United States Patent Application Publication US 2005/0228172 A9 - sequence listing, part 72

SEQ ID NO: 315406 - DNA, 691 bp, Homo sapiens
gtgataaggtgtgcacagggtattaggctttgttattcatgttatcttcttttaagtttgcctacccaacttgagtatttttataagccatatattttaaatgtcctatcagtttggataacatagctggaggagatttcaaaaatctagtcctattctttcttctatatatttatacaacttgaaatatattttttttgtaagagctagtttttatatggtaataatgtactgacagttttgagtcacaagaatcaaaagaacagttatgcttttattactctttgtttttggacctaggtaataatgttttttttttttttttgagacagagtctctctctgtcgcctaatttggagtgcagtggcacgatcttggctcactgcaacctctgcctcctgggctcaagcgattatcctgcctcagcctcccaagtggttgggattacagrtgcccaccaccactcctggctaacttttgtatttttagtagagacagggattcgccatgttggccagactggtcttgaactcctgacctcaggtgatccgccagcctcagcctcccacagtactaggattacaggcatgagttactgcccccggcaggtaatatgtcttttaaggtgccatcccaaagaggccagaaacacctcttcatacagagaacagtaggataaatagtaattgca

SEQ ID NO: 315407 - DNA, 602 bp, Homo sapiens
ttgctgttttaatcaattcaattaattacatttattgagctctctttgtcacacatacagaaacatgaatactcatatctgattacaaggatcttgcacttagaaaagtttctaagagacaagaaaaaaaaattgggtactataatgaaggaaaacatgagctaagaagttaagaaccagakagtaactgattggaaaagtaagaaaagctttataaaagaggattttgagtgagcacttgaagaatatgtaagataacacaggcaaaaacgctaagatataacattctaggaggaagaaacaacagaactaagtagtcccagaaaatcagatatatttgaagccaactatgtgggacaatttgttaccacacaaaatatgaatggaagattgggaatattttgaagcattttgaatgccaacactgagtactttttgtataagtaggcgacaggaaagctctgctggtgttgaagttagaaaaacacattattgtagatgttatggatggaaactgtggacgagaaggagaaaaatcggcagcttgtaaaactgacatcacaattttctaaaaatgtgtaaataaacgattaactaagata

SEQ ID NO: 315408 - DNA, 576 bp, Homo sapiens
aattcatagagaataaagacaggcatatgaggttgacttcagattataactctcgctagcttagtagaagtcttaattgtcggaagaaataaaatatgtcatcaaaagaataagtattgattatggctttaaaaaatgttgcataacactagacaaaagcatatttgtttttgtattttaaaactatgaatatttactttgttttaaatttgcgtcacatcacttgtggatcttaaaatttagagaatatggcttaccatgaccaaggtgaattaatgaaggaggtcaagggactggtatgattttaagtgtacatatttaaaaattcactctggagctycccaccctacttataaaagcctttcttttgtggaataagacatggatagaatgtgaacctgagtcaaaagccctgaattgttgtgcagatcatctcacctctctgaatctcagttttctcatctttaaattaggggtaatcatccatgcctcaccatgtcataggagtcttgaagtatcacacaagttaataaataaaacagcactttgtacattggaaactaccttgtaagttta

SEQ ID NO: 315409 - DNA, 366 bp, Homo sapiens
aaaaaaaaaaaaaaacaaataattgtaacaacaaacacttatacagtgcttactatatgataggtgagctttaactgtataaattaatttgatctcaacaaacctatgaagtgctattttacctcattttaccagtgaggagactgaggtacagagagattcagtgactcattttggtcaacttgaaartagagccaagatttggaccatgcactcaaggtccacttaaaccatacagtcagccctccaaatccgcaagttcaaccaaccatggatcaaaaattttcaggaaaaaaaatatgtaataataaaaataatacatatttaaaaaccaagagagtataacaattatttatatagcattta

SEQ ID NO: 315410 - DNA, 577 bp, Homo sapiens
ctgagtctcacctgaataactcagaataatctcctcatctcaagatctttcattccaatcacatctgcgagagttttctcttgctttgttttcgtttggattttgccatcttaatgtaatrtattcacagattctaggagttgagatatgaacatctttgaggagagggggcattgttctgtctaccacaccaggtagacatcctgcagcccgcacaacaaaggatcatccagcttaaaatgtcaggagtacagaggttgagaagcctgcatgctctgatactaccagatttcccacagaccctaattcaatgccactgcttaatgtgcatgacaactgcagaccccctattccttgataccatccatccaaaacactccctacaatgttttttaaatatgtgtgagtgttattcagtccaagtaagtgacagaaatcctgtttccctaaaaagtttgataacaggaaaaaacagtcatttattaggcttgacatgattcttgtgacttctaagtttggggcttcaggtgtttgaaagttactcagaagccaggcacggtggctcacacctgtaatc

SEQ ID NO: 315411 - DNA, 581 bp, Homo sapiens
aaaaatagccgggtgtgttggtgcatgcctgtagtcccagttgctcaagaggctgaggtgggaggatcaattgagcccaggaggttgagactgcagtgagctgtgatcgcaccactgcactccatcctgagagacagagtgagaccctgtctcaaaaaaaataaataaataaataaaatcacatcactattataagtatcatttgcatatcataataaattccaccatcacatatttgggcagagccttgaacattttcaaaaaagcyttcacatcatccagtgaaattatcacacaagctgtattagtccattttcatactgctataaagaacggcccgagactgggtaatttataaaggaaagaggtttaattgactcacagttcagcatggctggggaggcctcaggaaacttacaatcatgacggaaagcaaaaaggaagcaaagcaccttcttcacaaggtggcaggaagaagtcctgagcgaagaggggaaaagagccccttataaagccatcagatctcgtgagaactcactcactatcatgagaacagcaaggaggaaaccacccccatgatt

SEQ ID NO: 315412 - DNA, 581 bp, Homo sapiens
aaaaatagccgggtgtgttggtgcatgcctgtagtcccagttgctcaagaggctgaggtgggaggatcaattgagcccaggaggttgagactgcagtgagctgtgatcgcaccactgcactccatcctgagagacagagtgagaccctgtctcaaaaaaaataaataaataaataaaatcacatcactattataagtatcatttgcatatcataataaattccaccatcacatatttgggcagagccttgaacattttcaaaaaagccttcacatcatccagtgaaattatcacacaagctgtattagtccattttcatactgctataaagaayggcccgagactgggtaatttataaaggaaagaggtttaattgactcacagttcagcatggctggggaggcctcaggaaacttacaatcatgacggaaagcaaaaaggaagcaaagcaccttcttcacaaggtggcaggaagaagtcctgagcgaagaggggaaaagagccccttataaagccatcagatctcgtgagaactcactcactatcatgagaacagcaaggaggaaaccacccccatgatt

SEQ ID NO: 315413 - DNA, 537 bp, Homo sapiens
aataaagtacctatatatgctacaacagagatgaaccttgaacrcattatgctaagtgagagaagacaaatgtaaaaaaacaaatattacagtatatgattccatttctgtgaagtgttcagaataggcaaatccaagaagacaaagattagtgtttgcttaaggctggaagggttggagaataattagaactgagaagagtatggggcttttttgggagatgataaaaatgttctaaaattgattgcagagataatcacacaactctttgaatatactaaaaatgatcaaattgtacattttcaatgttacgtgaatatctcaatggagctgtaattttaaaaagcaaaaagatacatacagcattaatttataatattttaagtcaatgtattcaaaacgttatttcgacatagtatcaagaatttaaaattatttttgagatagttacattcttttcttaaaatctagtgtgcattttacatttgcaacacatctccatacagatgctaaattttcattggaaatacttactat

SEQ ID NO: 315414 - DNA, 537 bp, Homo sapiens
aataaagtacctatatatgctacaacagagatgaaccttgaacgcattatgctaagtgagagaagacaaatgtaaaaaaacaaatattacagtatatgattccatttctgtgaagtgttcagaataggcaaatccaagaagacaaagattagtgtttgcttaaggctggaagggttggagaataattagaactgagaagagtatggggcttttttgggagatgataaaaatrttctaaaattgattgcagagataatcacacaactctttgaatatactaaaaatgatcaaattgtacattttcaatgttacgtgaatatctcaatggagctgtaattttaaaaagcaaaaagatacatacagcattaatttataatattttaagtcaatgtattcaaaacgttatttcgacatagtatcaagaatttaaaattatttttgagatagttacattcttttcttaaaatctagtgtgcattttacatttgcaacacatctccatacagatgctaaattttcattggaaatacttactat

SEQ ID NO: 315415 - DNA, 549 bp, Homo sapiens
aatgtatgtaaatgtgtgactattttacctttagtaaataacagagaaaaaagtggagaacaaaaagaggccatcagtgatttttatatgtcttaaattagcagcaatcagtactatacaacccattttctatttactgcctcaagacggcaggaaatttttcaggctctccctctgcttcatctgcaataagaagctcacaaatttgttttgctttgttgcaaataacatgtatgctgagaggcatttttcctctctataactgtacagccatctaaatgggtcttttctggttttacaacttgaatatgttaacatgcacccctcagggtcccccttgtatcccagaaacagcacgcttgtaaaaccttattcatgtgatatccttaatagctgctgacatttattaagtgtttaagatgtgccaggcatrgtgctaagtgtcttagaactcttccagcctgtaatccccgagcctccctgtgaaaatacaagcatcttaagaatgccccctactctggcatttaccttcagatgaccgatgaggaa

SEQ ID NO: 315416 - DNA, 503 bp, Homo sapiens
gggagcagaagttgcagtgaaccgagatgatgccactgcactccagcctgggtgacagcgtgagaccctgtctttaaaaaaaaaaaaaaaaaaaagagagagagagggaaatcttgtggggtgctgcaccatagacaaacctcgacgactttatgtgataagccagtcacaaaaggacaaataccgaacaattccactccaatgaggtatctcaagtagtcaaactcctagaaacagaaagtagaatcayggttgccaagggctggaggtatttagtgtttaatgggtctagagtttccgttttgcaagatgaaatacttctacagatctattgcacaacgtgaatacacttaacacaactgaactgtacattataaaatggtgaagatggtaagtacaatgtcatgtccttttcagcacagttataaaaagaagaaaagtcctcatcctaggcaataataacccatattatgtattaagatggctagttctatatgttttct

SEQ ID NO: 315417 - DNA, 616 bp, Homo sapiens
agtatatatacatatacacactatagtgtatatatatacacactatatatagtatatatatacacatatacacactatatatagtgtgtgtatatatgtatatacaccatacacacatacattttgcttatgtatgcacaggatatttctagaagaataccaaagaaattggttcatttgttgcttcagggatagaggtagggggaaggtggtaaatggaaaaagggagacatttcactgtttatccttttgtattttttggaatttggaccatgcgaaagtattacctattcaaaacattaatgggtcaggcatggtggctcacacttgtaatcccagcactttgggaggctgaggcaggcggatcacttgaggccaggagtttgagaaaccctatctctattaagaatacaaaatgattggggcatggtggtgcayacctgtaatcccagctactcaggaggctgaagtacgagaatcgcttgaacctgggaggcagaggttgcagtgagctgagactgtgccactgcattccagcctgggcaacagactgagactctgtctcgaagagggaaaacaacaacaaaaaaaccattaacagaggatccttcctact

SEQ ID NO: 315418 - DNA, 616 bp, Homo sapiens
agtatatatacatatacacactatagtgtatatatatacacactatatatagtatatatatacacatatacacactatatatagtgtgtgtatatatgtatatacaccatacacacatacattttgcttatgtatgcacaggatatttctagaagaataccaaagaaattggttcatttgttgcttcagggatagaggtagggggaaggtggtaaatggaaaaagggagacatttcactgtttatccttttgtattttttggaatttggaccatgcgaaagtattacctattcaaaacattaatgggtcaggcatggtggctcacacttgtaatcccagcactttgggaggctgaggcaggcggatcacttgaggccaggagtttgagaaaccctatctctattaagaatacaaaatgattggggcatggtggtgcatmcctgtaatcccagctactcaggaggctgaagtacgagaatcgcttgaacctgggaggcagaggttgcagtgagctgagactgtgccactgcattccagcctgggcaacagactgagactctgtctcgaagagggaaaacaacaacaaaaaaaccattaacagaggatccttcctact

SEQ ID NO: 315419 - DNA, 577 bp, Homo sapiens
ttgagaccagcccgagcaacatagcaagaccctgtctctacaaaaaaagttagctgggaggccgaggcaggtggatcacgaggtcaggagatggataccatcctggctaayatggtgaaacccatctctactaaaaatacaaaaaattagccaggcgtagtggcacatgcctgtagtcccagctactcaggaggctgacgcaggagaatagcttgaacccaggaggcagaggttacagtgagcagagatcacgccactgcactccagcctgggcaacaaagcaagactccgtctcaaaaaaaaaaaaaaaaaaattagctgggagtggtggcacatgcctgtagtcctagctcgtcaggaggctgaggtaggagaatcacttgagcccagggaggttgaggctgcagtgagctatgatcacgtcactgcactccagcgtgagtgacagagtaagactctgtctcaaaacaagaagaaaaaaatgttctaggcagaaaaaaaacacacatgcaaaggccctaagatggaagagtatttgcaaagaagtgaaaggaggctgccatggcttaggtgagcc

SEQ ID NO: 315420 - DNA, 557 bp, Homo sapiens
gaactaagttcttgaaattctttctgaactggtgctagggttcccatcctcctggttttcctacctaaccagctgccccttctgtgtcccctaatgcctttcccaatcctaggtctcctctatctaagggatcttatcccctcttgtgatttaatcagctatagaccaataactctcaactatctccaggctcgtacctcctacacctgcctactccatgtcactgagatgtctaacaggcatctcacacagggcatgtatccatcataatacagttgttgaggcttctttcataaaccgaggcctctgagggtcttcccccaacatggctcccacccacagattattcagcctcgagaccttggagtcatcctcaactcctctctttccttcccatccacatataattcaaaccctgggagttctaccttcaaatgtatatgccagctgcaaccactyctcaccccttctgctgacaccacatcatttcttgcatcagatgactttggaagtccccttgctggtctccctcttccactgtgaccaccccattgcca

SEQ ID NO: 315421 - DNA, 408 bp, Homo sapiens
gattcaggcttcagtgtgggcaccgagtcctaggagctttcctatcttctcaggtccaagggtggtgcctaatgttaatttcagggaggtataagactgcatacgatacgcgcttcttccccaagcactggtaaatgaatggctttgaatattttrcatataggtcatagtatgcttctgtttctccccttcttggctgtttggcttagaatagggggcaacaaactttggtctgtgtgccaaaagcaatcagccacctgtttttttaaaacattttttaaaattgagagaaaattcacacaacgtaaagttaaccatttaaaaacatacaattcagtggcatttaggacattcacttttttttttttgagacaattcgactctgtcgcccagattggaatgcagtaa

SEQ ID NO: 315422 - DNA, 511 bp, Homo sapiens
cagagaaggaattcagaattccgtcagataaatgtaacaaagagattgaaataattaagaagaaccaagcagaaattgtggagctgaaacatgcaattgacatactgaagaatacatccgagtttttaatagcagaattgatgaagcagaagaaagaattagtgaactggaagacaggctatttgaaaatagatactcagaagagaaaaatggaaaaaagaaaaaaaaatgaagcacacctataggatctagaaaataatctcraaagcaaaaatctaagagttattggccctaaaaaggagttagagaaagagataagtttattcaaagggataataacagagaacttcccaaaccttgagagacattaatttccaagaacaagaagtttataaacaccaagcagatttaacccaaagaagactgcctctaggcatttaataatcaaactcctaaaggtcaaagataaagaaaggatcccaaaagcaacaaaagaaaagaaacaacatac

SEQ ID NO: 315423 - DNA, 445 bp, Homo sapiens
gatagctacttacatgcaagagatactgagccctgttagatgtgaaagacaaggagagttcagatggggttcagtgtaaagaagtgagttgctcttgtttttacaggtattagcaagcttagaaaaactcctgcccagaatttgtgtattggtttttgtcccctctggttctggaaagctccattttaactccagtttctgaaactgtcctgttgactcagtgtacgtggtgttaagaattatacctttttgtgcctgtcyacctgttggttcatgtggcaaccaacctaggggtgtgcttgaccgcattcttgctttcaccacggaactaaagccgttatgacattaatcaacaacttttcaatgtgatcatcctaaactagcaccaccaagccagactaaccaaataaatacaagtacagaggtgcgtgtgagccaaacgtac

SEQ ID NO: 315424 - DNA, 530 bp, Homo sapiens
aggaatatattgcaatcccaaatttataggcaactaatactggagttcccaaatttataaaatagttactactagacctaagaaatgagatagacagcaacgcaataatagtgggggacttcaatactccactgacggcactaaacagatcatcaaaacagaaagtcaacaaagaaacaatgaaactataccctagaacaaatggatttcacagctatttacaggacattcttcccaacaactgcagactatacattcttctcatcagcacatgttacattctccaaaatagaccatatgataagccacaaaacaagtctcaataaatttaagaaaaytgaaatcatatcaagtgtcttctcagaccacagtggaataaaactagaaatcaactccaaaagaaacttttaaaactatacaaatatatggaaattaaataatcttctcttgaatggtttttgggttaacaatgaaatcaagatggaaacttaaaattctttgaaatgaatgataatagtgacacaacttat

SEQ ID NO: 315425 - DNA, 530 bp, Homo sapiens
aggaatatattgcaatcccaaatttataggcaactaatactggagttcccaaatttataaaatagttactactagacctaagaaatgagatagacagcaacgcaataatagtgggggacttcaatactccactgacggcactaaacagatcatcaaaacagaaagtcaacaaagaaacaatgaaactataccctagaacaaatggatttcacagctatttacaggacattcttcccaacaactgcagactatacattcttctcatcagcacatgttacattctccaaaatagaccatatgataagccacaaaacaagtctcaataaatttaagaaaactgaaatcatatcaagtrtcttctcagaccacagtggaataaaactagaaatcaactccaaaagaaacttttaaaactatacaaatatatggaaattaaataatcttctcttgaatggtttttgggttaacaatgaaatcaagatggaaacttaaaattctttgaaatgaatgataatagtgacacaacttat

SEQ ID NO: 315426 - DNA, 619 bp, Homo sapiens
ggatagtttatacctatttttctgtggaaattgaagttctgctatgtaaaatgacttatcttgggttgtgcagctgataagtatcacagctacaaactacccacattgtctgcttccagatcctgagtgtttccactgcacagtgctgccaagtggatgtaagaacaacacagcttctggggctgcttgttggtttgttaacttgaataagagtccactctctaatcacrcttagtacatattgctaccagaagaacaaagatatacttagctttagtttaagttttacaacaactccttgtgcaattagcaaacacagcatggattttatgaacatcataactgcctactgcctcagaattctttgcacttcagggagctggactcacaaatctgggaggcagagaccagattgggccaagttgctcagcactctctatgcttattactaggaactcctagagtgagatggactcacctgagggaagagataagggacactttcagatttagattcaaccagcattttttgaatgtcaattatatgcaaagcattttcacatatgatagctcgtatctgaaagctcatcaaatgagggaaggcagtattctattttga

SEQ ID NO: 315427 - DNA, 590 bp, Homo sapiens
atgactcaattgtgtctacttctttccctctctttttttaagaaacagagaactttgcacaggcaactaaaaccttttcaattaaataaagatctaaaggtttccataagtccataagtgactctctaggtttgctctgtgacaagacagagacattccttactgtatttagaaagacagtctcatcccaggcatccagtaactcgctatttccttcagtccctgcctctagagatgcctctttctgatcgtggaaacattgcatatcatcttaacactccyccaatccatataaacatgtagaaagctgaaaactcatgcagggttagatgttcactgacagaacacacaaaaaacaacaagtaatattgtatttgtgaatgtggctacacattttaacttcgaggagctactcagatataatggatcccagagtttataacatgaatatatagagatcagtggccttctaaatgctgcctattagagaaccacaatcacagcgtccatcaataaaaattctagagaaagaaaaataaggaacagaatactatcataaatacttggaatattaatcatttattatgtgc

SEQ ID NO: 315428 - DNA, 699 bp, Homo sapiens
aagttacaccagggggctcccctgtattttccatatgaagtctgcaaagtggccttcacaggaaacccaaatacttctgagttccaaagtatttgctctcttggaacaagacaacataaaagaattcacaaacctagaaacaacatcattcgtttttatcaaaccactgtctgagactttcttacttcttcttagcctgttaaactagtagaaggaattaccaatcctctactactaamgagatataaatactaaaagacaaactgtcactcgactgaggaattcaatatattatttattcacaggtttgatcccaggttgagctcaatagaggacaaacacaagaagacaaacatttaattatcatcttcccaaaaagatcttgcaaataggagatggggggtggggagggtaaataaatgaaagtatatctgatgttttcctttttaagataatcagctacaaactgtaatacaagggaccgtagataaagagtcaaggactggttctaatgctggatgaacttctaacttctgctaattgagtgatcacctacctttagacctcaattttttcacttttaaatgagtttttttggggagagaaggggtcttcacatcagctttaatgacatattatttacatatgattgtatgtttaaatagttcttaagtgtaattttttttttttttttttttt

SEQ ID NO: 315429 - DNA, 699 bp, Homo sapiens
aagttacaccagggggctcccctgtattttccatatgaagtctgcaaagtggccttcacaggaaacccaaatacttctgagttccaaagtatttgctctcttggaacaagacaacataaaagaattcacaaacctagaaacaacatcattcgtttttatcaaaccactgtctgagactttcttacttcttcttagcctgttaaactagtagaaggaattaccaatcctctactactaaagagatataaatactaaaagacaaactgtcactcgactgaggaattcaatatattatttattcacaggtttgatcccaggttgagctcaatagaggrcaaacacaagaagacaaacatttaattatcatcttcccaaaaagatcttgcaaataggagatggggggtggggagggtaaataaatgaaagtatatctgatgttttcctttttaagataatcagctacaaactgtaatacaagggaccgtagataaagagtcaaggactggttctaatgctggatgaacttctaacttctgctaattgagtgatcacctacctttagacctcaattttttcacttttaaatgagtttttttggggagagaaggggtcttcacatcagctttaatgacatattatttacatatgattgtatgtttaaatagttcttaagtgtaattttttttttttttttttttt

SEQ ID NO: 315430 - DNA, 540 bp, Homo sapiens
aattcctatctccctgggacagaacacctgggggaaggggtggctgtgggcacagcttcagcagacttaagcattactggcygccagctgtgaagagagcagcggatctcccagcacagcactcaagctctgctaagggacagactgcctcctcaagtgagtccctgacccccatgcttcctgactgggagacccctcccagcaggggtcgacagatacctcatacaagcgaactctggctggtatctggcgggtgcccctctggggtgaagcttccagaggaaggagcaggcagcaatctttgctgttctgcagcctccactggtgatacccaggcaaatagggtctggagtggacctccagcaaacaccagcagacctgcagcagaggggcctgtctgttagaaagaaaactatcaaacagaaagcaataacatcaaagtcaacatcaagtaaaaggatgcccatgcaaaaaccccatcaaaggtcctcagcatcaaagataaaaggtagataaatccacaaagatgaggaaatacca

SEQ ID NO: 315431 - DNA, 540 bp, Homo sapiens
aattcctatctccctgggacagaacacctgggggaaggggtggctgtgggcacagcttcagcagacttaagcattactggccgccagctgtgaagagagcagcggatctcccagcacagcactcaagctctgctaagggacagactgcctcctcaagtgagtccctgacccccatgcttcctgactgggagacccctcccagcaggggtcgacagatacctcatacaagcgaactctggctggtatctggcgggtgcccctctggggtgaagcttccagaggaaggagcaggcagcaatctttgctgttctgcagcctccactggtgatacccaggcaaayagggtctggagtggacctccagcaaacaccagcagacctgcagcagaggggcctgtctgttagaaagaaaactatcaaacagaaagcaataacatcaaagtcaacatcaagtaaaaggatgcccatgcaaaaaccccatcaaaggtcctcagcatcaaagataaaaggtagataaatccacaaagatgaggaaatacca

SEQ ID NO: 315432 - DNA, 540 bp, Homo sapiens
aattcctatctccctgggacagaacacctgggggaaggggtggctgtgggcacagcttcagcagacttaagcattactggccgccagctgtgaagagagcagcggatctcccagcacagcactcaagctctgctaagggacagactgcctcctcaagtgagtccctgacccccatgcttcctgactgggagacccctcccagcaggggtcgacagatacctcatacaagcgaactctggctggtatctggcgggtgcccctctggggtgaagcttccagaggaaggagcaggcagcaatctttgctgttctgcagcctccactggtgatacccaggcaaatagggtctggagtggacctccagcaaacaccagcagacctgcagcagaggggcctgtctgttagaaagaaaactatcaaacagaaagcaataacatcaaagtcaacatcaagtaaaaggatgcccatgcaaaaaccccatsaaaggtcctcagcatcaaagataaaaggtagataaatccacaaagatgaggaaatacca

SEQ ID NO: 315433 - DNA, 509 bp, Homo sapiens
atgtccaaactcatcacattgtacacattaaatatgaacagttctttgtatatcaattgaacctcagtaaatttgttttttttttttaaaaaaagggagtagaaattatccaatctgttcacaaaacatggaattagagagatgtagctggatttttcagccctggaagcttgttgatgtcaaattcccaaagctgtactaattcctattgagcaaacagaaggaaaaagtatccrtcttaacttaaaccttccataagggaacagggcacaacacatggtattttgtccttcccaaatgtgaggaatacattagattgtttgaccctagcttcagtactttagaatgctaagaaaagctgacgttttcaaagcaaaaagctgtgctcagctcttctctgtcacggtgtcatcagtctcttgtgcccacatatcccctaaccctgtcctcctaagtgatttccttctatctaatacctgcaggtccagaacgtgatggttcagataaac

SEQ ID NO: 315434 - DNA, 403 bp, Homo sapiens
cagttccctctgtcctttcttaccttctctgatggaaaacacaatcacctgtcaggacagttcagcttttcagtaaaacagcttccaacaactttagggaaattgtcacttcctcttctgtgcttttataagtctttgttcatamccctattataatacctatcacattatattataattatgtgttaaatttcaaggcattgattatgtctcaattatccagtgattaatacagcccctggcagatagtattcaacgcatttttttgagtgaacaaatgagtgaccactgtctgaactatttgctttatttttctgtaaaactagtttaataatgtggttgccttggtatgacaatttattctataaataagtgtaagagaaagaagaacaagaaagtgata

SEQ ID NO: 315435 - DNA, 500 bp, Homo sapiens
atttcttgagttaatatcaaattgtgaggagaagagtcagaactcaaacaaatgtctctagacatttcacttataatatctctaaatattaagaaacataaaygaccgtattagtagtgctacaaattatactttccaaagacagacacatctgtatctttatccatctcacttacccttgaatgatattctccccacaagagatgggctctatgtttcctccacttaaacttgggcagggacttgtccaaccaatggatcagagtggaaatgatactatgtggttctcaaagctaggacataaaaaggacacagtttccactgtctcatgccatacacaaaaattaactcaacatgggtcaaaggcctaactgtaagagccaaaactataaaactcttagaagaaaatataaaagtaaatttttataggttaggcagtgatttcttagataagacatcaaaaacacaagcaatttttaaaaaatgaacaaactgaatta

SEQ ID NO: 315436 - DNA, 500 bp, Homo sapiens
atttcttgagttaatatcaaattgtgaggagaagagtcagaactcaaacaaatgtctctagacatttcacttataatatctctaaatattaagaaacataaatgaccgtattagtagtgctacarattatactttccaaagacagacacatctgtatctttatccatctcacttacccttgaatgatattctccccacaagagatgggctctatgtttcctccacttaaacttgggcagggacttgtccaaccaatggatcagagtggaaatgatactatgtggttctcaaagctaggacataaaaaggacacagtttccactgtctcatgccatacacaaaaattaactcaacatgggtcaaaggcctaactgtaagagccaaaactataaaactcttagaagaaaatataaaagtaaatttttataggttaggcagtgatttcttagataagacatcaaaaacacaagcaatttttaaaaaatgaacaaactgaatta

SEQ ID NO: 315437 - DNA, 563 bp, Homo sapiens
ctcactacttctttaggcagctatgagcaaatactagtataaatacatattcctcccctctttcttacacaaaggcagcataatagctttgctgttttccccttaacagtaaattttgtatatctgtcaagattagtcctgagagaacaatacttaggttgtctctaacaactagctactataaacaatgcagcattgaataatcttgtacagatgaaaattcatacatgctcaattcatacattccctggcagctccctctggccaagagcaatatacagaggcaggctcagctgtcgagcttctctcatgtggtgaattttcaggctgcaagtccagaagtgtggacttttatcaaaagataattcattttaaattttgatgggcattgccaaattactatctrtagggtttgcataattttgttctcccaggaggagtgtggtggtgcttatttctcttagcttcagcaacagagaatgctatcacacctacaaattttttgtcatctgatgagtgacattggtattttaaaatacttttatttttcctttatattatca

SEQ ID NO: 315438 - DNA, 606 bp, Homo sapiens
ggctgggcgtcccctctgtataatttgtagattttgtcagagacctgtctctgggtagacccacctttttgaagataggctacaaccacacaatatttttggggtaaacagttggaaactgtttgttattggattcttctatgacacttagcattttgttggctattagttaaaacctgatcctgtgtgtttggatgactcatttattgtatttatttgatacatactaacacacacacacacacacacacacacacacacacacagagcaatttacctaaacctttacaattagcctctttgataatttacaaatttaggagaaaataaagtgatcggatttctcctaagccttaaaatctctaagggcatttaacattcttcagtgatgtacaggtagaccacctggatgtactgtcagagcataraaggtggctcctaccatctgtagaatgggaaccatgattgctgtttctctcaaaaggtttgtgcaaaacccacaaggttcacttaatacccactgggaggagaacccagttttctgtccaaacattttagcatttttctctttcttttcctctccccctttaaaaatgtttgctctta

SEQ ID NO: 315439 - DNA, 598 bp, Homo sapiens
aatgactttatttggattattttggcctctcaagagacttcccctgtggctgtattataaaataattcctcatgttttcattatatactgttctgtcaggccttgtgaaacaagaaatgacttactgcayttatttgctgtgtgatggggcttttctgttatttacacattctttggtatactattaattcatacccacttcaaatatgtaattttggaggcaattttcattaaaatttcttacaacacatacatttgagataattgaactgaggccttatttacccaaattgcttatgccaatactattctatgggttttaaaagtaggacacatttttagaaatggtctctgatgatgaatatttggagatgatttttgatctctggaaaaacatttgttcccaacacaggtgaaatcaattcacttctaagttgataattatggcaatttaatgaaaccagtttttatgaattaagaaagacatttctttttaaaaacatgtttattgatacataatatttacatattcatggggtacttgtgattttttttacatgcatagaatgtgtgatgatcaagtcaaggcatttaggat

SEQ ID NO: 315440 - DNA, 555 bp, Homo sapiens
tttcggcaaattacaattatatttcttcttcaatgtttacctggatattaaaaaagcacttaccattaactatataacyttctctatagagtgtctcagtgttatggaaagtaaagtttcaattcaaagtctgcccaaaatataaaatgtcaacccaagctttatttaaacacttacttatgcatgacaatgtgtcctctcatataaaaaatatgtcacttctcaacttaaaaagttaatttaaactcatttaacatcacttttattagtgttaaaaatgtcttaaaacagcaacttatgtgtattagtctgttctcatgttcctaataaaatacatgcatgagatttggtaatttataaaggaaagtggtttaactgactcagttcagtgtggctgggtagaccgcaggaaacttacagtcacggtggaaggggaagcaaatatgtccttcttcacatggcagcagcaagaagtatagtgtgaagggggagaagagctccttataaaaccattagattttgtgagaacactcactatcacgagaacaacctgga

SEQ ID NO: 315441 - DNA, 555 bp, Homo sapiens
tttcggcaaattacaattatatttcttcttcaatgtttacctggatattaaaaaagcacttaccattaactatataactttctctatagagtgtctcagtgttatggaaagtaaagtttcaattcaaagtctgcccaaaatataaaatgtcaacccaagcyttatttaaacacttacttatgcatgacaatgtgtcctctcatataaaaaatatgtcacttctcaacttaaaaagttaatttaaactcatttaacatcacttttattagtgttaaaaatgtcttaaaacagcaacttatgtgtattagtctgttctcatgttcctaataaaatacatgcatgagatttggtaatttataaaggaaagtggtttaactgactcagttcagtgtggctgggtagaccgcaggaaacttacagtcacggtggaaggggaagcaaatatgtccttcttcacatggcagcagcaagaagtatagtgtgaagggggagaagagctccttataaaaccattagattttgtgagaacactcactatcacgagaacaacctgga

SEQ ID NO: 315442 - DNA, 556 bp, Homo sapiens
ccagtgtgtttccacagtactttgcacttcacctttcaaagtatgtaatgaatgccttttttccgtgtctgtctcctatggacacctggaaggagggaactatgccttcttcattcttgtagcctctgcacctagggactggtacatagcagtcactcaaatgtatgtgttgagtcaataaataaaaaactcaaatcccttttccaggattccaagtcttctggatttccttctttatcctgcaactggctaaagactaggccctcagacagtgctctatttgactgtcctttccctttctgcctgactcgggaggacagaaaggcattgctggggaaggacrggcactcctgaaagccataatgagcagttttcttgtcacatcttgctgaacttgtgccatgcagtgtcagcccaggggacattgatttaatatttaacactgtacattccaggtgagccaactcacctgcagcgcctgtgggtggtgtctcctccttagctgtccttccttttgaaaggctttttcccttcctcctctgcctcctcctcttct

SEQ ID NO: 315443 - DNA, 561 bp, Homo sapiens
tatttacataattagaaaaaccgatgcaaacatgtatgcttaacctactaaatctcatcctgccaaagtcagctatgaatgcaaycagtcacgattagagtctgacgctttctactatattgtaccttgcccactgccttcaggctgtctgaatgtatgtccagtttgccttctctatatttttccgaattacaaataacattattgagaaggatgcgagcaggtaattaatttcatgctgaattttaggattttcttcaggttagctctctgggggacagttattctcccaggtacaaattcacctgattctagcataatttcctctacatttctccatcttagctataaatacagccatttttgacctctcctctctactccccaagttgtatcaaaagctccttccaaatgtctgcttgggtctgacatcccgctgcagtgttcctgcctgttgacttccctgtgctcccctctcctgccttagtgctgctcactgttgtatccttgtgcctagcacactgctcttcattacatatgcaataattttgaatgaataag

SEQ ID NO: 315444 - DNA, 640 bp, Homo sapiens
ctgcttgggtctgacatcccgctgcagtgttcctgcctgttgacttccctgtgctcccctctcctgccttagtgctgctcactgttgtatccttgtgcctagcacactgctcttcattacatatgcaataattttgaatgaataagttcatttagcgtctagttgaaataaagatatacatttcctccgagagtctcctaatctgccrgtcaggcagctgaacaggaaaggcaatgaagcccatttgcatggctagttcttggtagacacatgcaggtttctggatgttttctgctgttcttagagtccagcagccaagtttttaataatccttgccaaatttttgcatctgtgacagttttagaaaacccacgtgggggttgccatcctgttacacaatgtgcttgaactatttactcaagttgaataaaggttaatttttattttatctctcaattatcaggcacataaattccaggtgattcatgtcatgtgaaagtccagccagagacagtcttttaattcagttattatttccaacaatgggtcacgttacttccgtttgaaataactgattagattcttcttgggtcagtgtaaaactatctgcacaaggagactgggagattcccaggattcc

SEQ ID NO: 315445 - DNA, 534 bp, Homo sapiens
gaggaagccagttactgcagggatcatctctccttattcatkaaggcgtttgggcaagccacatcaggcaggtcctagagctgtggcccatctcctatttctacctgggggagcaggttggggccggtgggtgatctaaagcaggtgacacaggagtcaggtcttagaatctataggccacctcctatttctacctggggaattgtgtggcgggtgtggaggggagagtgaagggtgccatataaagcagatgggacaccagcaggggcttcagaggaaatctaaacagattcttccctccatctgcttctgttagcagtcggcttgccctaagcccagtgaagcagtagaagcaagtcaatcctccctgcagttggctggcattgctggggaggcggcggggcacggggcggtcgtgagagcacgatcagtagcctgggttggcttccctgtgtgtcacttacaagctgtgtgactctgggcaagctggttaacctgtgtaatcacttggccttatctgtaaactggaagtag

SEQ ID NO: 315446 - DNA, 563 bp, Homo sapiens
agagcagatgaagcaattataggttaaatagctgctgctgtgcccaggagagtgtgtcgagaataactttgagacttttcatcctcatttttgcaaactgttcatgcacacatgatttcacttaatcccacaataaccctatgaggtgggtaaaggagacatgattctttattcatcagaggaggacacagtacagagaaagattaagtggctgccccaaggtcacacagctagtttgtgttataacatagactagaatgctcgggtctcttccctaaataagaggatatgacacaaacaataaaaatattttagacattttaattaatttgttttggtgtttgatatccatcagccactattgggtcacatgtgaatacaaactcataattccagaaagaggtagtatattgtggcttgctttcacacatgaaggttgtggattccagagaaaggaaataagttcacagatcttatgagaayatttcctgttactgatgaggaattctccctagggctatatatttagaatgttgtgaatctgtggccctttccaaaataat

SEQ ID NO: 315447 - DNA, 522 bp, Homo sapiens
taaatttacacaaaataatgttcaaagtttttactttatactcttcccccactccccactaccctcccaccccattacattctttcactgctgtttttttttgttttttttaaattttcttgagacagagtattgctctgtmccctaggctggagtgcagtggcatgatctcagctcactgcaacccctgcctcctgagttaaagtgatcctcctgactcagcctcctgagtagctggggctataggaacatgccaccacacatggctaatttttgtatttttagtagagatggggcttcaccatgttggccaggctggtcttgaactcctgacctcaggtgatccacacacctcagcctcccaaagtgctgggattacaggtgtgagccaccacacacctggcctctttcactgcttctgtttatcaagtatcaatggttgagtcttccaagcagctcagggttcagacacttgggattgaattaggaaattgaagacatcaaaaagttctttaaacccaa

SEQ ID NO: 315448 - DNA, 509 bp, Homo sapiens
ataattaaataagtgaatatatgaagtgcaaagaatgcccaacacttagtaaatgctcagcaatagtaacttcctcttctacttcacctgcaagccccatcacccacctcaaaggtagagagtgaagcctcttgggcaaaccagtcctgaatctcaatagcaagggggaagcctatgggtagatatttctggtctggtaggaaggaccattattatcayggagactaaaatataaggcagatttcagacctcccaggtagctcagaacacaataccccaaagtatggtgccttggcatgctgagtactttgaaatgaaggacactggaaggacctcagaagcaaggtatctctgaccttcccctgtcctcctgtctctcacccccttttctccctcagagcaaatcacagaaaccataattcttcttccccaagatggttcatagatactagaactcctccccataaagcgagccataaaacccagaaaagtcactctctcccttctgt

SEQ ID NO: 315449 - DNA, 610 bp, Homo sapiens
atagacaaagtaaataaactcttctgaaaggaaaaagaatattgtattccagccacagtcctcaaattacagaatgggaagtaagagtttcccaggtcaagagattccatttgtattcaaayggaaaacaaacaggaggaaaaggaaggggagaaggctttttggggggttatagtacctattagaaaaactaataaaaactcaggctccaataaacatcccctataacattcaaaagaatttctggaccatggaagtcctactaaatcaaaatttattgaaaatggaggtgcaacatgaaatgcaatctgtttcagaaaacagaagacaaactaaaaatgtagtcagaatagaagaggtcaggaagttcaaataaattatgaacatccatggagatcaaccacaacttgtctgacagtgagtgaccatttctaatgcctcattagtggttagggtggcatcgattataacacacagtcccatggatatgcgtggcaggcaggctgcagcctttgtccctgctcctcactccagcaatgcttttacaacttgttagttggcctggccccgcaaagccaaagaatagtgtcacttaaatgtcaacttacag

SEQ ID NO: 315450 - DNA, 618 bp, Homo sapiens
tgacaggggcagtggctcgcttcttcagtgccctgctgctcaaacctctaggagagcatacagacgggcaggctgtggggctccaacaccatggcagtgtctagaggtgaatgcttacagctcctaaagccccagtggatgtgtgttacagtgtgctcttttagttttgccgtctataggcttgtgttaaccacctcaactagaccctctaccttgtcgcaaggacaagagggctttctttatcctgggttcttgccttggtrtaccggaagaatcggatcacacgtgggcttggagaatgagtgcaaggttttattgactggaagtagctcgcagcaggtgggggaaccagaagggagttggttttcccactcagtggcccggattgccctggccaaattccgtgtgcttctgccggtcaggggctagccggcatgccggtgtgggtccattcctcttgacgtccagccgcctgtgtgttccttcaccaatgtgctcctcttgccctccagctgcttctgtctctgccttgctggggtctcgggtttttataggcacaggatgggggacgtggcaggccagggtggtcatgggaaatgcagcagaaatgcctgtcct

SEQ ID NO: 315451 - DNA, 555 bp, Homo sapiens
taaatgagtgtgtgtttttccagtgctactgccttctgtagaaggagctgaaaaaatgcaaaacgatttcctctcttaacacacacactttttttttttaatcaaaaaygctgttttgtcctcttttggtgtcttcttcctgggaagaagaatttattattagattggcaactccctcaaacgctgaataaaagaataaaggggaagtgcctttgctgtatcatgtatcagaggcctctcagcataatgtgtgagctctggcatgtcaccatattttacagtaactctgatgttttcacccagcgcttttgagtcaggcgaagagaactcgtatttcaacccaaatgcaatttgcatagcacacgtgataacatcacacttttaaagccacccgccctgttgggatccctcacatttagttcaaatcctcatttcctctacaaaaggatgttgtgtaattagtgtaatcaggtcctaaggaccattgagattgtgactattgtgggctcagcagacagagtgatgtcacatccaaatcctaacaaagcagattgg

SEQ ID NO: 315452 - DNA, 555 bp, Homo sapiens
taaatgagtgtgtgtttttccagtgctactgccttctgtagaaggagctgaaaaaatgcaaaacgatttcctctcttaacacacacactttttttttttaatcaaaaatgctgttttgtcctcttttggtgtcttcttcctgggaagaagaatttattattagattggcaactccctcaaacrctgaataaaagaataaaggggaagtgcctttgctgtatcatgtatcagaggcctctcagcataatgtgtgagctctggcatgtcaccatattttacagtaactctgatgttttcacccagcgcttttgagtcaggcgaagagaactcgtatttcaacccaaatgcaatttgcatagcacacgtgataacatcacacttttaaagccacccgccctgttgggatccctcacatttagttcaaatcctcatttcctctacaaaaggatgttgtgtaattagtgtaatcaggtcctaaggaccattgagattgtgactattgtgggctcagcagacagagtgatgtcacatccaaatcctaacaaagcagattgg

SEQ ID NO: 315453 - DNA, 555 bp, Homo sapiens
taaatgagtgtgtgtttttccagtgctactgccttctgtagaaggagctgaaaaaatgcaaaacgatttcctctcttaacacacacactttttttttttaatcaaaaatgctgttttgtcctcttttggtgtcttcttcctgggaagaagaatttattattagattggcaactccctcaaacgctgaataaaagaataaaggggaartgcctttgctgtatcatgtatcagaggcctctcagcataatgtgtgagctctggcatgtcaccatattttacagtaactctgatgttttcacccagcgcttttgagtcaggcgaagagaactcgtatttcaacccaaatgcaatttgcatagcacacgtgataacatcacacttttaaagccacccgccctgttgggatccctcacatttagttcaaatcctcatttcctctacaaaaggatgttgtgtaattagtgtaatcaggtcctaaggaccattgagattgtgactattgtgggctcagcagacagagtgatgtcacatccaaatcctaacaaagcagattgg

SEQ ID NO: 315454 - DNA, 555 bp, Homo sapiens
taaatgagtgtgtgtttttccagtgctactgccttctgtagaaggagctgaaaaaatgcaaaacgatttcctctcttaacacacacactttttttttttaatcaaaaatgctgttttgtcctcttttggtgtcttcttcctgggaagaagaatttattattagattggcaactccctcaaacgctgaataaaagaataaaggggaagtgcctttgctgtatcatgtatcagaggcctctcagcataatgtgtgagctctggcatgtcaccatattttacagtaactctgatgttttcacccagcgcttttgagtcaggcgaagagaactcgtatttcaacccaaatgcaatttgcatagcacacgtgataacatcacacttttaaagccaccygccctgttgggatccctcacatttagttcaaatcctcatttcctctacaaaaggatgttgtgtaattagtgtaatcaggtcctaaggaccattgagattgtgactattgtgggctcagcagacagagtgatgtcacatccaaatcctaacaaagcagattgg

SEQ ID NO: 315455 - DNA, 639 bp, Homo sapiens
tgggcactaggtctgaagcaataagcagcaatgatccagacagacactgagattattttcatatcttggctattgtgaaaaatgctgcaatgaacatatctgtatctcatgaatgaactccatatcccatggagtttatagctgttaggaaacagacatttaattcagtgattatagcagaaaatgtgatagtgctacagtagaaaacacatagtgctacaggttaatcyactcaagctgttatggcaaatgcacatactgggtagctaataagaaacacaaacttatttctcatggctctggaggttgggaagtccaagatcaagatgcccattgattttttgtctattgagggcccatttcttggttcatagaccacatcttctcactgagtccccacatggtggaaggagtgagggagctctctgggtcctgtattataatggcactaatccaatccacaggggctctgctgccatgagacaatcacctcctcataggtgtcacctcctaacaccatcatcttgggcgttaagtttccacctctgaattttgagggaacacaaatatttagacggtagcacacctcctttgtgagcctcagaaaagacttcctgaagttaatgatagttaagacac

SEQ ID NO: 315456 - DNA, 549 bp, Homo sapiens
tgatacaaacatgatttttcttttttagtttgttaatagagtatgttatgttgcctgattttaaaagcagccctgcatccctggaataacttcccccttttgtatgatgtataattctttttataattgctgcatttagtttactaatmttatgttgaagattttggtgtttatgtgcatgagacatactgtctgcagttttcttggtactgtttttatgtggttttggtgtcatggtaaaactgacctcataaaatgagttgggaagtgttctctattcttctatatttttgaagaaattgtgtaaaattggtgttaattcttatttaactgtttggtaggactcagtaatgagactttctggtcctggataatttgcttttccagagcttttaaactacaaatttagtttccttaatggatgtagggctattcagattgtccattttattttaggcgtaatttaatagtttgtagtgtctgaggaattgatatttattctaagttgttaagtttgtgagaataaggttgtctgtattttactgctta

SEQ ID NO: 315457 - DNA, 370 bp, Homo sapiens
aatacttagtagcttctttgctcatcaagatggtggagggaggttgggatgattcaagaggacacaattgaggtcactcctaatataccatatatatatgtgtgtgtatatataaaataaagtatatataaaaaagtgtgtgtgcacacacgcacacactttttttttttttttttttttttagagccagagtctcactctgtctcccaggctggagtgcagtggaattatcacagctcattgtagcctcaacctcctggtctcaagcgatcctcccacttcagcctcctgagtagatttgatcacaggygtgtgccaccatgccctgctacttttaaaattttttttcagagactggatctcccaacgt

SEQ ID NO: 315458 - DNA, 592 bp, Homo sapiens
gctgtatttttcatcaagccagagcccacccacctcacctctccatctctgggggttctaactgctgccatgttgttctactagccttctggttgagccaagcccaggcatttccttctaacaaggttctctgggcttcctctccccatttagtgagccctttccagaccagttcccatgggaacagtggtccacattgccgagacaccagctgaggggaaggaagccttctgtggccagagtatcaagatctctccatgaaaaatcatcaggacacagagtgggctgaggctcaacattctgagctccctctgccttttcctaaccccatggctaccaagcctgctacacattaatatcacctaaagggagttggattctattagtcagaagtgggacccagggattggcaattttttgtgatttttatcacaaaattttaggtaatttaggtaattctaatgtttagccaagtctggaaaccactgttacaaccaattagcaatcctrccaaaatatcctgcaacctaagaaatttctggtttcatttatcaaacaaggcctcccactgatgaaagttagggccaggcaa

SEQ ID NO: 315459 - DNA, 529 bp, Homo sapiens
tactgagaatattttccctctatggtgtgattatacctagtggtcgtttggttataatgatatgctgtctccctgttaattttcatggtggacgccttgcaaaatagtatcacatcacaatttgtaaatacattgctgggcatattctaagtatttgacaactcctgcatagctgagagatataatatttttcattctggccaaccctgtctgggaccttaaatttgtagggggttttatagctcatatatttctaaactcatgcctcccaacaccctggtgaggcaggcctagcaaatactgacggatacaccagtcaaatgacagaagtctgtacaacttgatgtagcttttctccaggaagccccctttgctctaatcttcaccaaagtcttctaaagtcataaatgcttggtgtatagattctttgtggtagaacctcaagaatggtgactgttctayttgctgttgatgggtggatagataagaaaatcaggggccaaggggcacaacagacaagaagaacgta

SEQ ID NO: 315460 - DNA, 533 bp, Homo sapiens
ttgtggaaaactactacccttggggaaaattagcccyttttttttttttttttttttttttttttttttttttttttgaggaatccctagctccgcatccattggccctgcatgaccaccacatgccctactggcttctccttcccccaggagagtctatctgtgtgtaccatgcctgactctctgcctgcctccagaatggcaggctcttggggaataaatgtctggcaactgtcagctcacctagaaaatactcttctatctctggagttttaattcatcttctccctttttgctttcacaggtttcataggtctttaaaaatgtaatttttcaattcatcaaatttttttctagttgatacaatgggactgttagcctgctatgatctcctacatactacttagaagtgaaagtcctctttggaagtttttaaactatttcctaactgctcatgactcataaatttatatctcgagttctgagctctcccatgaggtttgaactgatatattcaactgccctgagattca

SEQ ID NO: 315461 - DNA, 533 bp, Homo sapiens
ttgtggaaaactactacccttggggaaaattagccccttttttttttttttttttttttttttttttttttttttttgaggaatccctagctccgcatccattggccctgcatgaccaccacatgccctactggcttctccttcccccaggagagtctatctgtgtgtaccatgcctgactctctgcctgcctccagaatggcaggctcttggggaataaatgtctggcaactgtcagctcacctaraaaatactcttctatctctggagttttaattcatcttctccctttttgctttcacaggtttcataggtctttaaaaatgtaatttttcaattcatcaaatttttttctagttgatacaatgggactgttagcctgctatgatctcctacatactacttagaagtgaaagtcctctttggaagtttttaaactatttcctaactgctcatgactcataaatttatatctcgagttctgagctctcccatgaggtttgaactgatatattcaactgccctgagattca

SEQ ID NO: 315462 - DNA, 547 bp, Homo sapiens
atattttcaaagtgatcctttaatcaagagagacaggacctctgtgtgccaagagttctcactcagttctgcactgattggtaaaggtgttaatggcaccagcctataattaattatatagccctcaaaggtcagcatttccattatctccagctccatcactaatgtgtctaaagtgaggaaagaaaggcgcacgggaagrccctaatgtgcccttcgaggcagttacactccttggaggccagtgggagccagtgtgtggtaagagaaaatcaggacaacagggggcaggtgattttaagagagtgatagttcagttccccttcctgtgtccatgtgttctcattgttcaattcccacctatgagtgagaacatgtggtgtttggttaaatgaagagttaatgggtgcagcacatcaacatggcacatgtatacatatgtaacaaacctgcacgttgtgcacatgtaccctaaaacttgaagtataataatgaaaaaaaagagagcgacagttcagaatggaaggctgttggccttgaagtcaga

SEQ ID NO: 315463 - DNA, 547 bp, Homo sapiens
atattttcaaagtgatcctttaatcaagagagacaggacctctgtgtgccaagagttctcactcagttctgcactgattggtaaaggtgttaatggcaccagcctataattaattatatagccctcaaaggtcagcatttccattatctccagctccatcactaatgtgtctaaagtgaggaaagaaaggcgcacgggaaggccctaatgtgcccttcgaggcagttacactccttggaggccagtgggagccagtgtgtggtaagagaaaatcaggacaacagggggcaggtgattttaagagagtgatagttcagttccccttcctgtgtccatgtgttctcattgttcaattcccacctatgagtgagaacatgtggtgtttggttaaatgaagagttaatgggtgcagcacatcaacatggcacatgtatacatatgtaacaaacctgcacgttktgcacatgtaccctaaaacttgaagtataataatgaaaaaaaagagagcgacagttcagaatggaaggctgttggccttgaagtcaga

SEQ ID NO: 315464 - DNA, 423 bp, Homo sapiens
agcaggtcaatggatgcaaagttactaagagaagatatcaagtgtatgaaccatcttgctgaactcacctaacaaaattcttgttgaaggcaggccaagaacttagaaaatcaaaggcaggcgatgaacttgatcaaatatcaaagttgatcatatatctggagtarggggataagcaccaagggagatcagatattagggtcaagggattattatgaaactgatttagtaggatcagtagtaataaaaaactgggctatgcaggccttgccaggacagaatatgggccaatattgaggcctagtcaagaagtgggctaggggagcctgactaaagtttggtaaaggagagagtccttgtcagtggaaagtgacccttcttcctaggtgtcttagttcaggttgctataacagaatatcataa

SEQ ID NO: 315465 - DNA, 266 bp, Homo sapiens
gtgtaattactgaggtgacagatcaagcattctctttgaaagaggcatcccagagaggctcctaagcttgtgacttgaagyatagagaacctcttgttttttccacttcagtggatattggatagttttgtaagcctgtggaaaagagcttgatggtttaggaagagcagggggagaggcaaaagaagtatctgttgtgtttctttttgaattgaaggaaaatttgtattaagccaaagaagaaatgaacagaacagagcaagagc

SEQ ID NO: 315466 - DNA, 402 bp, Homo sapiens
tttttctacactaaagcaattaatgatgtctcaaggaggtggatgcccttgaggttaaataatgtcagtagaacttcgttctcatggtcaagcttatatttgagtgtcgtttttatgtgggtcatgagggcatctcactatgaactcctgtgaataatctggacatcctcagaagcattaattcatcctgttascatcctgttagagaattttaaaaattaggagtgggttttaaagaatcttaaaatctttgagtttaaatggcatgtagtccaacctcctaagtcatcatcttcaaaatggccataacaaaattgttgagtctatgtctgaatattttcaggagactataggggttggggtttcagtatcgtatgaagcaatttattacattgccgggaa

SEQ ID NO: 315467 - DNA, 568 bp, Homo sapiens
gcccatggagggaagccgaagcagggtgggtcatcacctcacccaggaagcataagggatcgcagaactctctcccctagccaaggaaagctgggaggaactgtgctgtgaggaatggtgcactccggcccagatactatgcttttcccatggtcttcgcaacccacaaaccaggagattccctccggtgcctatgccaccagggccctgggtttcaagcataaaactgggcrgccatttgggcagacactgagctagctgcaggagtttattttcataccctagtggctcctggaatgcgagcgagacagaaccgtttactcccctggaaaggggcctgaagccagggaggcaagtggtctacctcagtggatcccacccccatggagcccagcaagctaagatccaatggcttgaaacactcgctgccagcatagcagtctgaagtcgacctgggacccttgagcttggtggggggaggggcatccactattactgaggcttaagtaggaggttttcccctcacaatgtaaacaaagcagcacggggaagtttcaactaggtggag

SEQ ID NO: 315468 - DNA, 473 bp, Homo sapiens
ctctagtgttaactaaagctattcaagctaccaagattcaaatcctggctctagccttcagtgtctaccattcaatttttcacaagttacaaaactcagtgagcctcaatttccccatcttgtactatgaaaacagtaatatgcacctcaaaaggctattgtgamggcttaatgcaataaagtttgcaaatgtttgtgtcacacaggggaggtgtaataatttatttttaattccactagaaaccagccaaaagtcactctttcctatactgagtaagaatagaaacccagtaagatttttgtcaaataggttgcagagatgaaaaactgaaataagaactgacttcaaatttgtctttaaattgcagcaaatagattagacatgatttatccagataaaaattgcctaaactgatttgaagattgtgacaaatgtcttcttctacattgaccctaaattcaagttgtaggca

SEQ ID NO: 315469 - DNA, 545 bp, Homo sapiens
ttggggagagaactctccaaagtcctttggagagagttgtgagagtgctgtagggtctcttctctcctttcctctcaaggtggagagaaggggctcaccacttaatattaaattagataagagagggttaatggggccacacagggaatttgtcctgtgtcccagtgggctgagggatcattaggactggtgtgagaggctatcaatgaactrtaacttctgctgggtagaagccatcctttcactgttgatggatcagaggtgtgtattttcttagcccagatatcagctacaactaagagagcttgcctgaagcatcttggaagtttctgtgcttgaggatgcccggaggcacacaatcagaggacagaccaccagaggcccagtggctgatggggaaacaaaaggccatccctcagagaatgcactgatatcagaaagggaatttccctgctggaaactcccaagaaaaacacacaaaaatggtccaaaatagaagtcaccccaacaccaacttccaacagcgccagccacataaaaagatg

SEQ ID NO: 315470 - DNA, 597 bp, Homo sapiens
tttgtttgtccccactaaaactcaaatttaatcttcaaggtagcagtgttgtgaggtgggacctagtgggagtgtttgggtgatgggagcaggtccctcatgaatggcttgctgccattctcccaggaggtaatgagtgattggatttgttctcatgcaaattaattagtttctgtgagagtgagttgctataaagccaaaatatccctcaggtttttcccttcttcacacgtgtcagcttcccatttgaccttctcagccatgttgtgaggcagcacgaatgccctcatcagaacccagggccaagcccttgaacttcccagactgcagaaccacaagctgaataaacctctttttaaaataaatcactcgctctcagatattcttttacagatgcacraaagagagtaagctgtgttctttctccaaggcactcaataatggcgagagttattattctaacccaagtatatcccaaaccaaaatgtttcctaccctaataccaggacacaaaagaaagcaatgtagataaaaaggtactgcacatctggggtctctccctagttccttcagcactttcgttctcccatgttcttt

SEQ ID NO: 315471 - DNA, 609 bp, Homo sapiens
ggttctcatgcactcaggataaagccgaaagatcttaccagccaacaagacttgcatcatctgacagctgcctctctctccagccttgtttcacccttttaatactgcttgactactgttctctaaccactgtcatctccttttagtcccctgaacttgtcaaattatttcttgccccagggcctttgcacatgcttgtatacaggcttctttgaactcttattagaataayttctacttagttcaaatgccatatcttcaagtgatgtaatttgtaattatacacatggttttcctgttcaaagcctatcttattcattcaactctatgtttcagaggagaaccatatctcatgctcaccactatgtatcagtatctttagtaagtgcctggcacataggagcttgacaaatagtttgagtaaatgaagggaacccaagagtactgaaaccctagcttggaccagccacacctccatcttatagatctaagaagaattatatacacaaagaaagaagaacaaggcagggaacttatattagatttgaactaataaccaacttctaataataagaaacagagctacgtgcaggacatcttttttactat

SEQ ID NO: 315472 - DNA, 567 bp, Homo sapiens
agagtgggagtgaaaatgcattaccttactatctggtagcataaattttcttaagaaggaaacttttttttttttttttcaggaaaatgccttagtttcttggggcagaaagtgggactctgaaatcatgagtgttagcaagagctccagcaacaaagaaaaaacaagtcattctgcttgtagtataaaaacagaaggacataaagggagggacactttttttccctaggaagggaaatttggttaagagaatgaaggaacagagaaaagaggagggagggaagaaccagcggtattgcctgaagctgacatgctatgtcaactgagtggcaggtgaaaggaatccctggctgatttggaggctaaactacttttatgagcagagctggcagatatgcaatttgaagtgatgtgcctgaraaagcagccttgatcgagctttccattcttacacaagtctttgttaaagtcaaccaacacaaatacagttttaatatgagcctattgtgtgtgagtgaatatgtgtatgggagtctgagtttccgatctaggttggccatgtagaaa

SEQ ID NO: 315473 - DNA, 502 bp, Homo sapiens
tcttttactctttaaagagtgagttttgtcttagaaatttaattatattttcagaaacttttgtcatatrttcatattgacagtctttcacttattcattttttcattaatatatattaagtgcctgctgtgttgaggatacaggacctgaatacatattaatatatttttttctaggctctctccctctctaaattttgaaatcatttaaattaaatgctcatctctatcttcctggtctaaatcaaggtttggaatagaacaagtccccacaaatcctgttgaatgaataaaactataccttacttactcagcagttaaaagcacatgctgtggatccagaaagagccaagtgagaacccctgctcttccacacagctataacctcagacgttttatttcactagccctagtttccttatatgtgaaatgggagcaataataactattgtaaccatcaaatgaaataatgtgttaaacatcagctccatgcatggaacaa

SEQ ID NO: 315474 - DNA, 502 bp, Homo sapiens
tcttttactctttaaagagtgagttttgtcttagaaatttaattatattttcagaaacttttgtcatatattcatattgacagtctttcacttattcattttttcattaatatatattaagtgcctgctgtgttgaggatacaggacctgaatacatattaatatatttttttctaggctctctccctctctaaattttgaaatcatttaaaytaaatgctcatctctatcttcctggtctaaatcaaggtttggaatagaacaagtccccacaaatcctgttgaatgaataaaactataccttacttactcagcagttaaaagcacatgctgtggatccagaaagagccaagtgagaacccctgctcttccacacagctataacctcagacgttttatttcactagccctagtttccttatatgtgaaatgggagcaataataactattgtaaccatcaaatgaaataatgtgttaaacatcagctccatgcatggaacaa

SEQ ID NO: 315475 - DNA, 655 bp, Homo sapiens
acataggagcaaatagactagaaggaaggtcaactagaaggtcaatactgtctagcagttacctctccatttaccctgccctaaagcccatcccaccatgacagccaagagatacttatcccactgaattgttcaatggctccaatttggttagcgtttacttctctttccacccaggtggaaagaatgacagcactactaggacaccacgcttttgaaaatttgtcccaaagagtaaatagagcccatgactggcaggaggctgagcaccaatttggagataacttttccttttaaactcaagaaagtgctataggaggtaggtccattttgaataaaaggagctgtgttcatatcctgttatataagacttccttgtcctgaattcttctccactggcatgctcattaaacctgtagccaaatttcttttttaaaaaacctttgattcctcaccaccctcaagtgatttcactattctctccttctcacccaaattctcaaaaatactacctacattttttaatttcctcaactaccttaatccttgtatattgtaatacaatataattcacawacattatctatttaaactagacaattcaatggcttttaataggcacacagtttgacatttcctcaccccagaaagaatc

SEQ ID NO: 315476 - DNA, 386 bp, Homo sapiens
gagtgaagcacaatttatttatccattttatagtaggcaggcatttgagctattatttttgcaattttaaaatcaatgctgaaatgagcattctctacatgcctcttagtactcataaatatgcatttacgtagagcttcctcctagctgtagagtgctgagtagtggggcacacacatgttcaactctgctaagtagtgaccagttgttcatcaaagcagttccaattttccctccctctataactttaataagaaytcccattgtttttttaagttctaggatacatgtgctgaatgtgcaggtttgttagtaggtatacatgggccatggtggtttgctacacctatcaacctgtcatctaggttttaagcccctcatgcatt

SEQ ID NO: 315477 - DNA, 569 bp, Homo sapiens
tgaaaaaaacaattctttttcagagtaagaatacacacagccgggtgctgtggcttacacctgtaatcccagcagtttgggaggccgaggctggtggatcacgaggtcaggagatcgagaccatcctggctaacatggtgaaaccccatctctactaaaaaaataataataataatacaaaaaattagccgggcatggtggcgggtgcctgtagtcccagctactcgggaggctgaggcaggagaatggcgtgaacccaggaggcagagtttgcagtgagctgagatcgcgccactgcactccagcctgggcgaaagagcaagactctgtctcaaaagaaaaaaaaaaatacacacacacacacagacrcactcattcatggtgaccagctcaagccactgagccacgtactttgcctaatgtgtcacgtgtagcctttcttgattcataccggtgaccttgaaattgaggaactctagcttcactagtcaacctggcccagaaccagcatcgatccagtcctctgtttcctcctttctcgtgtctgtgccttttctgattggttcaaa

SEQ ID NO: 315478 - DNA, 563 bp, Homo sapiens
atggtgaccagctcaagccactgagccacgtactttgcctaatgtgtcacgtgtagcctttcttgattcataccggtgaccttgaaattgaggaactctagcttcactagtcaacctggcccagaaccagcatcgatccagtcctctgtttcctcctttctcgtgtctgtgccttttctgattggttcaaaattgggtggctcctctctcaagggctcttcagcgactttagcagccaagttgctgttgcttatatctggtccttcctggacatccaagaacccattgatcaggcagttcattcatatttcctctgcatctctgctgtctacggatctgyttcccagcgaccttgtagaaccagggggtgggttgcttcagagctttagaggcagtttgtttcaggacaggcgatggcctcacaaatatgtttaaggctatgtggaaagctgtattttccaattcaagttcagggctatttctgcataggtgtctagacagaaattcttttggaaagtggatactgaagttgaacattttttttaaaataaagcggggctttc

SEQ ID NO: 315479 - DNA, 563 bp, Homo sapiens
atggtgaccagctcaagccactgagccacgtactttgcctaatgtgtcacgtgtagcctttcttgattcataccggtgaccttgaaattgaggaactctagcttcactagtcaacctggcccagaaccagcatcgatccagtcctctgtttcctcctttctcgtgtctgtgccttttctgattggttcaaaattgggtggctcctctctcaagggctcttcagcgactttagcagccaagttgctgttgcttatatctggtccttcctggacatccaagaacccattgatcaggcagttcattcatatttcctctgcatctctgctgtctacggatctgcttcccagcgaccttgtrgaaccagggggtgggttgcttcagagctttagaggcagtttgtttcaggacaggcgatggcctcacaaatatgtttaaggctatgtggaaagctgtattttccaattcaagttcagggctatttctgcataggtgtctagacagaaattcttttggaaagtggatactgaagttgaacattttttttaaaataaagcggggctttc

SEQ ID NO: 315480 - DNA, 553 bp, Homo sapiens
agaaattaaagcagatatattattacttatcttacagaaaagaaaagacttacaagggaatgtgctataattttatgccaataaattagacaacttagatgagaaggacaaactgctatagaggcattaatttccaaaattaactcaagtaaaaataggacatttgaatagaagtataacaagcaaaaagattgaaatacaggttgagtattccttattcaaaatacttgggaccagaagtgtttcagatttttttttaaattttggaatatttgcacatacataatgagatatcctggggatgggacccaagtccaaacatgaaattcatcatgttwcatatacaccttatacacatagcttggaggtaattttatacagtattttaaataatatatgtgactcatcacatgagttcaggcatgaaattttccactggtgacatcaggttggtgctcaagatgtttccgattttggagcatttcagattttgggttttcagattaggattgctcaacctgtagtagctaaaaacctttcagcaaagaaaatc

SEQ ID NO: 315481 - DNA, 575 bp, Homo sapiens
aagtatcaagtgaaaatcaatgtggaacaagaagtgaaaattgtgatcatagtccaaggtttgagaaggggtgctgtacccaacagatgcacagctgccattaataagtaaaattaatatgaaataaaatattaatatttttatctaagttacatgtattattttttcaaacggttctcataagatagtaggatataaatgcttattcagttgtcaggattacctatttaaacagaaggttagctgctgcttttggcctaggggtacaaacaatcaagaaagtttgaaaacctctgctctatgatacaacctaatttaaaggatccatgtcaaacttataatctggagtcctaatcmcttctcaaaatattttccccttactttaaagttagattatccatagcatgtgtttgataaatttacactggacttgccgttgagtttgatttttatgatgttgaaactgtaaaggagttaacaatcagaatcacttggattcagctctcagttgtttccaatacaaatttgaggcagaaaatataaggaaagaccatgagatttttgacatcagcaaa

SEQ ID NO: 315482 - DNA, 618 bp, Homo sapiens
gccagttatcccagccgaatttattaaaaagagattcatttccccaatgtttgtttttatctgctttgtcaaagatcagatggttgtaagtgggtggctttatttctgaattttctgttccattggtctaygtgtctgtttttgaactagtaccatgttgttttgattaccgtagccttgtaatatagtttgaagtcaggtagtgtgatgcctctagctttgttcttttcacttaggattgctttggctatttgggctcctttctgttttcatacgaatttgagtatatatacccaaaggaaaataaatcattctaccaaaaagacacatgcacttgcatgttcaccatgctattcacaatagcaaagacatgaaatcaacctaggtgcacatcagtggtgaactggataaagagcatgtggtacatatacaccatggaatactacatagccataaaaagaaacgaaatcatatcctttgcagcaaatagattgcagctggaggccacaatcctaaatgaattaatgcaggaacccagaaaactaaataccacatgttctcacttataagtgggagctaaacattgagcacacatggacataaatatgggaagaataa

SEQ ID NO: 315483 - DNA, 618 bp, Homo sapiens
gccagttatcccagccgaatttattaaaaagagattcatttccccaatgtttgtttttatctgctttgtcaaagatcagatggttgtaagtgggtggctttatttctgaattttctgttccattggtctacgtgtctgtttttgaactagtaccatgttgttttgattaccgtagccttgtaatatagtttgaagtcaggtagtgtgatgcctctagctttgttcttttcacttaggattgctttggctatttgggctcctttctgttttcatacgaatttgagtatatatacccaaaggaaaataaatcattctaccaaaaagacacatgcacttgcatgttcaccatgctattcacaatagcaaagacatgaaatcaacctaggtgcacatcagtggtgaactggataaagagcatgtggtacatatacaccatggaatactacatagccataaaaagaaacgaaatcatatcctttgcagcaaatagattgcagctggaggccacaatcctaaatgaattaatgcaggaacccagaaaactaaataccacatgttctcacttataagtgggagctaaacattragcacacatggacataaatatgggaagaataa

SEQ ID NO: 315484 - DNA, 631 bp, Homo sapiens
actggctaatgtctttcttgtggtgttgtttatacactctcttaaagtaaacattttgtttctgcaatagtaatatagtcagttcctgtggctgccactctcaagctttaatcccaaccataattatcaccacagatacttttttaaaaattcagattcctggcccttgtgcccctcactctccaggctcccctccccaccctagagggtttgattgggaagttctacattgyagcccagacatctgcatctttagcacacttttcaggcaatttgaatgcaggtggtccctaattacaaggtagaaggaccaaatcttctagcgatggagttttatcgatcacctttgctttttatgactaaaaaaacagctccgttctgctgatggaatcccaaaggtgtcccaggggcctagcagagaagacaaaaacaggttttaccctcttcacaatttggccaactttggccacctcagccagggaccatccttatgacaggttaagcaatcaggggcccaccaactctgggatgaagaccccctttgggaggaagtcactatgtgcagcccactcttaagaagtaagcagtcttgttccacctgcctgagagtggatatacaagcggacttcaa

SEQ ID NO: 315485 - DNA, 631 bp, Homo sapiens
actggctaatgtctttcttgtggtgttgtttatacactctcttaaagtaaacattttgtttctgcaatagtaatatagtcagttcctgtggctgccactctcaagctttaatcccaaccataattatcaccacagatacttttttaaaaattcagattcctggcccttgtgcccctcactctccaggctcccctccccaccctagagggtttgattgggaagttctacattgcagcccagacatctgcatctttagcacacttttcaggcaatttgaatgcaggtggtccctaattacaaggtagaaggaccaaatcttctagcgatggagttttatcgatcacctttgctttttatgactaaaaaaacagctccgttctgctgatggaatcccaaaggtgtcccaggggcctagcagagaagacaaaaacaggttttaccctcttcacaatttggccaactttggccacctcrgccagggaccatccttatgacaggttaagcaatcaggggcccaccaactctgggatgaagaccccctttgggaggaagtcactatgtgcagcccactcttaagaagtaagcagtcttgttccacctgcctgagagtggatatacaagcggacttcaa

SEQ ID NO: 315486 - DNA, 650 bp, Homo sapiens
aagcactggaaagggtgctaagtcaatatctgacagatgaagctagctaactaattttcactctcattccatattaaaacaaaaacaaggcaataaataggttatgtcaatcaatgaggacatcaaatgtcttattttggacactgatacattgtcagcttcttttctaagtatttggaactagcaactgtaaatattcagtggttttcaggtattgtacatttttatctgtatgtcctaatcatggaaaytggcattgtatagttgtgtaacagattatttggagtaccttaactaaactacacttattataaaatgatagcgtttattgtctagccactattgttcctttgttaatttgttaaatcattgccccattcaaaattgctcaaatacttttactaaaaaatacgaatcttatcattcattttctgtgaatgaatgcaatatgtgagttttaaaacagctttggggatacatttcaaattactaatggagatttgctttgaattgcctgattcagttttctgggtgaccatttattttgataaattcttaaaattaatgatactctttaaaataagttttcttaaacatcagtatttaaattttatagttatcaaagaacaatccctatgtggacatttgcc

SEQ ID NO: 315487 - DNA, 581 bp, Homo sapiens
tatctgacagatgaagctagctaactaattttcactctcattccatattaaaacaaaaacaaggcaataaataggttatgtcaatcaatgaggacatcaaatgtcttattttggacactgatacattgtcagcttcttttctaagtatttggaactagcaactgtaaatattcagtggttttcaggtattgtacatttttatctgtatgtcctaatcatggaaattggcattgtatagttgtgtaacagattatttggagtaccttaactaaactacacttattataaaatgatagcgtttattgtctagccactattgttcctttgttaatttgttaaatcattgccccattcaaaattgctcaaatacttttactaaaaaatacgaatcttatcattcattttctgtgaatgaatgcaatatgtgagttttaaaacagctttggggatacatttcaaattactaatggagatttgctttgaattgcctgattcagtttyctgggtgaccatttattttgataaattcttaaaattaatgatactctttaaaataagttttcttaaacatcagtatttaa

SEQ ID NO: 315488 - DNA, 576 bp, Homo sapiens
atctcccagggttagtttggtctagagattttcttattttataaaaactgatttaaatgggctttttatatcctaacactaaagctcttttagttctttttgcctgccctaagtaattcaccacccaggtgacctttttcttctactttgatgaagcagtgtactcagtggtcataaaaatcaaactcagaccaagattcaattttgcctttcagagagattggctgtggaactcctggctctcatctgacttttctgtctctataactaagcatatcaaagattttctaggaattatttttctaaataagatgagttccagagatgaagattgtatctagatatccaagtattactggattagaactggtctatttattttggattctaacttgaaaagactggcaagtcgctgcagtgctaaaatagaagygtaagggagacatcacacacacaagctacctgtgggtcccaaaggaagggaaacgtttgcttgaagtaaacaagtacttttatcaggaatctctagtggaaagagaccacctgacagtttcctgtgaacaagccaaagtaccc

SEQ ID NO: 315489 - DNA, 590 bp, Homo sapiens
actcatcagctgatgaacatttgggttgtttccatttgtttgaggccaagattcttaattcctctgtttatttcacagagcaagtcaggaggtcttgcccagagatatgtattaaataagtatttgtttaataaagtgtactggtaatgccacttactgttcccagactcccatggatctttttaagtaacactcatcagttttattgtataagcagcatgtctcatcatacagaaataattagatcaggagattgcatctgacataagggtagttaatccacagtgtagtagatgattggtaacctggtagaaaaagatgagctgggccagagcctctttcttgggaactgaactttaaatattcaatactagttatcaataaggacagaaaaggaaaagttaatgtcttagactttttggagactgtttaaagctatagatcctctcctaagaaaaattacacatgtatgaacatatatttttagagtgtggggtattctggaagcattcayggatcccaggttaagaacctctgacctttagaaaggccaaaaaggattactatggtacaaatattgaatttaaagg

SEQ ID NO: 315490 - DNA, 507 bp, Homo sapiens
actggctagccatatacagaagattaaagctggactccttccttacaccatatataaaaatcaacccaagatggattaaagacttaaatgaaaaacccmaaactataaaaaccctggaagacaacccaggcaatatcatccttgacataggaatgggcaaagatttcatgaaaaagacaccaaaagcaattgcaacaaaagcaaaaatcgacaaataggatctacttaaacttaagagcttctgcacagcaaaagaaactatcaacagagtaaacagacaacctacagaatgggagaaaatatttgcaaagtgacaaaggtgtagctactatctagcatctacaaggaacttaaatttgcaacagaaaaacaaccccattaaaaagtgggcaaaggacataaacagacactcttgaaaaaaagacatacacgtggccaacaaccatatggaaaaggctcagtatcactgatcattagaaaaatgcaaatcaaaaccacaatgtgata

SEQ ID NO: 315491 - DNA, 556 bp, Homo sapiens
atgcatacgtttacttcactgagaacaaccttatgtttcattcttttaagatgtttgattagagacattaagaacataaaatctgtcactctatgagggatttcttacaacacatctttttaggacaaaaaacttttactctacatcatctacagtatccaatattaccataagctatttttgaaagcactaattgatgcaacctatttgcaagcaactgagtggtatgtaaaaaaaattaagtatatataccctctgagtaattctacttctagaaatctacaggaatactcaagcagtggaatcatgatttttatataaaaagttaacagttggattatttgtaatatggaaaaattagagataacatgaaattcaacaatggaggaatggccagcaaaactagatataccacagaatatcayacatatgttaaaaaaatatgattgatctatatgagcaggcataaaaggttttaggatacactgctcagcaaagaaggcaagctgcagaacaaaatatatgttatcatctgatttttgttaaaaatagcatc

SEQ ID NO: 315492 - DNA, 582 bp, Homo sapiens
tttaaatctataatatccaatctgctcttgctattgtgtggtaatctcagactatcagaaaataccacaaaattctaaacaatgaagatttctaaatgtcctatgttccttttagtaggagaggggcataaaaatcagatgacaagatgctactttaagaaagctgtatctgtattttctctttaaaattaggattttcttcttctctcaaaaagctaatttttataaggccaagcgtaattaggttggagaaaatacatactaccagaagagatttgttgcctaaaagctcagyactaagtttgtttgctccctattattctccattaagattcaatcctcactctctaatctttaaaaacagcccttttcttttccttgccagttccataaaatcacaattactctttaccctctgctatcattgtaatccataggtttaaatcaaaggctgaacaaatagtttcaactatgcttgccaagatgtgtacagagcaggatttctctaccttggcactactgacatcttggcccagataattctttgttgggtcactggggctgtactgtaatgcactgtcg

SEQ ID NO: 315493 - DNA, 519 bp, Homo sapiens
gtttctatctatatcgaacacttatatccttcccttcccttcccttgcctcttccctccccctttcctttcccctttctttctcctttcctttttccttttctcttcccttttccctcttctttttccttttcctttcctttcctgagatagggtctcattctgttgccccacygtagtgcagtggtgcaatcatagctcactgcaactatgattgagtggggagcccaactcctgggttcaagtaatcctcccacctcagcctactgagtagctggaatacaggtgtgtgccaccatgctctgctaatgtttaaagtttttgtggagatagggtctccatatgttgtccaggctggtcttgaactcttggcctcaagtgatcctcccacctcagtctcccaaagcacgaggattacaggcatgagccaccatgcccagccaatgcttatatattcttatgaaaatattaggtagaattatatatctcatacttcttagttttttatacaatttaagaa

SEQ ID NO: 315494 - DNA, 588 bp, Homo sapiens
tccttttctctgtgaaagatataaatatataaacaatagaagagctctttcaataaatataaaaattctaagtgataaggcattgtgaccatttagcatttttttctgagtaatacaaaaattagagttaataactcaacactttatcacttttttcacctatcttacctatcaacagggttggggaggttgtaaggtagggcaggggagttgaaatatcaaaaataattgatttttttttaatttgagacagagtcttgctctgtcatccagtttggagtgcagtggcacgatctcagctcactgcaacctccgcctcccgggttcaagcagttctccggcctcagcctcctgagtagctaggattacaggcrtgcaccaccacgcctggctaatttttgtatttttagtagagacagggtttcaccgtgttggtcaggctggtcttgaactcctgacctagtgatctgcctgccttggcctcccgaagaataattgatcttttaactacaaaaaaaaaaaattagctcctctttggcagaaataagcttttattcaagatagctttctgggtattacagatttgct

SEQ ID NO: 315495 - DNA, 588 bp, Homo sapiens
tccttttctctgtgaaagatataaatatataaacaatagaagagctctttcaataaatataaaaattctaagtgataaggcattgtgaccatttagcatttttttctgagtaatacaaaaattagagttaataactcaacactttatcacttttttcacctatcttacctatcaacagggttggggaggttgtaaggtagggcaggggagttgaaatatcaaaaataattgatttttttttaatttgagacagagtcttgctctgtcatccagtttggagtgcagtggcacgatctcagctcactgcaacctccgcctcccgggttcaagcagttctccggcctcagcctcctgagtagctaggattacaggcgtgcaccaccacgcctggctaatttttgtatttttagtagagacagggtttcacygtgttggtcaggctggtcttgaactcctgacctagtgatctgcctgccttggcctcccgaagaataattgatcttttaactacaaaaaaaaaaaattagctcctctttggcagaaataagcttttattcaagatagctttctgggtattacagatttgct

SEQ ID NO: 315496 - DNA, 575 bp, Homo sapiens
cacgcacacacacacacaagaatgaggagactgaaaattcccaaaacaaaaaagaacaaaggtatatatatatatatatatatatatatatgtatatacatatatatatatatatatatatgtatatacatatatatatatatgtatatacacrcacatataggcatactctattttaccactaacttttttaaaaactggaaggcatgggagaaaaagatcatcctgaaatgttaaaaacaaaaacaaaaaacaaacaaaaaaaaaacataaaacaaaatgatcggatagtttgactttaaaattattgacctagaagcacataaagtacttacttagatttatgtctataagccttatatatggcatgatcgtatgcttatatggcataaatcaaacctatatttcataatactctgttcatcatttatcagccaacaacttcactcttgggaaccaaatccacattgcactcatcagcggcaccagagtcaagccaccttggccttggtcttcatgtttatgtcttagctcctagtgccaggagtgtcatgccacatttcctacaatcacat

SEQ ID NO: 315497 - DNA, 503 bp, Homo sapiens
cacctggggtagtgcctctgctccagcgcctcactctacttcgatgcatatgtttatctccataaattgcaaccaagcctacacagtgatcatttttaagttttactgattgccttatgaccttacctctctcatggggccagaagaatgatggcgaaatacagtgattggcaggagcagctgtggagttgcttattgagtcatggtgggaccgttgcctttgctggggaagactcaggtatctctgatgtccaacattcaatgggagcaaatcttttccacaaatgccctgggaattctctatgtattacaatgcttttgtaataatctcataccctaaaagagactatgaaaaaagaataaatagaaagtaasaggtttaggagtgcctgttgacccaggtattaagaaaagttgatacagacatttgggtaaaattcaatcttctcatattgtcatttattcggcacatatttattgcaggtctactatgtgcaagacac

SEQ ID NO: 315498 - DNA, 604 bp, Homo sapiens
ttttaaattaacagagtatgaaaaatttatacctatggtttcagattctgcagtacaactttagaaactactgcttgttgagttcawtgtgatatcaaagaagaatatccaaaattaccctataagactatcaatgtactcctccttttccaactatataactgtgtgaggctcaattttctttatgcatttcaatcaacccatcacaacagattgaatgcagaagcacatctgagaatccagctgtcttctattgagctcagacattaaagagatttacagaccagacacggtggctcacacctgtaatcccagcactttgggaggccaaggagggtggatcatttgaggtcaggagttcaagaccagcctggtgaaatgttatctctactaaaaatacaaaaattagctgggtgtggcggcacatgcctgtaatcccagctactcgggaggctgaggcaggagaattgcttgaacctgggaggcggaggttgcagcgagccaagattgcgtctctgccctccagcctgggcaacaaagtgagactccatctcaaaaataaataaataaataaatagatttgtagaagtgggaaataatacca

SEQ ID NO: 315499 - DNA, 557 bp, Homo sapiens
agcatcgtttctgcctgtggaatcactttggtatgaagattcttaagtatgcagccccacaaattagggctctcattcctgtcaaagatagttattactccaggaacctttccaaggttgctaccatgaatactttttacttttatggtgacttggtctctgagagtaaagacaattatccaraagaaaacgtttttgtctggatatatcttggtgacaagaggaagaaaggtcatgatcttcaaaccaaaacccaacatgagaacaggttatgagcttgaattgaggtactgagtgtagaataaccaaaaattgtagtgtctgtttgaatttacacctgtcaccagatttgaatacacagttttaactttattttcattatttagacacatgatttgtagaactgaatcccaaggactgaggttggtgtttaggatctggatagcaagccctctgaaaatggaattatgaacttatttccaagatcttagctactatcatcttgctctgcctcctctgaccattcctctggtattagttgaagaatacagacctac

SEQ ID NO: 315500 - DNA, 491 bp, Homo sapiens
tgactaatgaaacattttaggaaacaacatactcaccttgctgttagattgtgctttttcagcggggatgaatcccagtttgtggaggaagactctggagatggactatggatggcacttgggcctgatggtttttatccttgaacctgggacagcatggtccctactctgactcaaactggggactgagcttttctgaagagactggcattcagctgacatcaactggctatatatagcaccaaatactttagctactcatatcttcctggcgaaagggaggaacagggaaagattaggctctctccattgtgtttctagtttgtgagatggttaaatgaaacgttcattggacatgyagaaagtttttagtgagcactttctgttgaacagatagtagccaaaagggattttaaacacttttaaacatctagctcttatgttacatgttaattgaggtggcaagagacacatgcatgaatcagaacaga

SEQ ID NO: 315501 - DNA, 620 bp, Homo sapiens
tggtatcatcagtactaataatttttgtgtctaaatttagttttgtgatgcacagtgtctttcattttcacaaataagaacatttccaagtgttagaatcttcactcacataaacatacacacttatacaattataaaaatacgtaattacgcacaatagaaggtaaggatcttaggtacactaatacatgtttatccttcttgatactactataagaccctgtcataccatgtttttttggttgaagagttctataaaaaatggagaaagagtagtccttcagaaaaacttaagtaagaagaaaagttctcatcatatatagcaaggttcttgagggaaaaakatttcttgttattcagatgaatgtgaaagttcagtgaaacgcaatcacagcagttgattgtgaatgttgacctcagaatgtattctctgaaggaatgctaatgactcttaccatgatgcactggcttatttagataccattaagagctccaacttgacaagcaggatgatgaactgcacttttcctatcatgcaacacatgtttggataacaggcagctctgtaaagttgggagattatttatttttaaagaatcaatttttcatcttcttctgca

SEQ ID NO: 315502 - DNA, 620 bp, Homo sapiens
tggtatcatcagtactaataatttttgtgtctaaatttagttttgtgatgcacagtgtctttcattttcacaaataagaacatttccaagtgttagaatcttcactcacataaacatacacacttatacaattataaaaatacgtaattacgcacaatagaaggtaaggatcttaggtacactaatacatgtttatccttcttgatactactataagaccctgtcataccatgtttttttggttgaagagttctataaaaaatggagaaagagtagtccttcagaaaaacttaagtaagaagaaaagttctcatcatatatagcaaggttcttgagggaaaaatatttcttgttattcagatgaatgtgaaagttcagtgaaacgcaatcacagcagttgattgtgaatgttgacctcagaatgtattctctgaaggaatgctaatgactcttaccatgatgcactggcttatttagataccattaagagctccaacttgacaagcaggatgatgaactgcacttttcctatcatgcaacacatgtttggataacaggcagctctgtwaagttgggagattatttatttttaaagaatcaatttttcatcttcttctgca

SEQ ID NO: 315503 - DNA, 530 bp, Homo sapiens
ggtggtaagaagtatttaaatggtcttacaggttaacaggtgaattaaaattcagggctggtgttactgttgacagatttgtttctcagagatggtggcttgctttttacaaattatatcattctactatgtcttctttttttactccactcagattcgaaatcagagcaaagcctctggktctgggctctgtgagggagatgaagtggtttccatcaatggcaacccttgtgcagatctcacctaccctgaagtcatcaagctcatggaaagcataacagactctctccaaatgctcatcaaaaggtacaacagatttgctggaatatgtattttctcttgaagctacatgggaatgattatagcttttactacatatataacttgtcatttatggagaaattaggggtgctttgtagaaggttaggtatagttaaacagaaacaccactgtgtttgaaaaatagtcaattctagtcaaccaaactttctggttaattgagaattaagttgaaaatgcttgtttcaagc

SEQ ID NO: 315504 - DNA, 510 bp, Homo sapiens
acacagagaaaaaatagaatggttccttaactgagaaagatattgatgtaacttgatttgtgatattattaatataaataaagcttgtgtagctcagaggagagattgctgagaaataaggcacccagcaataaacagtgaagaacctggaatatttgataagcgtatactaatatggrcatgatatattgatgaattagaacctgatatcatttacaaaatatgagttgtataaatctctttattctaattttatgcttaccatccaaacttccactaatccattggttttccatgtagtttgctagaatccaaatccacctgctttttctcattaaagtatgctgcaatttgagagtaaaacattcagcgcctagtaagtttgttgaataaatgaatgaatgaataagaaaaagaaagacactggaacagaaacggaagagcaaagttcaaaagaaaagagaatttttaggcactgccaagatctgcacaaaagtcacagagaaagac

SEQ ID NO: 315505 - DNA, 510 bp, Homo sapiens
acacagagaaaaaatagaatggttccttaactgagaaagatattgatgtaacttgatttgtgatattattaatataaataaagcttgtgtagctcagaggagagattgctgagaaataaggcacccagcaataaacagtgaagaacctggaatatttgataagcgtatactaatatggacatgatatattgatgaattagaacctgatatcatttacaaaatatgagttgtataaatctctttattctaattttatgcttaccatccaaacttccactaatccattggttttccakgtagtttgctagaatccaaatccacctgctttttctcattaaagtatgctgcaatttgagagtaaaacattcagcgcctagtaagtttgttgaataaatgaatgaatgaataagaaaaagaaagacactggaacagaaacggaagagcaaagttcaaaagaaaagagaatttttaggcactgccaagatctgcacaaaagtcacagagaaagac

SEQ ID NO: 315506 - DNA, 510 bp, Homo sapiens
acacagagaaaaaatagaatggttccttaactgagaaagatattgatgtaacttgatttgtgatattattaatataaataaagcttgtgtagctcagaggagagattgctgagaaataaggcacccagcaataaacagtgaagaacctggaatatttgataagcgtatactaatatggacatgatatattgatgaattagaacctgatatcatttacaaaatatgagttgtataaatctctttattctaattttatgcttaccatccaaacttccactaatccattggttttccatgtagtttgctagaatccaaatccacctgctttttcycattaaagtatgctgcaatttgagagtaaaacattcagcgcctagtaagtttgttgaataaatgaatgaatgaataagaaaaagaaagacactggaacagaaacggaagagcaaagttcaaaagaaaagagaatttttaggcactgccaagatctgcacaaaagtcacagagaaagac

SEQ ID NO: 315507 - DNA, 510 bp, Homo sapiens
acacagagaaaaaatagaatggttccttaactgagaaagatattgatgtaacttgatttgtgatattattaatataaataaagcttgtgtagctcagaggagagattgctgagaaataaggcacccagcaataaacagtgaagaacctggaatatttgataagcgtatactaatatggacatgatatattgatgaattagaacctgatatcatttacaaaatatgagttgtataaatctctttattctaattttatgcttaccatccaaacttccactaatccattggttttccatgtagtttgctagaatccaaatccacctgctttttctcattaaagtatgctgcaatttgagagtaaaacattcagcgcctagtaagtttgttgaataaatgaatgaatgaataagaaaaagaaagacactggaacagaaayggaagagcaaagttcaaaagaaaagagaatttttaggcactgccaagatctgcacaaaagtcacagagaaagac

SEQ ID NO: 315508 - DNA, 557 bp, Homo sapiens
tgggtgagaagatgtagatgactattgttctcactaaagttctaaaataatagcaagtgtagagaagagccgttgctttgaaaatacataccacatttgttataaagcatttgtttgttagtakcaatcacataggtagaaagagtttgagttttactgtggattaaaaagccttccctaaaaagagagcatgccagtcatagagacactaatttggcacttttcctccttcttaggtttaaatgttataccaatgcatgtgtttgaaatatccattaagatgatttaaaatttgtcttgtattttgagtttcttaaatgcgtggattcttgttcatttatctctgaatatgtctcttttatattttggcacaattatacacattggaaagggccaacctattagggctcaagtatgtatatgcaaaaaaaaaaagttatatcaaacaggcacagttattacaactagagagaaattccagaaatatttgtttttttaagagaaagtaaattttcacattagatttctattcaaagtactaatatctacatggtcca

SEQ ID NO: 315509 - DNA, 557 bp, Homo sapiens
tgggtgagaagatgtagatgactattgttctcactaaagttctaaaataatagcaagtgtagagaagagccgttgctttgaaaatacataccacatttgttataaagcatttgtttgttagtatcaatcacataggtagaaagagtttgagttttactgtggattaaaaagccttccctaaaaagagagcatgccagtcatagagacactaatttggcacttttcctccttcttaggtttaaatgttataccaatgcatgtgtttgaaatatcyattaagatgatttaaaatttgtcttgtattttgagtttcttaaatgcgtggattcttgttcatttatctctgaatatgtctcttttatattttggcacaattatacacattggaaagggccaacctattagggctcaagtatgtatatgcaaaaaaaaaaagttatatcaaacaggcacagttattacaactagagagaaattccagaaatatttgtttttttaagagaaagtaaattttcacattagatttctattcaaagtactaatatctacatggtcca

SEQ ID NO: 315510 - DNA, 557 bp, Homo sapiens
tgggtgagaagatgtagatgactattgttctcactaaagttctaaaataatagcaagtgtagagaagagccgttgctttgaaaatacataccacatttgttataaagcatttgtttgttagtatcaatcacataggtagaaagagtttgagttttactgtggattaaaaagccttccctaaaaagagagcatgccagtcatagagacactaatttggcacttttcctccttcttaggtttaaatgttataccaatgcatgtgtttgaaatatccattaagatgatttaaaatttgtcttgtattttgagtttcttaaatgcgtggattcttgttcatttatctctgaatatgtctcttttatattttggcacaattatacacattggaaagggccaacctattagrgctcaagtatgtatatgcaaaaaaaaaaagttatatcaaacaggcacagttattacaactagagagaaattccagaaatatttgtttttttaagagaaagtaaattttcacattagatttctattcaaagtactaatatctacatggtcca

SEQ ID NO: 315511 - DNA, 585 bp, Homo sapiens
gtaacagtggtgaaaaggtagataaggtttctgccctcatggaggtgcttgtagcaagaaatacagataataaaaataacaaataaataataagttccaggaaagtaataagcagtggataaaagagagagtaaataacaaaggccatcttagaaacagcaatgggaaagaaacccttctccaagcacttaatattttaactaagatctcaaggctaatatgctcagccttgtaaggagttgaggaagaatatttcaggcagagagaacagcaagtcttgtcgacaagaaagagtttgctgtggacaagaaacagaaaggctcacgtgaccatggccctagcagttgatggtgaaaaatttggcaacaaaagstttgagaagtaggcaaactcacagctcttgagtggcttggcatgctttgtaggttataagcaatttgaattttgtcttaaaagcactgggatgtcagaggcttcctagctggaagtaaactgctttgatctatgcatttaaaaattggggcaatgaattaaagaaggtcaagcaccagttaggaagctcctgcagaagtccaggcaaacagt

SEQ ID NO: 315512 - DNA, 626 bp, Homo sapiens
tctgtcgttctacctctgtgtattttgcaagcatttcctacccactcaactctaatatcccytagtagaggcttcgtgtttgaacagtctttgtagccagcgagcctaatgctatgctttaaacattgtcttcacgggcatttaactggtgaatattcaaatggaaagaaaagtcatggacgaatggttaagtaaaaaaagaatcactgtgctagcacaatgcttgctacacagtaaactctctgcctatattcagaatgaaggaataagttaattaattaattttgctcacatatgaattttgtaccttagcaagatgggacccagtgatggctgagccatctgttcttttaagtactttgtgatggacttggattctgaaattgctcattaattgtcattgcttcagtatggtgccgtgcttgggattggaggtcttgaagtgatacctaatttcggaggactgtgacaaaatttatcactaattacctgcccctcaaatgggaatcaaagccatcagcaacatacgatggtgataataatggttatcatttatcgagtgattagtattctaagcactttgcaggtattccctcgctttaattttactccattgctagcttaga

SEQ ID NO: 315513 - DNA, 379 bp, Homo sapiens
tttctgtatctgaacacagaaaaggtacagtaaaaatatagtattataatttcatgggattactgtcatacatggggtctgaagttgactgaagcattattatgtggkgcatgactgtacactaacaagtcaagtgacctcttaggacttagtctattaatctaaaggatgagaagtacattctaacatcaggtgtcttttctcgagcacaatcaaattttcattttcccaatctcttataatgactcatgaccgggtgaaggaggaatcagtgcaaattgcttgttgggatggaaacaggtgctagaagtgaggaaaaagcaatgttcaaacgcaaaggaagggtggaggaggaaaggtatggagttgccacagggac

SEQ ID NO: 315514 - DNA, 630 bp, Homo sapiens
acattctaacatcaggtgtcttttctcgagcacaatcaaattttcattttcccaatctcttataatgactcatgaccgggtgaaggaggaatcagtgcaaattgcttgttgggatggaaacaggtgctagaagtgaggaaaaagcaatgttcaaacgcaaaggaagggtggaggaggaaaggtrtggagttgccacagggactcatagcaagcaacaataaaatccagtttggaaatccaccagaaaatccccctcaatctcggaggcttctttcgtgttctttacaggaaacacttgtgtgttcctttccctttgtcagggacatataatttagaaagcagagaatttgttctttctagtttttccttttttttttttttcagtaaacatgaaggattaaagggaaatagacaacagcacttttaaaggatgctttttcgtaagactttcagtggatgttatccagtaaataagagtttcacagtatgctatcaatgttagtttggagaaggaaaggtcaaaaagtcaaaccttgatatctttatcttttcacaaaggttatttctgaaggagctatatgtaaaaggaaaaacaaaaggcaaatatatacacacacctatatatgtata

SEQ ID NO: 315515 - DNA, 598 bp, Homo sapiens
gctttggggagacttcttagcacacataacaatataggtttgtatagaaagagaaatggtgtttttgctaccttataattacaatctcttatatactcccattgtgctttatgtttttataaaaaaaactttaacatatatagtattagtcagttagagcaaacaactccaattctgtggcactgtacggtaaaagcatagttctttttcactgtatgacaatgcaggttggcaggcagagggggagaggctggcggggaggcctcaaatccaaacagtcattcagggactcaggctcctccttgtggctgccctctcctcggtcctctacccaagtcctctccatcccttctgccagtgaatggagaaatagaaytgggactcacatgtggaaagatttattttccatgtctgcaagtgaggaatgccatttctacatatctcattggctagaactcaggaatatggccctgtctagcttcaagagaggatgaaattgtagtccagttgccttgtttgcctgagaagaaagggaataatttggtgggcaagtagacagtatctgccatctatatggtgcagtttcaccctaacagtg

SEQ ID NO: 315516 - DNA, 539 bp, Homo sapiens
gcctttactatcagaaatttccacatcattctcattcatggtctctcagaacggttttaggaatcatttaaaagcaaaaaggaaaattaaaccttatgctgcactggtatctgtttattcctaagtagccagggaatgtccctggaatctgcttctccattacagcgtatgaatgatgcaggaagttatattaaatgcaaacagggagtgacccaaggagtaatagcatttaacatttgtggaacgtttttaaaaaatattaaactccatartcattagttcatgaaacctcataacaccctcacaggagtcataagcagtataaatcagacaacaaaccttgatatcacaaggtaagtctctgttaaacaaggatttgatcatttacacaagagctagatttctgtttcttcataaggggactcttggtggagctgagaaagattttcttcagtgaccttgaactctcatccttaaataaacgaagcagccccaggaaagagggtagagtatacacattcagctcacttagagggagc

SEQ ID NO: 315517 - DNA, 539 bp, Homo sapiens
gcctttactatcagaaatttccacatcattctcattcatggtctctcagaacggttttaggaatcatttaaaagcaaaaaggaaaattaaaccttatgctgcactggtatctgtttattcctaagtagccagggaatgtccctggaatctgcttctccattacagcgtatgaatgatgcaggaagttatattaaatgcaaacagggagtgacccaaggagtaatagcatttaacatttgtggaacgtttttaaaaaatattaaactccataatcattagttcatgaaacctcataacaccctcacaggagtcataagcagtataaatcagacaacaaaccttgatatcacaaggtaagtctctgttaaacaaggatttgatcatttacacaagagctagatttctgtttcttcataaggggactcttggtggagctragaaagattttcttcagtgaccttgaactctcatccttaaataaacgaagcagccccaggaaagagggtagagtatacacattcagctcacttagagggagc

SEQ ID NO: 315518 - DNA, 539 bp, Homo sapiens
gcctttactatcagaaatttccacatcattctcattcatggtctctcagaacggttttaggaatcatttaaaagcaaaaaggaaaattaaaccttatgctgcactggtatctgtttattcctaagtagccagggaatgtccctggaatctgcttctccattacagcgtatgaatgatgcaggaagttatattaaatgcaaacagggagtgacccaaggagtaatagcatttaacatttgtggaacgtttttaaaaaatattaaactccataatcattagttcatgaaacctcataacaccctcacaggagtcataagcagtataaatcagacaacaaaccttgatatcacaaggtaagtctctgttaaacaaggatttgatcatttacacaagagctagatttctgtttcttcataaggggactcttggtggagctgagaaagattttcttcartgaccttgaactctcatccttaaataaacgaagcagccccaggaaagagggtagagtatacacattcagctcacttagagggagc

SEQ ID NO: 315519 - DNA, 544 bp, Homo sapiens
ttatttggtttgatggtttgtattttattgaggggtaaatatataatctattactcaacctaggaacttacattgaatactcaaatcgggcaggctttcttccaattaatttcagtttccagtgagtcttgtttcttttcagtgtacaatggaagataactctaatcagatcttaagagacaattctcaaggcatgtcactcattggccatttatttgatgattagtagtggttgtagttgaagtaggcggcagtattatacaattatcatacatagtagctctataacatcttgcaaataaattaaactctttatatatcagtttttattttttgtaaaatgggaacagtatcctgcaggrgcttgtgtaccacagaaaggatgcgtatataaagccctaaccctatttctgcatagaacagccactcacagaatgatagttggcattctcaataatcattgacaagaaaagttagcaggatatatcccctgctctgatccatctaaacaatggtgcaataagaagtaacaatttcataatgc

SEQ ID NO: 315520 - DNA, 459 bp, Homo sapiens
agtatcctgcaggagcttgtgtaccacagaaaggatgcgtatataaagccctaaccctatttctgcatagaacagccactcacagaatgatagttggcattctcaataatcattgacaagaaaagttagcaggatatatcccctgctctgatccatctaaacaatggtgcaataagaagtaacaatttcataatgctttgcaatttacacatatttttatgtacgctgttgagagtgtaagcatcaaaataaaataggagaactggaaaatacagtgagggagctgagatcaagtgatacrgcatttgccaggaggtgggtattccatgccacagtatacaccaatacagaatgaggacaagcgttcattccttctaatgaggactttacctaggttgggcaccaaaggctgtcacacagttggatggaactgaattaaaacgatatcaaagttcagtt

SEQ ID NO: 315521 - DNA, 584 bp, Homo sapiens
tttagccttgaaactcaaattgaatagttaattagtgaattaccatttcattgatgaaacggggcagtggggcatttttttcaatctcttcatttgtattataaatctatgcagaagattgatgtgggtttggatcatcatcatgaggctttattttaagtagcttaatcaccgttaatcttttggggtaactttcttgtgatctaagtatctggtaggtctccttgtctataaataatttcttatgttggattagggtttctataagacttctcatttaaaaattccctactattttctctgtctgagaaagagtatgtttctgatacctggagcatcaggaggtcatcaggatagaaatgagacacatcaatgtgttccttcaaactgtcattggtgagcatgtgcagtgacccaggtcttttggcagatgccagggatataagcaaacctaggatcaggcatctggtggtttgcagactagtaggagggaaaaatgcagaactattaagtggtataaggtggttaaaggcaccatgaatgragtctgtcaacagtgcaaacagagatggaatgattgattc

SEQ ID NO: 315522 - DNA, 505 bp, Homo sapiens
ggtggttcaaacaacagacacttatatcacacagttctggagcctgaaagtctgagatcagggtgccagcatggtcaggtttttgatgcccttgattctcaaatggcaaggaagctgggggagaaggggacatggggagggaggagaggggcagaggggaaaaggagggatgggaagaggcaactctttctggtcccttcttacaaaggcactaatctcatcatcaggaccccactatcatgacctcatctaaacctgatcacctcagaaaaccrcacctccaaatgccatcacattggagggctagggcttcaacatatgaatttggggaaagcaccagcatttagtccgtaatgctaagagggtagttcccaaccccgactacacattagagtcatttgggaacttttaataatatactgatgttctgggcctagcccacgagatttgcatttaatgcttgccaggcctaactcttcatcctgttagtgatgtaattttactt

SEQ ID NO: 315523 - DNA, 591 bp, Homo sapiens
tcttattaggtgaaaaaatcatgctaggtctggattttagcatcttcttgctagaagcaactgattgtacctatcaagcccaagacagagcccrgacaaaagtattttcctgcctggtgggctcacagtttgtgcagctttatgtatgtatgaacatccattcatatatgtgtatacatatgtgcgtgtgtatagtgtgtatacacatgtatatttttaatgacattttggaaaggatacaatagtgtttgtattttgcagtgagtgcgccagttcataatctatgtttattagaatgaactaaattccttgagcctctgccatttttcctaccccctacgaagattctgttttcccctcttctaaaatataacactggagagaagtgccaaatcaacagcccagaaatcgggaagctccttttttaattcccatcctgtagtactccccttggatttctgtgccaaagctggctgagagcgctctcacttcagcttcctatttaacttggctggtactatcttcctggtgaatcatttcacgaatttgggcatgggtactgatctcatacatcaaacacacaagtacata

SEQ ID NO: 315524 - DNA, 480 bp, Homo sapiens
aaattatgtaactctataaaaaggtattcattaaatcctaactattcatatagcaagtgtcaaatgaaatttggagaaggaatttttttaacataytaaagttccattatcctcaattttccatgaccaaccaaacacttttgcctagcccctctattgaccaataggggcagatttcttagtctttggagatttggtacggcaattgcggcagtggaatggtataagtcagtcttcccagaggttatgatatttgcatttattgagcatcgtatatacagaatgccagccacactctactaatagctcagcacaaaccaatgaattagagaacagcattcctaattacagatgaaacatacgaggctctcgcaaaggctatgtaaaatgccctttaatcagtggccattctgtgattcagacccagggctgtttgtctctaaagctcgggctctcagttgttactccctactgccaact

SEQ ID NO: 315525 - DNA, 542 bp, Homo sapiens
agtgcctgcagggttcaaatagacaggtcaatagaagggtgtatataatatgaattgttctacactcaaaaaaaaaaataaggtattggagaaaaggtgtccctagggttcaaatttaatagaagctgtagattcarttggggtctctaaacttgacccccttttctgagaccaccagcctgaaagtgagtatttgagcagtgatttggattttcttttcaatcacagactattatcctcctatgctactacaagcatttggtatgctaaatactgaacctggccatcacattctcaagtacttgacatatagtttacatagtggatgttgtatgcatcttagttgaaggaacaaatgtcaagggctttagtagagacaaatgatgtttcagagaacttccccattggacaactaagaggaccagcatccttctcactgagtactgagcaaacttattttggcataggggtcaggtcaaaacggtgttaatgggaaccatcttttatgctaaaattagaatcattttattattgttatgatt

SEQ ID NO: 315526 - DNA, 588 bp, Homo sapiens
atataataagtggcatctacacattggtagcactgctatcagccataacagacatgattgtttaatgctttttatacaaagccttaaagatattggaatcttttggaattctgggtgtgttttgggggttggagggtaggttgggctggtatctccaaagaaactggcatggctcctcttatgagctattaagagttcgagaaatcatctttttttttttttttgctttgcctgacagagagggtagaagagtagaactaatttttggcttacttttcattagctatccttagcaaagtttttctgttggaatgatttgtcacaccactcttgttcttttgtccttgggtcaatcwtttgtcaaaagtcctcttctgagagaaataggtgcctgcgtgaacacctgaacttacatcttttaaagtaaactttcatttaggaatccaccgcgttaacacccagtttgattttcagatcgcacagatctattttaaataaccagtggaatatattgcaatgccaaaccttcttcagagagtatcacataagattatttgattctaagcttctactgaaagcctaagagga

SEQ ID NO: 315527 - DNA, 609 bp, Homo sapiens
agtgaatctatattaaatcaggttctaatcaatttatctttatttcattaatgttatatattaaatcaggttctaatcaatctatcttttttattaaaggtacatatatttataaaataaaggtatatatatgtgtgtatatatatgtgtgtgtatatatacatatrcacacaaacacaaatgaatcagacatttatgatactctgtcagtgtgttattttataaaattgtcttttgttattttatgaaattgtcttttgttttgttgatgccctagttaccagtttgtataggttttgaatggtctgctctaacacagatttactataaatcatcttggtttgttttcactgcataattttgcacattgcaagatttttaaagaatgcatatattacattagagcagaaatgcaagcactagtttcacaggtttgttgtgaggattaagtgagataatgcaggaaaaacatttatcccagcacagtgcacatagaatgagttccataaaagatcattactatgactattgaaatgtttatagcccagagaattcataacttccatattacaagcagaatgtatcattcaggaattgtgtataattgtt

SEQ ID NO: 315528 - DNA, 478 bp, Homo sapiens
ttggctgatgggactctcaaatgcttctccatttatgtcagggctattatacaacagcaaaatagtctcaacataaacttcattttaattcacattatcctcataaagcactgctacggaactatggggtggggtaggtgtgtgtcagaccaaatcatattaatgatgcctttcttctatatcctctatacttcaacaactatgagtctaaggctgaattcaaatggtggggaaaaaagaaacaagtcacaagattacacatttattgtcatatttgggtgggtgtagacaggcaaatgaaagagtccctttaattaatttggtgrcaggggacttcataaactacatacttgggatagtgccagggtttcccggtctctcctacagagctgagtaaatgcaatggcttgggatgcaaaaaagaagcaaggatgaactgaatggggaaggaaaaatggcaaggaggaatgcaaaacag

SEQ ID NO: 315529 - DNA, 609 bp, Homo sapiens
ataggccagaggagatagattttaaattatgtgttaggagaaagagtacagttagttacaataatctaaaattcaagcaggggagaaaatatctacaaaaaaatagtgaacacctggtttctttgaggatttcttaagaagtcttcagctggaggcaggtggcatgggctacggtagaggcccagatgaaggggctatagaggccatgacaacccgttaatccaaaatgagccattgaagggtttaaagcactggaattaaaatatcattttcaattgttttaacccctgggatgttttgattttatggttatgaacaaagatatgttcaacagaattctaccaaggttgataaattattattgagacaggatttcctagggacaataagactaagccaatttaattgctcaatcggtttcatatacctttccatatagtgtcatttatgcagagtaaatgataaggtcacattttctttagagtcaaaatgacagatgaaaaagttcacgtagcagagtggtgggttcaaaacttgcctctttggattctcattttatatagaacatgcaagcttctgaataygaaatatattcccactgcattctac

SEQ ID NO: 315530 - DNA, 514 bp, Homo sapiens
taatgaaaaacacttgaaaaggtaaaatttctgaatttaatgagaaaccaagccaacgtatatttggaaactattatctctggattaaatataagtttattggatatttatatcaatttagaaatacatacatgtattgaaatactaataaactggcatagaattttttctctaagaaattacatctcccaagtatgtataaggaggctgatatttattgccagtactgtcataataaaacaaatgtgcttttcattttagggaagcattgttatcaagaaaaaaataaacagggcttatactatgaaaaatactttcatagagaaaccaaaaacatgacatcatatcgccccctattgtttataatggggtatgcrtcagaaatagtttccaaattgtatacaaataaatggacattttggtaactagtggtgactttcagagtagacacaaacattaaaaaaaaaaaaaagaaactgggttcttaagagggcacttccaaagagtttaagat

SEQ ID NO: 315531 - DNA, 533 bp, Homo sapiens
ctttgcatgtgtgcagaactatgattcaattcttgtaaaattaaaaaataagtacatataatgtgcgtgtgtgtgagagagagagagagaaagagagagagagggagargtggaaaaggttaaatttcctaattgctacagcagaagcacaggtatgcaaatcacctaaaagccatattgatttttttaagatatacatttaaaagaatgccagccaggatatagatctactctaaggtatttcaaattagtagctcacctttcaaaaccatgagataacttttttgatcaacagaaatattgtaaagatttgagagaagtattaagctcctagatctaactctggggaacccatatgattgtgatcaaattcagaacaatgcatattttttgtggaaaataagttcttcccaagggctgttcataaatttaacttagtcagacaaccttaatgagcgaggttattctggcctacaaaacacagctgggagaaatggacatgcaatcatcaataggaatatgtgtcttcctga

SEQ ID NO: 315532 - DNA, 644 bp, Homo sapiens
gcatgtagatacaattgttcaggggggggtatagaatgagaaaattaaaaaagaggatcaaggatgaagcacagataacaccaaaattaaaagttaggtaaaaacaagaaagccctcagtgtcataaaagcaaaactagggggaaacactatcaaataagccaaagagggaaagtgttttgaaacaagggagttgttaaccatcaatgccaagagaggtcaagtgagtaaggatttcaaagcatatttaggtttggcaaccagasggccatatgttaccttggaaacagcagtttcagagatgcgataggcctttgaaacagcgagcggaagcagattgcacttgtgtcagtagagaatggtgggtggtgggtggggagagaaagttgacaaggcaaatattgacacgttttaggaagcttctactcaaatgaaagaaacaaagggtttgacattgcagagctgcaaaataggaaaatattccttcacattttctgccatataatatgtaaatcctgagcaaagaattccacacagatttatgatcttcgtgccgggaacgggaggtcaagaaaacattacaatgaattactagaaatagtttatggaaccacccttcctctatgtttatctgtccaaattact

SEQ ID NO: 315533 - DNA, 576 bp, Homo sapiens
ttttgctcacacatgaggcatggctttgtargttgtgcagtatacaacgtcatattatctatgagaaggccactcaattgcacacagggcaaaaatcattgattccagtgatttttatgacagacaaaagtaacatctcagttctaacaaaaccagaaaagggtctcaatgtagggattccatgacagatctttattttagccccagacacccactctctgtccgtctccacccatccccaccctgctctctgcccagggaagttgacttctttgtcctacaaaacaaaattttcatgtcctctgtcttcttgttggcatttagtcagtgaagagccgggagattgggaaggtgggaggacagtgaggtcagagtagctatttccctgtctcaatccctctcaagacagccaacctctgtgactctattcttctggattcttgttttaattcatatatttctctttaggactgactaatagactaaggggtatttgtcttttgtcccacactcacagatttataaataatgcctttgcaaatgagcattctggatcttcttccgttttgaaggtgt

SEQ ID NO: 315534 - DNA, 576 bp, Homo sapiens
ttttgctcacacatgaggcatggctttgtaagttgtgcagtatacaacgtcatattatctatgagaaggccactcaattgcacacagggcaaaaatcattgattccagtgatttttatgacagacaaaagtaacatctcagttctaacaaaaccagaaaagggtctcaatgtagggattccatgacagatctttattttagccccagacacccactctctgtccgtctccacccatccccaccctgctctctgcccagggaagttgacttctttstcctacaaaacaaaattttcatgtcctctgtcttcttgttggcatttagtcagtgaagagccgggagattgggaaggtgggaggacagtgaggtcagagtagctatttccctgtctcaatccctctcaagacagccaacctctgtgactctattcttctggattcttgttttaattcatatatttctctttaggactgactaatagactaaggggtatttgtcttttgtcccacactcacagatttataaataatgcctttgcaaatgagcattctggatcttcttccgttttgaaggtgt

SEQ ID NO: 315535 - DNA, 455 bp, Homo sapiens
ctgttatgttttcaaggtttatataatttatcttctattatttatgtataaccaagacctttgggttttattcataggtggattacaaaaagtgaagaccaataacagtatttataatataatggcatacaatacttcagaacaaagttgcatgaaagaaaaaagtacaagtaagcttaagctactaaatataagccactaaagggaaaatattctcagcattaaggtcaaattaattctgttttcagataatcaattgctcaaaatcatgagtgtgyttgtttctccaccttgaactgcaaatctagttatatataattttaaatggaagataattaaaaataatcatatagtcatcaatatattatacacaaatatagcattatttatgttaaactttcaatgaatttattaatcctaggaaaaactgataatgagaatgaaatcacagcttc

SEQ ID NO: 315536 - DNA, 455 bp, Homo sapiens
ctgttatgttttcaaggtttatataatttatcttctattatttatgtataaccaagacctttgggttttattcataggtggattacaaaaagtgaagaccaataacagtatttataatataatggcatacaatacttcagaacaaagttgcatgaaagaaaaaagtacaagtaagcttaagctactaaatataagccactaaagggaaaatattctcagcattaaggtcaaattaattctgttttcagataatcaattgctcaaaatcatgagtgtgcttgtttctccaccttgaactgcaaatctagttatatataattttaaatggaagataattaaaaataatcatatagtcatcaatatattatacacaaatatagcattatttatgttaaactttcaatgaatktattaatcctaggaaaaactgataatgagaatgaaatcacagcttc

SEQ ID NO: 315537 - DNA, 477 bp, Homo sapiens
cagattttattgtgagattggagcaattcagtcccatcttcagtcttcacttctaattctagttctcttgttatttccaccacaagagaattggtaatcacttcctccaccaaagtgttgaacccctcaaagttatccatgagagttctttacttcaactgcgaatgttgatattttgaccttctcccataaatcatgctctcaatggcatctrttatagaatggtgaaccttttgcaaaaggctttcaatttactttgcccagatcagaagctaagaattgacttctcctctttaggtatgaaatttctatctagtgtcttcttccagtcaaaagctgtttcatatacaatgaaaatctattttttgatgtagccaccttcatctattattttagctacatctttgggaaaacttgctgcagcttctacagcagcacttgttgcttcaccttgcactcttatgttatggagatggc

SEQ ID NO: 315538 - DNA, 477 bp, Homo sapiens
cagattttattgtgagattggagcaattcagtcccatcttcagtcttcacttctaattctagttctcttgttatttccaccacaagagaattggtaatcacttcctccaccaaagtgttgaacccctcaaagttatccatgagagttctttacttcaactgcgaatgttgatattttgaccttctcccataaatcatgctctcaatggcatctgttatagaatggtgaaccttttscaaaaggctttcaatttactttgcccagatcagaagctaagaattgacttctcctctttaggtatgaaatttctatctagtgtcttcttccagtcaaaagctgtttcatatacaatgaaaatctattttttgatgtagccaccttcatctattattttagctacatctttgggaaaacttgctgcagcttctacagcagcacttgttgcttcaccttgcactcttatgttatggagatggc

SEQ ID NO: 315539 - DNA, 296 bp, Homo sapiens
gttccatatacccttcccagttgctgctgtgttctgcccctctgtgtgtgagctgaaccagtatcctgcttcctggaaaaacagtaccttggctgctcagagcagtcatgcctccctggagcctaagcagaagcatgccctgcatcctgsggaaatggtgcctgggccacccagagtggtcatgcccccagtccttagctgaagtgacacattgcccctggggaattggtgcctaggctgagtagctgtacatatcaagccttagctatattagtaccctgcatcccagggaaaca

SEQ ID NO: 315540 - DNA, 625 bp, Homo sapiens
ccaaaaacctctccagctgctgtcacgctctgctccacaggacttgagctgaagctatgtactacctcccagggaaacagtgctttggtgaagtcgttccatatacccttcccagttgctgctgtgttctgcccctctgtgtgtgagctgaaccagtatcctgcttcctggaaaaacagtaccttggctgctcagagcagtcatgcctccctggagcctaagcagaagcatgccctgcatcctggggaaatggtgcctgggccacccagagtggtcatgcccccagtccttagctgaagtgacacattgcccctggggaattggtgcctaggctgagtagctgtacatatcaagscttagctatattagtaccctgcatcccagggaaacagagcagtgcctgagcttagacaccatgctctggaggccaaacaactcaagtaccctactctcctggagctggactagccccctagggcatgagctgctgagacacccctcattcccaggaagtagagtcatcactgtgctgctccctgtcccccagggcccaaacaacagctgtgatccaccattctggagtctgcactgtcactacacctgcctcacagagtctgggatactc

SEQ ID NO: 315541 - DNA, 615 bp, Homo sapiens
atttacataaacagaacatagacaaagaaaggaatgacaatatctgtatgtaacatgagaaatcttcgtatggttacatgactgatcaggagtttgtcaagtgatgatgcaagtcgggaaraaaataacacctagaagaaaaagcataaacctgtcagcaggcatggcagatccactgaataacagatcttgaaaaggggcagaatgtggtctaaaggaactgtggagtgccgaagaagaggcatgaagttgcaggaagcaacgtggttccacccttctgaactactcttgcttggtttgccaaatctgatggcaaactttctcaaaatgcaaaggaaacattttacttggatggatgaatggatagacagatagatagatagatagataaatagatagatagatagggtgttggaatctcaaatacatagttttgtcctcaatatattcctcttttccttgtagtcttttaggaaattactctgaaaagggatcaaaagaagactctttaatcattatcagatatcctacattttggaaaattactgttctttatcctggaagtcactaggccttaattttgcacccaaattaataataggtaactaatgctat

SEQ ID NO: 315542 - DNA, 595 bp, Homo sapiens
actatatactcttttctatgtttttttctttttagtttcactcagaaaaacaaggctcaatatctatcacatagcagtaagctatttcagtcagattttgattagagattattatagagtttatctattaattcataattcaacaaccacttatatggcaaaatgagaaattattaatgtattttgatatatatatgtgacaaactacacattaaacaaatgcatatatcaacatgcatacagtaacatttgtttatcaagcatttagataaaatttactatgtctaggcactattcaaagtgctttgcaaacattaattcatttarttttcacattaaggctatgaagtggataataattttagagatgaggaaaaggacaagggatatcaaataaccatcacagcagcacagcaggtacagtggcaaagccagacattaaactcagaaatcaaattcagttccagagtttatgtttttagtcacatatccttgttgcctttcacctgagttaaaatattttgagacaataaagtttggattcttagttcttggtctattttactatgttcgcttccttactattacatagagg

SEQ ID NO: 315543 - DNA, 497 bp, Homo sapiens
caaattttaattattcttccctcaccctaaccaagcatcaacaatgtgctacattcatacctataatatttgaagttgccaccactttgggacttgatggaatggatgcaggaaccatcactcttactaaataataaaaaataattaacactaacctaaaacatccaaaactctagtttttcaagtatgctaaatactagacttacttaaacaaggctaggaaaaaatgacaaaaataggttttagtaataaatcatcacttaattatttattagctaatcaaaggggtgtttataatattaatatttatatgtggattaacaacattagtgaagcagccactctaacagaatgtatgagccatgaaatcaycataataccataacccacaattttaacatattttgtaactcaacaaaaatattactggaggcccttgtcatgactaatttattcttttacttaactccaaacaaatgaaatcctggttaatagct

SEQ ID NO: 315544 - DNA, 579 bp, Homo sapiens
gtgtacttctgttactacttttaatttaattttgtagttgtcagagaccatctttatatgattttaatttttacatatttatcaaagcttgttgtatgacccgtattgtgatatgttggtaagcatcctgtgcatgactgaaaagaatatgtctccactattcttgagtgggatcttatataagtgataatttggtcaagttggtggatagtcatgttttatattcatatgcagtttctgtataattgttctataaattrtgaagacaaggtatttacatttattataatgatgtatttatctatttgactttgcagttctgtcagttttttggcacatatgtcagcttgaagaaatgacaactgtattcttataaaattacattttaattctttgtaatagtgtttgctattgaatctcttatgtctgatgcacatatagtaataccaggtttatttgtattgatgtaagcattttatatctttttcaagcctttcttttaaaaacatttgttttgtacatttaaagtggattacttttagataacgtagaatgggtctttactttcttcaatctgaa

SEQ ID NO: 315545 - DNA, 579 bp, Homo sapiens
gtgtacttctgttactacttttaatttaattttgtagttgtcagagaccatctttatatgattttaatttttacatatttatcaaagcttgttgtatgacccgtattgtgatatgttggtaagcatcctgtgcatgactgaaaagaatatgtctccactattcttgagtgggatcttatataagtgataatttggtcaagttggtggatagtcatgttttatattcatatgcagtttctgtataattgttctataaattgtgaagacaagktatttacatttattataatgatgtatttatctatttgactttgcagttctgtcagttttttggcacatatgtcagcttgaagaaatgacaactgtattcttataaaattacattttaattctttgtaatagtgtttgctattgaatctcttatgtctgatgcacatatagtaataccaggtttatttgtattgatgtaagcattttatatctttttcaagcctttcttttaaaaacatttgttttgtacatttaaagtggattacttttagataacgtagaatgggtctttactttcttcaatctgaa

SEQ ID NO: 315546 - DNA, 579 bp, Homo sapiens
gtgtacttctgttactacttttaatttaattttgtagttgtcagagaccatctttatatgattttaatttttacatatttatcaaagcttgttgtatgacccgtattgtgatatgttggtaagcatcctgtgcatgactgaaaagaatatgtctccactattcttgagtgggatcttatataagtgataatttggtcaagttggtggatagtcatgttttatattcatatgcagtttctgtataattgttctataaattgtgaagacaaggtatttacatttatyataatgatgtatttatctatttgactttgcagttctgtcagttttttggcacatatgtcagcttgaagaaatgacaactgtattcttataaaattacattttaattctttgtaatagtgtttgctattgaatctcttatgtctgatgcacatatagtaataccaggtttatttgtattgatgtaagcattttatatctttttcaagcctttcttttaaaaacatttgttttgtacatttaaagtggattacttttagataacgtagaatgggtctttactttcttcaatctgaa

SEQ ID NO: 315547 - DNA, 579 bp, Homo sapiens
gtgtacttctgttactacttttaatttaattttgtagttgtcagagaccatctttatatgattttaatttttacatatttatcaaagcttgttgtatgacccgtattgtgatatgttggtaagcatcctgtgcatgactgaaaagaatatgtctccactattcttgagtgggatcttatataagtgataatttggtcaagttggtggatagtcatgttttatattcatatgcagtttctgtataattgttctataaattgtgaagacaaggtatttacatttattataatgatgtatttatctatttgactttgcagttctgtcagttttttggcacatatgtcwgcttgaagaaatgacaactgtattcttataaaattacattttaattctttgtaatagtgtttgctattgaatctcttatgtctgatgcacatatagtaataccaggtttatttgtattgatgtaagcattttatatctttttcaagcctttcttttaaaaacatttgttttgtacatttaaagtggattacttttagataacgtagaatgggtctttactttcttcaatctgaa

SEQ ID NO: 315548 - DNA, 627 bp, Homo sapiens
gataaagagatatatcaataatagatacagatcaacatcatgcatgtttttacatatgtagtcctacttaaatctgatttctagctctgtacactcagaagagtctagaaccaatgacagtgacactcaggagcaatgagaataattagagactaaatcttaatttttaaatataawtcttcatgaaaaggaatgaaggttacttggagaatttgtaggtagagttaagattaggcttggaaatataagaaaaaatatgccatgataggaaggtgggatgtactcaaaaaatgatggggccgtgtctaaaggacaaattactgtgccaggagtcagcttaaagttgctcccactgtccgaatgagagtaattgattatagctcatagaatgaaataagaatacatctaaacaaacaaatccacaaataaataaaatgagggaagggaaatctcttccttgtagaatggcaaaaaaaaaaaaatgcaggaggaatgatggaattagaaaatcatgattttgtattcaccacaaatttttttgagagtattcttattagtggataacaacataataggtattcatttcaagaggcgtcagattttatactttcacaatgtattatctta

SEQ ID NO: 315549 - DNA, 627 bp, Homo sapiens
gataaagagatatatcaataatagatacagatcaacatcatgcatgtttttacatatgtagtcctacttaaatctgatttctagctctgtacactcagaagagtctagaaccaatgacagtgacactcaggagcaatgagaataattagagactaaatcttaatttttaaatataaatcttcatgaaaaggaatgaaggttacttggagaatttgtaggtagagttaagattaggcttggaaatataagaaaaaatatgccatgataggaaggtgggatgtactcaaaaaatgatggggccgtgtctaaaggacaaattactgtgccaggagtcagcttaaagttgctcccactgtccgaatgagagtaattgattatagctcatagaatgaaataagaatacatctaaacaaacaaatccacaaataaataaaatgagggaagggaaatctcttccttgtagaatggcaaaaaaaaaaaaatgcaggaggaatgatggaattagaaaatcatgattttgtattcaccacaaatttttttgagagtattcttattagtggataacaacataataggtattcatttcaagaggmgtcagattttatactttcacaatgtattatctta

SEQ ID NO: 315550 - DNA, 589 bp, Homo sapiens
aatctataataaaatacagatctcagtaaacctatggcagacccgtgatgttggtgaaattaaattataaaaattttcrtctataaatattgacttaaaatcatatatcaatgattaatcagtgaagtttaaaataccaacaataatatggaatatgatagaaaatagtataaaggtttgtaaagaaatgaaaatagagctactatgtgatccagcaatctctttctggctaccccctaaagaagataaaatcatcaccatgtaaagatatttgcaccttcatgtccattgcagcattgttcacaataggcaagatatgagaaccacctaaaaatctaaatgttcattgacagacaaatggataaagaaaatgtggtgtgtatatatatgcatatatacgtatatatgtaccacatatatgtgtatatatgtatatatatgtatatatgtactacatatatacgtatatatacaacacacacacacacacacacacacatatatatgtggaatgatatggaataatattcacagtttaaaaaaagaagcaaattccattatttgccacaacatgggtggacttggagga

SEQ ID NO: 315551 - DNA, 485 bp, Homo sapiens
ctgacatcaaaataaaaatgaaagtattayaaattactttaaaatcgtcctgtatccttagtaaacactaaaaagtgaatgaaatcagttaatattgcagaatgttattgtaaatgtttagtcaagtttttcttaagaatacctgaatgaacaagaggtatatctacattgaaaataacatgtattagtctattctcaaactgcatgaataaatacccaagactaggtaatttatacagaaaagaggtttaattgactcacagttccacatggctggggagccctcaggaaacttacaattatagcagaaggggaatcaaacatgtccttcctcacatggcagcagcaaggagaagtgctgaggaaaagggggaaaagccccttctaaaaccattagatctcatgagaagtcactgagtatcatgagaacagcatgggggaaattgcctccacagtccagtcacttgccaccagatccctcccac

SEQ ID NO: 315552 - DNA, 485 bp, Homo sapiens
ctgacatcaaaataaaaatgaaagtattataaattactttaaaatcgtcctgtatccttagtaaacactaaaaagtgaatgaaatcagttaatattgcagaatgttattgtaaatgtttagtcaagtttttcttaagaatacctgaatgaacaagaggtatatctamattgaaaataacatgtattagtctattctcaaactgcatgaataaatacccaagactaggtaatttatacagaaaagaggtttaattgactcacagttccacatggctggggagccctcaggaaacttacaattatagcagaaggggaatcaaacatgtccttcctcacatggcagcagcaaggagaagtgctgaggaaaagggggaaaagccccttctaaaaccattagatctcatgagaagtcactgagtatcatgagaacagcatgggggaaattgcctccacagtccagtcacttgccaccagatccctcccac

SEQ ID NO: 315553 - DNA, 447 bp, Homo sapiens
attctatcatataaatcagtttttgtgaatgatgaatgtttatttttcaggatgtcaggtgattgataagtagcgtggtgtatttaggtgaaatatggtgaaaaatatcacattaacagaaatatataatatttaaatttactggtacaccttcacattcttaataataataatgatgttaggagttacactagtattgcatcattctgttaatttaaacaatagccccaaacttatctctgggcctttggtatttttcaaaattgtctagagattccaagatacagccagggtggagaatctattatacaggctaatagattttgcatttgttaaatttgcttttttgtcgttataattgtgtgactgactaccatttgatatagtgagtaaattactgatgyaattgctataactaaatagaattgaaaatataaatagtgaaca

SEQ ID NO: 315554 - DNA, 549 bp, Homo sapiens
ttgacataactactgggatgtgtccaaaccaaaatcttactgaggatgagaggagacacgggcaagaaaaaatgatgagatgcgaaggggacaaatgggcagttggacagagacagttgaattggtataactatgagagagagaaacagagagaaacagcatactttgttttacataattttcaaataatggcagtggcctagaaagaaacctcaatgcaccggtgatgaaacagaaattgactgatgagttaggaatttaggaccaaagacagaaaacttcttrcagtcttgatgtaagcaaaacatttctatgctggagaaaaacaaaacaccttttagggaaatgtagtacatatggaatgtcttttagtgatacttcctttcactaacacacttagacttcaattctacttcaattcttcaattcaatctaattctcctgttctataaaattatatgtgtggcaagaaaaagaattatgtgacatggatgccaaactagggaagataataagaaaaggcaaattgatttctaataaattaatgga

SEQ ID NO: 315555 - DNA, 593 bp, Homo sapiens
attaatattattctcttcctcttttactcctgttgtgtattttgttgtaatatgtaaaatgtatcgattgtttaaaatttcaagttattggctgggcacaatggcttacgcctgtaatcccaacactttgggaggccaaggcgggcagatcatgaggtcagcagagcgagaccatcctggccaacayggtgaaaccccatctttactgaaaatacaaaaattagccgtgcgtggtggtgtgcacctgtagtcccagctactcaggaagctgaggcagcagaattgcttgaacctgggaggcagaggctaatgtgagccaagatcgcgctactgcactccagcctgggtgacacagcaagactctgtctcaaaaaaaaaaaaaaaaaaaaaaaaaaaattcaggtttttttgatgggtttagattacaatgtatttattcttggaaaattttcatgacttcaataacaaaaattctgttgaaaatctcctaataaaaaaacaactttttatttatttttatttttggggttaaaattttaccaagggcatgtttattattatacaactccagcttcatctttatactttaacct

SEQ ID NO: 315556 - DNA, 611 bp, Homo sapiens
ttattattaatgttaataattaatattattctcttcctcttttactcctgttgtgtattttgttgtaatatgtaaaatgtatcgattgtttaaaatttcaagttattggctgggcacaatggcttacgcctgtaatcccaacactttgggaggccaaggcgggcagatcatgaggtcagcagagcgagaccatcctggccaacacggtgaaaccccrtctttactgaaaatacaaaaattagccgtgcgtggtggtgtgcacctgtagtcccagctactcaggaagctgaggcagcagaattgcttgaacctgggaggcagaggctaatgtgagccaagatcgcgctactgcactccagcctgggtgacacagcaagactctgtctcaaaaaaaaaaaaaaaaaaaaaaaaaaaattcaggtttttttgatgggtttagattacaatgtatttattcttggaaaattttcatgacttcaataacaaaaattctgttgaaaatctcctaataaaaaaacaactttttatttatttttatttttggggttaaaattttaccaagggcatgtttattattatacaactccagcttcatctttatactttaacct

SEQ ID NO: 315557 - DNA, 593 bp, Homo sapiens
attaatattattctcttcctcttttactcctgttgtgtattttgttgtaatatgtaaaatgtatcgattgtttaaaatttcaagttattggctgggcacaatggcttacgcctgtaatcccaacactttgggaggccaaggcgggcagatcatgaggtcagcagagcgagaccatcctggccaacacggtgaaaccccatctttactgaaaatacaaaaattasccgtgcgtggtggtgtgcacctgtagtcccagctactcaggaagctgaggcagcagaattgcttgaacctgggaggcagaggctaatgtgagccaagatcgcgctactgcactccagcctgggtgacacagcaagactctgtctcaaaaaaaaaaaaaaaaaaaaaaaaaaaattcaggtttttttgatgggtttagattacaatgtatttattcttggaaaattttcatgacttcaataacaaaaattctgttgaaaatctcctaataaaaaaacaactttttatttatttttatttttggggttaaaattttaccaagggcatgtttattattatacaactccagcttcatctttatactttaacct

SEQ ID NO: 315558 - DNA, 593 bp, Homo sapiens
attaatattattctcttcctcttttactcctgttgtgtattttgttgtaatatgtaaaatgtatcgattgtttaaaatttcaagttattggctgggcacaatggcttacgcctgtaatcccaacactttgggaggccaaggcgggcagatcatgaggtcagcagagcgagaccatcctggccaacacggtgaaaccccatctttactgaaaatacaaaaattagccgtgcgtggtggtgtgcacctgtagtcccagctactcaggaagctgaggcagcagaattgcttgaacctgggaggcagaggctaatgtgagccaagatcgcgctactgcactccagcctgggtgacacagcaagactctgtctcaaaaaaaaaaaaaaaaaaaaaaaaaaaattcaggtttttttgatgggtttagattacaatgtatttattcttggaaaattttcatgacttcaataacaaaaattctgttgaaaatctcctaataaaaaaacaactttttatttatttttatttttggggttaaaattttaccaagkgcatgtttattattatacaactccagcttcatctttatactttaacct

SEQ ID NO: 315559 - DNA, 583 bp, Homo sapiens
ttataaaatgaatgtcttagtcctgtacaaatgggcatgtaatgatgccaaaataataaattaaattgaaaaacagtatacacaatgtgaaccccatcattaaagtagcatatatttattttttaaattcagaaaaataatgkaaacatgtatctataaggacatagttacctctgagaaactgatttacagtaaagactgtaattttgccatatttatgtcatattgattaaatacttttgtagttaatatgtatcataatttttgtaagaaaaataccaatctgtaaaaatattaaatgtctaatttgtccctctactattctcctctcaagatggccttatctagcttcttaagttaatgtatgtctactcttgttcatctgcaccttaacaataccatagaattttagggtgtatatcatgttattattattgagtgaacttatttgacaattccaaatccaaattgtgtaacctggcaattgaggcctccacaatttttttctcaactattgatacatttttttccagttttttaaatgtttgattccagctgaacaaaactacctctgtttccagag

SEQ ID NO: 315560 - DNA, 487 bp, Homo sapiens
ctatgttttccatccttacttgtagctagaggaggtcataggcctacgttatggccagtaaggtatgagtagaagaacttttgagtcttggttttaaaagggttgcacatgcattttcctaycttcatgcctcttactgtttgttaagagatggtgacactgaaatcacctccctgggtccagggaggaaactcatctgttaaaaatggcagaagtatgcttgtagtcccagatatttaccttggatctttacacaagaaagggagaagcttctgtcttgcattttgtaatatctttgttgcagaaatttagcatgtaccttaactaatatgcttctcctattttgaggtctgagtgagaagaaaagacatgaaaacaacagagaaaacgcttcacacataaaactgcctcttgcttccggatgtcactcctttctcgcattgttgctgtctatggttgtctcttctttcatttccatctaagcagc

SEQ ID NO: 315561 - DNA, 272 bp, Homo sapiens
gtaacggaagcaaagtactgaattaaatgttagtgattaatactattatcatttatgaggcctccttagagaaaatgttctctggtctcaatagcagtagcaaaagagtttttccaaaagttgctttatttttactttatggacctcatgagtcttgtaatttactatttcttcattcatgttggatttaatgtggccaatatttagcaaatgtgyttattttattgcttgttttgtctacccttctgtctctggctcctcctattttccta

SEQ ID NO: 315562 - DNA, 502 bp, Homo sapiens
gattttgcccttttgtggcctacatatgcaaaggatgcaaaggyagaccactttaaggtaggcactaaaagaaactgatgggggaagccagtcgattagcatttgcttgccccataccccaggtttagattttgaacataatagtgcctgacatcactgggctgctttcgcatatctcactttgcttgagttaagagtgccaattctaagagaatggtgatcctaataaacgtacattcggaatctcttaagccttgagcagaaaactttaggtggtgataggagggcaattgagtggctatagaagtgccacttgattacactcccatgatctttccttccttctagatttctcttattcatttcctactgcaagtaccttatctggttctcagtgtttaattctccctttttacaactgtttttttcaaaaacaaccacagcgccttccttattttcttccttagggataaagtatgctgaagttttctaaaggaacttt

SEQ ID NO: 315563 - DNA, 502 bp, Homo sapiens
gattttgcccttttgtggcctacatatgcaaaggatgcaaaggtagaccactttaaggtaggcactaaaagaaactgatgggggaagccagtcgattagcatttgcttgccccataccccaggtttagattttgaacataatagtgcctgacatcactgggctgctttcgcatatctcactttgcttgagttaagrgtgccaattctaagagaatggtgatcctaataaacgtacattcggaatctcttaagccttgagcagaaaactttaggtggtgataggagggcaattgagtggctatagaagtgccacttgattacactcccatgatctttccttccttctagatttctcttattcatttcctactgcaagtaccttatctggttctcagtgtttaattctccctttttacaactgtttttttcaaaaacaaccacagcgccttccttattttcttccttagggataaagtatgctgaagttttctaaaggaacttt

SEQ ID NO: 315564 - DNA, 502 bp, Homo sapiens
gattttgcccttttgtggcctacatatgcaaaggatgcaaaggtagaccactttaaggtaggcactaaaagaaactgatgggggaagccagtcgattagcatttgcttgccccataccccaggtttagattttgaacataatagtgcctgacatcactgggctgctttcgcatatctcactttgcttgagttaagagtgccaattctaagagaatggtgatcctaataaacgtacattcggaatctcttaagccttgagcagaaaactttaggtggtgrtaggagggcaattgagtggctatagaagtgccacttgattacactcccatgatctttccttccttctagatttctcttattcatttcctactgcaagtaccttatctggttctcagtgtttaattctccctttttacaactgtttttttcaaaaacaaccacagcgccttccttattttcttccttagggataaagtatgctgaagttttctaaaggaacttt

SEQ ID NO: 315565 - DNA, 502 bp, Homo sapiens
gattttgcccttttgtggcctacatatgcaaaggatgcaaaggtagaccactttaaggtaggcactaaaagaaactgatgggggaagccagtcgattagcatttgcttgccccataccccaggtttagattttgaacataatagtgcctgacatcactgggctgctttcgcatatctcactttgcttgagttaagagtgccaattctaagagaatggtgatcctaataaacgtacattcggaatctcttaagccttgagcagaaaactttaggtggtgataggagggcaattgagtggctatagaagtgccacttgattacactcccatgatctttccttccttctagatttctcttattcatttcctactgcaagtaccttatctggttctcagtgtttaattctccctttttacaactgtttttttcaaaaacaaccacagcgccttccttattttcttccttagggataaagtwtgctgaagttttctaaaggaacttt

SEQ ID NO: 315566 - DNA, 567 bp, Homo sapiens
ttgctccatatcttcatcaacactgcattttaaggcatctcaatttgagccttcttagtggacatgtagtgttaactccttataatttgcatctccttagatgactaatggttttgagcatttttttcatgtaaaatcccattagaaaacaacccaaagatttgaatgaacacttcgccaatgagtatactgtagtccctcattatcagcacaggataacttccaagagtccccatacaaaccgtccctcagtgtccatgggagatttgctctaggcaccctgtgkctagtaaaatctgcaaatgttcaagtcatttatataaaatagcacagtatttgcatataacctatgcactttctctcatatactttaaattatctctaggctacttataatacctaatatataataaatgctatggtaatagttgttgcttggtatagattatgaaaaaaatgacaagaaaaacgtctgtatatatttattacagaggcaaccattgtagacctaactacattttcaagccatggttggttgaatccacagacacagaacctgtggatata

SEQ ID NO: 315567 - DNA, 567 bp, Homo sapiens
ttgctccatatcttcatcaacactgcattttaaggcatctcaatttgagccttcttagtggacatgtagtgttaactccttataatttgcatctccttagatgactaatggttttgagcatttttttcatgtaaaatcccattagaaaacaacccaaagatttgaatgaacacttcgccaatgagtatactgtagtccctcattatcagcacaggataacttccaagagtccccatacaaaccgtccctcagtgtccatgggagatttgctctaggcaccctgtggytagtaaaatctgcaaatgttcaagtcatttatataaaatagcacagtatttgcatataacctatgcactttctctcatatactttaaattatctctaggctacttataatacctaatatataataaatgctatggtaatagttgttgcttggtatagattatgaaaaaaatgacaagaaaaacgtctgtatatatttattacagaggcaaccattgtagacctaactacattttcaagccatggttggttgaatccacagacacagaacctgtggatata

SEQ ID NO: 315568 - DNA, 519 bp, Homo sapiens
gtgcacgctcatcagctgctgcagggtgctaacagttgccaggctacctgcctacatgtaggcattcacagcagtggcagtgacagcatgactcaggggggtggggatgcctgctgcatctgtgcacgtgatcatgttggtggtggtgtcagcatgggtgagggacacggaaagacacaggtctgtgtgcactctctgtgccccctcaggcaggggtgattgctcagggcaagggagggtccattcttctcggtgcctagtttcactcatgtagctgtgtttgcactgrggtagagttctggctgggtctgtgaccccaaaggctctgactgcaatggtcttatgttaggtcaacagggatggcatgcattcccaccacagcactggcaaggcagggcgcatgcaagcagatatatgttttgcaaatattttctcccaattcatatgctaccattttattttgttgattgtttcttttgctgtacagaagctttttagtttgacacagtcctacttacc

SEQ ID NO: 315569 - DNA, 626 bp, Homo sapiens
taggtggtagtttaatgtctatgacgtactgacaggcatgatccagttttctcaaataggtgtcatctcatgacaaataaatgagcttggaggtgtttctcagtatgactgaaggagatcgaaatgcaacacttcccatttgtcttttacatgccacatggatccattttcaacctttttaatgagccttgtatttattaaaatatgataaactaggacccttgtagataatatttcagaaagaggaacaactgctgaattttaaaaccaaatacataatagacaaagaatgtaaaattcctaataaaactccagtttcagggttttgggggtatgtctccaccaagaayagagtgtgctgaatctaatttgctgtatcattgccaaatctgactctggttttatattaattgaaatggatgctttatgaaacaaagacctacattctgaaaattgttttccatgtgatgtgcattaaggaaacttgttccataagcgcatctggtcctggctcatcatgctgtgaggagaatctatgcaccatctcagtgctctaacattaaaactttaagaagaccttgcttccctaaacttattcaaagacaattaatgtcaatattttcaaa

SEQ ID NO: 315570 - DNA, 626 bp, Homo sapiens
taggtggtagtttaatgtctatgacgtactgacaggcatgatccagttttctcaaataggtgtcatctcatgacaaataaatgagcttggaggtgtttctcagtatgactgaaggagatcgaaatgcaacacttcccatttgtcttttacatgccacatggatccattttcaacctttttaatgagccttgtatttattaaaatatgataaactaggacccttgtagataatatttcagaaagaggaacaactgctgaattttaaaaccaaatacataatagacaaagaatgtaaaattcctaataaaactccagtttcagggttttgggggtatgtctccaccaagaacagagtgtgctgaatctaatttgctgtatcattgccaaatctgactctggttttatattaattgaaatggatgctttatgaaacaaagacctacattctgaaaattgttttccatgtgatgtgcattaaggaaacttgttccataagcgcatctggtcctggctcatmatgctgtgaggagaatctatgcaccatctcagtgctctaacattaaaactttaagaagaccttgcttccctaaacttattcaaagacaattaatgtcaatattttcaaa

SEQ ID NO: 315571 - DNA, 502 bp, Homo sapiens
caatatccttttgaagattctgctatttgatgcccatggattatgagcttatttcactctgctgctgagaatgcaaacaattatcagctctgtgtgagctctggaaattattgtatctatttctttcttgtgttctgttgttcttctgttgtcaagcaattccttgtcgcatttgtgcagatcaatattgagccaaagactctaggtgatccctctgaagatctatggaggtctctttctgtgtagctcctatcattttggcattctgcctcaccagttctagctgtgttagtctctctgatcrctgcctcctcaactcagtgagaccgcaaatctcagcttgatttcttctttcccacactaaagcctggaaactgcctgcatgcaataaaatgctgcaatttatagacttgatattgtatatgtgcttactgacagttattttgaatataaaattaatgtatgctgactgcaaacattcagaaaataattttgaaataca

SEQ ID NO: 315572 - DNA, 502 bp, Homo sapiens
caatatccttttgaagattctgctatttgatgcccatggattatgagcttatttcactctgctgctgagaatgcaaacaattatcagctctgtgtgagctctggaaattattgtatctatttctttcttgtgttctgttgttcttctgttgtcaagcaattccttgtcgcatttgtgcagatcaatattgagccaaagactctaggtgatccctctgaagatctatggaggtctctttctgtgtagctcctatcattttggcattctgcctcaccagttctagctgtgttagtctctctgatcactgcctcctcaactcagtgagaccgcaaatctcagcttgatttcttctttcccacactaaagcctggaaactgcctgcatgcaataaaatgcygcaatttatagacttgatattgtatatgtgcttactgacagttattttgaatataaaattaatgtatgctgactgcaaacattcagaaaataattttgaaataca

SEQ ID NO: 315573 - DNA, 619 bp, Homo sapiens
ttaaaaaaaaaaaaagaaaagggctgaattaacacattaaattttttaggctttccttgtaagtatacattgacatctacttatctgatagcagcactgctggttttgagtgagttttgttttgtttccttccagagggaattcagtatggcagtattatctttggaacaaattaagaagayagtaacaaataacagaagaaatacttctatacatatattttccatgggcaataaatagataagtatataattatgaaaaaatatgactcaactatgctttttaaaatttctcaaggtttactggtttgtttttcttattaaaatataatgcactatcactactatctgtcctgggaaaaacaaaccctgaggtttgagtttcctccttcagccaatagagtgatatcaagagtaaacgtggattgaggtcaaactgtttgagccaaaagagagttctgtagtatatctggttattttactaatatatacatattctaggttataatcaagatactcatcaaatattttctaccaaagttttgtatctcaaacaggttctttgatgatttatcatgctgctataggaaatttgaagaaataacaaattgtgtaacaga

SEQ ID NO: 315574 - DNA, 598 bp, Homo sapiens
ggggatgttaaaactcctgaagggagacccttcctggtgaggaagaatgggtcggggtcccacttaaagaagcagtctggacatgaacmatcacagctgctgtgctgtgctgtggagaattgctcctggtccaaactgcctagtcttgctggcactggcagcaggaaaaatggccaaatggagccacagtgatggtggccacccctccctgcccccccagaacttggtcttcttaagcagtctccagcttgctgtgctggtcaggggggattccaagccagtgagttttagcttgtggagttccttgggagtggggcctgctgaatggggacacttggctccctggtttcagcctccttcccaggggtgtggacagatctcctgtgtcactggagttcccagagccagaatatgcagactcctgtgtctcagtgcctgactgagtggctgcccactcaagcaactgccatgagtctgcacagctctgtgcttgggacccaagttcctggtggtgttgggctcatgaagagacctcctgatccaaaggttgcaaagctctgtggggaaagcaaggttttcagggtggagtagcacaatc

SEQ ID NO: 315575 - DNA, 195 bp, Homo sapiens
aaagggacttgtgtttctggccaagatggagtgataaggactggactgactctctggccagaaacaacagcaaaacaaacaaacaaatatcagacaaaatgtacagaacaacggttttcaagacactggacattgracaacaaagaacagtgatctctgagagacaagaaatgaatgagatgaatcctataatag

SEQ ID NO: 315576 - DNA, 578 bp, Homo sapiens
agaatgccccctgaccccaggggctgcctggggaagckcgcggtggacgggaagcgcagggtccgggcaaccctctcgagccattcttttctttccacactactctggctctgcaccacctctccggagccgccagagtctgcgcgaggctgagctggggccaggaccgttcctctacgctggcagagttgggtggaaacttggagacaaacggaatgcggagagcactggggtctgggaaaccagcctcctcgccgctgtctcccccaccgcatgccacggctgtctccaggtctcagacggaaatctgggcacctactcccctcacccctacctccaccccataggggaattcaccatctgaaccggggtctcggagaacgtgacctctcaccttccagggaggtcgccgggaggtgcttggggtgggtggaagcgtgcagtggcctctgctcatattttctggaaacccctccgttccctgggtggttttagacgtgcgaaccgcttgttttgtttccaaaagcaaaagatgttccgttgcaggcgggcccggctgggcgctgggcactgggcgc

SEQ ID NO: 315577 - DNA, 533 bp, Homo sapiens
gtgggtattgggccctgtggccatggagggatgggctggatgcaaatgctacctatacctctgggaaaagcacctcatgttggaggtcgcacagtgggaagtgctctgtgatgcatactcycagggtggtcctggctggcataaagcaggagagctgccacagatatgccccaataaagaggcatggtagtgagccaccagctcactggctacatatcttccaattgccacaacaaatatgaaagaggagctctgtgaagaaaggactaagctcccttattcttcctgctgctgggtcttgaatctgacaaagtgatgctagagtaaatttaagccattatgtcctcagaatgataaaatattaaaatggtaactatgcaatttctgagaaaaatctatctctactccaaatactagatcaacctcctttgaaaggttgggaaaaacatatagatcatagccattggaaaagctatagcttcaagaaaagaacggatatgaggataaaacaatgctctttcaactggtattga

SEQ ID NO: 315578 - DNA, 498 bp, Homo sapiens
atgaacaccaaaaaagccataataaaatgctagcaaaaaaagtcaacgtattaaaagaacgatgcaccaataagaaggggactttatttcattaacaaaccattcaatgtttaaaaaactattaataggatttaccacagtaattgcttaaaggcagaaaaataaaacagtcttcctgataaaatctgaaaagatggtaacattyaatataaattatcggttaaaatccctgttgagaatcaagaaatattagcactagcattgccattaaattcagaaaaagagaaagaaaacgatgttcattatcacatctattatttggcatgctttggaaggcaataaagaaaattaagaacttttaggaaaggcagaagaggcatattatctcttttttttctgcttttgctcatgctgtgattatttactaacgtgaaaagctaaaataattaattggaaaaatattagggaaactcaaaaacacagttcagtaagggaacc

SEQ ID NO: 315579 - DNA, 638 bp, Homo sapiens
ctcgctggcgttccaggcaccactggggtatgagaagaaactcctgcagctagctcagtgtctgcccaaatagccacccagttttgtgctcgaaacccacgaccctggtggcataggcrctggaggaagactcctggtctgtgagttgcgaagaccatgggaaaagcgtagtatctgggccagcatgaactgttcctcatggcacagtccctcacggcttcccatggctagggaagggaggtccccagccccttgctcttcctagatgaggtgatgccccaccctgcttctgcttgccctccgtgggctgcacccactgtctaactagtcccaatgagatgagacaggtacctcagttggaaatgcagaaatcacctgccttctgcattgatctccctgggagctgcagaccagagaacctcctatttggccatcttgccagctgctgtatattcacatttcttaaaggatgtgcaatcatcaccatggtcaatttgaaaacatattcatcttcttaaaaggaaatatcgtaccatttagctagtacaacccgacattccctttccaactccctaggcctaaacaaccactaatctacttttttttctctatggatatctctgttctgggcattgtgt

SEQ ID NO: 315580 - DNA, 561 bp, Homo sapiens
gtcctgatttcaccacagtgcaatgtatcaatgaagtgaaatcgcacttgtaccccatgaatatatacacattttttacaaaattaaaatgttaacaaaagccacaagcttcggcgtcagacagccctggttcacatgtctttgctacttgctaaacctgaccagaggcaagtwataaactaatggtaataatacccatctttccaggctattgggtagataattatgtgcctagtagatgctgagtgttcagttaagtattaggtctcgtaatattgtaacatgggtgattttcatgactttagaactgaatcctcatgtaagatgtgggctctgctatactctcagctgaggaatatgcaccacatcacagaaacattgagttgcagccacaaatgtggatgagtgctgacctcgcgctgtggcctgagttgtggatataaaatcattacttggatgtccttgttaaacccagaccctgctcccacaggttgaggctttatatgtggttctatttacctgtgttaactgagtctttttacgtcttgggaaagtgggtaa

SEQ ID NO: 315581 - DNA, 530 bp, Homo sapiens
taacaatcatgacccaaggaactgatagcagataagttgtttttactcaagtgttttattctaacccttctctgtttggggggactccatgagttccatgtagaatgtaaggctccactgtcaactgagttggtgtaattttcctggagactaagctgaaaatacctattagattcttcaaaatatacacaccctctgttttggcaacatccttaccagaaayttaagatttggatatactttttaaaagtcaccaatattcatgtacaaggatgtccacagaaatattttgattaataataaaaagtagacacaaccaaaatatctatcaatggagggctggtaaataaaggtttgtacaacaatacaataaaatactatgcagaattttgaaagaataaaatagtgttcactaaaaagcatgagttatatgctggtatagaatggtatagaatgatctcaaatttttatcattaaatgaaaaggtgcagaagtgagtagtatgatcacttttgtgtacgtttaaaaaa

SEQ ID NO: 315582 - DNA, 561 bp, Homo sapiens
gtcctgatttcaccacagtgcaatgtatcaatgaagtgaaatcgcacttgtaccccatgaatatatacacattttttacaaaattaaaatgttaacaaaagccacaagcttcggcgtcagacagccctggttcacatgtctttgctacttgctaaacctgaccagaggcaagttataaactaatggtaataatacccatctttccaggctattgggtagataattatgtgcctagtagatgctgagtgttcagttaagtattaggtctcgtaatattgtaacatgggtgattttcatgactttagaactgaatcctcatgtaagatgtgggctctgctatactctcagctgaggaatatgcaccacatcacagaaacattgagttgcagccacaaatgtggatgagtgctgaccycgcgctgtggcctgagttgtggatataaaatcattacttggatgtccttgttaaacccagaccctgctcccacaggttgaggctttatatgtggttctatttacctgtgttaactgagtctttttacgtcttgggaaagtgggtaa

SEQ ID NO: 315583 - DNA, 567 bp, Homo sapiens
aaacctacctgtctctttccaagggtggttgggtatggaaacccctggaaatctatatgccactctacaagtgagtggtggcattacctaaagccaatggaagtgaagtgacattttaccattattggagtcacgccatggtaaaaggattaagctccatgcagaccacaggggcctatggtccccctaacagagttgccacataccaggtgaagcaagcaatgcctatgggcactgccaaacagacaaagaaatgtgtggagagggaaaaagaaagtgaggaataaggatgcagccgacagtatgactgggaagccacgctgcagagggggaagatgatcaaaggcaagctccatttccctgggtgccccaaggttgcatttgaagcccaaagaaggctaaagggcaytggatatgcaggtgggtcaggccaccctccctggcccaccaatgcagcccttcggtgttggaaagagaagaaaagcctccatcttgggccctgtggagcagccacgctcaaactgatggccccagctcacatgacagacagagtccccccacaaggag

SEQ ID NO: 315584 - DNA, 567 bp, Homo sapiens
aaacctacctgtctctttccaagggtggttgggtatggaaacccctggaaatctatatgccactctacaagtgagtggtggcattacctaaagccaatggaagtgaagtgacattttaccattattggagtcacgccatggtaaaaggattaagctccatgcagaccacaggggcctatggtccccctaacagagttgccacataccaggtgaagcaagcaatgcctatgggcactgccaaacagacaaagaaatgtgtggagagggaaaaagaaagtgaggaataaggatgcagccgacagtatgactgggaagccacgctgcagagggggaagatgatcaaaggcaagctccatttccctgggtgccccaaggttgcatttgaagcccaaagaaggctaaagggcattggatatgcaggtgggtcaggccaccctccctggcccaccaatgcagcccttcggtgttggaaagagaagaaaagcctccatcttgggccctgtggagcagccacgctcaaactgatggccccagctcacrtgacagacagagtccccccacaaggag

SEQ ID NO: 315585 - DNA, 615 bp, Homo sapiens
gatcctttaaagcaaaactcagaaaccacctacttcatgattcctgactgcctcagagagaatacagtcctcctttccagcccattcrgattacacacaaaatgacaagaatcacaccagttatcctttttaccttctctattagattgattatatttcttcatatccttcccataacccagacgcctagtaaataatagaaaattaaggtttggatgcaaacaaaaggctttccgagacaggaggttggtacatttccatcagcataatcctttaataagtgactatattagcattcggttcaaatgctgagacagtgctctggctcagccttaacttaggggtatcaaaaccacacccggtggggtccctagcagaagccgaccagccggagggtgttggggtagctcttgcgcatgctcatgcatttttcctggtcgatgtacagggaattggctttgacagccaggtcatactcgagggtggctttgatgtggaccagcgactgcagggtgtcctctgcatccctcaggcgctgctgcagggtctggatggtgtcgtcaacctcgtgtacctcgttaacaaggctgcagcataaaggaatcagcatggtta

SEQ ID NO: 315586 - DNA, 580 bp, Homo sapiens
ttgctgctggaaatatgttttttatacagggttagactatcccccaagcacccttatatctttctccttcctttcatcatcaaacatttaaatgtttgatcttggacttccaaacatttaagtgtttgataaggaaaggaaggagaaagatgtctttattttctcgtcaccactcattacttaccctcttgcaacctagctttagttcccatccctttaaataaattgctttcttgatgttcagtgcttttatttatttatttattttttaacacagggtcttgctctgtcacccaggctggagtgcagtattgcaatcacaactcactgcagccttgacctctcagactcaagagattttcctccttcagcctcctgagtagctgggaccacaggtgtgtgccaccatgcctagataatttattttttattttttgtggagatggggtctcaccatgttgcccaggctgcactggtaacttcttaattgctaagccactagctttggctctattcttctcaacttggaaaattctatrgcatttggtacccttggtctcctgttttctccaaactcact

SEQ ID NO: 315587 - DNA, 533 bp, Homo sapiens
cgatctgagaggaataccacccatgagtttcagagctccatgagggagacagaggaccccaaaagtggggggtcagtggtgtcttttgtgtgtccttcaaggtgtcccagggtcatcaaaaatctcatttaggttcttcatgtgatagaactctgatattccccctcagtaatttttaatttgctggccgctaaatggaggggaacatatttcaaatatagaagtcattccaattcaaagaattcatcatctggtcattaacaattaggayctccaacggtgtatttattgcagtagcagctcaattcgataagcctcttcatggaaagaccaggaggtaatcttctaggtttagaataaatttttagcgtgaaagcaagaggcattctcaaagagggtgcagaagatgcagctcttaagatcccccaaaattcactttcaaaaatagattaagatagtgtaaagacctgtattagcataggcagttaagaatcacatttgcagtcaggtgcggtgtctcacatctgtaatcc

SEQ ID NO: 315588 - DNA, 568 bp, Homo sapiens
tgcctattataaatagtgctgctatgaacacaggcatacaaatatctttttgagactggctttcaattcttttgcttatattccctgacatgaaattactggatcagatagtggttctatgtttaattttttgaggaacttccatattgttttctgtagcagcagttgtgtcattttacaatctcactgatagcacaaaagggttccaatttctccatatgcttgcaaaccattgttcttttctttttttttaatagcactcatcctattgggtgttaggtaataacttattctggttttgatttgcatttctctgatgattagtgctgttgaggattttttaaaatatatttttggccatttgtgtatcatttttagaaaaatatccattcaaacattttgtctatttttttcttttttgagacagaatctcactcttgtcacccaggctgtagtgcagtggcgtgatcttggctcaccgcaacctctgtctccygggttcaagcgattctcctgcctcagcctcctgagtagctgggattacaggtgcctggcaccatgcccggct

SEQ ID NO: 315589 - DNA, 568 bp, Homo sapiens
tgcctattataaatagtgctgctatgaacacaggcatacaaatatctttttgagactggctttcaattcttttgcttatattccctgacatgaaattactggatcagatagtggttctatgtttaattttttgaggaacttccatattgttttctgtagcagcagttgtgtcattttacaatctcactgatagcacaaaagggttccaatttctccatatgcttgcaaaccattgttcttttctttttttttaatagcactcatcctattgggtgttaggtaataacttattctggttttgatttgcatttctctgatgattagtgctgttgaggattttttaaaatatatttttggccatttgtgtatcatttttagaaaaatatccattcaaacattttgtctatttttttcttttttgagacagaatctcactcttgtcacccaggctgtagtgcagtggcgtgatcttggctcaccgcaacctctgtctcctgggttsaagcgattctcctgcctcagcctcctgagtagctgggattacaggtgcctggcaccatgcccggct

SEQ ID NO: 315590 - DNA, 564 bp, Homo sapiens
gaagcaagtgagtccttgggattggaagtatcctttgactttaacctttccattactttgtataaaatatttttcaagagccattctttgccttcataatttataagaataccagtgaaaaacacttgttttatttaaataattttacttttggttasaactgcaggtgttttaggaaatggttttggaagacttgtcttttaaagtcaattcaaaaacttacattctgctgcgtgttgggaaatcattaggctgatattctgctagccaatagagtatttaatagaagtatatctaaacacatgtttcttgaagatatattcgaaggcaggaaatttattttattttattttactttaagttttggtatacatgtgtagaacgtgcaggtttgttacataggtatacatgtgccatggtggtttgctgcacctgtcaacccatcatctaggttttaagccccggatgcattaggtatttgtcctaatgctctccctcccattgctcctcaccccctgacagtccccagtgtgtgatgttcccctccctgtgtctatgtgttct

SEQ ID NO: 315591 - DNA, 557 bp, Homo sapiens
tatatcctacatgcatggtttcataggtgcttattctgtattcttctttatggatagaacacttccttttgtttctcacaccattggatgtactctgaaactagaaaaaaataatgtctacataataagtagacacctgaagaaatgcaagtccccaatcctttaaataagcagtcttttgaacaatgatattttgcagaaattctggaaataaatgacaatacatgtcctctttgacttatgatggtgttatatcctgataaagttgaaaatgcctttaatrcacctaacctacagagcatcaaatctcagccggtatactttaaacatgctcagaacactttacattggcttacagttggtcaaaatcatctaacacaaagccttatttatagtaaagtgttgaatactgtaaacaaatgggtgttttgtagacatgatgggatgcaaacacacaaaacactagattcaaataacactggtggcccagcatggtggctcacacctataatcccaacactttggaaggctaaggcaggtggatcacttgagcctat

SEQ ID NO: 315592 - DNA, 566 bp, Homo sapiens
tgcaagtcacagaaacagtgattgatcacattggggccacagaatggcaaactcagggcaagaaaaatctgaactaaagaatgcacacaggatcccacccaggccacagccatcaaaacaccacagacccactggcttatgatggtcatgtagtgcaggggcttacagatgtccacatagcggtcaacagccgtgaggatgaggatgaagatctccaggcagccaaagacatgggatgaaaagacttggatcatgcactcgctgaaggagatagttgtcttcttcaaaagggcatccacaatcattctaggggctatggaagtagagaggcaagtatcagataaagataagtagaaaaggaagaagaacattgggttcttaagtgcctggctggycttgacactaataatgattagcaaattacccaacagtgttcccaagtagagacgcaaaaaaataacaaacactattttcttccaaaaaggatcctgtgtcaatccaagcagaatgaactcagtcacattattattcagttgcatggttttcgtgagtgaggtgaaggggca

SEQ ID NO: 315593 - DNA, 588 bp, Homo sapiens
cagaacaacattagaaatggggtgggaagagaataaattagccacccttaagcatgcccagaggaagataaagtcaacatgatattaaaaacattaacaaaaaagacaatttaattattgctaatatgcaacctctacaggtgcatgtaacaaatatccaggacgaagggggacattggggaggaagtgaagcattaaggagaaagggtaatagagggccctctgttaacagaggggagaggcagcagacggtcgggagcttatatgaatggaaaataataatgatgaatatctgaaaagtgctctccaaatattattatgcttgttacttcctgtaattcttgcgaaagtgctggaggcagacacaaaattcttggataggttgtagagcacagaggttagtggtctgtgctgtgaactttatggcattactcacccacaggcttaatcagtttcactagttacccaaaactatccactgcagcagaaagtaaggataactatagtgtctatctattcatatggcttttrtgataattaaaataaaaaatcatgaaaatctttgcacagtaccctgaaatagtgagt

SEQ ID NO: 315594 - DNA, 566 bp, Homo sapiens
tgcaagtcacagaaacagtgattgatcacattggggccacagaatggcaaactcagggcaagaaaaatctgaactaaagaatgcacacaggatcccacccaggccacagccatcaaaacaccacagacccactggcttatgatggtcatgtagtgcaggggcttacagatgtccacatagcggtcaacagccgtgaggatgaggatgaagatctccaggcagccaaagacatgggatgaaaagacttggatcatgcactcgctgaaggagatagttgtcttcttcaaaagggcatccacaatcattctaggggctatggaagtagagaggcaagtatcagataaagataagtagaaaaggaagaagaacattgggttcttaagtgcctggctggccttgacactaataatgattagcaaattacccaacagtgttcccaagtagagacgcaaaaaaataacaaacactattttcttccaaaaaggatcctrtgtcaatccaagcagaatgaactcagtcacattattattcagttgcatggttttcgtgagtgaggtgaaggggca

SEQ ID NO: 315595 - DNA, 605 bp, Homo sapiens
aagtgtgaaatggtctacctgcaaaaaaaaaaggaattaatttatgctgtgctatgtgatgttatggaatattttatgcaaaattaaatatttcttattggatacattctggtggcggtttcttaataagccacttcaacactttcttccaaattttaatgaccacttcatagggttattatgattctcaaatatgcttatgaacatgataccttgctatagcattcttcaagtacaagccttggttagctttggcatcattctgattaatttttccaattcaaggaaggyaaatgtaagaggtaatgatctattttaatattaaatttcattttataattttcaataaatactgagggccattttttatgttgtgtatcactcaacatttaagatatatttagctgctctttgagttttacaatatgaagtcctatgccaccaccaccctgtagataatatcttattaatacatagtttatacattccatattcattatatatatttatatagatgttatttattaataccttgtatgctccacttctctgcaaaatttctcccagatattccagattataaaaagtaaacgaaaacacttata

SEQ ID NO: 315596 - DNA, 605 bp, Homo sapiens
aagtgtgaaatggtctacctgcaaaaaaaaaaggaattaatttatgctgtgctatgtgatgttatggaatattttatgcaaaattaaatatttcttattggatacattctggtggcggtttcttaataagccacttcaacactttcttccaaattttaatgaccacttcatagggttattatgattctcaaatatgcttatgaacatgataccttgctatagcattcttcaagtacaagccttggttagctttggcatcattctgattaatttttccaattcaaggaaggtaaatgtaagaggtaatgatcyattttaatattaaatttcattttataattttcaataaatactgagggccattttttatgttgtgtatcactcaacatttaagatatatttagctgctctttgagttttacaatatgaagtcctatgccaccaccaccctgtagataatatcttattaatacatagtttatacattccatattcattatatatatttatatagatgttatttattaataccttgtatgctccacttctctgcaaaatttctcccagatattccagattataaaaagtaaacgaaaacacttata

SEQ ID NO: 315597 - DNA, 582 bp, Homo sapiens
taggcattcatcagcccgtcttaaatggggacttcaaataatgagactgaattcattcttttgggcattacaaaaaatccagaactaaggaaaatattctctgctttgtttctagccatgtatgtgaccacagtgttgggaaatctattcattgtggtgactctggctgcaagttggagtctgagatcacctakgtacttttcccttacttccttgtctctcatgggtgccacctactcttccatcactgcccctaagatgactgtggactctttgagaacactaccatttcccttgaaggctgcatgacccagctctttgcagagcatttctctgatggtgtagcgatcatccttctcactgtgatggtctgtgactgctatgaggccatcagtaagcccctgcatgacacaaccatcatgagtccacgggtgtgctgctgttggtggtagaagcttgggtggggggattaacacatgccacaatacagctttttttttttcatatatcaaatacccttctgtggtcccaatattattgaccattttatatgtgatttgtttccattgttaaaacttgctt

SEQ ID NO: 315598 - DNA, 575 bp, Homo sapiens
aagctttttgtcactctattccatgggattacccagacatcctcagaagctctggctgctgcacctatgaagttatcccaggctctgtggccaggatcagagtagcaggagtacagcttgacaagcaaatgtcttccagaggctagttcattatttttttcatgggattgtactacattggttactagaattgtattgacatgatgattctgggtgacataggacagggacaaagttctgggatataaatgagcccctaccaacccttggccttggaaatgtgtgtggggcttagtcagcttttatctgttcatacttcgatgcagtgccagcatctatggccctgcaggtggtaagagtgatggcagacatcttttatcttgtgcatccttaatgctggcacacaaaaagrccatctcgtctcttccgcaggctctatgctatgtgtcaggaagttctttatgggtggctaggcttatccatttcaacggctttaacgacctttgctctggagtgttgactaacctgtccaatggttgccctttcttgcttcctttggtagcaaggatgttaac

SEQ ID NO: 315599 - DNA, 588 bp, Homo sapiens
tatgttagcttattagtttcatgtgtgcaaatgagttatccccaaactccatctcctttttgaactgtttagatggtggaaaatatggctgtgtgagttttaaacttgatgtttaattttaaatattcttacaataatacaggatatayagagaaaatagagtctctgtcattttatatgtttccttctagatcataaaattatattaaaaatatctatccaattggcagagttatattttttctgttttctcacttaaaatattgtaaaaatacctcaacttctatgtcctcatgtcattaattagtattttatttatagcaaatgtgatattaatttgtgatagtctaatttagatgaatatcttcctatgattgtatattttagatatttctcaattttcacattgaaaattgagatgacattgcaccatcttttattataaaactttcccatctcatttcacttttggaatatgttcttagagttgaggttactggtataaataaaataaacatgtttataattctgaagctatttactaatatgttttacaaaaggatgacatgaattaagcagttttattgt

SEQ ID NO: 315600 - DNA, 588 bp, Homo sapiens
tatgttagcttattagtttcatgtgtgcaaatgagttatccccaaactccatctcctttttgaactgtttagatggtggaaaatatggctgtgtgagttttaaacttgatgtttaattttaaatattcttacaataatacaggatatacagagaaaatagagtctctgtcattttatatgtttccttctagatcataaaattatattaaaaatatctatccaattggcagagttatattttttctgttttctcacttaaaatattgtaaaaatacctcaacttctatgtcctcatgtcattaattagtattttatttatagcaaatgtgatattaatttgtgatartctaatttagatgaatatcttcctatgattgtatattttagatatttctcaattttcacattgaaaattgagatgacattgcaccatcttttattataaaactttcccatctcatttcacttttggaatatgttcttagagttgaggttactggtataaataaaataaacatgtttataattctgaagctatttactaatatgttttacaaaaggatgacatgaattaagcagttttattgt

SEQ ID NO: 315601 - DNA, 598 bp, Homo sapiens
catttcacttttggaatatgttcttagagttgaggttactggtataaataaaataaacatgtttataattctgaagctatttactaatatgttttacaaaaggatgacatgaattaagcagttttattgtaattttagaatggatgtaacttaaaaatagcatgattttgaacacacgtattatactcttatgatcgattcaattttccagctcactttgtgtatgtagatgctgcttaaaaataatgttgacataaagatttcatatcttccttttaatttatactttgcaaagtacattcacaataactgtctattggactctcatgggtcaggaagcttcaggtattgctacctattttatagcagaggatgctgaaasatagcgctttgttcatgatacatggctagtagatgaagcagagattgctatctttttgatagcagaaaaaaattactttttaattaacttttcattagaagtaattttagattaagagaaaggttgtgaagatagtatagagagcttctgtatactactcacttagtttcccttaatattttcttcttacactactatttgtgaagactatgaaat

SEQ ID NO: 315602 - DNA, 507 bp, Homo sapiens
acagttgaagacttcaatgcccttctctcagtaattgatagaaagtagaaaataattcagtaaatccgaagattatttcaacagcattactaagtaacttgacccaactgacatctataaaacatttcatatcaacaacagcagaatgyacattctttatgagtgaacatggaacatacaccaaaatgtactatattctcagtgatttaacaagccttaacaagtcataccataaactttcaacctcaatagacttaaactagaaattaataacacaaaaatatctgaaagtgttctaatatttagaaattaaacaatatccataaataattcatgggtgaaagtgaaaatttctagaaagaatttttaaaaatatttgaaactaaatgaaaactcatcatcgcaaattagcagcatgcaacaataacagcactttgaggaacatttatagtactgaaggtatacattttaaaaatgaaaaatcccaataacacaagcttctaccta

SEQ ID NO: 315603 - DNA, 507 bp, Homo sapiens
acagttgaagacttcaatgcccttctctcagtaattgatagaaagtagaaaataattcagtaaatccgaagattatttcaacagcattactaagtaacttgacccaactgacatctataaaacatttcatatcaacaacagcagaatgcacattctttatgagtgaacatggaacatacaccaaaatgtactatattctcagtgatttaacaagccttaacaagtcataccataaactttcaacctcaatagacttaaactagaaattaataacacaaaaatatctgaaagtgttctaatatttagaaattaaacaatatccataaataattcatgggtgaaagtgaaaatttctagaaagaatttttaaaaatatttgaaactaaatgaaaactcatcatcscaaattagcagcatgcaacaataacagcactttgaggaacatttatagtactgaaggtatacattttaaaaatgaaaaatcccaataacacaagcttctaccta

SEQ ID NO: 315604 - DNA, 507 bp, Homo sapiens
acagttgaagacttcaatgcccttctctcagtaattgatagaaagtagaaaataattcagtaaatccgaagattatttcaacagcattactaagtaacttgacccaactgacatctataaaacatttcatatcaacaacagcagaatgcacattctttatgagtgaacatggaacatacaccaaaatgtactatattctcagtgatttaacaagccttaacaagtcataccataaactttcaacctcaatagacttaaactagaaattaataacacaaaaatatctgaaagtgttctaatatttagaaattaaacaatatccataaataattcatgggtgaaagtgaaaatttctagaaagaatttttaaaaatatttgaaactaaatgaaaactcatcatcgcaaattagcagcatgcaacaatarcagcactttgaggaacatttatagtactgaaggtatacattttaaaaatgaaaaatcccaataacacaagcttctaccta

SEQ ID NO: 315605 - DNA, 531 bp, Homo sapiens
tcacaataaaaattccagcaagctttttgttttaatagatatcaacaagttgattctgaaattcacacaaaaaggcaaaggaactggaagagctaacataattccagaaaacaacattggagggtccagatgaccaaatttccagacttaytaaaagttatagtaatcaaggcagtgtgttattggtgacaatgtagatacataaatcaaaatacaggacccagaaataggacaataaatatagataactgacttttgacaaaagagagaatgtaatttgatagagaaaggataagctttttatcaaataatattagaaaagctgaatgttcatatgcaaaaatgagcctagatccatgcctcacagcatatactatatagattaaaatgtgttaaagacctaaaagtactctaaacttgcctttaaagaacttgggaagatatacttagatgctttctgttaagggggaagagaatccctggagtaggagagtgttttgagtaaacaaatacagctagaaaaatgaatgg

SEQ ID NO: 315606 - DNA, 573 bp, Homo sapiens
actccaaaaaaatttgcatctgtactgaacacgttatagacttttgtcttgctcttctctaaccagtataatataacaattatttacacagcatttacattttattaggtattataagtaatytaaagatgatttaaagtataagggagaatatgcagctgttatgtcaaatactatgccattttatgacaagaactcaagcattgtctgattttggtcttccatgggaggttctggaaccgataccccacagatacagaggaactgctgtatttatagcatacaacatgatgttttgtagtatacatacaaagtggaacgataactctggctaattaacatatgcattacctcatgtagttatcatgtggggagagcactgaacattcaccctctcagaatcctatcatttgtgacaacatggatgaacctggaagacattatgttaagtgaaataaaacaggaaagataagtactgcgtgatctcactcatgtatggaatctaaaagagatgatttcataaaagtagacagtaaaatgacagttacaatacattggggcatttggggtggg

SEQ ID NO: 315607 - DNA, 607 bp, Homo sapiens
tcactcataggtgggaattgaacaatgagaacacatggacacaggaaggggaacatcacacaccagggcctgttgtggggtggggggaggggagagggatagcattaggaaatatatctaatgttaaatgacaagttactgggtgcagcacaycaccatggcacatgtatacatatgtaaataacctgcacattgtgcacatgtaccctaaaacttaaagtataaaaagaaatgcacactgaaagaagcccaaatacagctttcagaagatttttcagcacaaactctttaggcaagaagaaattggggttacatattcaacgtgctgaaaacaaacaaacaaacaaacagtcaactaagaatactttacctggcaaatctgttcttcagaaaaaaaggagaaataaaaacgttcccagacaaacaaaagttaagggagttcatcaccaggaggtcttcagaggaattaccaaaagtctaaaatttatgacatgacacatatgaaactaaaaatatgtcaacggcataagtaattcatactcagagttctctaatactgtaaggttagtgtgtaaaaaaagttgtatcactacgtaagttttaaaag

SEQ ID NO: 315608 - DNA, 607 bp, Homo sapiens
tcactcataggtgggaattgaacaatgagaacacatggacacaggaaggggaacatcacacaccagggcctgttgtggggtggggggaggggagagggatagcattaggaaatatatctaatgttaaatgacaagttactgggtgcagcacatcaccatggcacatgtatacatatgtaaataacctgcacattgtgcacatgtaccctaaaacttaaagtataaaaagaaatgcacactgaaagaagcccaaatacagctttcagaagatttttcagcacaaactctttaggcaagaagaaattggggttacatatycaacgtgctgaaaacaaacaaacaaacaaacagtcaactaagaatactttacctggcaaatctgttcttcagaaaaaaaggagaaataaaaacgttcccagacaaacaaaagttaagggagttcatcaccaggaggtcttcagaggaattaccaaaagtctaaaatttatgacatgacacatatgaaactaaaaatatgtcaacggcataagtaattcatactcagagttctctaatactgtaaggttagtgtgtaaaaaaagttgtatcactacgtaagttttaaaag

SEQ ID NO: 315609 - DNA, 412 bp, Homo sapiens
gaggtttttaaacttccacttccacacagattaagcctgtctctccgtcttattcctaagataaacaagtaaattaaatggaaatgtggtaagaatcactatctgcatctatcaaatttcttgttagcactaatttttccaagtatcccaagggtgtggtgctgctttttgcttactatttgggtaaaaaaaggttcgttccaaatagttctacttggtccctcataccaaagtaactttacttcmgatatcaggtaccctatatagttaccctatatagacatttatacatccatcaagaattaaggtttgaaaacctccacctagatttcagaggatgtccaagcagaagtttgctacatgggtggagccctcatggagaacatctgctagggcagtgtggaatggaaat

SEQ ID NO: 315610 - DNA, 623 bp, Homo sapiens
tgtaagtgaatgaaatttgggaagggggcctggagaaaaggaaggggagtgtacagtgtttattggaggatgtgtgctttgtaagcaggggcatactgtggcagattgtatttctgcaactgtatgtcttgttgcatatggtcttccaaagcattgccatttccccatcaggaagtggactctatcctctttgcttgcatgtgggagagagtttatggtgtcttgactaatggaatatggcagaatcwttctacgtgactttcaaggttaggtcaaagaaacaccaccgcttccacctggctcactctcttgggacacatggtttttagagctctgagctaccatgtgaaatgcctgcagtatcctcaatccagcatgcttgagaggccatatgggaaaattacatacacaaaggggaagatgcccaagaagcaccaactattttagccctcactgttcaagactttcaggcctacataccagacatgtgactgaagaaacgttttatatgacttaagcaccagccaatttctgactgcaacctcgagataccctgagctagaagtatctagctgagctgctgcttgcaagttcctgactcacagaactatctgacataatta

SEQ ID NO: 315611 - DNA, 460 bp, Homo sapiens
gactcacagaactatctgacataattaagtgatgatcagtgttttaaaccactaaatgttaaggtaattcattatacagcaatagtatctgaaacactcagtaaattacatactgtagtactggcttcttgaataaatgattagactaattgaacaaaattgaaaagtaggaaatggaacaatttttatatttgcattttatatataaaagtacttgtattgcaaggtagtagacaattaaatgattattcaataatgcgatgggaaaattattttcatgataagaaagtgaagtgcatttccacctcacaccatacctgaaaattcaaaccttatgtggtgtaaagagaccagacaagttagtgtgaaaggcaaaactttaaactttcagaraaaattatcttgatataaaactcagggcaagagaggactttgagaagcatgtgcagaagacaagaga

SEQ ID NO: 315612 - DNA, 640 bp, Homo sapiens
aactttaaactttcagagaaaattatcttgatataaaactcagggcaagagaggactttgagaagcatgtgcagaagacaagagaactttcttcctgagtttagcttcctcatctctgcatcatggcttgggtggcaaatccctgatcctaactatgctcactccagtatccagatgccagagtccccaattccaatgwttatgaagttctaattcctgctattagattcctttcttactaaataatctacatcactttttattttcttcactaaagaataaatacgatttcatggcatattttttgttcaatatgtgttgaataactggaagcattaatatttcaaagtgcattaagtaaatctattataaactgaggaaaggaaaatgaaaaaaagataccaactttttaccttaatatggatgctgtaggttgacttcatcaaggcaatatgtaatgccagagcccttaaaaattatctttgtaatacagtattagctctctaaacctactctagagcaactctaaacagagaagacacctttgatgtatcacttcagtcagtgagaacatatagttcacagagattctgaaagccatttactgtgtaaaacaaagcaatccgttccaaaaatgttt

SEQ ID NO: 315613 - DNA, 583 bp, Homo sapiens
caaaagaaaaataaatgatttttaaaattaaaaacagcttgaaataaaactaaatatcgttactactaaagaatyttaacacagtatgattaaaaaaacactatacactgttaaacctatgcaattatcttggtctgtaatgggcttaacatattgtacttacataaatattaatgtatataattgcttcagaataagtaagctaaataactaaaggcgaatgataacagaaatgtaatctgataggatagtgaaattattccttgcttctgtgaaagaatgaaagtcatattctcatgagggatacagcccttttccagctaagcttacttttttactccaaagtttcctcatggcacttttcatttctgcattcctcagggcatagattagtggtttcagcatgggagttatacaagttaaaaccacagtcatggatttatcaatgggaaaggtggagttgggccttgcaaacaggaagatgcaggggacaaagaataaagtgatcacagtgatgtgggatgcacaggtgtagaaagctttgcatttcccttccaaactctgagtcttaagagagggtaat

SEQ ID NO: 315614 - DNA, 583 bp, Homo sapiens
caaaagaaaaataaatgatttttaaaattaaaaacagcttgaaataaaactaaatatcgttactactaaagaatcttaacacagtatgattaaaaaaacactatacactgttaaacctatgcaattatcttggtctgtaatgggcttaacatattgtacttacataaatattaatgtatataattgcttcagaataagtaagctaaataactaaaggcgaatgataacagaaatgtaatctgataggatagtgaaattattccttgcttctgtgaaagaatgaaagtcatattctcatgagggatacagcccttttccagctaagcttactttttyactccaaagtttcctcatggcacttttcatttctgcattcctcagggcatagattagtggtttcagcatgggagttatacaagttaaaaccacagtcatggatttatcaatgggaaaggtggagttgggccttgcaaacaggaagatgcaggggacaaagaataaagtgatcacagtgatgtgggatgcacaggtgtagaaagctttgcatttcccttccaaactctgagtcttaagagagggtaat

SEQ ID NO: 315615 - DNA, 535 bp, Homo sapiens
tgatgccttactcaaccatgtttcccctggcgacacagagcagctcattagaaaaggagtgtttagaatctcctcccacaattatccttttcatttttacaaaatttattgytttaattacaatgatgaggcttcagtgttctaactggaaggtatgtgtgagtggatatatatgtaagataatctactacacctcaaaatagagatatttccagagaatgtctcttaaaaagactggatttttgacatttatatagtatttcccttttttttccctgaatggatttttccttccatgatctatcaagaaaacagtctcatatgtgtagactttacttatatgtttatgtaaattagtacccagtatacggagcataaaattaccggctaatgtttagatatttgccattctgaaacactctactgtgagctcctagaatccaggaataactcactcaaagaaccagacacattgtgaatgctcactaaatgtttattaaattttatttaattaaactgaatttcaaagctgaga

SEQ ID NO: 315616 - DNA, 535 bp, Homo sapiens
tgatgccttactcaaccatgtttcccctggcgacacagagcagctcattagaaaaggagtgtttagaatctcctcccacaattatccttttcatttttacaaaatttattgctttaattacaatgatgaggcttcagtgttctaactggaaggtatgtgtgagtggatatatatgtaagataatctactacacctcaaaatagagatatttccagagaatgtctcttaaaaagactggatttttgacatttatatagtatttcccttttttttccctgaatggatttttccttccatgatctatcaagaaaacagtctcatatgtgtagactttacttatatgtttatgtaaattagtacccagtatacggagcataaaattaccggctaatgtttagatatttgccrttctgaaacactctactgtgagctcctagaatccaggaataactcactcaaagaaccagacacattgtgaatgctcactaaatgtttattaaattttatttaattaaactgaatttcaaagctgaga

SEQ ID NO: 315617 - DNA, 578 bp, Homo sapiens
  misc_feature (1)...(578): n = A,T,C or G
gaatctttatacatttgggccaaagaaaaatgaaaaaatcagattttaaacttcagagataacttccagtaggacaatctctcctgttgacctttttgtacttataatacttatttgtttatagcatttcaagtactcaataaatatttcaattattaaaatgttcttaggagcattactattattctattgaaaattatcacctcgaatgattccaaattctgtattttatcaatattmtatattatggaaaatatatatctgattcaaacatttgaaagattcttcaaatttcttaacatattcaatgagaaagagtgaatcatttaagaaatactcaaaaaatgtgaatccaggataggtattccacaataacaatttttacaaaatatgaaaactcgtgttctgaaaagtctggtgactaggtaaatttatggacctacacatataccttattagaaagggtcatttagtgtctatggaaaaagaagttatgaattccattaggtacaagatctacagaaacttagggaaaatgccaacatcaatttctgcctgtgagttattacatnaatatg

SEQ ID NO: 315618 - DNA, 578 bp, Homo sapiens
  misc_feature (1)...(578): n = A,T,C or G
gaatctttatacatttgggccaaagaaaaatgaaaaaatcagattttaaacttcagagataacttccagtaggacaatctctcctgttgacctttttgtacttataatacttatttgtttatagcatttcaagtactcaataaatatttcaattattaaaatgttcttaggagcattactattattctattgaaaattatcacctcgaatgattccaaattctgtattttatcaatattctatattatggaaaatatatatctgattcaaacatttgwaagattcttcaaatttcttaacatattcaatgagaaagagtgaatcatttaagaaatactcaaaaaatgtgaatccaggataggtattccacaataacaatttttacaaaatatgaaaactcgtgttctgaaaagtctggtgactaggtaaatttatggacctacacatataccttattagaaagggtcatttagtgtctatggaaaaagaagttatgaattccattaggtacaagatctacagaaacttagggaaaatgccaacatcaatttctgcctgtgagttattacatnaatatg

SEQ ID NO: 315619 - DNA, 629 bp, Homo sapiens
ttaaatgcccatcaattaaagaacgaataaacatattgtagtatatacatacaaggggatattmttcaaccttaaaaagcaatgaaattgtgataatgctagaacatgggtgaaccttgaagacatgctaagccagacacaaaacgacaaatatgttatgatctcacttttataagacaccacaacagtggttaccaggggctaaggggaagggataaggaaaaattattgtttgatgggtatggagtttcagtttaggatgatgaaaaggtttggaaatgagcagtgatgatggttacacaacaatgtgttatgtgtattttaccataataaaaaataccaacacaaataaaacatcaggactttttaaaatattatatacaagataaaaatataaagaactgtggcaatacttattatcaatgtattaagatgtaagataatgattgttgtattctctaaattatataaagcaatctaaatgaagtcattataaatactaaatatagtcatgttatgttgtgctatgcattttctgcatttaaatatgtaattaaacaattctaattaaaaatttggagaaaattattgccattgtacttattctaataatattctacaaaatgaag

SEQ ID NO: 315620 - DNA, 629 bp, Homo sapiens
ttaaatgcccatcaattaaagaacgaataaacatattgtagtatatacatacaaggggatattattcaaccttaaaaagcaatgaaattgtgataatgctagaacatgggtgaaccttgaagacatgctaagccagacacaaaacgacaaatatgttatgatctcacttttataagacaccacaacagtggttaccaggggctaaggggaagggataaggaaaaattattgtttgatgggtatggagtttcagtttaggatgatgaaaaggtttggaratgagcagtgatgatggttacacaacaatgtgttatgtgtattttaccataataaaaaataccaacacaaataaaacatcaggactttttaaaatattatatacaagataaaaatataaagaactgtggcaatacttattatcaatgtattaagatgtaagataatgattgttgtattctctaaattatataaagcaatctaaatgaagtcattataaatactaaatatagtcatgttatgttgtgctatgcattttctgcatttaaatatgtaattaaacaattctaattaaaaatttggagaaaattattgccattgtacttattctaataatattctacaaaatgaag

SEQ ID NO: 315621 - DNA, 429 bp, Homo sapiens
tgatgtctgataaagcaggatgttgagcagagggaaataatgaaaatatgcagcacctatgatgatattctccaaaaggcatsacttctcggggaaatgatgatgagtagcaaggaaaggtacttttgggtgacctcctgggaaaggaaagtacaggacctataagaggaaattaaagtcctgaggaaacaaagaaggatgacaaaatctaaaggtattctaattcatccttcctcacttaaatgttgtactatgctaaaaaaattataaagaagccacctatgaactaaaaatcttagaagacacccaaaaaccgtaactcttcctctatctatacagagccttacttcagcacttcaaaatgaacagaagacaaaaatcattgtaactccatagaaagctctggtaagaagaaaccaaaaaaggaga

SEQ ID NO: 315622 - DNA, 582 bp, Homo sapiens
atttcaaaatcattaatgaaaggggtctgatgtctgataaagcaggatgttgagcagagggaaataatgaaaatatgcagcacctatgatgatattctccaaaaggcatcacttctcggggaaatgatgatgagtagcaaggaaaggtacttttgggtgacctcctgggaaaggaaagtacaggacctataagaggaaattaaagtcctgaggaaacaaagaaggatgacaaaatctaaaggtattctaattcatccttcctcacttaaatgttgtactatgctaaaaaaattataaagaagccacctatgaactaaaaatcttagaagacacccaaaaaccgtaactcttcctctatctatacagagccttacttcagcacttcaaaatgaacagaagacaaaaatcattgtaactccatagaaagctctggtaagaagaaaccaaaaaaggagaatcatarcaattcaattcatgaccccctctgagagaaccaagagcaaagaacatttacaaaattgtgtaggttgggttcccaaaaaagtcgtttctgctagattagtatgcaggatttgttggtgc

SEQ ID NO: 315623 - DNA, 547 bp, Homo sapiens
taacttcagacagtatggcttcagggaaagatcaccttcccatcccctttccagcctctctttctgctgaaagccacccaccactcaataaagtcgtccttatgcatctcctttcaaacagttcatgtgacctgattcttcctggattggacaggaacctaggtgccaaggtggcaggggctaccaccctgaccttccactgagctggttggcacttggccatccctgggtggcagagctgaaagagtattggttgtaacacacttggatgctgctgcggggcccacaaagagcctgctcctgccagagaggagtgaccagccagttccagtgtttgttccctctggttcccacacttgctcacttgcatgctccctcccacgaatggctagcagtgaactcagtgaaatgagccactccagttcctgcacgtgaaggaggtcaagggaactatctcatctcattatcacacactatggccataacttttgtaatatgatgtgtgacagmaaaactagcataaatttctttttcctctatcacaatt

SEQ ID NO: 315624 - DNA, 570 bp, Homo sapiens
gactgggacctaactctgtagactgtcctttcttcactccatgctactctactctgggatcctgggagcttgactagacaggtgtagggattccaaagaactctatctatcaccactcttagctattcaagtagagactggatggctacctaatgggccatcatgaatggagtttaatattttattaggttgggcatgatgaccttgtaagttcatgcaaattctctgatctggctctgtgctttcactccagacttgaaagacagttcaagacattttcacagatgacaacttagcaaaatccatgtttattatagttctttagatagtttcaaaccstcattcaaactttgtcacctaccatcataaatattatcatggtactacactaggtaaatgtttctactaggagataattctaacatgcttcacaatttgcaacaacataacagtttcatgacacattagttgtaaagcaataatttaagaataagaatcctggcccagaatttagaaggcttggcttctaattttgccttgccagatgaggttctaattccttgatttagt

SEQ ID NO: 315625 - DNA, 587 bp, Homo sapiens
gtcaaccactgcatagttacagtgaggaaagcaacatgaatagcatatttattatggtgggtgctagggaaagtgtgtctctgacaacttatgtttccctaatctgcctgcttacaatcgatatttcttgaccatgtctttctcccagttagagctgtgggttcaaatgtaaattctgtgggaagagagaataatccttacctgtgtacagcactttatagtttacaaaatcaatctcacaactacagtttgtaaactcacagatgtagaggaaggctcaaaagcatgggacactgtagtaacttagcaaagtcaaatggagttggaacaagaggaagaatccagatctcaygtatatagtcaagtatgttctcagcaaattacacagaaactgttgccttatatatgttttacaggtgataatactagatgtatttacgtgaagagactgaaagcatcatggaggaagtggaaatgaataatttaaataattaatggggtgagggaagccaaagacatgctccacagttaactaccctatctctatactgtgaaattcagactgtaatcctttaatgattaataat

SEQ ID NO: 315626 - DNA, 586 bp, Homo sapiens
agattgacctgcaatttaaaacttatgaattgttaatttctggaatatttcatttaatattttggaccatggttgaccacagataactgaatctgtggaaagcaaaacctcagataagtctgggcacagtggctcatgcctgtaattgtggcactttgggaggccaaggcaggtggattgcttcagcccagaagatcagcctgggcaacatggcaaaatctcatctctacaaaaaatacaaaaattagccaggcatggtggtgcatgcctgtagtctcagatacttgggaggctgagatggraggattacctgagcctggttggtagagactacagtgagctgagatcatgccattgcactccagctcaggagacagagtgagacactgtctcaaaacaacacaaaatcaaaaagcaaaacctaacctaaaaaactaaaccaaatcaaagaaaccaaaacaaaaacctcagataagagaggagtactgtatatattaagaccctagaggacagagtcaaaggatgtatttggttataatctctcagcatcttcatttccaaaatgacatctctcacttgaaaagca

SEQ ID NO: 315627 - DNA, 586 bp, Homo sapiens
cttaaaattgttttcctcagtgtgaaaaataagctgagattgcacttaacttgttctgattttcttaaatctcctcatagctcacagtttttcttgaatataaaggactttgttttgttttcctcaccaagatttgagaagcaatttgaagcaggaagattaaacattcttttatttattctcaacaaaaggcatatgctaagtttccaaagttattgctcattaaatatgctatatatatttatattcaatgcatgtcttattatttatcaaatgcattcactttagttaagtgacttaaaccatacactaaattgccagtttcaagattactgcccccattttatagagaagcaaattaaagctargacaggtacacaaatttgcttgtttcagatcacacatctgagtttcagcaacaaaatttgaatctaggtcttccaaatctcagtcgtacttcaaataaaacagttgttcatggtaagtttatgtccatagataagaaatttatatgtttcactttgtccttcaagaaagatgatgccaaatttgttgtagccttttatcacatgtagtatatattact

SEQ ID NO: 315628 - DNA, 616 bp, Homo sapiens
tgagtgtaagccagggatagggattggaaaagtgttgagaaaatgttatttctattctaacacaaaaagaaaggtttgaagatggaaactaggtccaatgattgtgtcttaggggctacaccaagtgctcagtggtggggtgagaagattagtgagacacaaattataaattgtcaacaacaaayttggaaggtataaaactaaaagaagaaatgtaaataaacctggcattctcagtggatgaagtcctgctggtttgtaaagaattttgaagaatgttaagatatccttttgcacccatcatcaagagtctcatgaggaccaacttcaatctgattatttctggttcttaaaaataaaatgatctaaaaacaagtatgtacgtttccccctataaattaaacagaaaaataatatttggttctcatgtataaggatgctttggtttaatctaaacattcaattcagtaaaaatactatgcattatttaggtagggggggtgagcttactattgttaagaccaactatgaagcatacgtattgttaggttttttacatactttgccacctgccatgattggaagcttcctgagaccgcccccctcccccagaagc

SEQ ID NO: 315629 - DNA, 616 bp, Homo sapiens
tgagtgtaagccagggatagggattggaaaagtgttgagaaaatgttatttctattctaacacaaaaagaaaggtttgaagatggaaactaggtccaatgattgtgtcttaggggctacaccaagtgctcagtggtggggtgagaagattagtgagacacaaattataaattgtcaacaacaaatttggaaggtataaaactaaaagaagaaatgtaaataaacctggcattctcagtggatgaagtcctgctggtttgtaaagaattttgaagaatgttaagatatccytttgcacccatcatcaagagtctcatgaggaccaacttcaatctgattatttctggttcttaaaaataaaatgatctaaaaacaagtatgtacgtttccccctataaattaaacagaaaaataatatttggttctcatgtataaggatgctttggtttaatctaaacattcaattcagtaaaaatactatgcattatttaggtagggggggtgagcttactattgttaagaccaactatgaagcatacgtattgttaggttttttacatactttgccacctgccatgattggaagcttcctgagaccgcccccctcccccagaagc

SEQ ID NO: 315630 - DNA, 563 bp, Homo sapiens
attccaaatatacaatattttggaaaaaaactgtggagacartaaaaaggtcagtggtttctagggttggagggaaggagtgatgaagaggcatagcatagacatttttcagggcagtgaaaaaaatcagtgctattataatagtggatacatatattagacatctgtccacacccatagaatgtacaatagcaagagtgaaccatgatataaaatatagagtctaggtgataacaatgtgtcaatgtagctttatcaattataccaaatgtaccaccatggtaaaggatgttgataatggagaaggctatgtatgtggggggcagggagtatatgggaagtctgtataccttctgcccaatttttcttagaacttaaactgctctataaataatatctattacaaatattatgtttacagcaatgaaagaaagaattaacaaattggatgtcacaaaatttaaaaatcctgttctgtaaaacacttaataaaaagatgaacctggaagaacacatttgcaaaacacatctgacaaatgactattaaacagaatttacaaaga

SEQ ID NO: 315631 - DNA, 571 bp, Homo sapiens
gcattttgagcttttgatggaaaacatcgcagaaatctaatcaatacatagaaatagactgttggttctaagagttaacacagataagagagatacaagggcccatcaggtgatttctgaggaagtatccttgtttatgttttaaaacagagaagattgaggagtaaaacaacaattatacttttgctatctgtagtggatactgcggtgcattagctagattctcccttcaggactgaggccattatctctcctaactggctgatggcctacacatacacccctttccaggtgtgccctctttgcaagtggctgcctcaacaaatgttctatccccctcagaggaatcttgcatccgggaactggattatacaagagtacaaatgtgtaacccatggcttcaatttgaaatgagtmcaaagggccatctcagctctagaactgcctggaagactggcgaaggcctttgttgcaactgatcaaaattcaatctcgtctttatctcaatcagtcttccatctccctttctcaggtttctccatattaatcctcaataaacctccagcactca

SEQ ID NO: 315632 - DNA, 558 bp, Homo sapiens
atttgaacatctatgccaccagtgggtgtacttaatatggtctggatttcagtgaccatggcagaatggaggctcaacactgcccaatgtcaaaatgtgttttctagccctatgtcagagtgctttagccctgcaacatttgtaatttctgaacaattcccataaaacctaggggttgttgacctgagataaactccctgtggctagcaatgtcattctccctctcatttcactttccaggttgataaaaatcaatactttctctcatagaattctgactttccaagcagcactcaggttcatacgaaatgtgtggagcagataaagggacaagagctgttattttatgttccactgctatttcctaatttcatccaagcagaggataatgctataaatgctatatgaaataattattttgaaatgaatcagtctgggagctttttttgatagagttaggataatttttaaaaatygcttatgatgacattaacatctagctttattcaaactctgttaaaataaaatctttgaacctaattctcattattatctccc

SEQ ID NO: 315633 - DNA, 549 bp, Homo sapiens
ggaatgataaaatagtttcataaattttcttcctatttaagtcaattgcagcagacactgctagatgcctactcaacatccacttccacttttcattaggacagtgtttgtttttgttttgagtggcaatgtgtcagaaaaaaaatgcaygcacgttccttcctttcattgcacggtaaatgagattaaagtagaagcctcctagagacttctggaaatgctttgactttcaaatacaggtgctacctttccttcttatactttccttcttcttccagcctgaaatttatgtggaaacctgaaagtatgaaggaacaatgaggataaaatcacaggctaggaatggtggagcagaaagacagtaggagcctgagatgctaatgttttaaagttcctgcaccatcacgataccactaacattcagagtttcatctgtctaaggaacataagtttttatttgcttaaatcactgtaatcaaacttttggtcattgtaggtgagacactttccaaaaagattcttttatctttttcaattaggaaatcttta

SEQ ID NO: 315634 - DNA, 574 bp, Homo sapiens
agtagttttcaatccaccctccaccaaaaacagataggtcagcttcataaataacaataaaataacatgacatcaagaaaaaggcacaaaagcagggtgaccatacattcagtttgactggaatagtcttggattgatcctgctgtcctggcttgattactaacactgcccgccttcagtgctcaaaaatactccgccawggttatatgggtttaaatttgaaactgtattttatacatttatcaacccaaactgttgatttttattaccattgcctatgcaataatataaaaggaaaattagaaatctctaaacttccccttatgttgttcattaattctccaattcgctttgctttcatccaacccagtcattagcaacacaaaagaaatcaaacaaaatctgaacaagaagtgtttttaaaaatgactatataaatgttccaccatagcacttttggaaaatacattaaataaaatcaaggggaaaaaagagcaaatataaagaacaagatgatcttgaagggcatacgtcagtattactaatagattagagattaagaacattctctttc

SEQ ID NO: 315635 - DNA, 592 bp, Homo sapiens
cgtattcagccatccttgtggggaccaacgcaggagggcagatcatcaaggaacatggctttatgtgaggtagactccaaggcatagaagcccagaggatcacagtggaagaggatgagctcaaactcccacatccagggcctgtgcaatggaaaagccctgtagagtgggaactgtgagtccctctttagagaggcatatctggcaagcagaagtcatcagtcaatgttggccagaaaagcagcagcagccaccgcagagcaaactgtgactatacacagttaaatacactgatgttcattatttttctttccttccttttaatgttcattattaaagtagttgcttcctagaggaaggaaggaaaggaagaactgaaaaagaagacatgtcccttttccggttaatcttcttaaagccacagctatagtcwacaatggggcagaggaaagctttaaatagattatcatgttaaattttatactgagttggattaactgtattgtggacaatgtttagaaagctaaagaaacatcctatgatggtcgttaaaggatctgccccccactgtggaatgggaattcaacaaagt

SEQ ID NO: 315636 - DNA, 479 bp, Homo sapiens
ttttcttggctcttatttgttttacttgaaaaattaatgagaatgaaattgaaaaaaatatatatttgaatttaaccattattttaatttaaaacttttcaatatcaaaataaacttatacaaaggaaaggtgtataattaatatttttaaataatttatatgctagctgcttgaygattattatctagtaaattagcctctctataaggtactttgcatctctatttacaggtaaggaagctgagagtgatagggtttaagttgtgtattctgttcaaagccatacaagtaagtggcatgggtatattttggactcaattttgtctgacttcaaagctaaggttttttttttttaaataatatgccaccttgctttttgttttcatgaagagcaatgaccagtgttcacatatactgttgtaaaagggaattagatgactattgtatccagaagaattttaagttattgaaaatgtca

SEQ ID NO: 315637 - DNA, 479 bp, Homo sapiens
ttttcttggctcttatttgttttacttgaaaaattaatgagaatgaaattgaaaaaaatatatatttgaatttaaccattattttaatttaaaacttttcaatatcaaaataaacttatacaaaggaaaggtgtataattaatatttttaaataatttatatgctagctgcttgatrattattatctagtaaattagcctctctataaggtactttgcatctctatttacaggtaaggaagctgagagtgatagggtttaagttgtgtattctgttcaaagccatacaagtaagtggcatgggtatattttggactcaattttgtctgacttcaaagctaaggttttttttttttaaataatatgccaccttgctttttgttttcatgaagagcaatgaccagtgttcacatatactgttgtaaaagggaattagatgactattgtatccagaagaattttaagttattgaaaatgtca

SEQ ID NO: 315638 - DNA, 520 bp, Homo sapiens
gccaggttttggtatcaggatgatgytggcattatagaatgagtgagggagtagtctctccttttcaattttttggaaaagtttcaggagaaatggtgctagctgttctttgtacctctggtagtattcagctgtgaatccgtctggtcgtgggctttctttggttggtagggtatttattactgcctcaatttttgaactcattattggtctattcaaggactcaatttcttcctggtccagttgtgggagggtacatatgttcaggaatgccataggaccataaggcatcttttcccactactatcaccaccaaagggactgctagattgtataactcaagcaataaagctgtttgtaacacagtctgaatttgttgcacagtcctatcctctgggactgactcaaagtagcccaatacatggtcatgcttaatatgtataaatataaaatctgttaacttcggaagtcaaagactgttgtgcttccctaatcgtggtagggaatgaatgacgcagaa

SEQ ID NO: 315639 - DNA, 564 bp, Homo sapiens
tcatccttacagtccagtgatctgttatcatttattggataatactttgtcattttaatttctataaaatataatgcatctccgtatttagtagaaaaatcacccgtttaaaaacatttttgacgttggtattcatccatgtgaaattaaaaatcaatttgtcatataccatgaagaatgttactgggattcaattagattgtattagtaaattgttaacgtatagattaattggaagataacattaaaaaatttttttaatttcccatgtttaatattatgtttttggtggtggttataagactgtatgcatcttattaaaagtacgctcttaaatggtaaattttagtaaagctgaccaaaaaaaactgatagaactgaggacacagttgcttaattttcaaccttccttgatctgtaataaatgctttacagccttacatttccttcygaacaccactttaaatccttcaagatttttcttactaaaaatattcaaacacaccaaaagtaggtgatggtaccatgaacttctgatgtccacttaccccaattcaacaatta

SEQ ID NO: 315640 - DNA, 544 bp, Homo sapiens
gtgctcacttctctgtggaggctctaggaaagaaagaattctttgcttctcccagcttctgacctgtggcctcatccctctgatctccacctccgagttcaggctgcttgctcgtcttccgcatmtaacctcctgcttttctctctgataaggacacctgtcattaagttaaggggccacccacataatcgagggtaatctcctcatctcagaatctttaacttaatcacttctgcaaagatctacttttccaaataagatagcaatcaaggttctgggaattcagccactacactgcttaacggggtcccaaagctgcccacactagcaggtgatccaattctctcttccatttagggacctcctttatggaatgccgaggaaattcccagaggagctgattcagctctcagtgccaatcctggctcctctcctcaagctcctgaggcagaacaatcgaggaattcctgggatgcccgccagtgtgctgcacataagcgtgtgctgcagggaaacccaggccctcccagactcaaggtggctc

SEQ ID NO: 315641 - DNA, 544 bp, Homo sapiens
gtgctcacttctctgtggaggctctaggaaagaaagaattctttgcttctcccagcttctgacctgtggcctcatccctctgatctccacctccgagttcaggctgcttgctcgtcttccgcatataacctcctgcttttctctctgataaggacacctgtcattaagttaaggggccacccasataatcgagggtaatctcctcatctcagaatctttaacttaatcacttctgcaaagatctacttttccaaataagatagcaatcaaggttctgggaattcagccactacactgcttaacggggtcccaaagctgcccacactagcaggtgatccaattctctcttccatttagggacctcctttatggaatgccgaggaaattcccagaggagctgattcagctctcagtgccaatcctggctcctctcctcaagctcctgaggcagaacaatcgaggaattcctgggatgcccgccagtgtgctgcacataagcgtgtgctgcagggaaacccaggccctcccagactcaaggtggctc

SEQ ID NO: 315642 - DNA, 522 bp, Homo sapiens
aactcacttactatcatgagaacagtatgggggaaactgtccccatgattcgattatctccacctgaccccactattgacgcatggggattattcaattgaaggtgagatttgggtagggrtacagagccaaacaatatcagaggccatatagtaactctatgttaaacattttcaaaccattttccaaagtaggcaaactatgtcatagctccaacatgctccacattctcaacaacacttcttattgtctttttaaaaagttcagtcataaagtcaaggcaaagcggcctcttattgtggcttttatttgcattcttaagcgactcatggtgtaagaatattttcatgttttcactgtcaatgtgtatatcttctttgaagaaacttttttcttctgggagaatttttaactgtttttcaatccttactattgaattattaattatttgctttatatttttaatttgtaaggactctctatttctcaatagttttagacaaacaatagtttctcttaaga

SEQ ID NO: 315643 - DNA, 570 bp, Homo sapiens
tctcttccccaaagctcttatctttctttccctttgccaacctctactctaatgctgtgttggcatttctcctttgttgtttagagttacagtgcacagttcagccatttctaaacttcctaaaacttttaaaatatgtctgaagtaataaaggctgccttatcatttgacagtcttataaacttgttccctatttgtttcctgccactattggttggaaagaaagaagaaaagaaagaaagaaaaaaatgcttgcagttacataaagcattgttaattttacagtgtacttaaatatgaaaatgacagagtttggggttattctaatttcccttaatattttatgattccaattaagacataataaattttttccactctcaatccctagaggaggaatacacacctttaaaaataatacagtrttgcaaaacaatcttctgataccaaagggaaacttccagatctctagctggaagatgagcggaaaatgtacctattctgtttagaagcatttaaaccccaagaaaaagaggtctttggatttgctcctccactccatgaattgaa

SEQ ID NO: 315644 - DNA, 635 bp, Homo sapiens
acctattctgtttagaagcatttaaaccccaagaaaaagaggtctttggatttgctcctccactccatgaattgaacaggatacctttgaagataaaacttatatattaccatagtttggaagtagtggcttttttcattttttgaaattccctttaagaaggttagaaagcctatcttcactaatgtggagacttcctgaaggaagccagtgagttttggagagcttccctggggacataatgagacttctgtcatttgtttaccaatggatatctcaaatgtatatggtgcatttatggtaagaaaccaaagctacctggagtatgattttcctgcctttccattcatgaggtatacagtaatgatttatacaagcatgcttggattyttgcacccacacccatcctatagagatagtcatattgtcatttcccatgcctcctaggtaccctggggaagaaaaaccatcactaaaataaaaatgtttaagtatttttatttgtgatgttacacatgttatatttgtaacatttgatcaaaatataacattactcaaacatacctctctatttaagagctggacaatggccagtccccctccttgttggccaatcttctactgattcaccagag

SEQ ID NO: 315645 - DNA, 635 bp, Homo sapiens
acctattctgtttagaagcatttaaaccccaagaaaaagaggtctttggatttgctcctccactccatgaattgaacaggatacctttgaagataaaacttatatattaccatagtttggaagtagtggcttttttcattttttgaaattccctttaagaaggttagaaagcctatcttcactaatgtggagacttcctgaaggaagccagtgagttttggagagcttccctggggacataatgagacttctgtcatttgtttaccaatggatatctcaaatgtatatggtgcatttatggtaagaaaccaaagctacctggagtatgattttcctgcctttccattcatgaggtatacagtaatgatttatacaagcatgcttggatttttgcacccacacccatcctatagagatagtcatattgtcatttcccatgcctcctaggtaccctggggaagaaaaaccatcactaaaataaaaatgtttaagtatttttatttgtgatgttacacatgttatatttgtaacatttgatcaaaatataacattactcaaacatrcctctctatttaagagctggacaatggccagtccccctccttgttggccaatcttctactgattcaccagag

SEQ ID NO: 315646 - DNA, 591 bp, Homo sapiens
ccccctccttgttggccaatcttctactgattcaccagagattatttctgaatttctcaattaaaagaaaaagagatgcacatcatttgtaaaatgaatttgcacrtgttgcaaaagatgtagaatttcataaagttgacaaaagtgttggaagaatggctcaaattacgtctaaagacactgattaataagtatctggtaggaaagataagtcaatagtctcattacagacttactgttacaggatctgtgggttgtcagttttctggctggaaatctctgtggccatggtgtctttgcccagttcttgtcctgcatccaagaagaatgaggtatgcagacaagtgaaaagtgaacaagacaaagatgagctttattgagtgttgcaacagctcagaagagacctgcagtggatagctcctctctgtagacaggtcatgcatggagtattcagttctcagctgagaggaggcgctggagagagtggctcctttctgccagcaggttgtctctgcagctctcgacagagaaggtagctcctctctgtagctggttgtcccatcatctccagctgtcagcggagagagtgtt

SEQ ID NO: 315647 - DNA, 533 bp, Homo sapiens
atggtgtctttgcccagttcttgtcctgcatccaagaagaatgaggtatgcagacaagtgaaaagtgaacaagacaaagatgagctttattgagtgttgcaacagctcagaagagacctgcagtggatagctcctctctgtagacaggtcatgcatggagtattcagttctcagctgagaggaggcgctggagagagtggctcctttctgccagcaggttgtctctgcagctctcgacagagaaggtagctcctctctgtagctggttgtcccatcatctccagctgtcagcggagagagtgttcctctctgcagctggtcatcccattgtctctctactctcctcctcctctggccatcctctcctgtgctctggctgagcctgrggcttttatgaaccccagagtggaggaagtgcttgtgattggttcatgggtggccatgggcaggcctggaagaggcaccatgagtccccactctggtcagcaggactggcagctcagctcccaaccttcaggacctccctggctgcc

SEQ ID NO: 315648 - DNA, 533 bp, Homo sapiens
atggtgtctttgcccagttcttgtcctgcatccaagaagaatgaggtatgcagacaagtgaaaagtgaacaagacaaagatgagctttattgagtgttgcaacagctcagaagagacctgcagtggatagctcctctctgtagacaggtcatgcatggagtattcagttctcagctgagaggaggcgctggagagagtggctcctttctgccagcaggttgtctctgcagctctcgacagagaaggtagctcctctctgtagctggttgtcccatcatctccagctgtcagcggagagagtgttcctctctgcagctggtcatcccattgtctctctactctcctcctcctctggccatcctctcctgtgctctggctgagcctggggcttttatgaaccccagagtggaggaagtgcttgtgattggttcatgggtggccatgggcaggcctggaagaggcaccatgagtccccactctggtcagcaggactggcagctcagcycccaaccttcaggacctccctggctgcc

SEQ ID NO: 315649 - DNA, 606 bp, Homo sapiens
cctccatcactcggtggttactcagttgtatttaatcttttgtatgaggttctgcctacctaatctttcccatttgaggtaatccatattcaaatcctggcttttgcacttaatatcaacttgacattagaactcacttaagctctatgagtctccattttctcacttattaaatgggaaaatccactttaaatggaaaatctgggttctttctttgttatatagactcattatccacagcaggagagttcaatttgatataaagtagaaartgcttcttggactacccttaccttacatcccagagtaatcatttgaaacttccctaccacttcatgctcccttgatgaactcctcacaattctcagaaaaggatggcatcacttttgcttggccccaagtttgtatacatgctcttccctctctctaagctgacctgctgtgccctccattctttgcttggataacttttcttcattcttaaatttcaagtgaggattttcctcttcctattggtacgccacttctgcgtattccattccaggttaggtgtcccacttctctgttcccaaaggacttttgcagagatgcacaaccccacccccc

SEQ ID NO: 315650 - DNA, 606 bp, Homo sapiens
cctccatcactcggtggttactcagttgtatttaatcttttgtatgaggttctgcctacctaatctttcccatttgaggtaatccatattcaaatcctggcttttgcacttaatatcaacttgacattagaactcacttaagctctatgagtctccattttctcacttattaaatgggaaaatccactttaaatggaaaatctgggttctttctttgttatatagactcattatccacagcaggagagttcaatttgatataaagtagaaagtscttcttggactacccttaccttacatcccagagtaatcatttgaaacttccctaccacttcatgctcccttgatgaactcctcacaattctcagaaaaggatggcatcacttttgcttggccccaagtttgtatacatgctcttccctctctctaagctgacctgctgtgccctccattctttgcttggataacttttcttcattcttaaatttcaagtgaggattttcctcttcctattggtacgccacttctgcgtattccattccaggttaggtgtcccacttctctgttcccaaaggacttttgcagagatgcacaaccccacccccc

SEQ ID NO: 315651 - DNA, 557 bp, Homo sapiens
cttctgtcctcacaacaccttgccatgtgggtaccatcccaatcagttgttcagaaagagcaacctgagatctggtgaatgatctctctctgtaatgccactctgtgaatggattctggagctctattccattccratctagatgattcagacatgtcctctctagaccaccccccaccccacaactgactgtggacttccagggagcagcagaaccacctcaattgtcacaacccaaacagagtcactgctgagcccagcctgatcagccaaacttcagccaatccgaagcttcctgagaataaattattattgtttgtgccaagataataataataatacaaattcaatgtgtgaactttgcttgacccttaattgaaacaaacctactggaaaaagtgtatatatttttgagacaatggagaaaaccaaacaggagttatattgcatgaactagctggtccatgatattaaggaattgctgttaataatggtaactgtgacactgttttgtgagtttgtgagtgtgtatattttttctttgctgttagaaatgc

SEQ ID NO: 315652 - DNA, 582 bp, Homo sapiens
gtcggttggaggaagattccagaggccaactgtggttacagtaatgtgagaacagtcagtgtggttaaaataaatggagagcgggagacaaggggcaatggtgaaagcagtgctgagccctttcctctgttgtggctctaaaggatggcgatttttcatctgggcacatggkgggtagggggagtggtgacaagctatgtggacagcctgggaatggaaattcttgtcttgggcttccaagttccacagagtggagtcacttgccccatttcttcccactagacccccttggtggagtgaggactttctcctgcagctcctcatactttcctactgcttttctcctctcatcccaccctttccttcagagacatctcactctgctgctggggtggagtctcctagggctcctgaagggtcagcatgagcaggacacgcctcttgcaccaaaacatgggtgtgtggccttgatccagatatcatctcacagctttgattatcattcaatatacagggtgtgctcaggacatcctggtgatggaaagtgcagcatctctatcttcaacttacagagacataccc

SEQ ID NO: 315653 - DNA, 577 bp, Homo sapiens
ttaaaaatgagaactgcccatccagagcctagggctttgagatgcagaggacctagatgagcatgactttgtggagtgctggcttcgagagcactacttagcacacatgcagttgcagattgattctcacaacctccctgagagataattaccaatcattttttaaatgtgaagactgaggyccaaaggggttagatgacctgtccaatttcaaagagatgttatgtgacagagctaaaatttgaaacccagaacaggactgtcggggtccagggttttaattttaaactttgcctcaaattggaaaatagggttttctccaccctaagtgataaatataaaaactaaagcatggtcgagctggtggctcaagcctgtaatcccagcactttgagagaacaaggagggacaattgctcgagcccacgagtttgagactagcctgggcaacatagcaagacccccatctctataaaaaataaaatattagccaggtgaggtggcacacacctgtagtcccagctgcagaacctcaggggctaaggtgtgaggattgcttgagtgtgggaggttgaggc

SEQ ID NO: 315654 - DNA, 515 bp, Homo sapiens
tcagctgacggctggaggaaaagcaggtcagagaggtgccagaggatgtctggggccacggacaagggaaggcagctccccagcctgtgctctggcgtccaggatggcgacttctgtgatccttccaaacagctcatttctgttccagtttactcactcagttgggttctattgttaatgaaaaaaatgaccattgtccaatctttccacatgcatgcaccctcttcttggatgtrcccagttataaattagccattttcatgattaatttttcctggatgactcattcttcaggaactcagcatcagcctaggctgtgggagttcgatttctgtggtcatctgctctccagcattctgatgtgagttaacccttaagaaataatgacagcagccttgatggggatcaatgatgcctccgtgcccacaaatcacattgcagagctcctgttagtttttgaagcctcaccagattcctggctcatggttgtaaagcagatggaggggtagggggag

SEQ ID NO: 315655 - DNA, 516 bp, Homo sapiens
atatgaatgaggtagtgttgaggacagggatatcctgcaaagaaggtttaacccycaatctcttgggcatcttgtccattcagttcccaaagccaaatgctagtcacagttctttggccataaattgagagttatccccttgaaagctacgattccagtggtgttttgtgcatgttgcctagtgtgagatccagatagatcacattttcacacttacccatctgccaccgcctgcctctcaaaaagccactcagtcatactctttcaagagtcctggctgccacgggaatgtattttgaaaatgaaataagaacaaaagacgagtgagccccctccccagcccgctccaggcaaggtcagaggcagagacgaggccgtgagctttggtcccatggctgcccttccctctgctcctcacagacgatctctgcctgaggataatttggaaagaaacttttgctcctgctgggttatggtggaagctattcacatactctaagaagaaatcctgagtga

SEQ ID NO: 315656 - DNA, 516 bp, Homo sapiens
atatgaatgaggtagtgttgaggacagggatatcctgcaaagaaggtttaacccccaatctcttgggcatcttgtccattcagttcccaaagccaaatgctagtcacagttctttggycataaattgagagttatccccttgaaagctacgattccagtggtgttttgtgcatgttgcctagtgtgagatccagatagatcacattttcacacttacccatctgccaccgcctgcctctcaaaaagccactcagtcatactctttcaagagtcctggctgccacgggaatgtattttgaaaatgaaataagaacaaaagacgagtgagccccctccccagcccgctccaggcaaggtcagaggcagagacgaggccgtgagctttggtcccatggctgcccttccctctgctcctcacagacgatctctgcctgaggataatttggaaagaaacttttgctcctgctgggttatggtggaagctattcacatactctaagaagaaatcctgagtga

SEQ ID NO: 315657 - DNA, 516 bp, Homo sapiens
atatgaatgaggtagtgttgaggacagggatatcctgcaaagaaggtttaacccccaatctcttgggcatcttgtccattcagttcccaaagccaaatgctagtcacagttctttggccataaattgagagttatccccttgaaagctacgattccagtggtgttttgtgcatgttgcctagtgtgagatccagatagatcacattttcacacttacccatctgccaccgcctgcctctcaaaaagccactcagtcatactctttcaagagtcctggctgccacgggaatgtattttgaaaatgaaataagaacaaaagacgagtgagccccctccccagcccgctccaggcaaggtcagaggcagagacgaggccgtgagctttggtcccatggctgcccttccctctgctcctcacagacratctctgcctgaggataatttggaaagaaacttttgctcctgctgggttatggtggaagctattcacatactctaagaagaaatcctgagtga

SEQ ID NO: 315658 - DNA, 516 bp, Homo sapiens
atatgaatgaggtagtgttgaggacagggatatcctgcaaagaaggtttaacccccaatctcttgggcatcttgtccattcagttcccaaagccaaatgctagtcacagttctttggccataaattgagagttatccccttgaaagctacgattccagtggtgttttgtgcatgttgcctagtgtgagatccagatagatcacattttcacacttacccatctgccaccgcctgcctctcaaaaagccactcagtcatactctttcaagagtcctggctgccacgggaatgtattttgaaaatgaaataagaacaaaagacgagtgagccccctccccagcccgctccaggcaaggtcagaggcagagacgaggccgtgagctttggtcccatggctgcccttccctctgctcctcacagacgatctctgcctgaggataatttggaaagaamcttttgctcctgctgggttatggtggaagctattcacatactctaagaagaaatcctgagtga

SEQ ID NO: 315659 - DNA, 596 bp, Homo sapiens
catgacgggctctatcgcctaagcaaaataagaacctgtgggttcatattgatataaatattcaaataagtaaataaagaaaaggggaaggctcttccttgtagtagaatctcaatttaggaatgtataaaataatgtaaacctttttaaaatcattgtttggcaaacactacagtacaaattctttcactcaagtgtcattgatgcttgccaaaatgagtgggtgaaagaataacgagaagcaggatattcacagtctcgaaatttggtgccataaaacccttaatgattacaaagaaaaaacatactaactttatagtggataaaccaggcagacactaggtgactttcacaagagtgaacatcactggcaatgacacatggcgtgattctgggctcttgatatcaagaaggacacaaaatcactttcataatatttcttcaaggaatgtatagctggaatttaatcatgaagaaacattaggcaacccaaattaagcggttctttacaaaataactgaccagtccccttcaaaagtgtcaaaatcatgaaaaaatgggaargactggagggcttgttccagattaaagatgag

SEQ ID NO: 315660 - DNA, 670 bp, Homo sapiens
acatggtcacctcttctcttggggtacccggaggtacagagggagttaagagtaatttagcgtgcgaggctgagaagtaaggaggcagcacgaaatccaaacatgaagaatactcaaaagcacagtcttccatgagacaaaaaagtggaagctactttatcagcttatattctcagtgatggggacatagtacatgcaggtctgagagatcagggaacacttaagatttagaataagagagccctggggccatttagttccaaaagcaaaatacggtctattaaattacaagcccctaggatctgtgaattgggcataatgtacattctgtcccaataaaacccaccctgaaaaagggttgggaggagtcagcccagacaccaaccactgttgttggtattggagttagtaggtcatttgagatggaaaatgaaggtgtcagagttgccccataggtctgtgtattmcccgccccttaatgccagaagccatcattaagtttcacttgtttgttttctgtacttttaagtcaagcctttttatgtgctgtacttcatactgaggattttatttacattatccatttaatcctcaggattattctcctaaagtttgtttctgctgttttgcattttacagacaagaaaactaagctagagaaggaaggtgg

SEQ ID NO: 315661 - DNA, 535 bp, Homo sapiens
agaatgtgtcttaaatgtcttaaaatgtgtagcttatgtttgcctgtttttgcatgttacctgtaaatgaatgactgtatatattttctcccctgtctagtgcytcaaacctcacacatgaagccaaatgtgactttctgtgtgaatggacatgtgcctcgagattacgatccagtgaaaagaagcaggacttctggacagaaggactcacaagcagcgtgggaccagctgttggttgctggggccaaatcctgctttcaatttttgccagcttttctgcctggggtacattctatcccatcctttctcaaagcctcagtttccttgcctcaacacagagactcattgtctcttccctgcagcaatttttgtggattaagtgaatgaaaggacgtgaattaaagaacattaaaggatgttctttgggctatggagggctattggaacataagggatgagggtgagaatgagataaacaatcattatgtagagtcatctccccatgccatgggcacgtgtgatgtggtttcaaggc

SEQ ID NO: 315662 - DNA, 583 bp, Homo sapiens
agtggatccagaggaacagaagctgagattgttgactatttatgctccttgcagcgggagatctgaatggtacagcttcccggctgccatattggatttactttgtaaaatatcatgctgacagctgcatggagagtagcatacagaaaccacggaaggagccgggacagtagttaaactacagcaactactaatgaaagagtactaacgagtgatagtgtcaaaattggcagaagagctcagatttgragtatatttttaacatagggccaacagaattttctgaaggcatagcttttgcatatgggataaaagtcaagaacaacccagattttcagctggaacaactcagaaacagtcatatagtgataagcttcaggttatttcagaattagaggaagaaataaggaagacagaaatggaagatattgaatatggaattcagcaatgtttataaacagttaagatttagagggtgagaggaagaaaggatccctaaagaatacataccgtttttaaaaaatgatagaggaaaattaaaggttaacataaatgtgaaagaatgagacccaggggagtgagg

SEQ ID NO: 315663 - DNA, 395 bp, Homo sapiens
tatagcataagagataaaggaaggaggtggtagaagcaagagaggaaatggaaggaaaagggaaaaaaaaaaaacagaaaagaaaggaaaataagaagtaaggacgtcacragcttcttccccagccagcctaacacatgtgggccaagttaagaaccgactgtcaccatgtggttttccagttcattacttcctggcatcagcaaggtctcatttgtgagaagaaacaatgtctttaaaagactcataaggattcttggacatcaacagtcttccccaaacataattttattaaatctgaagaaaagtgaatctgcttcttccagagaccatctttgcttccagatatattaatttactaatgaacacagaacaagtgtcctatggttggctga

SEQ ID NO: 315664 - DNA, 483 bp, Homo sapiens
gcttcttccagagaccatctttgcttccagatatattaatttactaatgaacacagaacaagtgtcctatggttggctgaaccccagatattagaggaagaaaatagctgaagccattcaacaaaaagttaaatgtaatagartttccatatctgacttttaaagaagcttccagatttatgattttattctgaagttggaccacttagtgctagagaatagtaatattttaaaagagaggaaagttttcctcttctctatgggacaagcttgcctattcctttatgctgtgatgtcattattagctgagtatcataggctaggattcagtataggccaggattgggagtgagggaaccttctggactatatagtgccaggccttaggggaagtgtttcaaaggatgtgaatacatgggaattcccacataagcctaatcagggcggtgaataggactggcaagggtctgaatagcatgtctt

SEQ ID NO: 315665 - DNA, 564 bp, Homo sapiens
aaaggatgtgaatacatgggaattcccacataagcctaatcagggcggtgaataggactggcaagggtctgaatagcatgtcttactcaaagctcaaagtcaagccttaaggtgatttggctgttttgggaagagtcgccacctgtgattaggattgcaggggcctgtgttctccagatagagatctgaaaggagccaggaagatgtctggaaccccagataatcaggacaagattctgaaaagtcccatggaaaaactctgctcccatcaggatgcctatatccaaagccagtcaccacccagrgggaatatttcagacctaatgccttaactcccactattatcagtgcattccgtgattgacaaccatatttcctaccaaactcacccaaacttgagtctcaatactgtttcataggcttaatcatagtcttcagttccttctgttataagactgatatcacaaacctaacctatgggatggttagagcagagcagtttgagtgttcttgtcccctccaaaactcatgttgaaacttaattcccaaagcaacagtgctgga

SEQ ID NO: 315666 - DNA, 564 bp, Homo sapiens
aaaggatgtgaatacatgggaattcccacataagcctaatcagggcggtgaataggactggcaagggtctgaatagcatgtcttactcaaagctcaaagtcaagccttaaggtgatttggctgttttgggaagagtcgccacctgtgattaggattgcaggggcctgtgttctccagatagagatctgaaaggagccaggaagatgtctggaaccccagataatcaggacaagattctgaaaagtcccatggaaaaactctgctcccatcaggatgcctatatccaaagccagtcaccacccagggggaatatttcagacctaatgccttaactcccactattatcagtgcattccgtgattgacaaccatatytcctaccaaactcacccaaacttgagtctcaatactgtttcataggcttaatcatagtcttcagttccttctgttataagactgatatcacaaacctaacctatgggatggttagagcagagcagtttgagtgttcttgtcccctccaaaactcatgttgaaacttaattcccaaagcaacagtgctgga

SEQ ID NO: 315667 - DNA, 564 bp, Homo sapiens
aaaggatgtgaatacatgggaattcccacataagcctaatcagggcggtgaataggactggcaagggtctgaatagcatgtcttactcaaagctcaaagtcaagccttaaggtgatttggctgttttgggaagagtcgccacctgtgattaggattgcaggggcctgtgttctccagatagagatctgaaaggagccaggaagatgtctggaaccccagataatcaggacaagattctgaaaagtcccatggaaaaactctgctcccatcaggatgcctatatccaaagccagtcaccacccagggggaatatttcagacctaatgccttaactcccactattatcagtgcattccgtgattgacaaccatatttcctaccaaactcacccaaacttgagtctcaatactgtttcataggcttaatcatagtcttcagttccttctgttataagactgatatcacaaacctaaccyatgggatggttagagcagagcagtttgagtgttcttgtcccctccaaaactcatgttgaaacttaattcccaaagcaacagtgctgga

SEQ ID NO: 315668 - DNA, 543 bp, Homo sapiens
tacctgtgtctttaatattgttcagttggggaatcacagcacaaaatatttcggtgactctacgaagtgtgtctttccaaatcatctgaaayggaagaggattagcacgaggcagctgatactgtaaagtgctctggctgaactgagccctgcggaacatgaagccctgggggctgagaaatctctatactatccatgtttgccccctgcccttagggtcaattggtggtattgtgtaaagctgtctgaccccagactcccaaacaatcccttttgctttgctgacataaatatgattcccaggacattatagtaaagactagaaaagttgcaaagggagaaaagttaaaagccagtttttttctcctttgaaatttttatgtgctgaaatgcaaaattcactgtcaaaaaaagtaacacttttacacggcctccggcatcagaacatcctaaaaatagtccagtaacaggtaagtgtgaacaacgtgccaggaggcctctagcacattttagcagaaatctgcacatctattctcaatgctc

SEQ ID NO: 315669 - DNA, 535 bp, Homo sapiens
agaatgtgtcttaaatgtcttaaaatgtgtagcttatgtttgcctgtttttgcatgttacctgtaaatgaatgactgtatatattttctcccctgtctagtgcttcaaacctcacacatgaagccaaatgtgactttctgtgtgaatggacatgtgcctcgagattacgatccagtgaaaagaagcaggacttctggacagaaggactcacaagcascgtgggaccagctgttggttgctggggccaaatcctgctttcaatttttgccagcttttctgcctggggtacattctatcccatcctttctcaaagcctcagtttccttgcctcaacacagagactcattgtctcttccctgcagcaatttttgtggattaagtgaatgaaaggacgtgaattaaagaacattaaaggatgttctttgggctatggagggctattggaacataagggatgagggtgagaatgagataaacaatcattatgtagagtcatctccccatgccatgggcacgtgtgatgtggtttcaaggc

SEQ ID NO: 315670 - DNA, 535 bp, Homo sapiens
agaatgtgtcttaaatgtcttaaaatgtgtagcttatgtttgcctgtttttgcatgttacctgtaaatgaatgactgtatatattttctcccctgtctagtgcttcaaacctcacacatgaagccaaatgtgactttctgtgtgaatggacatgtgcctcgagattacgatccagtgaaaagaagcaggacttctggacagaaggactcacaagcagcgtgggaccagctgttggtygctggggccaaatcctgctttcaatttttgccagcttttctgcctggggtacattctatcccatcctttctcaaagcctcagtttccttgcctcaacacagagactcattgtctcttccctgcagcaatttttgtggattaagtgaatgaaaggacgtgaattaaagaacattaaaggatgttctttgggctatggagggctattggaacataagggatgagggtgagaatgagataaacaatcattatgtagagtcatctccccatgccatgggcacgtgtgatgtggtttcaaggc

SEQ ID NO: 315671 - DNA, 535 bp, Homo sapiens
agaatgtgtcttaaatgtcttaaaatgtgtagcttatgtttgcctgtttttgcatgttacctgtaaatgaatgactgtatatattttctcccctgtctagtgcttcaaacctcacacatgaagccaaatgtgactttctgtgtgaatggacatgtgcctcgagattacgatccagtgaaaagaagcaggacttctggacagaaggactcacaagcagcgtgggaccagctgttggttkctggggccaaatcctgctttcaatttttgccagcttttctgcctggggtacattctatcccatcctttctcaaagcctcagtttccttgcctcaacacagagactcattgtctcttccctgcagcaatttttgtggattaagtgaatgaaaggacgtgaattaaagaacattaaaggatgttctttgggctatggagggctattggaacataagggatgagggtgagaatgagataaacaatcattatgtagagtcatctccccatgccatgggcacgtgtgatgtggtttcaaggc

SEQ ID NO: 315672 - DNA, 549 bp, Homo sapiens
tgagctcaacaatcgtttatgtttccaagaatctcagtgtctactggagcaaacaggcttgtcaaaagaagacactgaagaggagaggttaagtctttggggaaagggagctgggagatctttatagaaggggagtatctccactgggttatrttagaataaggggaagctaaatgaaatacacacacaaatgcacacaatcagtaaactttgttgttctttgttcgttgagtctttgcatctgcaaaattggtttggaaattgcaaaaccacagggaccgagcatgcaaaaccatggagactaagcatgcaaccccacaatcagcctatggattcattcttcatggatgatcagatggtgtggctttcacaatttttagtagcaagtaccaaagcccttcctttcttgttgtgaatctaactggggctttctatgtgcccccaaaaatcttagtctcttatggggaggtggaacctaaagaaagcagatgtctttttttgagccagcagtttcttggacaaggtgagagtttgtcccagggagctgaa

SEQ ID NO: 315673 - DNA, 549 bp, Homo sapiens
tgagctcaacaatcgtttatgtttccaagaatctcagtgtctactggagcaaacaggcttgtcaaaagaagacactgaagaggagaggttaagtctttggggaaagggagctgggagatctttatagaaggggagtatctccactgggttatgttagaataaggggaagctaaatgaaatacacacacaaatgcacacaatcagtaaactttgttgttctttgttcgttgagtctttgcatctgcaaaattggtttggaaattgcaaaaccacrgggaccgagcatgcaaaaccatggagactaagcatgcaaccccacaatcagcctatggattcattcttcatggatgatcagatggtgtggctttcacaatttttagtagcaagtaccaaagcccttcctttcttgttgtgaatctaactggggctttctatgtgcccccaaaaatcttagtctcttatggggaggtggaacctaaagaaagcagatgtctttttttgagccagcagtttcttggacaaggtgagagtttgtcccagggagctgaa

SEQ ID NO: 315674 - DNA, 565 bp, Homo sapiens
ttcaagctcagacccatcaaaagcccaactcagatcctccaatttcctcagagaatgggttggcctgtttgatcaaaagtcaaggcttgcgtaggtcattttaagtaatacagtactgaaataagaacatttcaataagccataaactgtggtcctccaagtgaatttctctctgtcatcacagaatgcctgaaatcagttggaaaaattgctttggagatgggcagtgtctcattgtttcttagtggttgaataagcctgagtctattagttaacctctcaaactctcagactggtaatttgtgaatactcaggctatttggaacgttaaaagcatcagtgtagtctacagggccaaagcagtagactacaagcaagtttgtccytgtaatctacaaggacaaaacatctgtcatctcatcttctctctgcttacaatgagcaggtacttagagaagaaagagtggtactgccgtagaagaaactctctttgaggaaagatctggcatcactttggggcagggagcccttttggccaaggcagcatgtgcctacttggaggcat

SEQ ID NO: 315675 - DNA, 561 bp, Homo sapiens
cacacatcaatttcccacagttctggagactggagagtccaagatcgaggtgctggcagattcactgtctagtgaatgtttcttttctgtttcatagatggaaccttctccctgttttctcacatggcagaaggggcaaatgagctctctagggtctcttttataaggccactaatcccattttcaaggttccacccttgcaaagacctccacctcctaatgccatcacattaggggttaggatttcaacatacaaattttagagaaatgtaaatgtttagtttatagcagtattcttattattctcccattttacacatagaaagctgaagctcaaaataarcaagttgtcaagaactgtgaaacagctaacaagtgagcctgtcgcagtttcatggatgctggcggaagacacaagcttcctgggtcagagatacagaacagttttttaatcacagttatagaagtagccagagcatcagtatttcttgcaccttccccataagctccaattctcacaggatgacacaaagagagccaagtgacaccttcatatgcaat

SEQ ID NO: 315676 - DNA, 529 bp, Homo sapiens
gctgaaggaagcgtgtgcaaggaatcatggtgtggaaggaacttaagagatgagcccgaccaacctctgctttatacagatgaagaagggaaagrccagataagcacaggatcttgctgaagctcctatggctaattagaagcagagtttttactgcaacctcagaatctcttatcccagtctattattcaccctctaggagctctcagcctaattgatttaatttgtcactgacatgtcatacttaggatgggaccaaaaactgaaactggctatgtccacagcaagggagaataattagcaaattcacatgttgtgctgatttttgtctccccaaaatcagagccaattattgctttaagtaaagccataggtggaataaaaacatagataccaaaaactttttccagaatctaacaaaacagaactcgtgctttttcttctgggttatctaggttgggataaactcagaattcaactactccttttcccatcccattttttctttcccctctcccttgctgacaca

SEQ ID NO: 315677 - DNA, 573 bp, Homo sapiens
gagactcagggacccctgggaaagttttcaaaggtctaaatccatgccattagaatttcgagagaaaataaatatgaaaaaatgtttggagaaacagttggcaaaatcttcccaaattttatgaaacacgcatttacagattcagaaagttcagtaaaacacaaacatgataaactttaaaaaaacayttccagaaatatgacattaaaactgatgaaaactgaggataactttttaaaaatcttcagagtatccaaaggaaaccaataattgtatatacagaaaaaataatttaaatgactatggatttttcatcagaaattatggaaaccagaggaaaatagaagaacatttttcaattgctaaaagaactatccatgtaaaattttatgtgtaacaaaaatactcatcaggaataaaagcaaaatagaagcattcccatataaagataaactaagggaattagtaacctgcagatatgcttttaaacaattcttaaaagttgttcagagtgaagaaacatgatctacaagcgaaacttggagctgtaaaaatgaagaaggaacaacagaa

SEQ ID NO: 315678 - DNA, 560 bp, Homo sapiens
ttacaagtgtccgaaggagaggaagagagaaacataattacgcattaaatttggaagtaaaggatggagaaaatatatgccaggcagaaactagccttaaaaaaaaaactggtgtagctattttaatatcaggggaaaaaattgaagcctcaaattattacagagaactaaaatacataaaggagttattatggtttagaacttctgtatacccaattatgtatcttcaaatcatatcaaagaaatgacaaaataaaaaaaaactagctraagaatctactattatagtgggagatattaatatacttctctcagtaactgatatctcaggaacaaaataagaaagatctagaatatttgaaccacataattcctgagtttgaaataagatatatagaatcctgtatctcccaaattggagatgaaatgtgcatttagaacacgcataaagaacatacaaatgttgaccatttcctagaccgctgatcccaagtgtttgccaaaatgtggagcaaaggaatctgttacaccctagcagttcatatctatgtgggtacgcc

SEQ ID NO: 315679 - DNA, 526 bp, Homo sapiens
acaacttagaagaaacagacaaagattttgaaagacacaaactactaaagcattccttacaaaagaaggaataggaaatatatgtatccctgcatatattacataaatcgaattaagattttcaaaattttatacacagaaaattctacgtccatatttcttcattggtaaattttaccaataatcaaataataattaataacaactctatacatactttctcaacacatactgtctcagaaaataggagaagaaaatatttccaaatttattttatcagatcaaaaatcacacaaagacattaccgataaaatgtcaataacttttataaacatagatccacaaataatatcactttgacatttttctgggtttgtttttgtaaatcaatcaaatgcagcaatatattaataatataatgtaatatgagcaaggattwattttaagaatgcactgttggtttaacatttgaaaatcaattagtaaaatatcccacgttaacagtcaaaaaatgaagttttatttg

SEQ ID NO: 315680 - DNA, 524 bp, Homo sapiens
cttcttttcacattatactgttgatctttgcaagtgctaggccagaaaatttaaaaagtggtgttaagattggcacaaaagaaatgaaattgtctttatccagggatgatttgattattcacataaataatcttagaaactcttaaaccaataagtaagtttagcaaggttgcagaatacaagactggaatacaaaattaaaaaaaaaaagaataaagaatttctatgtaccagaattcttatgtacagtgcattcttaatagaaataatagacaatgatacttaagagtcactatttataatactgttaaaagttgcaaaatacttaatatatattttccaatgatgtacaagacctgtcttcttaaaattagcaaacattgctaaaagatgyttttatagatataaataaatggagatatttactatgttcctgaatgggaaaatccatgtatgtggcaattcccttcaggattagatcttagatagaataaaatgtcaatcagaattctagaaggatttat

SEQ ID NO: 315681 - DNA, 439 bp, Homo sapiens
cggtaccaatttactatattagtctgttctcacactgctaataaggacatacctgagactgggtaatttataaaggaaagagatttaattgactcacagttccacatggctgggcaggcctcacaattatgatggaaggcaaatgaggagcaaagtcatgtcttacatggtggcaggcaagasagtgtgtacgggggaactccccgttataaaaccatgagatgtcctgagacttattcactatcatgagaacagcatgggaaagaaccacctccatgattcaattacctcccactgggtccctcccatgacatgtgggaattatgggtgctgtaattcaagataagatgtgggtggggacatagccaaaccatattggtaggactgagctaaagttaaaatccacagcaggcatgctcccaggctcattcttacatgt

SEQ ID NO: 315682 - DNA, 566 bp, Homo sapiens
aaccaaactcttgataatctctttgggtgatgattagaaaatgctggttgtgattttttaaaaatatcaaatggattaatgataatcatctagaaataaggtcgtacttcattttatacctaagttgtgatgacatgaggcaccattggcttgattaccaggaagaacaccattcagattgtcccccaaccatctgtagacattcccaaaagcctccatcgcatatgctygtgcacccacttgtcagaagcatacccatgctgcaccgccccggatttgcttcttttgtttctgctttcgcttgcctctgtttcctgcccatgaagctgtaggtgaaggcacacctccaccaccactcacagaagcatcaaccactagctcacaatgctgagtctggaggaaccaagacttcagtcattaaagtgccagaacttctctgggtcctgagtagactcagtcaagatgactgtctcctacctgtgggccatacatactcacttggacacaaatgacctgtgtttctgtggtctctcttcaacggttccagcttctgattatctccactt

SEQ ID NO: 315683 - DNA, 568 bp, Homo sapiens
aaaaatagatctatccctaacttcatggcacttatggtctgaaagtgcttacttatccaagtcaaaacagagtcctgagggacagatcttttctgcaagctactagaattttaaaggtatattttttcttaagaaaatcactttctcattattactaggtcatttgcttctgctttttgctattccccaactgtattcattttcacttatcacagaggtgtaaattgatgaaaattaagtatttccactttatttaatattgcagtttaggggaaaagatggtaactacagcctaaaatcaattttgaatataaagttttaatattatcaactartttttttttattctaatcctcattaaaaaatttggcctagcggggtgcgctggctcacagctgtaatcccagcactttgggaggccaacgcgggtggatcatgaggtcaggaaatcaagaccctcctggctaacacagtgaaaccccatctctactaaaaatacaaaaaattagccaggcatggtagcacgtgcctgtagtcccagctacgtgggaggctgaggcaggagaat

SEQ ID NO: 315684 - DNA, 556 bp, Homo sapiens
acagctacgatcataatacattcaaaygtaaatttcaagggaataagcttttttgagcttattttcattcactagttgtttattataaattaaagaaatgagtgatgttaaaaatacagcactctctatataaataaatacttaaatttctaggaccagaaaataacttcctaattgtatggtataacttaggcagggtaaggttgaaaaaattcttaagactagacagtcaagcactttaccatctatctagaaattaaaatattgttaacctgaaaagctttgggatatagattttgaaaagggctatggctatcattaaactacttttctgggctagatgtaataaaactacatctaaaaagggtaactttgggaagatacacttccacaaagcattgctttcctttattcacagaaatctggattttgaggttattctctgagatagcgagaaaaaaagaacagcttattttgacttgtcctgatcccccttttctatttgttgatcagaatgaaataaaagtagaagttagaaatgtgtttatagtctata

SEQ ID NO: 315685 - DNA, 608 bp, Homo sapiens
agctgttacagtttaataaaatcagttttatcatttgctttttatgcatacattttaaaagttagctgtattcttacatttgacttgtactatattcagaatgcatttttttccctcagcaataactggttagattttataatagaagtaattagaaacagctgatttacttaagagatttctgtatgggaaatgttgcaagaatccacctacatttctaataaataatgactgtaatgaaggaaaaagagaaaaaagttttattttatgagrtcttttttttttttttaaataccatcttgatagtttggagtataaccttttgctctttattttcttttggttagcatcttcatatgttatcgtaattatttttatttataagctctgaaatttgatattttatcttatacgtgtgtgtgtgtgtgtgtgtgtgtgtgtgtgtgtaataaagtatatacttttactgatcaaagtaagtagagaactgggcaatttcagataaaaataataaaaaaattgttcatatgagacatatgaagaagagctgtacactgttatttgtatttttaagtttcctcttctgttattgcaattttgaaataatt

SEQ ID NO: 315686 - DNA, 541 bp, Homo sapiens
tgtgtatgagcaggaacagtagacagcttagattttagtctacttagtgctttctcatcaacactatgccatgacagtaggtttcacgttggtcaggctggtcttgaactcttgacctcaagtgatccacccacctcggcctcccaaartgctgagattacaggcatgagccactatgccaggccagcagccaaagtttttctttggattttctctacctcttgttagttgcatgggttgctccattgcctcaggtttctgctcaaatgatatcatatgagagaagaatttctgacttccctattgaaaataactccttcaacccctctgcctgtaatgtctgtccccttaccttgctttatatttactcacagatcttacatttttgcaggttatgtttacttttctgcatgattttctgctggagtatgagctccaagaagacaaacatattgccattttgtttgttcctatgtcctcagctctggacataatgataaagttggcatacagtgaaagcagcagtttaaaattgagaagt

SEQ ID NO: 315687 - DNA, 541 bp, Homo sapiens
tgtgtatgagcaggaacagtagacagcttagattttagtctacttagtgctttctcatcaacactatgccatgacagtaggtttcacgttggtcaggctggtcttgaactcttgacctcaagtgatccacccacctcggcctcccaaaatgctgagattacaggcrtgagccactatgccaggccagcagccaaagtttttctttggattttctctacctcttgttagttgcatgggttgctccattgcctcaggtttctgctcaaatgatatcatatgagagaagaatttctgacttccctattgaaaataactccttcaacccctctgcctgtaatgtctgtccccttaccttgctttatatttactcacagatcttacatttttgcaggttatgtttacttttctgcatgattttctgctggagtatgagctccaagaagacaaacatattgccattttgtttgttcctatgtcctcagctctggacataatgataaagttggcatacagtgaaagcagcagtttaaaattgagaagt

SEQ ID NO: 315688 - DNA, 541 bp, Homo sapiens
tgtgtatgagcaggaacagtagacagcttagattttagtctacttagtgctttctcatcaacactatgccatgacagtaggtttcacgttggtcaggctggtcttgaactcttgacctcaagtgatccacccacctcggcctcccaaaatgctgagattacaggcatgagccactatgccwggccagcagccaaagtttttctttggattttctctacctcttgttagttgcatgggttgctccattgcctcaggtttctgctcaaatgatatcatatgagagaagaatttctgacttccctattgaaaataactccttcaacccctctgcctgtaatgtctgtccccttaccttgctttatatttactcacagatcttacatttttgcaggttatgtttacttttctgcatgattttctgctggagtatgagctccaagaagacaaacatattgccattttgtttgttcctatgtcctcagctctggacataatgataaagttggcatacagtgaaagcagcagtttaaaattgagaagt

SEQ ID NO: 315689 - DNA, 561 bp, Homo sapiens
gaatagaggtggattctgaaaaatataatcaacttgcaaaattgaataaactgctgaatcgattatttctatttagcaaaaggaagcatgatagctaggaacctgcataaattctctagaaattaacttgatttttatagttgacagagtcatgtattagggcctgggtacctgatatactggatggactatttcatgctgcccttggagacaagttggagaaacgttggcagcagtgaagtgaatttacatgtattgaaccattacatcaacragtgtgaacttttacaagattctagtagacctggaaaacatggtgatagaactgaaaatatgtagcctggaaaagaaaaatgttttgttgttttccctcttgggcagtataggcatggcaactattctcaaatatttctaatagctctgtcattaaagaccaattagatattcctcgtatctcaagtaggacaatttgggatcaggaaggcagaattttcttcatacaagggaaaacatttctgtcaataagtctaacagaaacgactatcttttgaggtaggaaat

SEQ ID NO: 315690 - DNA, 589 bp, Homo sapiens
ggaagcagctcatcctcattagagctcaactagtgtctaacgtgctcacttttcttcctttgtgattagtaaccatgttcttgggactyggcaaccgtgggactatacagtcaacccaagaagcctcagcattcacatcatagtcaaagtcattcaagcaaagctatatccagtaagaaatttctcctgtagagagaaatttttattttacctattctcagactgaccctttgctcattataatagtaaaaccacactcacacatataatctagcactttgggaagccaaggcggacggaacacctgaggtcaggagttttgagaccagcttggccaacatggtgaaatcccatctctactaaaaataccaaaaattagctgggtgtggtggcgggtgcctgtaatcccagctactcaggaggctgagacaggagaatcacttggacccaggaggcagaggctgcagtgagctgtgatcacgccattgcactccagcctggcaacagagcgagaatgtgccacaaaacaaaacagaaaccaaacacacaggtggagatttaagatgctaatgagacatgcgacatatga

SEQ ID NO: 315691 - DNA, 582 bp, Homo sapiens
gtagaaaaggaataaggccaactagttatccaaaagcaggtggcagaattatgacttctcagctttttggataagatgaggaagaaaacaaaattataaatcatggtacaaattttgtgctattttgtaccatgatttataattctgtttttatcacacacataatgacatataatactgttatggtttaaaaggttttataagattraatatgctttttgctgcttacttcatatgtagaatagtagactcctctgtgaaaggatataaagacttgatggaaatcttgtgtatgtcagtaccaattatataaggcattaaaccaaactatagccataaatattgtgtgagggccttggtttgatgtttcaattaagttgttggttctgaagtagctcagaatattgctgcctccatatcttcagtggttggcactgatctttacatgagatgaaattgaaaactgtggatgccaaaggcctacatcaacaatatcttagtgggtacaggaggtaaatggataagatgctgtaaagcttttttcagtcttagtcttctgttatgtgaccaagatgctttgtc

SEQ ID NO: 315692 - DNA, 662 bp, Homo sapiens
acccctccaaaaaatggcttatatattggcttaaaattacaacatataaggagaataacacacacctgtaatgttaagccatttacaaagaaaattcaatgaaatgtasgttcttctcaatgtcataagaatatccattctaagccaaattaatccatgaatttaaggcattttcccctaagagaatattttattttggtaaatgaaaagttgatcctaaaatttatatgaaagaaggaaaactaacagtaaccaaagtgaatttaaagaacttgagaaatgtcctactagacttcaaggcttaacataaagctatatgagttttaaaaaacatggtattataactgagatacataaatagcctagtagggtagaataaaccagtaaaaatgagctcttatagagaatcttcatatattaataacacttttaatcagggtaaacgtaactcaaaaattataatggagtaagaggtaataagtatagaagaaaaccatttttaatctcaagtatttctgcccttgaaaaaacacacatacacacatgccaattccaagtgcataaaaatcccaaatgaaaaaaacaaaacttttaaatttcttaaaggaaatataggattaaattttatgacctggtattgagaaatatttttataaaaagga

SEQ ID NO: 315693 - DNA, 580 bp, Homo sapiens
cggcatcagttgtaagcagacaagtttgtgagaaacttctacagactaaaactgtcatcgtgcctatgctatatgatctttctaacctacaggatggaagaattaagtgagacacagccataaatactgtttttttttaacattttagttattttattacaaaccaaaatacaaatacagaaaagcatacaaaaattttgtagtgtaatgaatgcatagaaggtaagtgctctcatatcctttccccatatcaagaaacagaattttaacagccaccttctaagcccctccttgtgccccattcagatcaccaactcttccccacaaaatagcaactatcttacttaaatttttctttttaattgatacataatatttgtacatacatrtaatacatgtgatatttagttgcattttaagatgtgtagtgatcaatttagggtatgtaggatattcatcacctctagtatttatgatttatatatgtagagaacatttcaaatccttctgctagtattttgaagtatacaatacactgcttttaactgtagtcaccctactattctattgaacattataa

SEQ ID NO: 315694 - DNA, 463 bp, Homo sapiens
tttgttctttttgctcaaaatttatttggctatttaagttctttttgtggttccattcacattttaggattgttttactatttctgtgaagaatgtcctgttgttttgatagggattgcactgactttgtagattgttttgggtaaaatagacatttaacaatattcaatcctttcatttttcctgcttcagctgatattttcagattgtctgacatgctttccaaggaaaacctattggctattttgggtttttttctgttctcaagtttgccatatgtccccagtagtttcatagtttcagccrtccatttaagtctttaatccatcttgagttaatttttgtatgtgatgagagacaggggtccagttttattcttctgcatattggtatacagtttctctctgctctctcctgcagatgacaatataatttatgtgaacattgtagcaattggtggttt

SEQ ID NO: 315695 - DNA, 595 bp, Homo sapiens
gattatcttgctgctcagcttgcagacagctgattgtgggacttcactttgtgatcctgtgtgtcagtactgcttaataaattccttttcatgtatacatctatcctattagtcctgtccctctagagtaccttgattaatacagtgtgattaccttgtagataaatatgtttatggggtacatgagatattttgatagagttctgcaatacataacaatcacatcagggtaaatagggtgctcatccagtgaagcatttatcctttgtttttcaaacaatccaattatactcttttagttattttgaaatgaaaaattaaattattttttaccatactctttgtgatgtgttagcaaatactaggtcttatttattacttctaactattactttgtacctattaaccattttcccttccctcccagcttcccagcctctagtaaccatccttctactctctatctctatgagttcaatagttttaatattacattacamtctcacagctaagtaagaacatgtgatgtttgtctttctgtgactggattatttcactcaatgtaataacatccagttccatccaggtttttacc

SEQ ID NO: 315696 - DNA, 371 bp, Homo sapiens
aacaatgtcctggagatttcccccaatcttttcttgtagtagtttcatagttttgagataacatatttaagtatttaatttatttttatttgatgtttatatatggtgagaaatagaggtctagtttcatttttcttcatatggatatccagttttaccagcatcatttactgaagtggctgtctttaccccccactgtatgttmtttgcatctttgtgagaatgagttcactgtaggtatgtgaatttctttctgggttctctattctgttccattggtctatgtctctgtatttatgccagtatcatgctgttttggttactatagctctgtagtataatttgaagtcgggtaatgtaattccagtttt

SEQ ID NO: 315697 - DNA, 624 bp, Homo sapiens
aattctggagttgaaaagtataataactaaaatgaaaacttactagaggtgtttgacagcagatttgagtatgcagaagaaagaattagtcaacttaaaaataagacaattgaaattatctagtctacagataraaaatatgaacatgcacacacacagacacatatacatacatacaacagaaaaccaagaatgctgtatctagtgaagtgaaactgaccttcaaaaattaaatagaaaataagattttcccagataaataaaagccgatggaatgtattattactaaacctaacttacaagaaatgctaatggacatcattgtagtcaaatgaaaggatggtaggcaaaactatatgaaaatataaggttctctgttaaaggtaaaataggaacacatataaaggccttaattatcatataaatttttgtgactatattttattattttatagaatgtaaaagagaaaagcataaaataactctaaacttatgttaatgggtacacaacatagaaaaggtatggtttgtgacacacataacataaagggaggcagcggaagagctgtagtcaattttttgtttgtaaatcgagttaagttcttatcaatttaaaatgtatga

SEQ ID NO: 315698 - DNA, 624 bp, Homo sapiens
aattctggagttgaaaagtataataactaaaatgaaaacttactagaggtgtttgacagcagatttgagtatgcagaagaaagaattagtcaacttaaaaataagacaattgaaattatctagtctacagatagaaaatatgaacatgcacacacacagacacatatacatacatacaacagaaaaccaagaatgctgtatctagtgaagtgaaactgaccttcaaaaattaaatagaaaataagattttcccagataaataaaagccgatggaatgtattattactaaacctaacttacaagaaatgctaatggacatcattktagtcaaatgaaaggatggtaggcaaaactatatgaaaatataaggttctctgttaaaggtaaaataggaacacatataaaggccttaattatcatataaatttttgtgactatattttattattttatagaatgtaaaagagaaaagcataaaataactctaaacttatgttaatgggtacacaacatagaaaaggtatggtttgtgacacacataacataaagggaggcagcggaagagctgtagtcaattttttgtttgtaaatcgagttaagttcttatcaatttaaaatgtatga

SEQ ID NO: 315699 - DNA, 561 bp, Homo sapiens
tgggagggcatgaataataagtctgtggggccagcatgccacctggggccatggaggctggtttggcaattaaattgggcctgaagactgggtctatatatgctggcgtggttattagggctgcaagagccagactgatgctggggcaggcacaaacctgagccttaggggcccacctggcattgggttgggcctgaagctcagtccacagctaccagcctaaagtctggggctttgagggcctgaatagcaatagcatttacttgggctgacccactattggggtccaagacaaagttcagtgttcacttcattccctttcctctaggaggttatctttctccatgctgtgctgcctggggttaggagaggagtggtctggataatgtaaaactattctttctaccctcttgaatgcatctttacttagttttgtgctrgacccaagtgctctaatctgtcatctggtttccttagctctggtgaagctatttttgtacatgaataggtgctcaaattgatgtttttgcaaagggaaaactgctgaaaagttctatttca

SEQ ID NO: 315700 - DNA, 519 bp, Homo sapiens
tctatttttactttcttgcctgtgcttttattatatccaagaaaattatccaatccaagtttayaggtttccccctttgttttcttctaggtgtttaatagtttagctcttagatataggtattctatccattttagttaattttatacgtggtgtaaagtaaaggtccaacttcattttctgcatgtgcatatccagttttcccggtaccatttgttgacagaactgttctttcctctttgaatggtcttcatactcttttcaaaaataatttgaccatatttgagaagaatatagaaatgatttttaaatccattataaagaaggagaaaatatgcattaatactgtatcttatacttacgtaattacttttactggtgctctttgtgtgtttgtgtgcgtgtgtgtgtgtgtgtgtgtgtgtatgtgtgtgtgtttgcatttccatctgggcctatttgttttcagcctacagaatagcctttagtatttcctataaggcaggcctactagaaata

SEQ ID NO: 315701 - DNA, 561 bp, Homo sapiens
agaagtagaagtttacagtttctgtatgtgattaaagttgttatcatcttagaatggattgttttgagtatagcatgttttatgaaagcccagtggtaaccacaatgacaatgtctatagtaaattcatcacagaaaatgagaaaygattcaaaggatgtccctgtcaaaaaatcaatgaaccaccaaagaagacagcaagagaggaatagagagacaaaagagctataaggcagagataaaacaaataacacaataaaaatagttagtccttccctatcaataattaggaagaatctgatctgaataacattacactgtacaatgcctgtcatggagttcagcaaaccacagttttctggactgccatgcctaacttttcctattttacatgtgctaaggaaagaaactgaatcccactcatttttatatttgcaagactggcaggatgtctagtctcaaaaaatttttcatcaataaaaaatagaagctccagtttatgaaaattactgctctcagataagaactaattgtggccatagttgtgaaaggaaaggaaact

SEQ ID NO: 315702 - DNA, 559 bp, Homo sapiens
cagctaaactctctgacctttgaaaatgtgggtgtaataaccagatcgaaggacagaaatcaaacaggagatggatgaaataagctctctctctctctctctytttttttttttttttatgacaagcgttgatcttttttctgtagctgccgattcccagaaaagtttttcttaatttccaaggtcattaagcagcagaatagagacaaagtcaaacttactctgtctgccattttgggtgaagattttccaggagtatggcagctcacttcataccagttactttgggagaacctctctcttctctctaggaagggagaatgttaagcttaattaattctgttttgtttctttcaaggaggttttcatttttaggcttacattttaggaggtggtttacatttaagagctccaggatttaatcaatctttttagataccaggtctttattgaagaaaagaaagagggggcatgcagtgggcagaagagccagattaatgagcatgtagagattaatctgtgcctcctactccatccagttgattgtatggctgtggat

SEQ ID NO: 315703 - DNA, 629 bp, Homo sapiens
gtgctgggctattggctgcactctgcaggctcagagttaaagttagagggacctatgtgagtgtctacagccagcgtggtcaggaggagtgagaagaaggcagtgtagacatctataacaccctgtgacaggaagtagacagactgttagccacagatctatagatcttacttttctattgcctcatcctttccccctttgtttcttagtacatacctacaattcacactgtattttttagtgtgctgatttaacttttctctttctaaggctgtgtgagcatttccagggctgtggttgtgaatgcagaggtctttccaaagaaagacatctcttctcatttcggtattcacttttacagtaggatgtcccttaatgaaaaggtccatttacagatagttttctcatctgtagctagacagggacagaacaattaccttccagtggtcttcccctacaagtgagagcagaggaattcatggtccttcattatcatttgatctcccttgttacaatactgactctggagatggtataggtcgggcrtgggattagaggcaatggaggggcaagaagtggtgatgaaatgagttggcattcatatagtaatcattgtgagcactccctgt

SEQ ID NO: 315704 - DNA, 603 bp, Homo sapiens
atggtccaaagcttactgatggctctccttttgattaatactttattggatctgtttactgaaaccttttaagtagcaaaataaagcatcatttaagtctgaatgtgacaatcaatcatcctaatactgagaaaaaaataacaaaatgaaagaacacaaaaattgcaatatccaacctttattgaatacatgcaatttgycaggcaaaaccaactatgaaatagatattcttgctttatatacaagaaaacaggcacagagaggttaacaaagggaagctgtgatttgaaagtaatagtcctgatgcccaaactcacattcctcactacaatgcaatgctctataaacattttcataggtgcaaatcatttatgaatttttataatccgtaaggcagctttgttttaaaaatgctcacttaaaacaataagaatgttcatctgcatataaaatgtcccattgcttcctcaaaatgtttatttctgcctatagggtcattttagacctagttttctgccttttctaattttctttgcaaatctgcatgttacttggttaacaaatcaatctcctaaaataccccaaatctctgagaacaaagaa

SEQ ID NO: 315705 - DNA, 525 bp, Homo sapiens
ctcgatctcctgacctcgttatcagccygcctcggcctcccaaagtgctgggattacatgcgtgagccacagcgcctggccaaatgttaatattttcaactcaacacattgtatccctgtgtgttggagccctcttcattttggtaccttcactctgagcagagtagctgaagccagtctatgctgtagctagaaatcgaagtagagaaaacatctgaaaatattaaaatggtattggataagctcccttctgaaagcacatttgatgcaggtcaggcaagcacctgtgatgtgaaactgtggcatcagtctctagatcccagtggtttatctgaaagctttggctctctctctgagaatatgtccttaaaaaactagtgcaacatgtagtatctacaggaatgaattgattaagacatatttctctcaggtgggtggaggaggaattacttattcattctgggcatcaaaatcgttgactatatcgatacgtctatttattaagtattcagtctatgccagcca

SEQ ID NO: 315706 - DNA, 525 bp, Homo sapiens
ctcgatctcctgacctcgttatcagcctgcctcggcctcccaaagtgctgggattacatgygtgagccacagcgcctggccaaatgttaatattttcaactcaacacattgtatccctgtgtgttggagccctcttcattttggtaccttcactctgagcagagtagctgaagccagtctatgctgtagctagaaatcgaagtagagaaaacatctgaaaatattaaaatggtattggataagctcccttctgaaagcacatttgatgcaggtcaggcaagcacctgtgatgtgaaactgtggcatcagtctctagatcccagtggtttatctgaaagctttggctctctctctgagaatatgtccttaaaaaactagtgcaacatgtagtatctacaggaatgaattgattaagacatatttctctcaggtgggtggaggaggaattacttattcattctgggcatcaaaatcgttgactatatcgatacgtctatttattaagtattcagtctatgccagcca

SEQ ID NO: 315707 - DNA, 525 bp, Homo sapiens
ctcgatctcctgacctcgttatcagcctgcctcggcctcccaaagtgctgggattacatgcgtgagccacagcgcctggccaaatgttaatattttcaactcaacacattgtatccctgtgtgttggagccctcttcattttggtaccttcactctgagcagagtagctgaagccagtctatgctgtagctagaaatcgaagtagagaaaacatctgaaaatattaaaatggtattggataagctcccttctgaaagcacatttgatgcaggtcaggcaagcacctgtgatgtgaaactgtggcatcagtctctagatcccagtggtttatctgaaagctttggctctctctctgagaatrtgtccttaaaaaactagtgcaacatgtagtatctacaggaatgaattgattaagacatatttctctcaggtgggtggaggaggaattacttattcattctgggcatcaaaatcgttgactatatcgatacgtctatttattaagtattcagtctatgccagcca

SEQ ID NO: 315708 - DNA, 525 bp, Homo sapiens
ctcgatctcctgacctcgttatcagcctgcctcggcctcccaaagtgctgggattacatgcgtgagccacagcgcctggccaaatgttaatattttcaactcaacacattgtatccctgtgtgttggagccctcttcattttggtaccttcactctgagcagagtagctgaagccagtctatgctgtagctagaaatcgaagtagagaaaacatctgaaaatattaaaatggtattggataagctcccttctgaaagcacatttgatgcaggtcaggcaagcacctgtgatgtgaaactgtggcatcagtctctagatcccagtggtttatctgaaagctttggctctctctctgagaatatgtccttaaaaaactagtgcaacatgtagtatctacaggaatgaattgattaagacatatttctctcaggtgggtggaggaggaattacttattcattctgggcatcaaaatcrttgactatatcgatacgtctatttattaagtattcagtctatgccagcca

SEQ ID NO: 315709 - DNA, 587 bp, Homo sapiens
tttgtttttctatcttcacctcaaggttcagattcttcttaaccctcaaaccatcaagtgcctgatgagatctcatcttctagataattactatgctcccacttctttaaggataactaccctcaagatcagcataaaagctcckttcttctgtagaagagctggcaactgcatgtcttacttcaaatgagaattaacaccattccataacttccttctggtatcattttacttctgcctaaagtacttcctttattaggtgatgaatccatttaggtatgtcttaaaaagtctttatttcaatttactttcaaaaaatgtattcactagatgtagaattctaacttaacagttgcttttcttgctgttgattttttttctttcagtaatttaaagacctagctctttcagtaatttaaagacttagtaagttaaagactgtctatccttaaagaagtgttttatactgattatgaggccaccacaccaaacctcataatgtgttgtttctccctactatctttaatttaattatgtttacataatttctggggaaaaaagtgctgcaactcatatctttgctgttc

SEQ ID NO: 315710 - DNA, 647 bp, Homo sapiens
ggctccttgtgaactctgagcacaattacttctaatcatttttttgtgtttctctctttgttcaggtggttatttttttcccataggcatgtgatcagctctctgctgagtatccattcaaaggggacactttgcatatctctgtaattcttgttatgtgcatctatctcctctgtggtactttgtcttggaaactctagctgctttgctttccccatactcaactccatctctgcttgtcagggagtttgacctctgcaatggcctggaaactattttcagacagtagtaaattggaccaataacagaagttaccttctaaatacacaatttctccaataccactgtcctttgttgtctatgttcagtgtctttgaaactatctctatctatctatcatctatctattatctagccagctagctagctgccaactgattttttgtttgtatcaggtgggtgagtaaatccagcctcctttactttatcttgatgaaaagtgacagctttccatctatatatttgaacccacagaatccttatgaggtggtatcrtctgctctgatttacaaacaaggaatcctaaatggcagagaaggcaaggcttttgttcccatagtcagaaagtttaaaagcaagagagcaag

SEQ ID NO: 315711 - DNA, 607 bp, Homo sapiens
taacacagcagttcagtacattrtatattatttgctcacagatgtaatgattcttggctcaaactgtataaagtggtgtgactttggacaaaacaatttactgctatggacgtttatctctatcactatgatagtgttggattaaaatatctctaaggtgcttttcagcctcaacaccatgttttcttttctaaagattgtttacttattatgacatataagctgccccaaaccaaattcccagggtacaaagagtgatatctctgcctgtcatcggtacataagtaagcacatatgcacattatacattatcaaaagggatcaatttgcaatagtgaacaaacatcaaagaatagtgaacaaacatcatgaacaaagggagagctaaaatgggacatgtagaaagattgctaagcaattctgtatgcctgcttgtgtcgatcacaaggcagtacatactcatggaattttatccaagtgttcccaatattccaaagtaaaactaaaatgtaagcatttatgactgactcagatccatacattttaggcaacatggaaaaagaccaaaacacaggggtattaagagtcctgataagagagtggttca

SEQ ID NO: 315712 - DNA, 483 bp, Homo sapiens
cagattattttagagaacagtatttgattataacacttgaagaagcacaagctttgtactcatatccaagtggcagattcatattaatgtttaatgcttattcatcataaaaaacctttttatttttaatatgaaactttttaattgttaattaaaatttcagtagcatatatcttgggaacctgaaattcaaaaggtctgataaaatgtaaatgattttatgtaaatgctaaaatggaatcatgggtcaggcataatttatcactgtcacaactaatcatggggattgttaatgtgcaacagtaaaatcaaggtcattttatttacatatatcaaaataatagtgatgttgataagcatagaaacatgtttttattgttcccatmtttacaaatgcaatagtccctccttgtacagagaggatacattccaacattcacagcacagtggatgcctgaaaacacaaatagcaccaaactctat

SEQ ID NO: 315713 - DNA, 332 bp, Homo sapiens
atatttgcaaataaagtctgctttgcgccctccagaaccagtgaccagcatcccacactgctagtgagggctgtcctttttaagaccactgagagccagggaagggtagggcaggaagaaataaaaatgctacaaagcttcctaccactctaaagtgaccctttccttgattcagcatcatcttggatggtgtaaacctgttttctagggttgtgayagaagttattgtgattgtttagtgctgattccagtgcttctgaggaggaatagactcttgaaagtgtctactctaccatgttctctgatatccagataaatgtttttaacctccc

SEQ ID NO: 315714 - DNA, 458 bp, Homo sapiens
ggagtgtgcacgatgtcctttcatttgtatgtgtaaatgtttgtgtgtgtgtgtgtgtattttacactacataaaattttaattttcccactttctctttcacaagctacctggtgaaaggagttgcttactgcataaaagtttcctcagggcccataacattttgtgttttcttctcattctgacctaattgatcttattcgtaggtaaatcaaggcacaaaccaggtgtctttcagagtcaaaactgtctggtgtacaattctaataataactttatatttgtcaatgtccacaaaagcccactacaccaccattcacattctagcagctctctggctatctctccaggttggctgtggggagggaggaaaagtgaagggacrgaatactcctttttgatctggtaccttaagtaaacctgtattatgctctttggaactgagagttttataaatt

SEQ ID NO: 315715 - DNA, 612 bp, Homo sapiens
tgagtgtaggcacccttgtcctgttccagttcttagaggaaaaactaaaagcttatttatttagaacgatgttagtggtgggtttgtcatatatagcctttgttatgttaaggtactttcgttctatacaaaatttattaagagtttttatcataaaataataytgaattttatcaaatctttttatgtgtcaattgagatgattatattgtatgtgtccttcattctattgatgtgatgtatggtggttattgatttgtgtatgttgagacttccttgcattcctggaataaatcctttctgatcacggtgtattaccttttgatgcactttttgatttggtttgcaagtattttgttgagaacttttgtgtctatgttaatcagggatattggcctgtagttttttgttgttgctgttgtgtacttgtctgatttgggtataagggttatgctagccttatagagtgaattacaaagaactccctgtgttttaatttctttggaatagcttgagaagaattggtattaattctcctttaaaggtttggtagaattcagcggtaaagccatccagtcctgaacttttcttttttggaagacttatttatta

SEQ ID NO: 315716 - DNA, 572 bp, Homo sapiens
gtggctcattcccttaatctctatctttaatacctataggtagaactttcttcaccaaagccccctgcaaaatccatgcccagttccttattgaggccctgctgagcacagccacaacctcccctaggttggagagggcagcaaagggtggctcaggttggactcaggtctggctgcagagaagaatggttcagtcactcagaaaatgcttactgggaaactcctgggagccaggcgcttggctggtgctgagtgtagggggcaggatgggcaagtggaatctgggggtggggagaggggatggggtattagcaaaaattattacaaaccttcctcaacagtgcaggaagactgaccatgggtggattcaaggtgcctggagtgtggattggggaccctagctcacctctgattcccacccaactcctgcactcaccaccccaacacatgcacacacacatgcacagcygttaaataggctgcaaatttcacagcaagagctattgagggacagcctatacacaccagttggtggcacaagggggagagctgtaggccccacaccacattgc

SEQ ID NO: 315717 - DNA, 585 bp, Homo sapiens
ctgtgttagctagcactgtgcttcctggcaaagttgttcctgcattgtcagtgagttgtaggttatgttttggattcatttgttatgtcctatttgagactaatttaaaagtattacctagtgaagtggagtattctctggtttccaaatttaaatagggatgctttgagaaaatgtgatttatatacaggcgaacagtgactccataaaagtcactgtcgtaagtattccagckacccagggccaagtttatacagaccctgcctgcattttaccaaccatctgtggttttacaagaaagaatgaacaattgcaattagcagcttatccagaaacttccttttaaacaataatttctcttcactagattaatttcaaaagatagttgccaattagccaaatggtcactttcatagacatttctcatccctgtgctctaaataaacttgctcattagcaatgagaacatttaaaggaagagttaaaattaaaagatgaagtaaaaaatagagcatgtcaggtaacatccacctatgttgttatagatgccataaggaaaatgtggccctctaataagagaaccaa

SEQ ID NO: 315718 - DNA, 585 bp, Homo sapiens
ctgtgttagctagcactgtgcttcctggcaaagttgttcctgcattgtcagtgagttgtaggttatgttttggattcatttgttatgtcctatttgagactaatttaaaagtattacctagtgaagtggagtattctctggtttccaaatttaaatagggatgctttgagaaaatgtgatttatatacaggcgaacagtgactccataaaagtcactgtcgtaagtattccagctacccagggccaagtttatacagaccctgcctgcattttaccaaccatctgtggttttacaagaragaatgaacaattgcaattagcagcttatccagaaacttccttttaaacaataatttctcttcactagattaatttcaaaagatagttgccaattagccaaatggtcactttcatagacatttctcatccctgtgctctaaataaacttgctcattagcaatgagaacatttaaaggaagagttaaaattaaaagatgaagtaaaaaatagagcatgtcaggtaacatccacctatgttgttatagatgccataaggaaaatgtggccctctaataagagaaccaa

SEQ ID NO: 315719 - DNA, 585 bp, Homo sapiens
ctgtgttagctagcactgtgcttcctggcaaagttgttcctgcattgtcagtgagttgtaggttatgttttggattcatttgttatgtcctatttgagactaatttaaaagtattacctagtgaagtggagtattctctggtttccaaatttaaatagggatgctttgagaaaatgtgatttatatacaggcgaacagtgactccataaaagtcactgtcgtaagtattccagctacccagggccaagtttatacagaccctgcctgcattttaccaaccatctgtggttttacaagaaagaatgaacaattgcaattagcagcttatccagaaacttccttttaaacaataatttctcttcactagattaatttcaaaagatagttgccaattagccaaatggtcactttcatagacatttctcatccctgtgctctaaataaacttgctcattagcaatgagaacatttaaaggaagagttaaarttaaaagatgaagtaaaaaatagagcatgtcaggtaacatccacctatgttgttatagatgccataaggaaaatgtggccctctaataagagaaccaa

SEQ ID NO: 315720 - DNA, 565 bp, Homo sapiens
gtcaggtaacatccacctatgttgttatagatgccataaggaaaatgtggccctctaataagagaaccaaaattaatacagaataatttgaaaataaatgatgtcctgttgttaagcaagcactcagatttaaggtgtcttaaaacaaatgctttttaaaccttcaagagtatttagaggggttcctcatttgaagtagaaaatttgtagaatcttttagaggtgacagaaactttaagaagctcacagtccagtttccttgttttgttattataacagttggcacttaaagcagaactatatttaagtgaccttcatccacataagttcaagtgagtcatatatgcaaaagtatttgcaaactgcatggactaacgttcatattttaatagagtgtgtgcaaagttcaacctaggagaaacgtcatatgttaagacagacctgttcccccatagggccttttattcaacaggaagaaaaactgtgaggttacatctttctctcaggtkcagccctttaaaaggagagagctgaaactaatacccatgtactttccaaagtgctg

SEQ ID NO: 315721 - DNA, 599 bp, Homo sapiens
taaatgttgagtaactgacttcgtaacccttattatagattatcaccaacagcaacaggagcaatcatggatcaaaaatttaggaccacttttattcctgtagcaagagctttaaaatgaatgcctctcaggctcatcgtcttctgtggttaagtcccaccttcagccatcttcattgctgatggagggaactggctgccagtgcccaaaggagggagcccaggtttcctgcagctgctttgccttaacatccctcccctttcccttcgcacttctgccattcagtgtgtacccccacccaccacacactccctccttcaggtcccagaaccacgctagaaacaaacattctggtgatgcgctcaaacgggccctggtctcgggcagttcagttcattctgcagtcagaatagtggtgctgggctgacctgaattggaattccagctttgccacatacyggcagtgctgctgtaacaaaggcacttcatctcctaagcctgtttcttgggctggagtaggtgcctcacactgctgtgttggggaatgaatgagatcgtgcatataaagagcagcatccagcacctgcctggcagggagc

SEQ ID NO: 315722 - DNA, 507 bp, Homo sapiens
gctaactgcaggcttgttgatgaggatttgaaatgtgtttctaggaaggaaggagaggtagcaagtgggcagtgtgtgtgtttgtttgttcactttaatggaaggcattgaggtagtgaatcgtgttctaattggtattgaaaaacaatcttggtgaccattaagaaaaggctgagaaaggctrtggaagagtatggagacacgtttaggaggttagagcaaggctctaggtgaaagatgatgtgggcttgagtttgggcagaggtgttgggagcttatgaggagtatacagtttgggtgttatggtgggtaggtggtgctgataaggaaggaggagaacttgagaatgaaccagggtttctaccactgtgacttgggttgctataaaggatattaaccaagaatgggtatctctttccagcccacccccacacccccaaataaaagtaggtgtaaggagaggcaatgtgtttcatcttggacatgctgagtttaagaagctgaatg

SEQ ID NO: 315723 - DNA, 501 bp, Homo sapiens
agggagggaaggtgttccaggcagaggcaaccacaggaccctggagggaagctgcagggattcagtatgaaccaggggagatagggaatggggattctagggagaactgaggccttgtcatggatataccacgtcaggaattkggcttcagctcatgaatgacagagagccccaaaggatttgggtgtggaagtgacaaggggaaagggccacactggagatactgcagagacagagtggatcatccaaaggcagaacaatcagcatctgacttaacaaggaaaaggttactggcaaccttttgcctcagtgttttcagactgatggcctatctgagttctttgattacatgcaacagaaatcaactctggctaatttcaggaaaagggaaaagaatattataagctcaaaatgttgatgtgaagagtaaggcttacaaaagataggaaagaaggtaacagctccagagggctagtgagccaaatgggtctcacagccaga

SEQ ID NO: 315724 - DNA, 464 bp, Homo sapiens
tattcccccccccacacacacacacatttgcctgcgtgagtaaccagactagayctcttttacaattttcacattccccatatctgatcagaggttcttcccaaatgtatgcacatgacacgcacacacacacacacacacacacacatgcatacacttggacatgcacacacacacatccctatctccatttcagaaatgttctttgctttgttgggagcaggaagccactgtttgttctgagtgcagaccatggtctctcttgttctgaattctggtgagttgtcaccatgaatgaatgaatttcctgtggggaagacaggatcatcttcctatctgtttctcacgcctcctgtgtctctgctgttgccagtgttagaaaccttaaccccttggagtctgttcatctctcttgctggttctgctccctggtatgcgtgcagctagtgactgtgcaggcatca

SEQ ID NO: 315725 - DNA, 464 bp, Homo sapiens
tattcccccccccacacacacacacatttgcctgcgtgagtaaccagactagatctcttttacaattttcacattccccatatctgatcagaggttcttcccaaatgtatgcacatgacacgcacacacacacacacacacacacacatgcatacacttggacatgcacacacacacatccctatctccatttcagaaatgttctttgctttgttgggagcagsaagccactgtttgttctgagtgcagaccatggtctctcttgttctgaattctggtgagttgtcaccatgaatgaatgaatttcctgtggggaagacaggatcatcttcctatctgtttctcacgcctcctgtgtctctgctgttgccagtgttagaaaccttaaccccttggagtctgttcatctctcttgctggttctgctccctggtatgcgtgcagctagtgactgtgcaggcatca

SEQ ID NO: 315726 - DNA, 561 bp, Homo sapiens
tgggaggtgcaccaattctctgtgcaatgtactcagggctgcaggaagcaagatgctgagccagcacctggctaatatgtcaaagggttctggaattagcagagggcaagagtggtagattggggggtctgagcaccccaagttgagggaaacagaaaattccgcagaggctaagattccctgctgggagagggtggagggaattcyggagggaggaatagaaagtgggatatcaggacacactgctaaggtggagagaaaccccgtgtcaccatctcattgatgattaatgagagccacaccctcatcaagaaagaagacacagggaggtggcagccagaatgaagagggggctcaggccagcagcggtgcttcccaggcacagagtgggtccctgggtcaccctttgggtgtgaggggccatgagaaaatattttgctgggagtcgtgtctgtatgactagtatgattaaaatgtatttaaaaattcgtgggtccgtgtgaggtctagtggttggctaatgaagatctgggatgatgagagaaggcctacttacctatg

SEQ ID NO: 315727 - DNA, 590 bp, Homo sapiens
aaagttaaacatctgctaagatacattaatttgtgtgggaacgttattgccttgttctgatatgaatttactgacaaaatccatcactccataatttacaaattggctytgatgttctgggcagcagcctccccctagaattgatgaaatgtattatgtggcatcagtgggctaaaacgccattaaccatgaggaagatatgaattgtagcagagccctgggtacaatgataaagtcataagcacgttttctgcttgttgatggaagaatttatattggcaacccgtccttcacagttagctctgctcggctctgccagccgaagcgccttccccactcagagccccccaaccccagtttgctccccccgctctgaggaactggatttcaagtcataccacctatgttgtcacaactgggtgcacaccgagtgtgctgctgtgatgagtctatcgcagcaggcaagctcaccacggagctgggggccaccttctagcccctccaaggtggcagggccagggcgggaagagccctttccaccactgtgaaaacttcaggaacgccacccttgtgctctgaagggacagcca

SEQ ID NO: 315728 - DNA, 577 bp, Homo sapiens
tctgtctggccactaatatatgatgacccaatattaacttcatcatgtctgactgaccagacattagtgcaacagtaacattcaagatttatgatttagcaaaccaggrgctcaaaggagaggaagtcatgtccactactgcatgtctctgtatgtagaggcagggcagagtgaagatttcaaaagcaggctcaagtgatgggcagaagagcatgcaagtgggtaggattgcccagaagtgatcgtatttcacaatcaaaatgcaaccttggagattatgtggcctgcaagctggatgaagccacacacataagaaccgactggatagaacacctgctggcctcatggtggcagccatgggggccctggataagtgttcttttgatttttgtttggttttgtttagagacatgatttcactctgtcacctagactggagtgcagtagtgggatcatagcttactgaagcatcgaactcctgggctcatgtaattctcccacctcagcctccaaagcatctaggaccacagttgcacaccatgcctgactaatgtattttattttattttttgtagat

SEQ ID NO: 315729 - DNA, 563 bp, Homo sapiens
tacaatattccattttagcttttgagaacttttgtggagtatgagtatgtgtgtgtaaggagaagagaggaggtaaattttgcttagttttgccaggctcatgaaaataagttacccaaagtacctgttggaacttggcttaattggaaagtgagtcacaaataggcatttcccagggacacaggcccagaaggctgactgctcagtcctaggtgagctccrtgaatggtgctctaaactccgcatggcgctgaggcatgagaacgaggacatctcatacacttgtctttcctttattacatcactaaccgtgttcctcctggaaattaccatatctgagaaaacctgaaacctttttgatcgcatgatagatgtaatcagtgaatgttcctacatggagaagctggctttggaaatctactggctcactgtggtaaagactgattcaggggctgcactgaccctgcagctcagtggtgggattgttggtggggttttgcttagtttgtttttttgaaatagaaaggaataaaaatattccattagtcatttgtaacttggga

SEQ ID NO: 315730 - DNA, 563 bp, Homo sapiens
tacaatattccattttagcttttgagaacttttgtggagtatgagtatgtgtgtgtaaggagaagagaggaggtaaattttgcttagttttgccaggctcatgaaaataagttacccaaagtacctgttggaacttggcttaattggaaagtgagtcacaaataggcatttcccagggacacaggcccagaaggctgactgctcagtcctaggtgagctccatgaatggtgctctaaactcckcatggcgctgaggcatgagaacgaggacatctcatacacttgtctttcctttattacatcactaaccgtgttcctcctggaaattaccatatctgagaaaacctgaaacctttttgatcgcatgatagatgtaatcagtgaatgttcctacatggagaagctggctttggaaatctactggctcactgtggtaaagactgattcaggggctgcactgaccctgcagctcagtggtgggattgttggtggggttttgcttagtttgtttttttgaaatagaaaggaataaaaatattccattagtcatttgtaacttggga

SEQ ID NO: 315731 - DNA, 563 bp, Homo sapiens
tacaatattccattttagcttttgagaacttttgtggagtatgagtatgtgtgtgtaaggagaagagaggaggtaaattttgcttagttttgccaggctcatgaaaataagttacccaaagtacctgttggaacttggcttaattggaaagtgagtcacaaataggcatttcccagggacacaggcccagaaggctgactgctcagtcctaggtgagctccatgaatggtgctctaaactccgcatggcgctgaggcatgagaacgaggacatctcatacacttgtctttcctttattacatcactaaccgtgttcctcctggarattaccatatctgagaaaacctgaaacctttttgatcgcatgatagatgtaatcagtgaatgttcctacatggagaagctggctttggaaatctactggctcactgtggtaaagactgattcaggggctgcactgaccctgcagctcagtggtgggattgttggtggggttttgcttagtttgtttttttgaaatagaaaggaataaaaatattccattagtcatttgtaacttggga

SEQ ID NO: 315732 - DNA, 533 bp, Homo sapiens
atttgacagagggatgttttaggtgacagtgcaaaagacaggagggttggcagggagagcaaggggcttggctggggaagaccaggcggagctggacacctgccgagctgagtctgcctctctgcatttattttctgattagcattctaatggtagcccagagggtcagattaatcaaagtgggaagcatttctctttcaattgcaattacaaccattatttatgttattgaaattaatcaatcactattgactgcctttactattttttatatcattttgaggaatgggacaaacaaatgtcccaccccttcyctggtaggcagccccaaaccgagaggcacaaaaattctcctcaccatgaagtagagaaagtaaggagggtggtgtggtcaatgtgaaatttttaacatgcaatttctgtgtaaagcaacatgctgtttgcattcttagaatttcttggcaaaaagctggcactccttaatagacctgtgtctcatacgcaagtcacccacatcagtaccacattttggg

SEQ ID NO: 315733 - DNA, 533 bp, Homo sapiens
atttgacagagggatgttttaggtgacagtgcaaaagacaggagggttggcagggagagcaaggggcttggctggggaagaccaggcggagctggacacctgccgagctgagtctgcctctctgcatttattttctgattagcattctaatggtagcccagagggtcagattaatcaaagtgggaagcatttctctttcaattgcaattacaaccattatttatgttattgaaattaatcaatcactattgactgcctttactattttttatatcattttgaggaatgggacaaacaaatgtcccaccccttccctggtaggcagccccaaaccgagaggcacaaaaattctcctcaccatgaagtagagaaagtaaggagggtggtgtggtcaaygtgaaatttttaacatgcaatttctgtgtaaagcaacatgctgtttgcattcttagaatttcttggcaaaaagctggcactccttaatagacctgtgtctcatacgcaagtcacccacatcagtaccacattttggg

SEQ ID NO: 315734 - DNA, 510 bp, Homo sapiens
atacaactgcaaaatgactgagaagttttatttgttttatccaggaccacaaattcttcccaactcactgccagccaaatacgtgaaagtaagagtagatatatgattgtgtaatacttagtacaccttgaaagacagaaacagttacagactcatttttataagcgatatatcttacctctattttgcagtcaaatattgaacaccatgttgtacaaattaataataactagagattaggacttcatgaagatggaaaaatgtgttgatgatgactaaactttcactcagagattacaactctctgtataatacattttgtactttgcccaaccacacacaacagattccatataccactccaagtgcttgctttttaaaaaattcatttttaatccctccctattttacattgttcagatagactaattttgcctttttcttaacaaaggttgtatttagaaayataatatgcatatagccacacaatgcttcctagagagactgttt

SEQ ID NO: 315735 - DNA, 635 bp, Homo sapiens
atctttgtctttaagtgctgcatgatggtattcatttcatattgtgctaaacaaactctacatgtttgtaatgacaagcatttcctgggataatgtaattttgtccaaactgattgtgatggctaatacaaattaagaaagtaatttgaactaacagagtatgttacagtctgaattgctgaataataattgacactaaaagtaacaatagcaatcacatattaagatctagtatatttcagacactaacataaacaaatattgtttcatttacatctcacaaccttgtattttatccatggtttgaaagaaaatggagactttgtgaaatttagtcacttgcctagctcacatagctagtaaatatcaacgttgattcaaatctaagatagcatgatcagagagccaggctcccagagtctcttagtaatgagtgatgacggtggcttaacaattccttttacagttcttcatattgaaaaaaatttaggaaaaaaatcwtcctaattttgttaaattataaaaagttagaaacgcagataagtaaaagagcaatatggtaccaaatccatttcagatatttaaaactctaagaagataggaagcaaatattcaactaaaggataaaaaatatt

SEQ ID NO: 315736 - DNA, 578 bp, Homo sapiens
acaaaactacaataatcaaaacagtatggtactgacatcaggayagatatataggccaatagaatagaacaaagagctctgttatggtttgaatgtatgtcccttccaaaatctatgttgaaacataatccttattgtggtggtgtaaagtggtagtttcttttggggcagtcaataagttgagaacctcaccctttgaatgaactgaagcccttataaaagaggcttcagagagttcacctctcttcttctttttctaggaggtgttttgttacagcatcacacatagacaaagaaatgaagtaggagtgttgctataataaatactgggaaatgtgaaagctgctttggaactgggtaatgggtagaattttgacatgaatgctggaaaaagcttgtattgtcatgaatgaataattaagggtaattatggtgagggctcagaacaagggagccgtattcatccttggacattatctaaatggttgtgaacagaatgtttgtagaaatatgcttagtaaaagccattctgggagacctgggaagatagtggatagcagacaggactaatgtgcagc

SEQ ID NO: 315737 - DNA, 401 bp, Homo sapiens
ggtggggaagcttattgcctggatcaaggtctgagatccatgtgcaggctgcctggagatcaattcagctttgttaacagggcacagtgggagtgaaamcaacttcaccagctgtgtgagcgttggatgaggcctatcactaccggctttctcccacttccctggtgacagggacagccataatcccctctggaacgtaaactttttggcctgaaaaccacccccattacccatagtggccacagcaagccccacctaaggaaagtctgagctcagacctacctaattctcgcccgacctaatggttttttgctacccgccccggtagccaatcacaaaagaaataaactcttgggaacttcatggccctgcccatcacctgagaaacctgaatacctacc

SEQ ID NO: 315738 - DNA, 268 bp, Homo sapiens
attgttatataagacaaaacagactttaaagcaacaacagttaaaaaaagtcaaagagggacattacataataataaaaagascagtccaacaggaaaatgcaattataaatatatatgcacctaacactggatatcccagatttataaaataattattattaggcctatgaaataagatacaaggcaacacgataataatggaaggcttcaatacttcactgacagcactggacagaccatcaagacagaaagtgaacaaagaaaca

SEQ ID NO: 315739 - DNA, 557 bp, Homo sapiens
agcttgtagacagcattagttttcattgccagcataaaatctgttacctttcttttgggaaacaatacctctttttcattcaaaaacttccctacccaactgctagccttaatgttttaggacatgcagacataactacctctttccccacagttccaaggtggggcaaatctagcaaattgggagtaattcccaaaaatgaatctggattatcaggaaaaaaaaaaaaaaawgagttctttctcctagaataagtaagctggtagaatgtaaacctaaggctactgttaccataaaacctcatgagaccacatagagagagtatgaatgaggatgtctactagagatgggaaaacagtgtctgggctatgtcatttgatgcctggatacacgtatatttgatatccactctggacttatcagttgtatggaccaatatatctgtactgagatatcaaagataaaggatgaatatccattttaaaaagtgtttacaaacgaattagaaaataacaggcaccttaagagaaaatgggcaaaagatatattgaagggtt

SEQ ID NO: 315740 - DNA, 568 bp, Homo sapiens
tttttaagtgcagacatggagagtgtttaggaaaacagcatccttatactatgttggaggatatgtgggttaatttgcccttccttgagtatagtttctcagcgtgtactaaaatctaacatgtccatagaattatccaaaggaaataagtgtttatgtatgtaaaaatgtatatacaaatgtgattgtcacagacagcataataataaaatatttgaagtactttttttgggagtatattataagttctaataggaagaagaaaaatgaatataacacctacttatatgtgtgttttaggaacaacatacctggmctattcaatattatttgccttcttctctctcctaaaagtcaaatatcatttggcctgctaaaactctcactaatggcttcatttttgcatcttaagtgtatcaaaagatagtaagtatttaacctttatacaataaacatcaaaattctgcccttcgcacattattatattactacaaaagacatgtctataatttttttaaaagaatttgtgctctttgctgaaggcatttggagttaggctgattgtggt

SEQ ID NO: 315741 - DNA, 568 bp, Homo sapiens
tttttaagtgcagacatggagagtgtttaggaaaacagcatccttatactatgttggaggatatgtgggttaatttgcccttccttgagtatagtttctcagcgtgtactaaaatctaacatgtccatagaattatccaaaggaaataagtgtttatgtatgtaaaaatgtatatacaaatgtgattgtcacagacagcataataataaaatatttgaagtactttttttgggagtatattataagttctaataggaagaagaaaaatgaatataacacctacttatatgtgtgttttaggaacaacatacctggcctattcaatattatttgccttcttctctctcctaaaagtcaaatatcatttggcctgctaaaactctcactaatggcttcatttttgcatcttaagtgtatcaaaagatagtaagtatttaacctttatacaataaacatcaaaattctgcccttcgcacattattatattactacaaaagacatgtctatawtttttttaaaagaatttgtgctctttgctgaaggcatttggagttaggctgattgtggt

SEQ ID NO: 315742 - DNA, 512 bp, Homo sapiens
taactagcagtcattctgtatgaacacaaactcttagatctttcttatgagaaattataatacttccaatatttgaggagggtgggtagctaattcaaaagtgtattattataaagatctttatgtgataatatttctatgatttcttataatgtaaagggaaatgaacagttacgggaaatttagtgacatatatgaagacaaacaacagttgatgaaaagatttaaaatattttatcctttgctcagctcctgatatcccataaggaaatgagaccattagacctaattgtcaccaagagacgcagaagggaccaagctatgatttcagtgaaactgggcccaagattcaaagaaattatctaccatttttttaaccttcrcataaatccagaactaatctttttcactttttcaaaaagctatatatgtacatgtcattccttatcaggcagtatgcttcttgagaaaaaggatattttcttcatagttttacttctacagagcctagc

SEQ ID NO: 315743 - DNA, 512 bp, Homo sapiens
taactagcagtcattctgtatgaacacaaactcttagatctttcttatgagaaattataatacttccaatatttgaggagggtgggtagctaattcaaaagtgtattattataaagatctttatgtgataatatttctatgatttcttataatgtaaagggaaatgaacagttacgggaaatttagtgacatatatgaagacaaacaacagttgatgaaaagatttaaaatattttatcctttgctcagctcctgatatcccataaggaaatgagaccattagacctaattgtcaccaagagacgcagaagggaccaagctatgatttcagtgaaactgggcccaagattcaaagaaattatctaccatttttttaaccttcgcataaatccagaactaatctttttcactttttcaaaaagctatatatgtacatgtcattccttrtcaggcagtatgcttcttgagaaaaaggatattttcttcatagttttacttctacagagcctagc

SEQ ID NO: 315744 - DNA, 644 bp, Homo sapiens
tacattctagaatatgaagattgattgaaattcttagaagcagaaagtggaagagagagacaaagtgagaagaaaaatagctgcatggtgagtgtatattaatgactggaaggcacattggaatgtagttaatttcctgcaatcagtagctacttccataataattacacatgtgtaattccttctctctmtatataattgcatgtgtgtgtgtatatatatatacacacacacatacataaaattgtgtatgtatgtatatatatgtctctgtatataattgtgtgtatgtgtgtatatagatacatatatgtgtatatatacatgtttatatgtaaacatacctatacccatatataagcatatatatacccataaacatatataaaatagatattatatattataatatatattatatatataatataatgtataatatataaatctatattgtaaatttaaataaattataaatctgtaatatataaatcatatatataatattataaatctataataatgctgtcataccaggttactaaagctaaagctttagttttagtaacctggtagcaattgcacaatactactctaccatttatatggactgaattttttttatatgtttctattcttaatct

SEQ ID NO: 315745 - DNA, 644 bp, Homo sapiens
tacattctagaatatgaagattgattgaaattcttagaagcagaaagtggaagagagagacaaagtgagaagaaaaatagctgcatggtgagtgtatattaatgactggaaggcacattggaatgtagttaatttcctgcaatcagtagctacttccataataattacacatgtgtaattccttctctctatatataattgcatgtgtgtgtgtatatatatatacacacacacatacataaaattgtgtatgtatgtatatatatgtctctgtatataattgtgtgtatgtgtgtatatagatacatatatgtgtatatatacatgtttatatgtaaacatacctatacccatatataagcatatatatacccataaacatatataaaatagatattatatattataatatatattatatatataatataatgtataatatataaatctatattgtaaatttaaataaattataaatctrtaatatataaatcatatatataatattataaatctataataatgctgtcataccaggttactaaagctaaagctttagttttagtaacctggtagcaattgcacaatactactctaccatttatatggactgaattttttttatatgtttctattcttaatct

SEQ ID NO: 315746 - DNA, 597 bp, Homo sapiens
caagttttctcactgttatatgagacttccattcgtgcaaagggagaaaactaatgtaaaccttgccctgtgttgctgaattgggattggagataccagtgtgaactcatggttttcaacatagacagttagatatgtagttagagagagaaagataagtatatatcaggaagggttagaggwgagagaaataagagaaatagagacagagaaatcgatataggtttgtgtgtgggcgtggggagggtatctttccactgagtgggctgggcctgggagcagtgagataccaatagccatgagctcacctagacccagatcttaatccctaaatattattcttcatcaaaagcaaccatttatcctgggagaaatgataaatagccattttgtggggagaagttctttgttagtgaaagtacaacatgagcctggaacatcttcttgtgccaaaaacttaaaaagtgctaaaagaattatgagacatgccaataaaacacagaagtcagcctaaagtgttactactcacaaaatctggtataaattgagcattaaattacataatgctataataaattataacccattgaataaaac

SEQ ID NO: 315747 - DNA, 597 bp, Homo sapiens
caagttttctcactgttatatgagacttccattcgtgcaaagggagaaaactaatgtaaaccttgccctgtgttgctgaattgggattggagataccagtgtgaactcatggttttcaacatagacagttagatatgtagttagagagagaaagataagtatatatcaggaagggttagaggagagagaaataagagaaatagagacagaraaatcgatataggtttgtgtgtgggcgtggggagggtatctttccactgagtgggctgggcctgggagcagtgagataccaatagccatgagctcacctagacccagatcttaatccctaaatattattcttcatcaaaagcaaccatttatcctgggagaaatgataaatagccattttgtggggagaagttctttgttagtgaaagtacaacatgagcctggaacatcttcttgtgccaaaaacttaaaaagtgctaaaagaattatgagacatgccaataaaacacagaagtcagcctaaagtgttactactcacaaaatctggtataaattgagcattaaattacataatgctataataaattataacccattgaataaaac

SEQ ID NO: 315748 - DNA, 594 bp, Homo sapiens
aagtcagtgagaccaagaacccaccaattctggacacagtatgaggggtgggctcccaaagttgtgagcaactccaacccaggggctttgcagggttcagccccagcactgctctcatgggttggagttgaatgcctgtagcttttcctaggttgaagttgtaagttgccattggatttaccattctgtgatctgaagatggtggcccccttctccaagctccagtaggcagtgccccagtgcctgtgcsttttggagcttccaactacgtgttttccctttacactgtcctagtagaggttctcactgagggcatctcccctgcagcaccaccactccaccaagatttcagaggatatatgaaaaagactatcatgtcccccagaagctgatgctggcaatacactttctgtgcaggctgcaaaaccatgagtctgcactgactatcaggcctttccatatatcctctgaaatcttggtggagggtaccaagcttgattcactcttacacactgtgtgatggcaggcttaacactatgttgaagctgacaaaccttacagctcgcattctccaaaatggcagctcaagctgta

SEQ ID NO: 315749 - DNA, 594 bp, Homo sapiens
aagtcagtgagaccaagaacccaccaattctggacacagtatgaggggtgggctcccaaagttgtgagcaactccaacccaggggctttgcagggttcagccccagcactgctctcatgggttggagttgaatgcctgtagcttttcctaggttgaagttgtaagttgccattggatttaccattctgtgatctgaagatggtggcccccttctccaagctccagtaggcagtgccccagtgcctgtgcgttttggagcttccaactacgtgttttccctttacactgtcctagtagaggttctcactgagggcatctcccctgcagcaccaccactccaccaagatttcagaggatatatgaaaaagactatcatgtsccccagaagctgatgctggcaatacactttctgtgcaggctgcaaaaccatgagtctgcactgactatcaggcctttccatatatcctctgaaatcttggtggagggtaccaagcttgattcactcttacacactgtgtgatggcaggcttaacactatgttgaagctgacaaaccttacagctcgcattctccaaaatggcagctcaagctgta

SEQ ID NO: 315750 - DNA, 582 bp, Homo sapiens
tactgtgcaaatgcttattgaggtttcattttcattacgctttctcatgtcccattggtcaaagctaattatatctagtcacatgatcaatctcagaattgatgagggrgaacacacaaaggcatacatttcagggagcttagttgattgggggccaccaaaataaatgtctgccacaagatttttaaataattttcttgcctttgatctctcctccatgatccattctcaaagttcctactagagtgtttcttttttgttttttttaaagtagaggtcttattcaaagtacatcatttgaataatatatgataaactgaagagttgtttatgtatatactcacattaaaataaaaattttaagtttcagataaattgtcattttattgtaatcaaacactaggatttgaagtaatttcagttatattacaacacagtttttttaaattaaaaataacaactaacgagcagtgagcacttatgtgtcaaacaccataataggtgatttatatgaattatatataatgaggaaaatgaagctatgagatgaaacaacttaacaatgtcaagcagttggtaatg

SEQ ID NO: 315751 - DNA, 582 bp, Homo sapiens
tactgtgcaaatgcttattgaggtttcattttcattacgctttctcatgtcccattggtcaaagctaattatatctagtcacatgatcaatctcagaattgatgagggagaacacacaaaggcatacatttcagggagcttagttgattgggggccaccaaaataaatgtctgccacaagatttttaaataattttcttgcctttgatctctcctccatgatccattctcaaagttcctactagagtgtttcttttttgttttttttaaagtagagktcttattcaaagtacatcatttgaataatatatgataaactgaagagttgtttatgtatatactcacattaaaataaaaattttaagtttcagataaattgtcattttattgtaatcaaacactaggatttgaagtaatttcagttatattacaacacagtttttttaaattaaaaataacaactaacgagcagtgagcacttatgtgtcaaacaccataataggtgatttatatgaattatatataatgaggaaaatgaagctatgagatgaaacaacttaacaatgtcaagcagttggtaatg

SEQ ID NO: 315752 - DNA, 538 bp, Homo sapiens
gattgtatggaattgctgtcataaatacttgacttacaaatgcctaagcagattttttacactattaaamaattcctcaattaagtacataatatttatattttccaaatacaactatgaaacctgttaaattaaatagagaatgcaagtattgttccttctttcagtagttggtttattcactcagcaaacttttattaagcatctactatgagtatagtactgtggcagaatctgtgaatcatataaagacaattgaacattacttcctgctcttaagtactcttcaataattttacaaatgtataaattaatattgtttgagtatccatgtcaatgcaatttcatttaaacatagctgagagaatcttacggataaattctatttctaacctctgcattcctcaagtacaaatttatttttattccttattcacagcaaaatacatcatttctttatttattcagaatgcagtattgagagagatttttcttattcagccacatcttttcctcttgtcacataggaagagatgca

SEQ ID NO: 315753 - DNA, 538 bp, Homo sapiens
gattgtatggaattgctgtcataaatacttgacttacaaatgcctaagcagattttttacactattaaaaaattcctcaattaagtacataatatttatattttccaaatacaactatgaaacctgttaaattaaatagagaatgcaagtattgttccttctttcaktagttggtttattcactcagcaaacttttattaagcatctactatgagtatagtactgtggcagaatctgtgaatcatataaagacaattgaacattacttcctgctcttaagtactcttcaataattttacaaatgtataaattaatattgtttgagtatccatgtcaatgcaatttcatttaaacatagctgagagaatcttacggataaattctatttctaacctctgcattcctcaagtacaaatttatttttattccttattcacagcaaaatacatcatttctttatttattcagaatgcagtattgagagagatttttcttattcagccacatcttttcctcttgtcacataggaagagatgca

SEQ ID NO: 315754 - DNA, 628 bp, Homo sapiens
taaaggcttatttttgcttttctgagataattcaggttttattctttagtcaatgagaaagcaacacgagttttaaaaaatcaagtttatggaagatggggaggtcaactagtgacagagcagagaacagactagagactaatgtagagaaggatgctttggagctcactgcaccatggactagaytagggcaatgggagaggaaagaggagaagaaggagacacaaaactcaaggaattcctgaggtcagaaaagaggtggaatctacagactttgtcaactgaatgaggaagcagaatataagatcacaccaagttttctaggataatgaactcctgggttaatagagacaacataattagaaaatgataacacaagaagtgaaagaaagtgatttacttgaaggctaaaggaaataagtggataatgaattacattttaaaacaagtatctgtagtttggtgtgacagacactaattgttttttttttactaggcaggataaaagtaccagaaaacctatgtttgcattaataaatcctctttaaatgttatcataacttaatatgtacaatatattaatgcattgctaaacatgaaattctaaatttaagcaagcatttaaatg

SEQ ID NO: 315755 - DNA, 556 bp, Homo sapiens
atataaatatataactcctaaaacaagaagagaaagatatagctacatgcacactggtgtttaaatttctcatctgtgcatgcgaccctagccatattattcagagttgaggcattcagtacacacagaaagagtacagagtgtccttgaaggattctttctattgtaaatcttggacaaggagaatttagccttgagtatgaactcaaggcaaaatctgtagagaataaaaaagactaaatagtctggaaatatttctagatcaacattcctcgatatcwctcagagaagaaatgtttaaaatcctgcacatgatacgccacataggacaggatctaaaggttgtattaaccttctctctcattataaaattctatacaaccccactctattgctgttttctaaataataattatacaaatatgcttccaaccattttgccagcctcaagaaatgtcttatgaattagctaatacaactgaattgattggatagtgaatcatactatctgataaatatattgataattttttctaactaattcaatcattgcaaa

SEQ ID NO: 315756 - DNA, 498 bp, Homo sapiens
tgaattatacaagacagagtggctttcaacattaggccctaaaatgacactgctattcccaccttcacttttgctccaaatctgacacattttacccttcattctaattgtatctgcaaacatatttcttttttacatatttcctacactaaatattttatggagaggaaacattttattcttctagctaatgagaatagcattaaacatgaggtctaggcccttcgttaaatcacaatttgagccatgataacaataacttgtaagccttaatgcaaatgaaaccttatttttatttcatcatgcatatagccacaagaaagctttgtaagcaccaaaacatcatatataatatcttctttaakaatgatgaatttatgtaaacaaaaaaagaaaaaaacgataaataagaaaatttacagtgagccacgttttgtcattttaacacaaaagcttcagaagatcagattaccctaccagagtgaaatgggcgtaaca

SEQ ID NO: 315757 - DNA, 527 bp, Homo sapiens
aaagtagaggaaatgtttatgtcaaaatgaattgattctttaattttagatgcagttttttgttcattttctgatcattgcacttaagtggcatgtttagaacaaagtttggagttaatctatcgttaattaaatatcaatattaagtctcattttacagactaatctgcacattttacagactcaaatcatttgcttatattttagaaatatgatttctattaaggtcaataggaatagtgtggcttcaaactccaactagtactttgaaaaattacccctactaagtattaccagtytttcctgctgttgatattaatacttaccaaaagtggaatttggaaaatgtccacagatgaaaacaattttatcagaattttccttatccttatttctgcatgaagtaacatattgaaacatttggagagtgttttcaagtaacactcttttttataggttaaaaaaatgttattttaaaactccaatgaagaaaaatatatagataaagaagagcagcaaatactaat

SEQ ID NO: 315758 - DNA, 636 bp, Homo sapiens
gcttttaatagaatgaactaatgaatccttaattgtcaggttaagaaacaaagcctaatgaggggaaaaaaacctgttcccattgttaagtccgttggctccttgaaatggggttgtgcttagcttttcaatatgaaattaattttatgtgggaactggcttataggaatccaataaactcaactaatgtgaggaaagaaaacataaatgaatgaatgaatgaatgagtgaattctgccaaatacttattgtatttgctgatatacaacaattttgcaatcttaagctttacacttaccctaagtcattacccagatacggagtagcgtagtgataaaaattgtaagttctgagatcaaattgtttggggctgaaatttggctctcattggacaggttacataacttctttgtgtcccagttttccatatataagatatgaaaactaacgctattttcttctttgagttgtgaggatttcttgaagtaataaatgaaaaattatacaatgtaattyttggcaacctgaaaactttaaataaatattagctattgttattactattctatattcatttttctctgcttctgaagattgacctggactttaatagatctgagtcttccaattagctgg

SEQ ID NO: 315759 - DNA, 618 bp, Homo sapiens
ccaggtttttgctttcatattagcatactggcacctatcgctttcccctgcactttattccattttcattttgtaatgttttcaggcatgttggaaatatttctatttccacatcctcttccttcaatgagtcgataggtttttagtggtaattcgagtaaataaaagctttgccctctaaattgtgaattcagatgagatagagtagcattttagagaatttaatgagtgaaattaactaagtaaaagcaatgaaagggcttggttatgacacctgattaataggcttgtaatcagtaactaaaaggccagtgttggtgtacagaagctgaggatggggaacaggttttcccatgtggaatttacaaaataaaatmattgataagttcagtcaatatctggtaactacctttgctcaatgaacataggcatatttagggagtaaacatcgttgtcacaaattaggcatgaaaaagaactggctaatgtactgaagagttcagtttttgataaaatgggatgagtcagtgaatcattctaggtaaaatattttaaaagttaaagaaaatatacagaagaaatgaagagaggtcattgatggatatagtacaatgagat

SEQ ID NO: 315760 - DNA, 583 bp, Homo sapiens
taaaattgaaaactcactagtgattgctacaagtcaaatagttattcaactgattattaagcaaaataataatttaataaaatgtaatattctttctacaggttttattgaaaactacagctggagatattgacatagagttgtggtccaaagaagctcctaaagcttgcagaaattttatccaactttgtttggaaggtatgttgacttttattctactggagaaattcttgttaatttaaaaataaactgcagtgtctgcttcacaacattgaagactagtgttaaatagtggtcatgaatgacaggtgttgctatgaggatatggtattgagctgggtgtccggaagtagagataagagataaatgttatcccaaataaatttgaatactttcaacagagcagtttatctcaacaaataatactgtgatcctctttggtcttctttgctatcttacgcttcttyctttcattctctaaatttgggtattccctaagattgcctctagttctctattgtcatcactctctagttgttacttcagtccaaatgactaccacattaagaacttcagtcatttc

SEQ ID NO: 315761 - DNA, 583 bp, Homo sapiens
taaaattgaaaactcactagtgattgctacaagtcaaatagttattcaactgattattaagcaaaataataatttaataaaatgtaatattctttctacaggttttattgaaaactacagctggagatattgacatagagttgtggtccaaagaagctcctaaagcttgcagaaattttatccaactttgtttggaaggtatgttgacttttattctactggagaaattcttgttaatttaaaaataaactgcagtgtctgcttcacaacattgaagactagtgttaaatagtggtcatgaatgacaggtgttgctatgaggatatggtattgagctgggtgtccggaagtagagataagagataaatgttatcccaaataaatttgaatactttcaacagagcagtttatctcaacaaataatactgtgatcctctttggtcttctttgctatcttacgcttcttcctttcattctctaaatttgggtattccctaagattgcctctagttctctattgtcatcactctctagttgttacttcartccaaatgactaccacattaagaacttcagtcatttc

SEQ ID NO: 315762 - DNA, 609 bp, Homo sapiens
aagtgagtggggtgaaggggtgtctgtaatcccacactgataatccataaaccagagaggactctaatcttatttctcctttcacataaagtaaagcctcaattcagactttaccaattattaacttgtgatcgggcagaaaggttctggaataaagattaatactgtgcagtcastgaaaaaagaaacttgataaacaaatgaagaatgaaacaattatttttaagccctttagaaatatttaatttcatgcaaccactgaaactgcaaattattcttagtcattagaacagacacttatttggctttggctccagtcatttcatacacttaaaaatagtaaagctaaattttgaagaaatatattctattagccacagttttccaacattcaagctagtcttccctcttcttaccaaggtatttgaacagtgctggtagtgtaaaaaactgtatataagcaaaataaacaaaaatacacttctacttggattctctccagaatttatctcatgtacttaaaaacaatttccctttctctaagccagtaaatttcaacagtattgttcttgttactctattttctccaactaaacttacctacttgtc

SEQ ID NO: 315763 - DNA, 627 bp, Homo sapiens
acttttttgatgacttattgaagaaattaagctagctgatttatagaagactactcatggtgtaattaaacttgttatcttctctgtatttcttataagctttaagttagatctagagtcttgatcaatctcaggtaaacattttgggtaaaatatttccatatttcataatgcatcacatcaagatgcatataatgttaggttgcctcattattgataataatgtttgaataataatactaatacatttgatcacttgatttggggctgcctgtcagacatttccatttttattagtaagcratctatgaggtcatattttgggattgagttttcacagtgtcttttcacgctgtggttttagaacccattgaggattcttgttctcagccaattataacattaggaattgagttacaaaatggtgattttttttccttctattatttaacctatatttattagctgcattaaaaaataaagatgagcttttttctctcaagtataactatagacttttagaagttataatcaattattgtcattattctctttgatgctcaaattaaatttagtgcatacattataattaatgccaaatctggccagcgcaagtctctataagcc

SEQ ID NO: 315764 - DNA, 627 bp, Homo sapiens
acttttttgatgacttattgaagaaattaagctagctgatttatagaagactactcatggtgtaattaaacttgttatcttctctgtatttcttataagctttaagttagatctagagtcttgatcaatctcaggtaaacattttgggtaaaatatttccatatttcataatgcatcacatcaagatgcatataatgttaggttgcctcattattgataataatgtttgaataataatactaatacatttgatcacttgatttggggctgcctgtcagacatttccatttttattagtaagcgatctatgaggtcatattttgggattgagttttcacagtgtcttttcacgctgtggttttagaacccattgaggattcttgttytcagccaattataacattaggaattgagttacaaaatggtgattttttttccttctattatttaacctatatttattagctgcattaaaaaataaagatgagcttttttctctcaagtataactatagacttttagaagttataatcaattattgtcattattctctttgatgctcaaattaaatttagtgcatacattataattaatgccaaatctggccagcgcaagtctctataagcc

SEQ ID NO: 315765 - DNA, 572 bp, Homo sapiens
aaaaccacacctttgactgttttttttccctgcscccatgcttctttcctcattcctctgcagatttcacctgaggatattcaataaggcacttgctcagtagttcccatctcagctctctttctaggggacccaagttaactaatctaatatttaatttgactaagcaaagatggtcttttgctttgttactctctgtagctttgctagcacgtcagtggaggaataactatctgagctgatcctttcatattcaactataggtgtgctctgtgaggagtcctctccatttcatcatgtttacctttgagcacctggcactggagttgtcttagggaggaaaatgtttttgtttagggaaataccttgctgagttgcttgagagttgaaagagagaccctaaggccatgtgcttaaagaggatgatgaaacaaaagatggatatactgatctgcataataataaacaaagattttatactggggttaatcaggaagattagagggtttggggaggagaaggagagggaagtctggcaataagatagagggacaagaatttccagtggtgtg

SEQ ID NO: 315766 - DNA, 559 bp, Homo sapiens
aggtcaagttggttgatagtgttactcaagtcttccatgtcctcacagatttactgtctacttgtgccattagttaatgagaaaggtgttgagatcgctggctataattgcaaatttgtctatccataagaatttttatttacggttataccaggatttgtttcagatatttgttagtaggtgcataaacacttagaattttttttttttttttagatggagtttcactctgttgctcaggctggaatgcagtggcatgatctcggctcactgcaacctctgcctcccgggttcaagtgattctcctgcctgagcctcccgagtagctgatgttacaggcatgcgccaccatgcccrgctacttttttgtatttttagtagagatggggttttgccatgttgaccaggctggtcttgaactcctgaccttaggtgatccgcctacctcggcctcccaaaatgctgggattataggtgtgagccatcatgccaggccaacacttagaatttttatattctcttgaccaaatgacccttttatcattaggaaaaaaacctc

SEQ ID NO: 315767 - DNA, 562 bp, Homo sapiens
aactgatctatgtccatattaaaatgaaatcttcacaatttatgttcctctgctgtggctccagccggtccctctgttcagggtccctgacttcctgcaacaatttgacttctttgactccatccaaaatcaaaattttaaaaatttcaagaggataaactttaataactggaaggaacataaatatatttaaagcagatttactgaaccaatgatttaattttcatgagaataattacatcctgctgctatttttccttcagcacaatttccctaaggtatttcatcattaacggcctgattcaatgtgaatttttagtgagacacatagtgaactgaatttttaaaaagcattcattgttaacagtattatcacccaggtacaagttattcttttggatagagttcaggtaattggtaayaaataatagatactgattaccttcttgagtggaagaagcctctaagtgttgaagcttaaggccagtgtctaatctttgaggtttcgtatacagaaataaatagcaaaggacacagacactgatgacaaaggcgagtaaaa

SEQ ID NO: 315768 - DNA, 617 bp, Homo sapiens
acattacaggttctggggattaggatgtgaacataccttttgtgggccatcattcagtccactacaagagcccaggcaaaaaatatgatgtcccctctttcttcttacattttgctctggttattttttaagctcatcgttaagaaacatgttatgatgatttycataaaactttctgaagctgatattaaaatttgatgctttctgaaataaaatgtacattatgtgagtccctcatgtttactaacaaaaacaggtttcaagtaaaaagctaaacataatcaaattttaaggcttgcctagaacactgtaatgagaaaaattctgagtgcattccagccaacaggaaaaaatactatgattgattagcaatgcctgcctcaggtgaagcagggagcatggcagaacacaccatgaatttgcaatccccaaattttaatgacctcaagccatagtcttgcaaagcaattcctaggtaaatttcaggttggctataaattaagccattcttgtccctaagaataattattgtatcagtcaaggtttgaacagaaagcagaaccactaagagatatatttaagaaggaagattgtttaggaatttgaccttacacact

SEQ ID NO: 315769 - DNA, 584 bp, Homo sapiens
aacctgcattcaagagcacctatcaaagtcctacagttgattataaaccaccttttgaagaggatcaaaacaagagaagtcttaggacagccattattaaaaccacattttactagcaattttttacttctgtggcatacaacagttttacataataattataattattaataacatacactaagtcatattaaaattataggagtttcccataatttgggaacacataccaataacatttatacagatatagcccaaagaataccaaacaccatttcatatttgacaatgcttcctgtatgatttctataccaataagccaaatatgtctcttttgcacttctggggactaatagcaaaaaattaatgaggacccaagttagaatttgactttagaaagtgtgtcaaatataaaaagtttaaaacacttgatatcatgaaatargatcacaggtcattgcaaaataagtcattcatttaaccaaagggataacataaagatttcaaaaacaggtgaaaacctttattctttgagagaaaagacttaatttcctgaataataagccctaataaagacagcatga

SEQ ID NO: 315770 - DNA, 600 bp, Homo sapiens
tgcaaaaaattcttatctgcttagcaaaaagcaagtatctacaggtccaataacactttaaatatcacaggttattgtgatccagtagaggtttggggttaaaatcatagaatttggagctgaggttgtctgataagtagggtgaccaacttatcctggtttggcaacgactttgccagttttagctctgaaagccacacgtcctgggaacaccctcagtcccaagcaaacctggacagttggtgatgagcttcctgagtcacctgtccattggttacctgttgattgtccaacagcactgtgaaaactcctccaactggtgcccagcacaccaccttacacttaatactagccaataaatttttgttaaattctaattcagctttgtgttttgctcaagaaaaaaaatcttttctgctgtttcctaggtaaracacaatctttggactcactcttgttgatgccagactcaatagttcagccattttggtatcattttctcatctagtgtcagcgtggttcaaacttccatgaagttttagtattcagagacgactttttgaaaggggacagcaaagtacaggaactgaaagatattgt

SEQ ID NO: 315771 - DNA, 618 bp, Homo sapiens
tactggctctgtattttttctcccagtaactgactgacctatttaaacaaaagcatttccttttgagaggcccaaatgactaaattaggttatggaagggttgaaagcgtgagagctctcatggctgcaatgcagagggctgtggatacagcttccctagaatttaagcatgggtaagcatatgttaagaggagttataaggctccctgagtcttactgagggtatccacattgggtgccaggtgaaacaagaatcagtaaacctttctagcctgtgaggttaagtatacttagctgatttcactatcatgaattcacctgcagcygtatctataggttatcaatttgaaaatttctaagcgcaccatagtgaggtatttgcaatctttggtgctgtgccatgacattggttgatgttcgatgcttctacaacataagcatttactttagtggacataagggctacctaagtattaagcaaagtaacactgatcaatgtgaaaatagaaatttaaaaaacgtatctactaatatgtgtttgaaaatgcttacccatataaaatttccattattatacaaaggctttcatgatgcaactccctggctcttaaattttaa

SEQ ID NO: 315772 - DNA, 583 bp, Homo sapiens
ccaaacaaaatccccctatttccccagtaaagacattgactggtgccctggaattgtgcagtgcacagcctgtgggctggcccaacatcagcagcactgaaatggctgcttagaggaaactcagctgcaatgctttgaaaggaaatgttgaccttttgagttaaaagcttaccctggagcaggggtgagcaaactcttcccataaatagctaattagtaagtaaatattttaggcgctgcaggccttggtgtctgtggctgctcctctctctaccactgtagtgcaaaaacggccacagatgatgcatctgtgaatgaatgtggctctgttccaataaaactttatttataaaatgggtggtgggccatagttcattaatacttgcttttgaagttttttyccctttaatttatatctaagactaattgcattcctataaaatatgtatacatgtgaaagggaaaacagtaaaagctatttaagggtaggttgcctttgtttagtattttaaagagaatgttgtctttaacattgttattttcaatgaaaacgttcacacatgcataaggtagctttatgcaa

SEQ ID NO: 315773 - DNA, 594 bp, Homo sapiens
tgatcagggatgcagtgtttagatgtgtgtgtgtgtgtgtgtgtgtgtgtgtgtgtgtgtgtgtgtgtatgaacctaaaggctctgagactgtatatagtcacatattttagatggacgtcacttatgggtgtgaaattctgcttttagagtcatgcagagggccatttttcccctttgaaaaacaagaactactggtaaaaattcattagtttatgtcctaatgggaaacccttcttgtcacagttcttctctatgatgagaccrttattcatgcgttcgtattgtcacctcttgtcatttcttgtccacaggcaaaaactgggacctgacagccgctctgagcgactatgagcagctccgccaggtgcacacagccaatctgccacatgtgttcaatgaagggcggggtcccaagcagccagagcgagagccacagcccgggcacaaggtggagcgaccctgcctgcagaggcaggacgacattgcccaaggtaccgctgagggactgagcctaggcacagccgcccaggccagtgcaccgcagcttgcaggcgggttgcgtggtacaaagaatggtggggtcatcacctcc

SEQ ID NO: 315774 - DNA, 452 bp, Homo sapiens
ccattagtagttctgcctgcgttgtgctctgtttttgtttttttttatggactttaatcacagggcatggtagtattaagagatgctctaagggagctcttckattccacacgtgttcttccttatcttctgtgtgcagtagcggtccggtttcctgtttgtactccagatcagtttccccagccagtacagtaactctcttctttgcctgttagttcatttgcacaaggagctcaaagtggccggatggcagtcttaacttccagttcaatggaatcagtattgtgtctcttggtggaagcattccttgctttggaactaaaacctctagatgagcagagcacagcacaaagttgcagagacaggaagcaaacaatgtcctagtggttactacgcgtaatagtgaatggtgccactcccatttccatcctagattcctggactattgaaga

SEQ ID NO: 315775 - DNA, 570 bp, Homo sapiens
  misc_feature (1)...(570): n = A,T,C or G
atgtctctggtttggatccagtgatctgcatgtggcctcacatccccatcatagttgctctttgcttgcaatttttagctcagtgtaaatgcagaataacctatatttcacataaacaactcttgctagatatgcagggttgttgtgaaactttgtttaactattttaccatcttcatgtgcaaagctctggcaggtatgctttagcctcaggggagggagagacgaagtggtgcagaactgaggtaggtttcagaggcctccgttatgaacacacacgtgaccgtgcacagagttagtagcttgaaaaatgttacattcccaacatgggagtcacttcttagtattggtggcttttggagttgtttaaaataaattagtcagaaatggatgaataacaaagttaactggattttttagtatgactagtaaaatgtaaacaatagcagatcatctgtgttcatgacgttgaaaaaaatccctatactgcaaatatgtactaagtcagacagtaatggaattacacatcctgyaccaaattcatctgtgtaaactgtaacactannnnnnn

SEQ ID NO: 315776 - DNA, 608 bp, Homo sapiens
ttagcctgcccagccacacctgaaagccaagctgcagtgcctggggggtcaagtgcttttggaagttgcttgtttgtccctgtcacctagtatgcgttgagtgccggcgagtgaatggttgaacaacataatgaacagcacagggggagagaatatggagttaaaacctgcatacttggagagagaaataccccagctagaaatgtggagcactgttccttccctaattcaaggaatggagggggcagtgctggaaagagaggagctgctcttgagtcaggtactaatactgagaagcgggcagagcaaggtgaatggtagccctctcaggcctgggttctgagtcccatcttcacttcctggcagaacactctgggatctgagcagctacacaggaggacccccatggtaacaacagcgtgaaggctcagtattrggcacctttgtactggcacagcattctcctcatgcaaaacttaaagcagggccatcatatttccaaccaaaaaaccaataaatattcattgagcacttactatacactggtgctgtgaaaggcactgcagaggccctcagagaactctgccttcatgtaacatctaccaacc

SEQ ID NO: 315777 - DNA, 608 bp, Homo sapiens
ttagcctgcccagccacacctgaaagccaagctgcagtgcctggggggtcaagtgcttttggaagttgcttgtttgtccctgtcacctagtatgcgttgagtgccggcgagtgaatggttgaacaacataatgaacagcacagggggagagaatatggagttaaaacctgcatacttggagagagaaataccccagctagaaatgtggagcactgttccttccctaattcaaggaatggagggggcagtgctggaaagagaggagctgctcttgagtcaggtactaatactgagaagcgggcagagcaaggtgaatggtagccctctcaggcctgggttctgagtcccatcttcacttcctggcagaacactctgggatctgagcagctacacaggaggacccccatggtaacaacagcgtgaaggctcagtattgggcacctttgtactggcacagcattctyctcatgcaaaacttaaagcagggccatcatatttccaaccaaaaaaccaataaatattcattgagcacttactatacactggtgctgtgaaaggcactgcagaggccctcagagaactctgccttcatgtaacatctaccaacc

SEQ ID NO: 315778 - DNA, 578 bp, Homo sapiens
gggttctttaacatccttccctaaaagtggctgtcagaggcatgatgctgtcccacagactctgcctgtcactaaagcccattcttagtgtggggacagttaatcagatgktaatcttcaaacacccctttggtcagtggaatgggaaaaaagatgagtttacagtattctggattttagccattcattgactatagcctgaaagctttaaaaatgctttacaaaataaatccacagagctccttttctgaagcatgattaagtcagaggatagtaaaactccctggcccagaactgaaaccttcccataattattgaaatcaaatgaaagcatgacagtctgtgtcttcacaaagcaaaatctattcattaggcaataaaaagcagtctagaataaaatacagagtttatatcagagtctcatcagaggatttggacagaaattgttccatcaatatattttgttggaattgcagtttatttataagggaattgccaagagcctttgataaactgtgaaacttcctaggtgaacgagaactgtataatcaatgaaactgaggaaaaacatattaagt

SEQ ID NO: 315779 - DNA, 578 bp, Homo sapiens
gggttctttaacatccttccctaaaagtggctgtcagaggcatgatgctgtcccacagactctgcctgtcactaaagcccattcttagtgtggggacagttaatcagatggtaatcttcaaacacccctttggtcagtggaatgggaaaaaagatgagtttacagtattctggattttagccattcattgactatagcctgaaagctttaaaaatgctttacaaaataaatccacagagctccttttctgaagcatgattaagtcagaggatagtaaaactccctggcccagaactgaaaccttcccataattattgaaatcaaatgaaagcatgacagtctgtgtcttcacaaagcaaaatctattcattaggcaataaaaagcagtctagaataaaayacagagtttatatcagagtctcatcagaggatttggacagaaattgttccatcaatatattttgttggaattgcagtttatttataagggaattgccaagagcctttgataaactgtgaaacttcctaggtgaacgagaactgtataatcaatgaaactgaggaaaaacatattaagt

SEQ ID NO: 315780 - DNA, 578 bp, Homo sapiens
gggttctttaacatccttccctaaaagtggctgtcagaggcatgatgctgtcccacagactctgcctgtcactaaagcccattcttagtgtggggacagttaatcagatggtaatcttcaaacacccctttggtcagtggaatgggaaaaaagatgagtttacagtattctggattttagccattcattgactatagcctgaaagctttaaaaatgctttacaaaataaatccacagagctccttttctgaagcatgattaagtcagaggatagtaaaactccctggcccagaactgaaaccttcccataattattgaaatcaaatgaaagcatgacagtctgtgtcttcacaaagcaaaatctattcattaggcaataaaaagcagtctagaataaaatacagagtttatatcagagtctcatcagaggatttggacagaaattgttccatcaatatwttttgttggaattgcagtttatttataagggaattgccaagagcctttgataaactgtgaaacttcctaggtgaacgagaactgtataatcaatgaaactgaggaaaaacatattaagt

SEQ ID NO: 315781 - DNA, 576 bp, Homo sapiens
ggatgatggatataggagatgttggggtttcaaggatgaagaacatctagcagtgaagcagagaaaacaatgatgtctagagtgagagaaaatgtgagggrctgttggaaaatatcatcaatattcatagagacttgatattagtgacaaggagggataatactcacctaggtggaaaatgttcacatccccttagctgaaattacttcttcaagcagatggttttgaattgctgtgaataggctcacatttgcataatggcttttctagattttttttttctgttactctcaactagttgctttagaataacgttgttatttctgttaaactcctcctcctaggaaccagtgcaaacatatgtaacatttacattttttttttgtttgcttcttcaccacataacactgagcctcctagtagtgttgcaaatctttggctattaaggaccagagatgtccctatcccttttcttacatgtcacgttgaggaaggaggtgaaatcttggtgaaatttttcttgacctgatatgggctagagcaaggatatgacctggtttccattgtagaggatca

SEQ ID NO: 315782 - DNA, 576 bp, Homo sapiens
ggatgatggatataggagatgttggggtttcaaggatgaagaacatctagcagtgaagcagagaaaacaatgatgtctagagtgagagaaaatgtgagggactgttggaaaatatcatcaatattcatagagacttgatattagtgacaaggagggataatactcacctaggtggaaaatgttcacatccccttagctgaaattacttcttcaagcagatggttttgaattgctgtgaataggctcacatttgcataatggcttttctagattttttttttctgttactctcaactagttgctttagaataacgttgttatttctgttaaactcctcctcctaggaaccagtgcaaacatatgtaacatttacattttttttttgtttgcttcttcaccacataacactgagcctcctagtagtgttgcaaatctttggctattaaggaccagagatgtccctatcccttttcttacatgtcacgttgaggaaggaggtgaaatcttggtgaaatttttcttgacctgatwtgggctagagcaaggatatgacctggtttccattgtagaggatca

SEQ ID NO: 315783 - DNA, 512 bp, Homo sapiens
aaatcacatatatatatatatatatatatatacatatctcacattttctttctttttttttttttgagatggagtctcactstgttgcccaggctggagtgcagtggcactgcaacctccaccttcgggtttaaatcattctcatgccttaacttccagagtagctgggattacaggcatgcaccaccacgcctggctaatttttgtatttgtagtagagatgaggttccaccatgttggccagcctggtctcaaactcctgacctcaagtgatctgcctgcctcagcctcccaaagtgctgggattacaggtgtgagccactgcacccagccaatatcacattttctttatccactcattgattgatgggcatttgggctggttccttatttttgcaattgcaaattgttttgctataaacatgtgtgtgcaagtatattttttgtataatgacttattttcctctgggtagatacctagtagtgaggttgctggatcaaacagtaggacg

SEQ ID NO: 315784 - DNA, 512 bp, Homo sapiens
aaatcacatatatatatatatatatatatatacatatctcacattttctttctttttttttttttgagatggagtctcactgtgttgcccaggctggagtgcagtggcactgcaacctccaccttcgggtttaaatcattctcatgccttaacttccagagtagctgggattacaggcatgcaccaccacgcctggctaatttttgtatttgtagkagagatgaggttccaccatgttggccagcctggtctcaaactcctgacctcaagtgatctgcctgcctcagcctcccaaagtgctgggattacaggtgtgagccactgcacccagccaatatcacattttctttatccactcattgattgatgggcatttgggctggttccttatttttgcaattgcaaattgttttgctataaacatgtgtgtgcaagtatattttttgtataatgacttattttcctctgggtagatacctagtagtgaggttgctggatcaaacagtaggacg

SEQ ID NO: 315785 - DNA, 512 bp, Homo sapiens
aaatcacatatatatatatatatatatatatacatatctcacattttctttctttttttttttttgagatggagtctcactgtgttgcccaggctggagtgcagtggcactgcaacctccaccttcgggtttaaatcattctcatgccttaacttccagagtagctgggattacaggcatgcaccaccacgcctggctaatttttgtatttgtagtagagatgaggttccaccatgttggccagcctggtctcaaactcctgacctcawgtgatctgcctgcctcagcctcccaaagtgctgggattacaggtgtgagccactgcacccagccaatatcacattttctttatccactcattgattgatgggcatttgggctggttccttatttttgcaattgcaaattgttttgctataaacatgtgtgtgcaagtatattttttgtataatgacttattttcctctgggtagatacctagtagtgaggttgctggatcaaacagtaggacg

SEQ ID NO: 315786 - DNA, 512 bp, Homo sapiens
aaatcacatatatatatatatatatatatatacatatctcacattttctttctttttttttttttgagatggagtctcactgtgttgcccaggctggagtgcagtggcactgcaacctccaccttcgggtttaaatcattctcatgccttaacttccagagtagctgggattacaggcatgcaccaccacgcctggctaatttttgtatttgtagtagagatgaggttccaccatgttggccagcctggtctcaaactcctgacctcaagtgatctgcctgcctcagcctcccaaagtgctgggattacaggtgtgagccactgcacccagccaatatcacattttctytatccactcattgattgatgggcatttgggctggttccttatttttgcaattgcaaattgttttgctataaacatgtgtgtgcaagtatattttttgtataatgacttattttcctctgggtagatacctagtagtgaggttgctggatcaaacagtaggacg

SEQ ID NO: 315787 - DNA, 450 bp, Homo sapiens
acgattttttttctctacatactcccatctttccattagcagttwtttttctagaaaaatgtacatgatcaatgtcaaagtcaccactactgtgtggagacagtctctgatacctccagcctcactcttcctcactaacatcacactcagaaggagatctagatgctggtaaaatggctgacccagcagggctcatggaggacagcattctttccaaaggcaatctaagcaaggctgagccagacacagacaaagttacctaggaagagacagagggtgagtggtccaggggtttgtttcagtctttttaatgccaggctccagcatctctaatatggtcgcagtggtatccaaaagaaaaataccttcaaaaaatcaatgaatccaggagctggttttttgaaaagatgaacaaaacagaccgctggcaagactaataaagaagaaaag

SEQ ID NO: 315788 - DNA, 585 bp, Homo sapiens
aggtgtgggcagctattgaggggcacttgttgcctcagagggaagggcttcttcagcatcttcccactaggggaagtaccagctcttaatagagatgggtggattgccttagcaagttccgaaggtacaggggagtctacatgactaaaattcttgagggcatccaccatgaggttcctatcctaggttccagggtcccagcttttcccaaccaggcctctgastttagcataatagtcctgtcttaactgagcagttaaacatctctggagttctggaaaactgaatcctgtatcctctcttcaactttgatcatcctcctactgcagtagataagaggcctctggctctcacacttagttctgaactgttcattaactgccctctgtttctcattatccctccacggggtgtcaatacgatatagtaataactgtccttgtagctattgctctccctagatatctaaaatgcctgaatcactgtactggcaaaggcattctcctctattgggacatatttttctggtcactaccaatgacatcctcagcaattgagccacaccactttattccagggactatc

SEQ ID NO: 315789 - DNA, 632 bp, Homo sapiens
aattgtgacactgccttttgtcaagcaaaatagattaagacataagagtatgagctggaatagagaaatgaggtggtaagacccagttacacgagccacaagtgtctttgcacttagtcatacactccaagagcacaagctcatcgctgaggccaatttatccctagtctcattttcaagttcacagataagcagagaagggctggctcagggtgggggtagaaatgtacagaaatttcaagaagcattgtagtctgagataagcaactttccccatctacttttaggatattacttttcataaagctttaccataagttctgctttatcatctctgcctgagcttccagctggacagactccgaaatctaaaagcctgcaacttccaaaggaggacatttagctgcccaaggctgtacagccacaccaggctgattgcttctgggtaatcaggtgggaaatatcatctgcatttagggtttcctgtgccatcagtcttctccagatgcctgcagagttgagattcacgtacccacaccagcaacactgtcccttaaasggctgtagtgctttttgggaagtagagtaaataaaatgatttattagttttctttaaccagaagaatcaatca

SEQ ID NO: 315790 - DNA, 607 bp, Homo sapiens
ataaaatcagttgtaatgatggtttcacaactccgtgaatatactaaaaaaaatcmaattctgtcctttaatgagtcaatcatatgatatatgaattacatttcgaactgcaaaaaaagggaaagagagatcattacatgcccatgaatttttaggtattaagagaagcatgtgactctcacctgcaacgacttaacaagccagatgggacgacaaacatatatgaaataataagcaatactaaatcagttataaccaaacactacaccacgaagcaaaagctgcggtcctaagaaggcgcacaacctatgaagatggggcatcttgcataggagatatcttaaattctgaatacagaaactacatcctgtgacacttggtgttgacactagctattttctagcactgttgtctgcttttccatatgttttagtcagcacctcccagctagatcgactgtttcatcgctgccttcccctagctgcaagcacagtgcttggcactcacttagggtggtgggttctatgactggaggtggagcccgtgtcgggatgtaaagcctcctgtctgagctgacctgtctcttttcatcatgcctatgtcaaca

SEQ ID NO: 315791 - DNA, 607 bp, Homo sapiens
ataaaatcagttgtaatgatggtttcacaactccgtgaatatactaaaaaaaatccaattctgtcctttaatgagtcaatcatatgatatatgaattacatttcgaactgcaaaaaaagggaaagagagatcattacatgcccatgaatttttaggtattaagagaagcatgtgactctcacctgcaacgacttaacaagccagatgggacgacaaacatatatgaaataataagcaatactaaatcagttataaccaaacactacaccacgaagcaaaagctgcggtcctaagaaggcgcacaacctatgaagatggggcatcttgcataggagatatcttaaattctgaatacagaaactacatcctgtgacacttggtgttgacactagctattttctagcactgttgtctgcttttccatatgttttagtcagcacctcccagctagatcgactgtttcatcgctgccttcccctagctgcaagcacagtgcttggcactcacttagggtggtgggttctatgactggaggtggagccmgtgtcgggatgtaaagcctcctgtctgagctgacctgtctcttttcatcatgcctatgtcaaca

SEQ ID NO: 315792 - DNA, 514 bp, Homo sapiens
ggattttttaaaaaagatccaactgtaattgtccacaatttttcagagtgataatagtattgtaaaactcatggtgatagctgcataaggcatacatttttccaaaacacatcaaactgtacrcttaaaaaaaggtagatgttttcttcattgtcttctggcaaaaaaagggggatgttagctttatatagattatacctctataaagctgtaaaaaaaaaacaataaaaagaggacatattccaaatcattctatgaatccagaatatccatcataacatattcagataagaataaaaaggcagatatcaggccattctcacttaaaaagtagatgcaagaatcctaaacaaaatattaacaaaatgaattcagcgatgtgtaaagacagatgaaacgtcaagatcaaattgggtatatcctaagaatgtaaggctggttgaacctttaaaagttagtaagtacaatctatcatagtcataaattataagagtaaacacatggtcgacagaag

SEQ ID NO: 315793 - DNA, 514 bp, Homo sapiens
ggattttttaaaaaagatccaactgtaattgtccacaatttttcagagtgataatagtattgtaaaactcatggtgatagctgcataaggcatacatttttccaaaacacatcaaactgtacgcttaaaaaaaggtagatgttttcttcattgtcttctggcaaaaaaagggggatgttagctttatatagattatacctctataaagctgtaaaaaaaaaacaataaaaagaggacatattccaaatcattctatgaatccagaatatccatcataacatattcagataagaataaaaaggcagatakcaggccattctcacttaaaaagtagatgcaagaatcctaaacaaaatattaacaaaatgaattcagcgatgtgtaaagacagatgaaacgtcaagatcaaattgggtatatcctaagaatgtaaggctggttgaacctttaaaagttagtaagtacaatctatcatagtcataaattataagagtaaacacatggtcgacagaag

SEQ ID NO: 315794 - DNA, 519 bp, Homo sapiens
acacatatacacacacatgatgacaagagaagagtatgcaatactgttacaaagggttgaggggatgttccaaagcattactgtattagttgggatttatttcaattctgaaaaacaaaataccctcaaagtatattaacttaaacaagaaagagtttactgaagttcaagtagatagcccagtsctggtaaggtgtcattccatggtgtcaggaactcaagctgcttctaatttgttgtcctgcaatacatggctttcccaagtttaccttataatgaaagatcactccagctccagccaccataactaccttccagaaagaagagaatggaaaaagaagggaacacctccttcctttaaggataatttccagagctgcaccatcatgtttactaatatcctactggccagagttttttcaaatggccacaactaattgccaggtagactggaaaaactgtagttggtattctgggcaacgaggtgcccagtgaaaaagaggacaaatattgggacca

SEQ ID NO: 315795 - DNA, 428 bp, Homo sapiens
cccagggccatccagtagagtcattggaacaaagaggaccttagaaatcatggttccttcccttttyacaggtgaagtgtttgaggctcagggagtgaagtggcttgtccagggacccaggccatggattgaggtgattaagagtcttggagtaagacagacctggttttaaatctcagttcagttacttaacatctgtgtgacttggacatatttttgattttggacgagttacttcacctcttggagcctgaattatctgacctgttcaatgggcatcctataataagtcctgcaaagcataatgtcaaggaatatgtgagaggatgcatataataaatgacatctctaattatgagtagtagagctggagccaaaatttggctcctgtcctcagttctgttccagttccattgtttcacgttaat

SEQ ID NO: 315796 - DNA, 436 bp, Homo sapiens
tgtgagctctgccacttggtccaagtggatcaggattcgaagtccagctctaccattttcaagctcataaataatcaacctccctctcagcctcagtttccttatgtgtaaaatgggataatgctatgatctaccttataggcttctggtggaagttagaatcagaacccatattaaacacttcaggctagagtcagaagagagtaaggactcagcatatattagttatagctaatgtttgtggcaggttgtattttcccccaaatggctaccacagcatctccccaatcaatatactctttttacaatgtgactgtaactctcctcccctccaatagaggtgggcagtctatgttctctttatttggatgyagatagacaagtggctatggggcaagtaatattttgtgacttctggggctaggtcatgaaaaat

SEQ ID NO: 315797 - DNA, 436 bp, Homo sapiens
tgtgagctctgccacttggtccaagtggatcaggattcgaagtccagctctaccattttcaagctcataaataatcaacctccctctcagcctcagtttccttatgtgtaaaatgggataatgctatgatctaccttataggcttctggtggaagttagaatcagaacccatattaaacacttcaggctagagtcagaagagagtaaggactcagcatatattagttatagctaatgtttgtggcaggttgtattttcccccaaatggctaccacagcatctccccaatcaatatactctttttacaatgtgactgtaactctcctcccctccaatagaggtgggcagtctatgttctctttatttggatgcagatagacaagtggctatggggcaagtratattttgtgacttctggggctaggtcatgaaaaat

SEQ ID NO: 315798 - DNA, 576 bp, Homo sapiens
tggaacccctttccagtaacaaacccactaaatgttaagacagcttgttatgcagcaatggttcaatattatttttattaatctccaaaaagaaattctccttctccttatatcatctcttaagcctcatcatcaacaccaagaagaaaaccagacatagtaggaaatgttgcagcttcttgccagatctcctgtgattcttctgtatatctggagaagatgatcaaacaccactaccggttgaggatgtgatatatggagattcgggaatctgagggtttatctggggacatagttcaaccgatctcttttgggarcaggttaattccagggcctgacaggcttcttgaaacttgtgaacaaggttctccaacagcacttactccagtgttatttttcccttcgcttcttccttgctttctgccatgagtgtgagacatgtgtgggaaggaaaaacaacgttctcctccattctacgtgagtttttagctgggactccctctaataaaagacagattaacaagagaaaagcaaacaaatgtttaataacacacacacctcctgtagatctcaaat

SEQ ID NO: 315799 - DNA, 576 bp, Homo sapiens
tggaacccctttccagtaacaaacccactaaatgttaagacagcttgttatgcagcaatggttcaatattatttttattaatctccaaaaagaaattctccttctccttatatcatctcttaagcctcatcatcaacaccaagaagaaaaccagacatagtaggaaatgttgcagcttcttgccagatctcctgtgattcttctgtatatctggagaagatgatcaaacaccactaccggttgaggatgtgatatatggagattcgggaatctgagggtttatctggggacatagttcaaccgatctcttttgggaacaggttaattccagggcctgacaggcttcttgaaacttgtgaacaaggttctccaacagcacttactccagtgttatttttcccttcscttcttccttgctttctgccatgagtgtgagacatgtgtgggaaggaaaaacaacgttctcctccattctacgtgagtttttagctgggactccctctaataaaagacagattaacaagagaaaagcaaacaaatgtttaataacacacacacctcctgtagatctcaaat

SEQ ID NO: 315800 - DNA, 604 bp, Homo sapiens
gatatatggagattcgggaatctgagggtttatctggggacatagttcaaccgatctcttttgggaacaggttaattccagggcctgacaggcttcttgaaacttgtgaacaaggttctccaacagcacttactccagtgttatttttcccttcgcttcttccttgctttctgccrtgagtgtgagacatgtgtgggaaggaaaaacaacgttctcctccattctacgtgagtttttagctgggactccctctaataaaagacagattaacaagagaaaagcaaacaaatgtttaataacacacacacctcctgtagatctcaaattagactttaggcttaaatattttgtttctctgaaacaaaaaaaggagtgtataggaaaaggccctattaagatgcaatggccaggaaaagcaccataaaccaagggtaagattttctatgcagatttaagtggatgccttctccactgatgaagagtttctgataatttagtaatctttctcctcctggtgcagagagggaggcacccttaaaaatgggaatttcttttgtaaatgtaaatttctcttacaaaaagacaacttttcagagctactgct

SEQ ID NO: 315801 - DNA, 495 bp, Homo sapiens
cagcctgggtgaccctggatttggggaaaagagaagatggtaatacctcaaagagcatttaaatgaaacttcttgaaaagaaaaatgtattcttttttttttggtaaatacttttcaaggttttattgcaaaccgaaattgatttattacacacacacaaagttgtgagatgggaggagggaaggatagtacatattataaccatgttaattacagtacattaaaatggtggtttatatgacaaataagcctgtaagtttaaatatactagtgttataactcaatgtacagattttctttatacaacacatataattaccaggaatgcaaaaaaaaaagaaaacataaataatgcccattttacaggtgacattttaaacaatgaacacrcaaacagttctggctgacaactggggcattggtccataaaaaccctttctaaaaatagaaatagttgtagcagcaatgctctttttaagcaactgaatacaagtc

SEQ ID NO: 315802 - DNA, 563 bp, Homo sapiens
agtgttggtcagcctagaattccaaaggacaaggagcaagctagaaagctttgtctgaggcagcaaaaagactctcttattgctaaaaggatactttgtatttgttattatcaactaggttagccagcagccacagtttaggaagtcactctaggttatcactgtgtgggttatctattttgtggattcttaatgagtttttaagttctagggttgtgtatgtgtatatatatayacacacacacatcaatgatcacacaaattttgaattgatatccagggcttgagaaagagagagagagaaagagagagagatagtatagtgtgtgtatgtgtatctcactgtactctgagctcaagggactacaaactatttaaatgttaatcttactcaaatgaaattctgaatacaaattggatgctcctaggatcccagaactgtcttcctgcaaaagaaaaaggaaacatatactgcatttcaaaatgaaatatacatcatcatttcataattgcattatcacccgccattgcattaccacttatctttcttcgtgtgggtaaaa

SEQ ID NO: 315803 - DNA, 494 bp, Homo sapiens
atccacctgccttggcctcccaaagtgctaggattataggcatgagccaccatgcccagccacagttttgttttgttttaaggccarcagagttatagtaaaatatttattgccttttatgacataagtaaattaaggctcaagtcacccatatatctgtcttatgttcctgttggttatgatagcttttgttgttttttaataattggagttcacttgtaaagactgaagatagcctcaaattgcagctaacagattgtgcaaatggcacaagattgattcctttatactagtttatcccttatactagtttttaaatatggttttgagatttgatttgactatttcttcaggattgtaggtctcattcaagaccactctgaaagacttagtcatcttgaataatatcctttgagcaggaatctgaaatatgagtgctttctgtacacaaggtgggtggtgggtgcctcagttccccagaatgttagttctgt

SEQ ID NO: 315804 - DNA, 494 bp, Homo sapiens
atccacctgccttggcctcccaaagtgctaggattataggcatgagccaccatgcccagccacagttttgttttgttttaaggccagcagagttatagtaaaatatttattgccttttatgacataagtaaattaaggctcaagtyacccatatatctgtcttatgttcctgttggttatgatagcttttgttgttttttaataattggagttcacttgtaaagactgaagatagcctcaaattgcagctaacagattgtgcaaatggcacaagattgattcctttatactagtttatcccttatactagtttttaaatatggttttgagatttgatttgactatttcttcaggattgtaggtctcattcaagaccactctgaaagacttagtcatcttgaataatatcctttgagcaggaatctgaaatatgagtgctttctgtacacaaggtgggtggtgggtgcctcagttccccagaatgttagttctgt

SEQ ID NO: 315805 - DNA, 494 bp, Homo sapiens
atccacctgccttggcctcccaaagtgctaggattataggcatgagccaccatgcccagccacagttttgttttgttttaaggccagcagagttatagtaaaatatttattgccttttatgacataagtaaattaaggctcaagtcacccatatatctgtcttatgttcctgttggttatgatagcttttgttgttttttaataattggagttcacttgtaaagactgaagatagcctcaaattgcagctaacagattgtgcaaatggcacaagattgattcctttrtactagtttatcccttatactagtttttaaatatggttttgagatttgatttgactatttcttcaggattgtaggtctcattcaagaccactctgaaagacttagtcatcttgaataatatcctttgagcaggaatctgaaatatgagtgctttctgtacacaaggtgggtggtgggtgcctcagttccccagaatgttagttctgt

SEQ ID NO: 315806 - DNA, 494 bp, Homo sapiens
atccacctgccttggcctcccaaagtgctaggattataggcatgagccaccatgcccagccacagttttgttttgttttaaggccagcagagttatagtaaaatatttattgccttttatgacataagtaaattaaggctcaagtcacccatatatctgtcttatgttcctgttggttatgatagcttttgttgttttttaataattggagttcacttgtaaagactgaagatagcctcaaattgcagctaacagattgtgcaaatggcacaagattgattcctttatactagtttatmccttatactagtttttaaatatggttttgagatttgatttgactatttcttcaggattgtaggtctcattcaagaccactctgaaagacttagtcatcttgaataatatcctttgagcaggaatctgaaatatgagtgctttctgtacacaaggtgggtggtgggtgcctcagttccccagaatgttagttctgt

SEQ ID NO: 315807 - DNA, 563 bp, Homo sapiens
tcaggatgtgcataggttttaaaaggcagcttctcctgtggacttatccatatatctatacaaaatgctctgtgaatgcgggttgtttgagtcttaagaggtagtctatgcaatgattttaaaactgtactcatgaaaatgtaaggagatcctttgaatgtcctgggaaataagggaagaagaagaaaaagagaaaggtatgagaggggggattytgagactttcagccctgacatcaaccattgtagttgtaattgctttgctttatattgtgttcccattcataccacataatttaatcgggttaaaaataaaactgaatgaaaatacaggcttatagaaaacagaaaagactcttcacatagagtgtgaagaacagtagactattgaatcactctgtaaaaaaaaaaaaaagcgtcagccctctaatgagttccccaatttctacagactatcacctttttggagagataaagccctaacagcaaaaatccctttaaaaagaaacacaaagtaaccaggataaccaatagttaaaggaaccctaattctggatttgttta

SEQ ID NO: 315808 - DNA, 635 bp, Homo sapiens
ttctcaccacagaataatatgtgtgataatgcatgttagtttgatttagctattccacaatgtatatatattttaaaacatcatgctgtacaccatacatatatacaatttttatttgtcaatttaaaaaatcaaaatcaagggggtaaaaaatagaaatggggagaatggggaggggrttttagaaagagctgtttaaacaaagatacagagatatgataatgctagatgaattgtcaggaggaaggctgtcatatcttgcagcaggaagccaatatatttagactaaaagctaagactgaaaaattaggtacaaattagattgtagacgattttgaatgcaaggctaagaagtttaaatctaaatcaacagttatgggaacttgacactattagataggaatagtttggttgggaagaccatatacgggagaccagttgccatctattgtgttgtgttgaggactgaactttgggcctcaactaggaagctgctggtggtcatggaaaagaagagagagatatcagacattccagaggcagaagtaacaaaatgagaagtctaactgaaaagaaaaagagaagtctgagacaaatgagatgggagctgtgtaccctacaggattgtcctggtg

SEQ ID NO: 315809 - DNA, 572 bp, Homo sapiens
aatgtgtagaatcactgcagagcagaagaaattaaattttgaatattaatgcctgatcttttaagttatctgactaaaaacagaagagtgatcgtaagcccaaccctaggtatcagtgtattatggctagcaaggagttaagaagctttgtctattcagcagtcataattgaatgtgtagtttgcaagcctgccaaattgctaaacctagatttctcatattagataatgtgtaataaaagacagctgttgccagcatatgctgtgaattgcacascagttcctcattcatgatttttggcgccatcactacaacccttagaaaaggctctgactggagggctgtctggggaacatagaccccactggtcagatccttgaataaggctgctcgccctagggaaagcggggcaggaaagactttttttttttttcaaagtgcaaaacccttgataagaccttagacacacttcatttcactttaggcaggtagtttggtgtgtgagctagtttcgaaccctgggaacattcctttccacatcgcctgagtctgacagcccggatcaaaaacaa

SEQ ID NO: 315810 - DNA, 545 bp, Homo sapiens
tcactcaaagcagcatatgacagcatccaaagatgacactaagctcagtaaagggcaagactgctggtagccagctctgacctccccgtgaagcatggctactgtgtccataatacaggatgtgtgaggatcaaaggcacactattctgctagctaaagagatagcaaaccaccccccaaccctaaaagctccttccccaggtaaataaaagtatacgaggggaaaaaattaaamtacacttatctacagagtaagggttttgaaatattaatgtaatccctccttcaaaaattctaactagagtcatctggtcatttctgattacatcttaaagatgtatccagattcaatttctgttggtttatccttagacgcttctagtcaaaagtattaattttattcccaaatatcttaaccactagtacgactgcagtgtattatctcccagagttatcaagcactggaagagaaaaaaatagatgttcaagcagcaggcaacatttatggccctttcacacagtggcatctgagtggctactgaata

SEQ ID NO: 315811 - DNA, 545 bp, Homo sapiens
tcactcaaagcagcatatgacagcatccaaagatgacactaagctcagtaaagggcaagactgctggtagccagctctgacctccccgtgaagcatggctactgtgtccataatacaggatgtgtgaggatcaaaggcacactattctgctagctaaagagatagcaaaccaccccccaaccctaaaagctccttccccaggtaaataaaagtatacgaggggaaaaaattaaaatacacttatctacagagtaagggttttgaaatattaatgtaatccctccttcaaaaattytaactagagtcatctggtcatttctgattacatcttaaagatgtatccagattcaatttctgttggtttatccttagacgcttctagtcaaaagtattaattttattcccaaatatcttaaccactagtacgactgcagtgtattatctcccagagttatcaagcactggaagagaaaaaaatagatgttcaagcagcaggcaacatttatggccctttcacacagtggcatctgagtggctactgaata

SEQ ID NO: 315812 - DNA, 545 bp, Homo sapiens
tcactcaaagcagcatatgacagcatccaaagatgacactaagctcagtaaagggcaagactgctggtagccagctctgacctccccgtgaagcatggctactgtgtccataatacaggatgtgtgaggatcaaaggcacactattctgctagctaaagagatagcaaaccaccccccaaccctaaaagctccttccccaggtaaataaaagtatacgaggggaaaaaattaaaatacacttatctacagagtaagggttttgaaatattaatgtaatccctccttcaaaaattctaactagagtcatctggtcatttctgattacatcttaaagatgtatccagattcaatttctgttggtttatccttagacgcttctagtcaaaagtattaattttattcccaaatatcttaaccactagtaygactgcagtgtattatctcccagagttatcaagcactggaagagaaaaaaatagatgttcaagcagcaggcaacatttatggccctttcacacagtggcatctgagtggctactgaata

SEQ ID NO: 315813 - DNA, 624 bp, Homo sapiens
aatattggatttatatgcatatataaatacctagacaaaggctgataagaaaactcactaaagtgttaacaacagtatttctgaagaaatgagtaggagtcaactgagaacattttaaatttgatttaataaatatataaaaattgttttgtcactgmcaggcaactatgctcatgaacattctcatttgaggacgttcaataatccatacttgactcccgttaagtatgttccctgttctggcacttcacaaggagattttgctcttataaacctgacattttcaaattcttttttgtttccaaaataagcccaaagggaacacatatttctattgctttctaaaatgactgccagatttttgtctgtttcattcttagtgacgcatatacaacattttttgtttttttgtttctagggcaaaaatgtcaaacatcttttggaccattttgactgtgatattcttcatcctaaaatagtaacaatcaaaaacctctaattacacaaagataaagcaaattgattattataatctctacaattataaaatcagcatagataatgcaaacacaatcacatattaaatccaaaaattttgccaagatcaatgataataaacataaa

SEQ ID NO: 315814 - DNA, 624 bp, Homo sapiens
aatattggatttatatgcatatataaatacctagacaaaggctgataagaaaactcactaaagtgttaacaacagtatttctgaagaaatgagtaggagtcaactgagaacattttaaatttgatttaataaatatataaaaattgttttgtcactgccaggcaactatgctcatgaacattctcatttgaggacgttcaataatccatacttgactcccgttaagtatgttccctgttctggcacytcacaaggagattttgctcttataaacctgacattttcaaattcttttttgtttccaaaataagcccaaagggaacacatatttctattgctttctaaaatgactgccagatttttgtctgtttcattcttagtgacgcatatacaacattttttgtttttttgtttctagggcaaaaatgtcaaacatcttttggaccattttgactgtgatattcttcatcctaaaatagtaacaatcaaaaacctctaattacacaaagataaagcaaattgattattataatctctacaattataaaatcagcatagataatgcaaacacaatcacatattaaatccaaaaattttgccaagatcaatgataataaacataaa

SEQ ID NO: 315815 - DNA, 532 bp, Homo sapiens
ttcagctttcagaagtgctataagatggggaaaatgtgtattagaaggtgatgtaatgttaagtaaaatgtgcagtatgagctcaatacataataaaacctgtatagaaaaaataaaggatggaaataggggaataaagattttgggggtaattgtcattgagtgaaatttttctctttgtgtkgttcttcattttccaaagttgatgtaatgagcatatataactttgtaaataaggaaaaataaaattcagaggaaacactgggttttcactgctttccagagaaagagcaggtagagaagccatgtggtagctgcctctgtgccctgctgggaaggcaagggataaaggaaactttccttgatgcggctcttggggcttccctttaagcctagtgtcttgacttgtgctctgatgaaaagggatctactgagatttggagagtttctaagtttagcattaatcccacctgaataagaggtttgagtaaacttgcaggagggaaggggtttccgtgtttataaattttgg

SEQ ID NO: 315816 - DNA, 590 bp, Homo sapiens
gtatggcagctgagaagtcccgcaacaagccatctgcaagctgagatgccagtgttgcaggactttttccttagttcagctaaagacgggggtccttatcacacggccatgaaaatttaggctcacagacaatttgaagggtgaatagaatgggatttattgggcagaaaggaaagaaaggaagaacagggactctccacaaggccagagtccctgctcctgtgcttcctgccttgcagtttgaatcctagcttccacccaggaagaggaggggccaggttcctccccgctgcaaacagcacgaacttctgtggctctgcccagtgcacattcctcccagtgagcaggctggttggagttttkccagggagcccttcccaccaggctgtcttattagcatggttcagtccaagtcaatgatgaaacttagtatgaggctgaacacctgagaacctgaatgactgctggtgccagtccctgagttgaaacccagagaacttggagttctgataggagaagaaaggtgtcccagtttcaggagagagagagtaaatccccctttcctcttttttgttctatctggaccttct

SEQ ID NO: 315817 - DNA, 349 bp, Homo sapiens
agcattcatgacaagctgatttaagaaaccttgggtcttaagggaacatcaacagtagtctggcagaactcctcgtggcctgggctggcagtggctgtggggtgaggctcttctgcctttgaagggaagggaagagtgggaaggactgtgtcttgtggtttggtgccagctcagttgcaataaaataaaacaccaggtaaacttctaaggtttttgactctagtttctgacgcccagacagtayttctggacccactcggaggcgagtggggggaccttgctgccctgaagggaaggacacaggcctggctgactttgacacctgccaattgtagagccccagggcctt

SEQ ID NO: 315818 - DNA, 452 bp, Homo sapiens
aaaataaaaaacctttgtgcatcaaaggatactatcaatacagtaaaaagacaacccacagaatgagagggaatactttcaaattatatatctgataagggattaatattcagaatatatgaagaacttctacaactcaacaataaaaacccaattaaaaatgggcaaaggacttgagtctacatttctcccaagaaaatatataaatagccaataagcacatgaaacgatgctcaacattactgatcaacagggagatgcaaatccaaatgacaatgtgatactatttcacaccacataggatggctattaygaaaaattaaaccaaaccaacccaaacagaggaaaacaaaggcagaaaataacaagtgttgccaaggataaggagaaattggaacccttgtgcatttctagtgggaatgtaaactggtgtagccactttgcaaaatgat

SEQ ID NO: 315819 - DNA, 566 bp, Homo sapiens
aataaacctactttgcacttccaagatttgagttacttaaaaactgtcgtgaagtggatttccttagggtagcatgctgaagacagggcatagatcagaatctttggccttaatccttttacttcacacctgaggcttgcacctctgtggtatttgcatctaaatacctggatagtgataggagattaagagagggaatcccctctgaggccagaacaggaactctaggatatgctggtgctgcagtcacccatatcattcctgtgtttataatccatgagccctgcaatgkccaggacgatggagcagctacatgccagcctctatttgctcctagacttaaattgctggctgagtccatgctggtgaatagagtccatttctcctgcaaagaacttaggagtcagtcgatcagaaagaatagggggtggagcaggttattaagaacaggctctagaattagattaaatcttgtcctcaccgctttgtaactgtgtgacagaggatgccagtaggggatacttcttccccctcctgttgtttccttctatgtgatgggaatttgt

SEQ ID NO: 315820 - DNA, 566 bp, Homo sapiens
aataaacctactttgcacttccaagatttgagttacttaaaaactgtcgtgaagtggatttccttagggtagcatgctgaagacagggcatagatcagaatctttggccttaatccttttacttcacacctgaggcttgcacctctgtggtatttgcatctaaatacctggatagtgataggagattaagagagggaatcccctctgaggccagaacaggaactctaggatatgctggtgctgcagtcacccatatcattcctgtgtttataatccatgagccctgcaatgtccaggacgatggagcagctacatgccagcctctatttgctcctagacttaaattgctggctgagtccatgctggtgaatagagtccatttctcctgcaaagaacttaggagtcagtcgatcagaaagaatagggggtggagcaggttattaagaacaggctctagaattagattaaatcttgtcctcaccgctttgtaactgtgtgacagaggatgccagtaggggatacttyttccccctcctgttgtttccttctatgtgatgggaatttgt

SEQ ID NO: 315821 - DNA, 429 bp, Homo sapiens
gtaatagcttttatctgctgtgttaaaatatgtcagtttactagttcctctcttccagtggactgtgagaatccttgaggayaagaattgtgtcttatttatccttatccttatttatccttatcttatttatccttatttatccttatccttattttgcccaggttaagtgtttggtaagtgttttgataaatagaaaaatgatgggaaagatgctattttcattgaactttgaaaaacaatgagaaggtaaacaaaatagaacagggaaaatgacattcttcaaatagtgagcagaaagacatggaagaaccaaaggctaagggaagatgcttatgggaatgacaagtgtttagtgagaaggagcctggactactggggcatcaaagtgggacacaatagcgcgacaaggactggctgtccttgcaa

SEQ ID NO: 315822 - DNA, 587 bp, Homo sapiens
tttaaattaaatgagggagatacgatgattcatgtaacaccagggcaacatctgtcttgtacaacaggaagcgctgccacacctcgcaagagaaactgtgaacttaaggggaaaatagccccatcttgctacaaaatgaaaccatcactaacacataaaacagctgatacattgactcataccctcyatgtggccttccactgaccaggatatcaaatctaggcaaggatcagagttttattcccactatatccagactttgattacctctttaatccagaaataagccttgcaaacactaagcagtgttagcttagaggatacacatgcatttaggtgaatgaagtctctttagggtctctttcatggctccatagagggcctgatggtccttggcaaatgtccatagcagttgatacagctctgccaaatgcagtttttaaaaattgtctcacaatactatattgtaaataacatgcactgttgtcttccccgccatgcctttcacacaccctcttccctaggcctggaatcttcctgatatcccaatatctaataattgaacgcttgtttttcctatctcagct

SEQ ID NO: 315823 - DNA, 546 bp, Homo sapiens
ttcattctgtttcactatgattgtagttgttttttttcttctgccagctttggagttagtttgttcttgtttgattcctccaggtgtgatgttacagcattaatttgaratctttctaactttttgaggtaagtgttcagtgatataaactttcttttcaatactgattttgctgcatcccagaaatgttggtattttgtgtctgttttcacttatttcaaatatttttttaaatttctgccttaatttcattgtttacccaaaaataagtcaggagtaaattgcttaattctcatgtaattgtgtggtttttgagagaccttcttggtattgatttctgtttttagtccactatggtctgagagtatggttggtatgatttctatattttaaaatattttttgagacttgctttatggccaagcccgttgtcagtgtaggagtatgttttgtgtgcagatgtgaagaatgtatattctgtggttgataggtggagtatgctgcagatatctattaagtccaattggtcaagagtcaaatttaagt

SEQ ID NO: 315824 - DNA, 500 bp, Homo sapiens
caggcccaggtcagcaggcacacatatagactgcctgatagcaggtacaagcactagtagtaagggagaatccaatgggtgaccaacaagtgccttgaggtatgctcaggcatggggctagaaaacctcagctcccagttctctgcatggatggcagcggggagtggggtccctaaactcctaatccaggagagtgagtgctccatttgccaagagatctgccagggcacagaatgcagaaggccccactccaccacaatctctgcacaggaagggtgggccagctcagactggtaatccagatgaatgggtyctccaactgcccaaagatttgtctgggtgggtatggggcagagggggccctgcttcaccacagttgctgtgcaggatgagtgggctggctcaggatgctgatctagggactaggtgctctgagtgcctgggcgctgagcagtgaaggccctgctgcaccataatctctatataggaagagtgagttg

SEQ ID NO: 315825 - DNA, 584 bp, Homo sapiens
tgtatctgtatatgtgtatatatgtgtgtatgatatagggacttaattttttaaattttcattaagaaaataatcaaataatcacgatttcaggaccaaatttgggaggaaaatatgtatatatatatcccctaacaaaaatctacatgactgcttccaacctgagttttccttttggtctctttgtgcccttgctccccaggcatgggaaagaacagattcagactagcataggaagacctcactcctaaggaacttttctcaatagctttccagggttggggctgattttttttttttttttttttttttgagatggagtttcgcacttgttgcccaggctgcagtgcaatgcgtgatcttggctcaccacaacctccacctcccgggttcaagcgattctcctgcctcagcctcccgagtagctgggattacaggcatgtgccaccatgcccggccaatgttgtatttttagtagagatggggtttctccatgttggtcaggcygatctcaaactcccgacctcaggtgatccacctgcgttggcctcccaaagtgctgggattacaggcgtgagccaccg

SEQ ID NO: 315826 - DNA, 560 bp, Homo sapiens
cacccggctggggctgcttttttgggaaacaggaaaggccatgaaaaacatatcccactacttgctgcaatattcacttcattgtgcttctatgaaagatatacaactttggacctatgtacacgtgaggctttaaaggaaaatgagtcaagacataaaattacctactattttatccttggaacagccccgttgatgaattcttggaataaggggagagcggcgctactgttgatgaacaagggagtcagtcagttatggcacagcatcagtgcagtccaaccytctagcaagaaatgtaagcaggaccaaataacacctctagactctgcaggtatagcctgatgtttgctcaatccagcatcagatgtctctgaagtctaagaccatttttaaaccaatctgaagtctaggaccatttttaaaccaatctatcctttccctactatttttaatgccacttttgttacatagcaagttgtcgcacattcatgagcctctttctagggtactttgttcttttgatccagatctgtgccaataatattctgttttaaata

SEQ ID NO: 315827 - DNA, 523 bp, Homo sapiens
ctgcgggttctgtgaattcaaccaaccacgattcaacatatttggaaaaaataataataataataaattaaaaatgtagtataacaactatttacatagcatttgtattgtattagatattataagtaacctagatatgacttaaagtaaatgggagaatatgtgcaggttatgtgcaaattctgcaccattttatataaagtacttgagcatctgcagattttgatatcaatggagggtctaggaactaattccctatggataccaatggatgactgtagtttattatcctatttactctatgttttcttttatctaattcaataaattagtttmgtttacttcctacaatgatgccttttgttaaatttatttctatgtttctcattgctttgatgtaatgtaatatgtattataagcaaattatttttcctaaacattatttttagttgctaatgtatagggctgctttgattttttaatgtaataatcttgtatccaacaattttgattattagttctt

SEQ ID NO: 315828 - DNA, 523 bp, Homo sapiens
ctgcgggttctgtgaattcaaccaaccacgattcaacatatttggaaaaaataataataataataaattaaaaatgtagtataacaactatttacatagcatttgtattgtattagatattataagtaacctagatatgacttaaagtaaatgggagaatatgtgcaggttatgtgcaaattctgcaccattttatataaagtacttgagcatctgcagattttgatatcaatggagggtctaggaactaattccctatggataccaatggatgactgtagtttattatcctatttactctatgttttcttttatctaattcaataaattagtttagtttacttcctacaatgatgccttttgttaaatttatttctatgtttctcattgctttgatgtaatgtaataygtattataagcaaattatttttcctaaacattatttttagttgctaatgtatagggctgctttgattttttaatgtaataatcttgtatccaacaattttgattattagttctt

SEQ ID NO: 315829 - DNA, 557 bp, Homo sapiens
tttcaattagtgaatttaggctgttaaacatttaattttttgaatctactyataaattagaatgactaaaatggtacttttttggactgatattgacttatttttaccatcaggtatactttcctcataaaatatattggaatactttcttaatttttctatattctaaaacaatttttagatgatacagacattttctctgatgttttcgtaaagttgcctataaaaccagtttgttttgtcattgttgttttgtttgtttgctttattttttaaagaattgattttataatactgattattttacctgatggctataatttttagaatttttaaagatttttaatatgttttaaaaacagaaagttaccctttctcctaaaatttcaaatttcatgttataaaattgttcatagtattttttaaaaaaacaatgttacctctagttaagtgtccttttctattttctcatattattttttggtgccttctctctttttgcgctgattagtattgtcaaagttttatttattttataaatctttgcaaccaaacac

SEQ ID NO: 315830 - DNA, 557 bp, Homo sapiens
tttcaattagtgaatttaggctgttaaacatttaattttttgaatctacttataaattagaatgactaaaatggtacttttttggactgatattgacttatttttaccatcaggtatactttcctcataaaatatattggaatactttcttaatttttctatattctaaaacaatttttagatgatacagacattttctctgatgttttcgtaaagttgcctataaaaccagtttgttttgtcattgttgttttgtttgtttgctttattttttaaagaattgattttataatactgattattttacctgatggctayaatttttagaatttttaaagatttttaatatgttttaaaaacagaaagttaccctttctcctaaaatttcaaatttcatgttataaaattgttcatagtattttttaaaaaaacaatgttacctctagttaagtgtccttttctattttctcatattattttttggtgccttctctctttttgcgctgattagtattgtcaaagttttatttattttataaatctttgcaaccaaacac

SEQ ID NO: 315831 - DNA, 527 bp, Homo sapiens
ctcaggtaacaagaagaacagaaatttccaggtcactaaatttggtgggaaactcaaaataaggcttttgcctttagtttacagaaatragactacagatgtacttcactttaagaaaatccaatatacatggaactttatctaattcaagcaatgattactcaaattacaaaatgattctttccttcacatggaaagtttccagtagatgttcgttactgatcatttcttgagagagaggctggtcaaaagaagacagagaagttcaaagctaagataaataggaaattagacatcattgctcatcgaagataaatttgaagtaaagatgaaatgcctctgaaattagaccatgaacaattagaaacacattttgatgaataaaaaatgggatttgctgtaaccattttataaaatgaggcacatccagaaggtcttcctttttgtaacagtatctgcaccattgcctcttgcctctccccaaacaactgttaataacttggtcccaggaaaagcgatactatatt

SEQ ID NO: 315832 - DNA, 527 bp, Homo sapiens
ctcaggtaacaagaagaacagaaatttccaggtcactaaatttggtgggaaactcaaaataaggcttttgcctttagtttacagaaataagactacagatgtacttcactttaagaaaatccaatatacatggaactttatctaattcaagcaatgattactcaaattacaaaatgattctttccttcacatggaaagtttccagtagatgttcgttactgatcatttcttgagagagaggctggtcaaaagaagacagagaagttcaaagctaagataaataggaaattagacatcattgctcatcraagataaatttgaagtaaagatgaaatgcctctgaaattagaccatgaacaattagaaacacattttgatgaataaaaaatgggatttgctgtaaccattttataaaatgaggcacatccagaaggtcttcctttttgtaacagtatctgcaccattgcctcttgcctctccccaaacaactgttaataacttggtcccaggaaaagcgatactatatt

SEQ ID NO: 315833 - DNA, 541 bp, Homo sapiens
atgcatgaaatatatgcagatactagtctgttatcatttatcatatcaaaatatatgcaaatctattataaaaagttaaaaaatcaaaacttgcacacacaaacacagatcacagatggtgccatttacagtacrgagaaatgttaaaaaagtaaacacatattaaatcataactgcataaaataactgtagcacatactatactacttttataatataatatatgcttcctctcccacctcctctacctcttccacctttatcacccctgagacagcaagaccaaccctctcctttctcctgttcctcagactactcaatgtgaagatgatgaggatgaagacctttataatgatccacttccacttaatgaatagtaagtatgttttctcttcttcatgattctctgaataacattttcttttctctagctttctttattacaagaatacagtatacaatacacatatcatacaaatatgtgttaattgactgttaatgtcctcagtaaggcttctggtcaatagtaggctataagtag

SEQ ID NO: 315834 - DNA, 541 bp, Homo sapiens
atgcatgaaatatatgcagatactagtctgttatcatttatcatatcaaaatatatgcaaatctattataaaaagttaaaaaatcaaaacttgcacacacaaacacagatcacagatggtgccatttacagtacggagaaatgttaaaaaagtaaacacatattaaatcataactgcataaaataactgtagcacatactatactacttttataatataatatatgcttcctctcccacctcctctacctcttccacctttatcacccctgagacagcaagaccaaccctctcctttctcctgttcctcagmctactcaatgtgaagatgatgaggatgaagacctttataatgatccacttccacttaatgaatagtaagtatgttttctcttcttcatgattctctgaataacattttcttttctctagctttctttattacaagaatacagtatacaatacacatatcatacaaatatgtgttaattgactgttaatgtcctcagtaaggcttctggtcaatagtaggctataagtag

SEQ ID NO: 315835 - DNA, 541 bp, Homo sapiens
atgcatgaaatatatgcagatactagtctgttatcatttatcatatcaaaatatatgcaaatctattataaaaagttaaaaaatcaaaacttgcacacacaaacacagatcacagatggtgccatttacagtacggagaaatgttaaaaaagtaaacacatattaaatcataactgcataaaataactgtagcacatactatactacttttataatataatatatgcttcctctcccacctcctctacctcttccacctttatcacccctgagacagcaagaccaaccctctcctttctcctgttcctcagactactcaatgtgaagatgatgaggatgwagacctttataatgatccacttccacttaatgaatagtaagtatgttttctcttcttcatgattctctgaataacattttcttttctctagctttctttattacaagaatacagtatacaatacacatatcatacaaatatgtgttaattgactgttaatgtcctcagtaaggcttctggtcaatagtaggctataagtag

SEQ ID NO: 315836 - DNA, 583 bp, Homo sapiens
tgcacatgacaagacacttagctcctgggtttcatccactaaatgccacctatgcaatgtgacaaagaacttccctcagttaacaatgactttcaaaagagaacgtccaggacattatttattcatccttttcttttccacagcagttagcacagtgtctttgagagaatgaacatggagtagcaaaaggaacttaaagttggaaagaatgggtgccaactcctaactctatcatttattaactatgtgacttttggtaagwtttttatctctcccttagcttctgtgtcttcatctataaattgaagtcaatcgaatctactccacagggcaattttaagaattaaataaataatgtaagtaaaaaaaaatttttgcacatactaggtgtttcatatatttttgtttctatacctcctttactctcatttaaattaaataaaaatccagaaataattattacaacattatttcttctagtaaagtttgtggctcaaatctttttaaagaaaatgtgtatgtgtgtaagattgtgggtgcgtgcatgtaattggcatgagatctagaaaggtaagtatgcagc

SEQ ID NO: 315837 - DNA, 575 bp, Homo sapiens
taaaatgtagctgatttttgaagtgggtattgtaatttttatacttgtctttaatacaatctttcctaattattttattattctcttctcctccatcttcttytttccccacctccccagtagtgctttccatccctatcagcatatgaccttccatattttttaagtttatacagatataaagacataaacaggctggtcatggtggctcacacctgtaatcccagtgctttaggggataaaggtggagggattacttgaggctaggagtttgagacaagtctagacaacactacaagatcctgtctctacaaacaaaaaataatttaaattagctggatgtggtggcacatgcctatggtcacagctacttgggaggctaaggtgagaggcttacttaagcccaggagttcaagcctgcagtgatttatgattgcaccactgcatcccagcctgggtgacacagcaaaaccttgtctctaaaaagagagagagagagaaaggatataaacacatatgtattacacatattcccacatacatttctggcatttttgttttataagtatggattc

SEQ ID NO: 315838 - DNA, 603 bp, Homo sapiens
aacgttatgtaattttagactgtcagaaaggtaagactttaataaaagcattattaaagataaaaaaaggcctcatgcctgtaatcccaacactttgggaggctgaggcaggtggatcgtgaggtcaggagttcaagaccagactggccaagatggtgaaaccccatctctactaaaaatataaaaattagccaagcatggtggtgcgtgcctgtagtcccagctactcaggaggctgaggcaggagaatcacttgaacccgggaggcaaggttgcagtgagctgagattgtaccactgcactccagcctgggtgacagagcgagactctgtctcaaaaaagaaaagctactacataagatttcagctttaatttatcaaggaaaataaacacatctaatcttgaatatttctaataatgcagttgcaaaatatataaataaaatggcagatgtataaagagaaatgtgagactttttaccatcgcagtggtgggagagttctatrtctatttctgatttcatatatgtatatatattttcattatattaaacagaaaaaaatccagatggataccccaattaacctgatttgatcattacac

SEQ ID NO: 315839 - DNA, 549 bp, Homo sapiens
acatttatagtgtgtgtgtatgtgtgttttgatagtgttcccataaggcccttagactttcttcagtcttttccattattctcttttctttttgctcttcttactgggtaatttcaaatgtcttctagttcactgattttttattctgcttaatcaagcttgctgttaaacactgttaactgaaaaatcacaaaatttataaatttagaaaggagaggagacttcatttcttgtgaaagttacagccttcaaggtcactatccacagctgggaagcatagcacctggcaaataacggagaaaggcactttgaaggagcggggattagggtaggagccttatgctgagtgcgttgactaacatacrtattcaacaggttacaggaggagctacaaatattcaagcaggtgattctgactcaacatctcattgcattacaattagggcttatatttcaaaaagcgaagagggacatgaaggcacttaagtgcataacctctaaactggctagaacaggtccacagttggtaatcttatcagacaaattagt

SEQ ID NO: 315840 - DNA, 591 bp, Homo sapiens
tattatccttccaaaattctttacagcactttataagccaccatccatcagtgcagaacatgtggcgctggtgttagcagagcgtgcaatgcctttggaacattctctgtacagcagccttgcctgtaagggtcagtaaggaggacagctcttgaagactctatgcgaggtctttgaagagttgcatgtttactagcagcagtaaaacagagaaaaggggaaatgttaaggaagctctagatggctgaactcccaggaacaagaaagtctggatcttgagcataaatttcctcagaaaaggactttgaagtttgtttcaatctgtgaaattctagtaacggtctaaatttgctccttaacatctggtgtagataattacagcaaatggtttggatatgtccatttgttcattaatccaytcatttactggagatggttttattgaaagcctcctattataagaaaatggcctttagcacttcatggaatagaaaagtgagtaaggtggtcattgccctcaaagacctttttctgtcttagggaggggggaatccataagtacataatggtaatgtatagtaccctgagata

SEQ ID NO: 315841 - DNA, 566 bp, Homo sapiens
gcagtgactaaaggccttcattcccaagaccatttctcatcctactgcttaatcacttctcctcaaagtccaggctcagaggagacacatatttagggaagaatttgtggatggaaaacagctgaatacaacctggtagagtgagtcaaatcatcytaaggtaaaacaacaaactatttgggggaaaacaaataagtacagggacttactttttattgattgtattcttcattagttgcatatttttgctttctatttggcttcatttaggatctacatatttctacaaatttcaggggtccatgtccttttgtgtagactccttgtattgactgaccctaccattcaccaagtctccctgttgagatttagccaacatccttctgcttacctccaggatctctaaatgaaactctatgataggtgctggaagactgagcctatagaaaattacaaaccaggggaaactttcttcagagctttgcagtcccctgtctaaatgtccagtgctagtaatgacacagtcttgctgacaatgtcatatagtctgctgggatttgtataat

SEQ ID NO: 315842 - DNA, 539 bp, Homo sapiens
ccacgttatagtatattttgaaagttgactgactttctgttttattcagtaataattggacattttaaatattattttgttttgcctcttttaaactcttggagaaaatatagctaaaatatactattacttgtttttaactttcctgagcagcctatagtttattctttgacacatttcttcaaggtcaccaatttactataagcattgatatttaatgtactacagatataaaaattataggtgtagaagattgagctagatatattgccatgaataactgccctaggaatgtcatttttagacttttttgaaaatattgcctttatacaagatgtggtacagaaaaaacgtcaattaactgagggctttattaaagatattatrgaactatgaatgtatataaaacctttaacaataaatttgataaatttttaagcactagatagttaaatttatcctagttataacttcatttacatttgtgctccaatattatttcaatttagaattactggaagaatttagtccagttgttg

SEQ ID NO: 315843 - DNA, 571 bp, Homo sapiens
gccactactcctggcccattatgtcctttcttgtagataaaccagttgttatcgttttgccacatttgctttctcttgttctctctatggattgcttggttggttgatgagctatttggaagtaaattgcagacatcctgacatttcatctctaaatacttttrgcgttagtctctttgaggttaggatggtttcatgtcattccaacactgttttacacctaaagcaaatttatttttatataattttcttacacttttcataaaagagctctaaaactgtgtacaggtcagagattgtttctagcagcatatactgctagtgcgtggttaagatttagatctttaaagtataatgttagctttcttgttatataataatacttctatgcctacttatgggtaaatatgagtaaaagttttgccaatgtcagtaggaatttttttatgagatcagttttcacaatgtgttaattattaagcactcccactacacagtcactatcacaggcccttggaatttgcttattgaatttgtttacagtattcctatgaagcatgaaagagattag

SEQ ID NO: 315844 - DNA, 571 bp, Homo sapiens
gccactactcctggcccattatgtcctttcttgtagataaaccagttgttatcgttttgccacatttgctttctcttgttctctctatggattgcttggttggttgatgagctatttggaagtaaattgcagacatcctgacatttcatctctaaatacttttggcgttagtctctttgaggttaggatggtttcatgtcattccaacactgttttacacctaaagcaaatttattttkatataattttcttacacttttcataaaagagctctaaaactgtgtacaggtcagagattgtttctagcagcatatactgctagtgcgtggttaagatttagatctttaaagtataatgttagctttcttgttatataataatacttctatgcctacttatgggtaaatatgagtaaaagttttgccaatgtcagtaggaatttttttatgagatcagttttcacaatgtgttaattattaagcactcccactacacagtcactatcacaggcccttggaatttgcttattgaatttgtttacagtattcctatgaagcatgaaagagattag

SEQ ID NO: 315845 - DNA, 571 bp, Homo sapiens
gccactactcctggcccattatgtcctttcttgtagataaaccagttgttatcgttttgccacatttgctttctcttgttctctctatggattgcttggttggttgatgagctatttggaagtaaattgcagacatcctgacatttcatctctaaatacttttggcgttagtctctttgaggttaggatggtttcatgtcattccaacactgttttacacctaaagcaaatttatttttatataattttcttacacttttcataaaagagctctaaaactgtgtacaggtcagagattgtttctagcagcatatactgctagtgcgtggttaagatttagatctttaaagtataatgttagctttcttgttatataataatacttctatgcctacttaygggtaaatatgagtaaaagttttgccaatgtcagtaggaatttttttatgagatcagttttcacaatgtgttaattattaagcactcccactacacagtcactatcacaggcccttggaatttgcttattgaatttgtttacagtattcctatgaagcatgaaagagattag

SEQ ID NO: 315846 - DNA, 527 bp, Homo sapiens
ttttgtaaaaaaaaatcttttttttggtaatctcgtaagaaaaaagtttgaaaaaagttcttttgttatttttcacttatttgcttttgtcagtgaatgattcagtttcttaaatttcctgctgattttaatttgttgccttttggttaggtgtgttggcttacgtctgtaatcccagcattttgggaggctgaggtggggggatcacctgaggtcaggagttcgagaccagcctggccaacatggcaaaaccacctctctactaaaaatacaaaaattagccaggtgtggtcacacatgcctgtagtcccagctactcaggaggctgaggcaggagaattgcttgaacctgggaggtgaaggttgcagtgagctgagattgtgccaccacattccagcctgggcaacagagygagactccatctcaaaaaaaaaaaattggttgcttttagttttgttttggatctgtattataaaacagtttgttatgattgtatcttatatctcttctatttctgacagcactc

SEQ ID NO: 315847 - DNA, 595 bp, Homo sapiens
ctcaaaaaaaaaaaattggttgcttttagttttgttttggatctgtattataaaacagtttgttatgattgtatcttatatctcttctatttctgacagcactcaattctgagtgaggcctgagagcttgacatctaaacattcagagttttagtgcatagactttgtgatgattatttggatactcagggacctttattgcttactattttgttatctgctrtatgtataattgtcatatttaacaaaatctggcacctttagataaatgagatgttacataatttaaaaaggtaatacttttctaattccttatttccactttctctttatttttagagtatgccaagatggaaggaagcctcatacagtgagattaataatccgtcggtattcctctgagaagcactatggtcgtgagagtcgtcagtgccctattccttcacatgtaattcagaaattagggacaggtatggactagttttccaacagtttcattagcaggttgaactcttaaataagccaactttgaatgagaaatatgctccaaaaatggagggtcttcacagggaattagcaagcaattaaatgcttt

SEQ ID NO: 315848 - DNA, 574 bp, Homo sapiens
acataaataatttgaatctctccctacctaacatgccaaaataatggctacttttaaagaactgattaaaattctaatcattcaacattagtttgttattactattatccacatttgtgcaaggcaatgagaagttgccaacttctgtgtaagtatagtgccagtgcctacaacacagcctcgctcacataaacaagggtatagcctggatgtcaatctgcaaagtaatctgtaaaggaagcaaaagtcggccggtggctcatgctgtaatcccagcactttgggaggctgagacgggtggatcacctgaggtcaggagttcaagagttcaagaccaacctgcccaacatggcgaaaaccgtctctagaaaaaatacaaaaaattarctgggcatggtgtcaggcacctgtaattccagctacttgggaggctgaggcaggagaatcgcttgaacccgggaggcagaggttgcagtgagctgagattgcacccctgtactccagcctggatgacaagagcgaaactccatctcaaaaataataataaaaaaaaggaaacagaagtctagtaaaa

SEQ ID NO: 315849 - DNA, 590 bp, Homo sapiens
actgctattaaagcctgatgttcccggttcacaaggagatacagaggatacctgtttgctactggataaatgatctctaggatttatgggaatatcttgcatttgttttttagaaaagaaagataatactcctctagaggcatgtaatggacaactcacacttcctttcccttgaaatttttccctagattttccagaaaggatttcttcttgaatatctactggaagctgcttgaagacttcttggtcaacaccttcaggaagtgaacagagtgggaattcattaatgtctttttctttagaaaaatttgtggtatctagtggagactccctagttcttgtactttcaattcttccacttggtaggaaatcccggtttgtttctttgtctttgggaaaatcttccatatgagtgtctttcattttctagaacacaagaataacagactaatttasatatctgatatcttttaaatatcgctgctgctgctgtgtgcctgtagctattatctgacatgtttctaacctactcaacaaatacaactctttgtggccagttccaaacaactagagatctactaccacaatta

SEQ ID NO: 315850 - DNA, 331 bp, Homo sapiens
ctgttaccccttgatgcaaaaatgctcattgaaaaaagtaaggttttccaatatttgaaacgtttttctggctgggtgcggtggctcactcycgtaatcctagggcttcgggaagtggggcgggaagattgcttgagcccaggagtttgagaccggcctgggcaatacggggagactcccatctctacaaaaaaaaaaaaaaattgtcttaattagctgagtgtgatggcacgtacctgtggtaccagttacacaggaggccaaaacaacaacaaaccaataaaccaatcaaccaaccaaacaaaaaaccaaaaaacaaaaaccaaaccaa

SEQ ID NO: 315851 - DNA, 598 bp, Homo sapiens
ttatgcatttattcgtggagccctttttacatacatatttaaaggaaacgtgtgggttgctcttaagttcccactgtggacattcgattgacatttttaaaaattccatttatgctttgagattaatggaaaaatcagtgcttttaaaaacgattttgtttccaagatgtttgcctgccaaaatctgaatataatttagtgtaggtaactcagagttatgtgtagagggagtttggatgaatggtttatcagactcacactcttgtagcctttggttttgtgtgttgtagaaacgggttggcaaacaacaggrccagtaatcattctgtgcgtctctggtggagtaatataagcaatagttcatgttttcagtttccatgttgcgggtagagagttgagagcctaacattaacacttcatttttagactaccttgtttttactttgtttgcttttcagtaataattttgtttcatttctttatactaattcatgacgttttgaagagaaggaagataaaagtgacaaattctttgcttctattgtgttctttttgataatagctttattgagatacaattctctatcatactttaaaa

SEQ ID NO: 315852 - DNA, 598 bp, Homo sapiens
ttatgcatttattcgtggagccctttttacatacatatttaaaggaaacgtgtgggttgctcttaagttcccactgtggacattcgattgacatttttaaaaattccatttatgctttgagattaatggaaaaatcagtgcttttaaaaacgattttgtttccaagatgtttgcctgccaaaatctgaatataatttagtgtaggtaactcagagttatgtgtagagggagtttggatgaatggtttatcagactcacactcttgtagcctttggttttgtgtgttgtagaaacgggttggcaaacaacaggaccagtaatcattctgtgcrtctctggtggagtaatataagcaatagttcatgttttcagtttccatgttgcgggtagagagttgagagcctaacattaacacttcatttttagactaccttgtttttactttgtttgcttttcagtaataattttgtttcatttctttatactaattcatgacgttttgaagagaaggaagataaaagtgacaaattctttgcttctattgtgttctttttgataatagctttattgagatacaattctctatcatactttaaaa

SEQ ID NO: 315853 - DNA, 493 bp, Homo sapiens
gaaccaaaatctgtctctttgacrttttgataattggaacaccatggaacaaatctaatccctttctcacatgacaaacccttatgtgaaggcagtgattacagcttcctgaaatcctgccttgaggttaagaatttccaatattttttgtttgcttttttttttttttttttttttttttgagacaaggtctgtcacccaggctggagtgcagtggcatgatcacagctcactgcagccttgaccttccaggctcaaccgatccttttacctcagcctctcagcctcctatatagctgggactgcatgtgtgcaccaccacagccagctgatttttactttttttgtggagatggggtctccctatgttgcccaggctggtctcaaattcctgggttcaagctgtccttcctcctcagcctcccaaagtgctgggattacacaggtgtgagccaccttactcagctatccagtaaatataattttgactact

SEQ ID NO: 315854 - DNA, 585 bp, Homo sapiens
ccttagaacaaagcatcttagaggcagaatacacatgaatggtcatcttttcaacctgaaccaccacccaggaatcacctccatgttacctctgagagagtatatgctggagtcagctmattgctttcgcaaatgctcctctagatagttggctcggctatatgaagttctgcttgctaagaagttctactgacatcatgtgcctcttacccattggtcctgatccatcctctggagcaacataggatcagtttagctccattttatgttgtccaaaacaaacaaatattgcatcctccaaaatcttcttgtttcaaggataacctattctggacattctactctgaatgaactctgctttgttcaaatcatggcattcagaactgaacaaataactctaatgttactgaataaaatccacatgtcacgtcattttctgtgatattgatactgaatatctattgatatcaacctaatagtcaaaatacagttagaaaacattttcaaatcataataataatcaattcaatctcactggccacactctccactgctgatggaggcagtgacattggccataatcac

SEQ ID NO: 315855 - DNA, 585 bp, Homo sapiens
ccttagaacaaagcatcttagaggcagaatacacatgaatggtcatcttttcaacctgaaccaccacccaggaatcacctccatgttacctctgagagagtatatgctggagtcagctaattgctttcgcaaatgctcctctagatagttggctcggctatatgaagttctgcttgctaagaagttctactgacatcatgtgcctcttacccattggtcctgatccatcctctggagcaacataggatcagtttagctccattttatgttgtccaaaacaamcaaatattgcatcctccaaaatcttcttgtttcaaggataacctattctggacattctactctgaatgaactctgctttgttcaaatcatggcattcagaactgaacaaataactctaatgttactgaataaaatccacatgtcacgtcattttctgtgatattgatactgaatatctattgatatcaacctaatagtcaaaatacagttagaaaacattttcaaatcataataataatcaattcaatctcactggccacactctccactgctgatggaggcagtgacattggccataatcac

SEQ ID NO: 315856 - DNA, 578 bp, Homo sapiens
attttatatattattattaaatataaacatattaaatattatgtaatatttatgttacacatgtatttatattaccaagtcagcgttggatgggctccagtgtgtttttggttacctcaaagtaacctgaaggctctcttctttctctttattaatgtctttgcaagcatttctaaatgaactttatttatatctcacttagcagcaggtattgttcacaacaagaagtttggggaatacagaatagtataaaaatggaaacaagacatggataatcacactacctacaggcaaccattgttcatattttgtcatggtatttttttcagcatttttttcacgatttttaaataaacctttttcataatggaggaatagtgcatgtatggcttggtactctgtttttctcactcaagattttattatawgaagtttcttatgtcattaaagtttttatatacattgttagcaacgtcataatgttctattcgtggatgtgccatgtagtaaaattttgcttacctataccctaacagtggacattgaaattgtttctcattttactttattataactgc

SEQ ID NO: 315857 - DNA, 513 bp, Homo sapiens
tattgctctcattgaaagaaatctgttactgggacaggttttagctacatatttttattaatcttaattatttttgctgagatctagttttgaagggaaaatgctgcccctctggtgtttcatctcattaaactactccatgaaaagggtttgctagaaatgtataaacaaatgcagcattatgggtctaattagctagaagaatacctgtataaatggaatttgtcagtcacaaagcagagacccttcccccacttacttatataataatcctggctttcagaagactaatctckacacaccatctatacagcatctaatttcctcatcaaattcctctgctgggtttagccatgcctgtcaacttcccagctccctcttcaataactgagtttattcttagtgtctcgccaatgaacattcctatgagcacacccatgaaagaattaagtccaaatttctttattgctccctctttcaagaaagggttttcggctcactctcctgggaaag

SEQ ID NO: 315858 - DNA, 527 bp, Homo sapiens
tttgggaatatgttgcttgattcaaataactacttttaatttttaaagtaaacaaaattagaataataggaacaacattagttttagcaaacagaaaagggttatygctgttctttttagcatcagtcacctcttgctgagtctgccagaggcaaaaaaggatctccacctacccagcatgcttccctttctggagggcccttgtcctgtggtaagcaagtgaagcatcaacacatatagagggcctactagctgctgtcaagtgatgtctggcttagagatgacaaataaaatacgtggcaacaatagagaactttgctttcataactgaaaacctgagaaagttttgctgtgtggattcaccaatttgcttttccacaagggtttgctatcctgttcgtcagtctgattttcgattattctaaaattctacatagagtagatgtctgcctttccttaccaggcggcagattctccctggatcatttactgtttagaattacaaaacaaatacaatgtttataata

SEQ ID NO: 315859 - DNA, 546 bp, Homo sapiens
agggttagaatttcaacgtaggaattttgagaggacacaaacacycaggctatgacacggtctttagaaaatcccagaatgagttgtcaggttcttgggagatctgtaactgtgggaaagcgtcacatcccagggaaagccaccagctgggagagccatcccagacaaggcctgctccctttgggcggacctctgtggagaagccagcttggcacgttctttctcctccactgcaaagttaaatgcgagaaggtagaaacccagaggccatgctggcgctgagagatgagccccactcaccagattcaagatcccaaggtaggcacagacacagggcaagcagactccaattccaggagtttggaacttaaatagagtcatagagacactcagatctgatcaaagtgagtgcactcggtgacatttcctaaagggttctgacaacttcatctgcaactggggctgccccaggttctgcacctccagctcacagcgcacaggtgttgctgagctcctctaaacaatgaacagcactaacaagtgggt

SEQ ID NO: 315860 - DNA, 617 bp, Homo sapiens
ataggtctttgatttctttcacttcagcatgctggtcctgtcatgtttttttagacctattcctaaatatttcaattttggaagcaattataatagtctgtttcaatttccatgtgttcttgttactatatagaaatatgatttattttaatatgttgatcttgcatcccattactttactgatcttacttattaattctgggagttaattttgaatattccttgaaatttctayatagaacatttttatcatgtcactggtaaatgacaattttatttttcttttctgatctatatgcctttcttttccttttcttgccttatcatgctgggtaagacttctagtactgtgatgagtcagagtggtaagagccaacatctttatcttcgtcctgattttagggagatattgactgtgggttttttacagatgttgaagaagttcttctattcctagtttgctcagggttttttttcttgtttatcataagtgggtgttggattttgtcaaatgctttctctgtatcaattgatataatcatgtcactttctttagcctgctaatatagtgggttacattgatttttttcaaatattgaacatggtttgcattcctg

SEQ ID NO: 315861 - DNA, 617 bp, Homo sapiens
ccacctacaactcaggccagcctgtagggccrtctgtgggtatcaggaaggcatggagacccagggctaacaaggagccctgcctctaccctgtcatgtcctggggaggccacacaacctgagagtctcctcctcatccatgtgaggaatctggggctgtttcatgccagaaggggtcttagcaggtccacagccagcaaacttaggccatgagtgtcactacttccctccttctctctctccaaaccccaccccaaggaccatgacttggtccttgtactctgtcttaatgagccctgagccacccccacggtcttcctccaccctgctctctgcctgggcatgggatgaaagtgttctcccataatgaacttcaattcacaggatgggcatggatctcccaagaccacacaggagccagaggagacaatgtaaagggcaggcccaatgggcagaaatgagagcatctggaaatgtggaatgggagagaattatggacaggaggtcttgaaagctgcactgccaagtggagtcatgagggtcctgagcagtaaataaaatcacgtggccagagggtttgggagggccctgaaatgatcctgtgggacacagggttg

SEQ ID NO: 315862 - DNA, 560 bp, Homo sapiens
atggagacccagggctaacaaggagccctgcctctaccctgtcatgtcctggggaggccacacaacctgagagtctcctcctcatccatgtgaggaatctggggctgtttcatgccagaaggggtcttagcaggtccacagccagcaaacttaggccatgagtgtcactacttccctccttctctctctccaaaccccaccccaaggaccatgacttggtccttgtactctgtcttaatgagccctgagccacccccacggtcttcctccaccctgctctctgcctgggyatgggatgaaagtgttctcccataatgaacttcaattcacaggatgggcatggatctcccaagaccacacaggagccagaggagacaatgtaaagggcaggcccaatgggcagaaatgagagcatctggaaatgtggaatgggagagaattatggacaggaggtcttgaaagctgcactgccaagtggagtcatgagggtcctgagcagtaaataaaatcacgtggccagagggtttgggagggccctgaaatgatcctgtgggacacag

SEQ ID NO: 315863 - DNA, 580 bp, Homo sapiens
gcatgggatgaaagtgttctcccataatgaacttcaattcacaggatgggcatggatctcccaagaccacacaggagccagaggagacaatgtaaagggcaggcccaatgggcagaaatgagagcatctggaaatgtggaatgggagagaaktatggacaggaggtcttgaaagctgcactgccaagtggagtcatgagggtcctgagcagtaaataaaatcacgtggccagagggtttgggagggccctgaaatgatcctgtgggacacagggttgctgtggaccaaggcaagagcattgggaatggagagtggggttgggaccaagagtctcagcagagagggaaagggatctataggttccagtgctttcatgcaggatatgggggccacagagagttccatggacagaggtgtctaggctgggcagatagaaggcaaggtgatgagacattcttgaagaccaggaacccagcagaaaacatgagtctgttgggagaggaggacatcgctttgcgtgcattgaatttagaagctgcatgaagggctgtgaaaatggaacttcatgtgctcattgaat

SEQ ID NO: 315864 - DNA, 564 bp, Homo sapiens
gtagtgtatttactaagggggcccttgacttggttgggccttgaaattcagtgttttcctctttagccctgagaaaccaggacatatgttaggggatttctgcccaacttcttattcccctactcaatgcagtccaagaatctgacaaatgcctgaagtggaaggagaaaccaggtgttagggtctcatccttctacctcctttccctgggatattggccayccaaatcctgactgcttgccatcacacattccaattttgtcacttcgttttgttcacctcttggtctcttagcagcagctctacctagacctccctgtgcccgggttttcaggctccttcgtgctattaacagccaaatgcccacaggcaaaaatcagataacgaattctggctcaccatgccagttcacttccttttgccatctgcgcactcaaatccatgttgcctgggcagctctctgaaggtttcatacagattaatttttttaaatcttatttccttcttaatctgtttttcatgggagcacgagttttccacaaatcactccaacagccagaaaag

SEQ ID NO: 315865 - DNA, 518 bp, Homo sapiens
gacaattgacactgaatatcttaataaagagaatagatttttcttgttctgggggaagatatgcaaattaggagagggcctaattatagacaattgrtacaaatttgaatgctcacgggtagttgtttctagggagagaaagagaaaaatctagacttggagtagattgcaaaaatgggtacaatttcccatgcctcctggtgtgtgtggtcctttacaatgagactttgtagctcctcccaagatgagtcctacttctctacctcttgaatcaggtctggctttgtgacttcctttggccaatacagaacccccaagatgtcactgtgccatctcagagcctatgcctcaagaggacaggcatgcttcccctctctctctgggaaccatgcccattccaagcaatcctgggctagcctgttggatggcagagatgcacagcctcattactcctgtcatacaagtggaccatcgtcatcctccagccacgtaagtgatgccactcgagacaagcagca

SEQ ID NO: 315866 - DNA, 502 bp, Homo sapiens
ctggcagagcacacatacttgttgtatgacccataaagtaaaatccattacagtaagtagaagtaagtgattattcccaaaactgccttgactgattaaaatagtgtaaagcagagtcatacttcactcaggtaaaattgcagccatgaagataaaggggatataggacccatcatagcccaagaatggctactgcaaaaacaagatggatcagggcagatgagagtcaactacyctaaccctaaccctgtggttgtttcataagcagctgctgtgcatattgtgttaaccttacaggactagatcaacaggctctggcaagtggtatgtgcccatttatctgaagaatgtgttctttttcatctttatcagcaaagatgatcaaaagcgattttcatttacctagataagaaagcaattcatgtttctctccagagatgatggcaaattttctgtactatgtcacaatgtatctgaagggatcctgatcattttgacattt

SEQ ID NO: 315867 - DNA, 439 bp, Homo sapiens
cctctgtcacctttccctgggcctctcgaacctcgttgagtccaacaaactcttcatatctgtcccaccaagtcttggctgtggaggtcgctcgttgctgaatgctgtgccccagggctcttcccagtgctgggaggcggtggtgcagccccagggcccacctcctcargtcttttctctccgggctggcttgggcctgggctgcacagagtcctggtcatgaagaggtcccttccaaggaggcccctccgaaccagtacgtggggcacacccacgatgtgctgcatggcaaacccagggctgcgccccatcatcctgagatctgtgagggggacgccagacaggtcagctcacagctgagaaaggctggacataagtcagttttgaggcctagggacagttctgaacagactaatccccactcaaatcatctaaactg

SEQ ID NO: 315868 - DNA, 519 bp, Homo sapiens
aactgccccatttctttggtttcctttataaccaaactccttgacagactgcctgaattcactgtttctgttcctcttctctgattccgtccagctccctctgatctggccttcacctgctcctccttcacatgccatttttcactcggtttccagtccccactcatctgcctaacctctggaaactgtagcaccccggcactcggcactcagactcctctcttatccagtcctgtggttttaaaaatcatctatgaaaatggycaaaaaaatttattttggtgatggccatacaactttgtgaatataataaaaccactgaattgtacacattgcatgaattacatggtatgcaagttatatatcaataaagttgttttttaaaaaaaaaaacagaactatactcttgactcctccagcgcagacctctctccccagggttctaggctcatttatcaaacttcccaacctatatctctgcctgaaaatctaatggggatctcatcttcccctcccaaa

SEQ ID NO: 315869 - DNA, 519 bp, Homo sapiens
aactgccccatttctttggtttcctttataaccaaactccttgacagactgcctgaattcactgtttctgttcctcttctctgattccgtccagctccctctgatctggccttcacctgctcctccttcacatgccatttttcactcggtttccagtccccactcatctgcctaacctctggaaactgtagcaccccggcactcggcactcagactcctctcttatccagtcctgtggttttaaaaatcatctatgaaaatggccaaaaaaatttattttggtgatggccatacaactttgtgaatataataaaaccactgaattgtacacattgcatgaattacatggtatgcaagttatatatcaataaagttgttttttwaaaaaaaaaacagaactatactcttgactcctccagcgcagacctctctccccagggttctaggctcatttatcaaacttcccaacctatatctctgcctgaaaatctaatggggatctcatcttcccctcccaaa

SEQ ID NO: 315870 - DNA, 563 bp, Homo sapiens
gggctgcacccactatccaacgagtcacagtgagatgaatcaggtacctcagttggaaatgcagaaatcacccagcttctgcatcaatcacactgggagctacagactggagctgtccctattcggccatcttggaacagaaccaaacaactttttctcatatgtttacctatttgttgttcatttcactttgcctcagaagacatcaaatatataaaccttaataggtatcataaaaggcagaatacatgggggacayacaggtcttgacttcaaggaaaaaatgactcttctatgaaatgaagcaacaaaacaaacaaagaagcaagtactttgcttcacacaagggtcacaaagcaagatgcttacaggaattgtgtggggtgtgtcaagaaagttttcaaaggttaccttaaccttaagggggttttaagtcacatatagtgtttgacttaccgaaaaagtcactgtcacttttttctctcaagaataaaggtagaatgtgctgtctaattacgaacaactttgaggaacagattatctttctttctttctgggagttt

SEQ ID NO: 315871 - DNA, 605 bp, Homo sapiens
tggaacaaaagccactgtagccacaaactggtaagaagacttaaacagtattttttttaatgtaataaaattaaaataacaaaatttatcattttgaccacttaaagtatacagctcagcggcacgaagtacattcacactgccatgcaactttcaccaccaagtatctccagaatgttttcatctccccaagttgaaacactgtaccccttaaacaatagyttcccaattgccccttgctcagcccctggccgccactaccctactttctgtccctttgagttgacctctctatgtgtctcacataagtggaatcatataatatttgttcttttgtaagtggcttctttatttaccataatggcttcaagcttcatccatgttgtagcatatgtccaaatttctttcctttttaaggctcaataatattccattgtatttctaagccacattttgtttatttgttcatctctcaataaaaatttgtgttgctttcacttttgagtactgtgaataatgctgccatacccattggtgtacaaatatctgtttgagtctttgctttcaactcttttgggtatattctcagaagcagaattgccaca

SEQ ID NO: 315872 - DNA, 646 bp, Homo sapiens
tttatggtgcatggactatactacagtaaagctattagttaaaaaaaattcttaaaggaagatacaaaactattataatgaaaatatactgtaatttccatgtataaatatctttgaacctaccaaatcataattagaattaatcaaatagactatcatgtttgccagatcaatataaaataaatataaaataaaacaatttattttacttactacagcaacaatcagaaagaaaatataatttaaataaatatgacatgatagtaacaaatatagagtacctaacaatgaatctaatcagaaatttgcaaaaatattataatttaaaatgataaaacatttaacaatatcgagaagtcttataaaaatggagaaatatatcattttcttaggagaaaactctagcataaaccaaaaataaaattctaaggcccccaacaatctgaatggaccccccttcttagccaagggaattccagcactaacctgaaaatctagttgaggccaggatggaagagggggttggacatgcctcattatactcctccagcaytgacataaacacagaccttaaatcttataagaaacatttacaatctatttttctttgaagactgctacctggagtcttcgcctgcaggataaa

SEQ ID NO: 315873 - DNA, 576 bp, Homo sapiens
gcaacttggcaatagagatattttctctgtgacaataagcatagccttacatttctcctctgaataaataatcacgatatccatgagcttaaagcagtctgtctttttcttttggaatgctgcttgatacaccaaagaaggctgtaagcagtgatcctagaactataacagcaaatgcctatttcacaacacaacagcaaggcctggagagaactttaggtgatggatgggacatggtactcatgtaagaacaatagattgaacagaataatgcactgccattagaaattcccttggtcccacctcaatattgaatgtctttcaaatatacccaggacaatgggggtacctataataaaytaagctacctggatttcttacctcacatatttagggaaaaaaaaagtctatgacaatgcaatatttaaaaaaaataaaacaagataagggaaaacttatctaaggaaacatacctcttttttaatcctgattaaagatttttaataactaagatttttctgacacaagtcttctgaaacaacatgtttgaaaataaagttctaggaatgttttcac

SEQ ID NO: 315874 - DNA, 561 bp, Homo sapiens
aagctgaaaatattggaaataccatgatttagatctctctratttttatatttagtaattatgtatagtaattctcaactttcattaacttgggtttaattatttcactgtaatatctgtagttctaaaatatgcatatttttccacaaagaaattaatgtttatttgcttcctaaatagaaatgtagtaacgcaaatgcattgttttactggatattgtttaaatgctaataccaaataagatacaggcaggaaaagaacagtcccattttgaagcctctaaatttttgaaaagcaaattttaaaacttgccccttttcctttttatttaaattattgtgtcattgttgtttttgttttgcttttacttattgagtaggttcaacaacggcaagagaaagaaataaggtggttgtggagaaacacctttcctaattataattggacttttatagagaaagaaaaatatggaaaaagaaatataagttttctgagccaaatgcattatggaacaaacattaagttcttccttaccaagtaatgattttagaccatgaaaat

SEQ ID NO: 315875 - DNA, 561 bp, Homo sapiens
aagctgaaaatattggaaataccatgatttagatctctctgatttttatatttagtaattatgtatagtaattctcaactttcattaacttgggtttaattatttcactgtaatatctgtagttctaaaatatgcatatttttccacaaagaaattaatgtttatttgcttcctaaatagaaatgtagtaaygcaaatgcattgttttactggatattgtttaaatgctaataccaaataagatacaggcaggaaaagaacagtcccattttgaagcctctaaatttttgaaaagcaaattttaaaacttgccccttttcctttttatttaaattattgtgtcattgttgtttttgttttgcttttacttattgagtaggttcaacaacggcaagagaaagaaataaggtggttgtggagaaacacctttcctaattataattggacttttatagagaaagaaaaatatggaaaaagaaatataagttttctgagccaaatgcattatggaacaaacattaagttcttccttaccaagtaatgattttagaccatgaaaat

SEQ ID NO: 315876 - DNA, 561 bp, Homo sapiens
aagctgaaaatattggaaataccatgatttagatctctctgatttttatatttagtaattatgtatagtaattctcaactttcattaacttgggtttaattatttcactgtaatatctgtagttctaaaatatgcatatttttccacaaagaaattaatgtttatttgcttcctaaatagaaatgtagtaacgcaaatgcattgttttactggatattgtttaaatgctaataccaaataagatacaggcaggaaaagaacagtcccattttgaagcctctaaatttttgaaaagcaaattttaaaacttgcyccttttcctttttatttaaattattgtgtcattgttgtttttgttttgcttttacttattgagtaggttcaacaacggcaagagaaagaaataaggtggttgtggagaaacacctttcctaattataattggacttttatagagaaagaaaaatatggaaaaagaaatataagttttctgagccaaatgcattatggaacaaacattaagttcttccttaccaagtaatgattttagaccatgaaaat

SEQ ID NO: 315877 - DNA, 487 bp, Homo sapiens
gaaagaaaaatatggaaaaagaaatataagttttctgagccaaatgcattatggaacaaacattaagttcttccttaccaagtaatgattttagaccatgaaaatattgtttctctaaaagcaaaatgcatcatgcaattcagagtgctctgcagggaacaaggccactagggaagcagcagcaaaacactttcgataagaaagtagcaaattgttccagattttgtattattctagtcaacaggagacacagaaatgtgaattttcagaaaatgacatcacaaaatggtcagaaacaaagagttctatgaactttctttgaggcacttgcagcagtatgtagtccttgcactttaggcaagccaaagttatccaatctgatgggagtcattcatttcccatcacacaacagagctttatcagggaggaaawgggaggctaacattatatctaaatatatatacacatatgtaagtcatcagaatcc

SEQ ID NO: 315878 - DNA, 594 bp, Homo sapiens
tttaaacttgctatgcatccctttccttatctgaaagcagacataataatagtacttactcagagagttttaattaatacatgaaatcatttagattatttgttacatagtaaaagcatatgtagtggttattttctcattatttttactaataatgaacattatgctttacttttagagaagtgttcagaaacttacatgctggtagaggagatacaatgatcataaaacatgacaagtgtagtgtgtatatgataataagaatgctggtattgtgatcttaattacactacattctaaaatactgggktaagccaaacaacacaacaaactaaaatatgtctgagggtcattattaccagcagataccaattgattattcttggtgtgaaccataatcatttatttaggacagcaaataaaccaagctaacaaatgcagctctgagccttggatatcagaattttaaattccattaattacacacttataacatgtccacattaaaattaacattatttgaaatcccattattaaaatgtaagataattcaacaatgtatgtgagtatgtgtatataactatatatataatt

SEQ ID NO: 315879 - DNA, 616 bp, Homo sapiens
ggcagccagggcagcagtgcagttggargattttgccagaatctaaataggtgagcaaaggactgtctcaaggagaacatcacctacttcattctcctctcccactatgtgcaaaaagataaaattgtagtaccacaatcaaccagaggagggccagacctcctgcttgggattaggtgcccaagagtgaaactcttcttcctttataattttataagagaagaggaagtctgactgcttcctgtttcatgccctaatttaagccagcgatctatactctgtccagtgcacaaatctcagagagaagaaaaagacctgtcaatatgaccaacaagagaaaatctttctgcatagctatctataataatcagactagtcttttatgcataaccatgactgattgaccaaggatcactacatatttgatcaattcagatacaaaatgacccagatgtggtttataggctatttttcattatctctttaaggtatacattacatacagtaaaaatcacctttcttaaagcaaagttctgtgaattgtgcaagatacacacagttatgtaaccaccagctcaggatgtggaaggactatattattccccaaaattcccct

SEQ ID NO: 315880 - DNA, 509 bp, Homo sapiens
tgggaggccgaggcgggcggatcacctgaggtcaggagttccggaccagcctgaccaacgtggtgaaaccccggctttactaaaaatacaaaaattagccgggcgtggtggcagacgcctgtaatcccagctactcgggaggctgaggcaggagaatcacttgaacccgggaagcagaggttgcagtgagtcgacattgtgccattacacagagcgaaactccgtctcaaaaaaaaaaaagggtgacagtagagaaaaccatagcccaggaattgcgtgagagaaggcagccagggcagcagtgcagttggaggattttgccagaatstaaataggtgagcaaaggactgtctcaaggagaacatcacctacttcattctcctctcccactatgtgcaaaaagataaaattgtagtaccacaatcaaccagaggagggccagacctcctgcttgggattaggtgcccaagagtgaaactcttcttcctttataattttataagagaaga

SEQ ID NO: 315881 - DNA, 509 bp, Homo sapiens
tgggaggccgaggcgggcggatcacctgaggtcaggagttccggaccagcctgaccaacgtggtgaaaccccggctttactaaaaatacaaaaattagccgggcgtggtggcagacgcctgtaatcccagctactcgggaggctgaggcaggagaatcacttgaacccgggaagcagaggttgcagtgagtcgacattgtgccattacacagagcgaaactccgtctcaaaaaaaaaaaagggtgacagtagagaaaaccatagcccaggaattgcgtgagagaaggcagccagggcagcagtgcagttggaggattttgccagaatctaaataggtgagcaaaggactgtctcaaggagaacatcacctacttcattctcctctcccactwtgtgcaaaaagataaaattgtagtaccacaatcaaccagaggagggccagacctcctgcttgggattaggtgcccaagagtgaaactcttcttcctttataattttataagagaaga

SEQ ID NO: 315882 - DNA, 571 bp, Homo sapiens
gtttaattacctaccatctgcgtttcttacttggtgaagagtttttacaaatcttttgtttatttttctaggttgtctctcttattgctgggttatagcatggctttatgcattctaggtaaaaataatttttagatatatgttttccaaatacttctcattggcttggcttcctctttcattttcttaacagtgttcttggagaaacaaaagtgtgtaactttaatgaaatccaattctttttttttttaatgtacttatttttttaaatggtccttttgcatttgtgctttttttttttttgtcattttaaagatgtcttaccaagccgtaggtaaaaaatattttttccggatgttttcttctaraagtttgatagttgtagctcttacatttaggtcatgatacatctcaaataatttttatatgtggcatgagataaggattgaagtttttgtttttttgcataagggtacccaatagtttcagcaatagttgttgagaagattgtattatttcccctttgacttatgactttaccataatgcttgtgtcaagcattaattgacta

SEQ ID NO: 315883 - DNA, 524 bp, Homo sapiens
tatgttttccaaatacttctcattggcttggcttcctctttcattttcttaacagtgttcttggagaaacaaaagtgtgtaactttaatgaaatccaattctttttttttttaatgtacttatttttttaaatggtccttttgcatttgtgctttttttttttttgtcattttaaagatgtcttaccaagccgtaggtaaaaaatattttttccggatgttttcttctagaagtttgatagttgtagctcttacatttaggtcatgatacatctcaaataatttttatatgtggcatgagataaggattgaartttttgtttttttgcataagggtacccaatagtttcagcaatagttgttgagaagattgtattatttcccctttgacttatgactttaccataatgcttgtgtcaagcattaattgactatatatttatgggtctatttcaggattctcctttctgttcattggttaattgtgtgtcttgacaccaattccacaatcttgattactgaaga

SEQ ID NO: 315884 - DNA, 550 bp, Homo sapiens
cacccctttccccaaattgagtttgaaaaacacctaacctaagagctttggaagagatgatttgagtactagctctatttccgacatggcttggccagccttatgtctattaaactctttcctactgcagtgccatggtctttattttacatacggtgggcaagaagaaccccgtgggtggttacattatttgttataaaaatgtcatttttgttaatagagaagaaggcaaaatcaaaataatttacrgacgaatcaggttgtggatggatcttattttataatgggaagtggaaattgttggtctgggggttgtaaaccaaaaataaaatttgaagcccttccacttgccctgcagccatctaaatggacccataatggaccagggccctccagatttaacgtgaaagacgggttcaggtcatgacaggaagcggggagctggacatgccccattatgctgtcttcccttttgtaattcaggaatagcagaccagcaatttgacatcaacccagcctttaagtctgataagaaatatttacattctat

SEQ ID NO: 315885 - DNA, 622 bp, Homo sapiens
tggaaacttttggtgggcctgctgagtgaatcaactaggaggccttaaaaactgggcttaggtaggagagaaggaatraaagtgagagagaaagtaggggagatagagagagagagagagaaagagcgcagaagaaattccacttgtgaacaacagcttcctatatgcatggagttcatcctcaccatcttcctttcttactgacagctttatggattttggattgtttaaccatccattacaattgtgtaagttaattccttgtaataaatcatctatctatcatctatctatctatctatctatctatctatctatctatctatccacatatcctgcaagttctgcttctctggttgaacccagcttggttcattaatgtctcctctaagaaattattctctacctccatattacaaagtcattctcctatattttcttctagaaactttatggcttcagcttatacatttaagcttatgacccatcttgaatttttttgtgaatattgtagtgtaattttttccctatttgggtattcccttttccagtaatgtttattgaaaagtctttgttgttgatactgaattaccttgtcatcactatcaaaaattaatttatc

SEQ ID NO: 315886 - DNA, 622 bp, Homo sapiens
tggaaacttttggtgggcctgctgagtgaatcaactaggaggccttaaaaactgggcttaggtaggagagaaggaataaaagtgagagagaaagtaggggagatagagagagagagagagaaagagcgcagaagaaattccacttgtgaacaacagcttcctatatgcatggagttcatcctcaccatcttcctttcttactgacagctttatggattttggattgtttaaccatccattacaattgtgtaagttaattccttgtaataaatcatctatctatcatctatctatctatctatctatctatctatctatctatctatccacatatcctgcaagttctgcttctctggttgaacccagcttggttcattaatgtctcctctaagaaattattctctacctccatattacaaagtcattctcctatattttcttctagaaactttatggcttcagcttatacatttaagcttatgacccatcttgaatttttttgtgaatattgtagtgtaattttttccctatttgggtattcycttttccagtaatgtttattgaaaagtctttgttgttgatactgaattaccttgtcatcactatcaaaaattaatttatc

SEQ ID NO: 315887 - DNA, 559 bp, Homo sapiens
ggcatatttggagccaaggggaggaggtcagtggtaggcctgtacacctcagaagatgaagcttaaggcttgggaaataagtcgggctgcattttatcagaagaggaacgaaataagtatgtggttactagaaaagaatgtccagggcagtgtttgtttagttgttcacctacctccttcctcctgggcatgtagctacaattcatttcccagcctcatttgcagtttggtatgtccacatgactaaattctgaccaatgccacatctggaaaataaaaataacttacatgattttcagctcctttgttcatttgcttgttggatgttggtactgaggacacctttgaaagtcacacaatgaatattgttcaagcctccatcaatctgggttcttgaattgtcaggcttaacacccaccccctcatgccatttagtcttacataagtaagaattaaactttygtttagtgactgaggtatggaagactatcaattacagtagtaaaaactattataatatcgaaaagataacaaatatctttttgaagtttgtctcagg

SEQ ID NO: 315888 - DNA, 631 bp, Homo sapiens
gactatcctcctataaacctaattctagttttgtctgatttaggattgttttaaagttttcctcttgtagggtttgcatgtttccataaaaagtttattcttaagtattttaagaattgtttttattgcaaatgggggttaactccccatttatwtcttgtaattattacaatatatgtgtaaataattacagtagaagcttttaaatatcacaatggtaacaagcagctataaaggtaacaagcagctataaagaaacaaggacatcttgttttactgcactctgctttagagcactttgcaggtattgtgcattttacaaattgaaggtttgtggcaaccttgcatccatcgagttcattggcaccatttttccaacagcatttactcacttcatgctatattttgctaattcttgcagcatttcaaactttttcaatattattacatctgttatggtgatctgtgatcagcaatatttaatgtccctattttaattgttttggggtatcataagtcacgtccaagtaagatagttatgagtgttctgattgctccactatccagctgttttcccaccttcctcccttttttcaggcctttctattctctgagacttaagattattgag

SEQ ID NO: 315889 - DNA, 631 bp, Homo sapiens
gactatcctcctataaacctaattctagttttgtctgatttaggattgttttaaagttttcctcttgtagggtttgcatgtttccataaaaagtttattcttaagtattttaagaattgtttttattgcaaatgggggttaactccccatttatttcttgtaattattacaatatatgtgtaaataattacagtagaagcttttaaatatcacaatggtaacaagcagctataaaggtaacaagcagctataaagaaacaaggacatcttgttttactgcactctgctttagagcactttgcaggtattgtgcattttacaaattgaaggtttgtggcaaccttgcatccatcgagttcattggcaccatttttccaacagcatttactcacttcatgctatattttgctaattcttgcagcatttcaaactttttcaatattattacatctgttatggtgatctgtgatcagcaatatttaatgtycctattttaattgttttggggtatcataagtcacgtccaagtaagatagttatgagtgttctgattgctccactatccagctgttttcccaccttcctcccttttttcaggcctttctattctctgagacttaagattattgag

SEQ ID NO: 315890 - DNA, 586 bp, Homo sapiens
gagaggcactcagaagacagatcaggacactgggacagccrtcctgtgacttgccccagtcacataggttttgagcccaggcagtctgcctgcaaagcctgagctctcagcctcactaccatattgccttgagggctgatctataatgctcagaagaaagaccataaatatgaaaatgaaagttcaggaaaagaggaaacagtttccttccccacgcctacgtctgacattacctgggcctgaagcttcttctggtccacagagaccttttcatcaggattggctacttggtcccctgctgtctaaaagggttctcagggatggaggtctcctattctcacaccacacacatttttttctagagatggagaggtgttaggaaaataaaaattttatggaaatcctagtcagtcctcgactgggaaaggattggccccatcacaatgttcatgcaactaccagctctgtgttcacaaacactagaattgacataaaaatgaatcagagttgctggaaaatccacaggactttagtaatccctgaaaagtctgacttatctgacatttgctgaagagagattgggaaa

SEQ ID NO: 315891 - DNA, 665 bp, Homo sapiens
ttatgatatgtcaatacatcataaaccaaagagtggcctctctgaagacagggacagcatctccccrctgggacagaggcttccccagcagagtctctgttccctgccccatgccactcaccatcttaggccaggaaactctcccggggcacttgagagagctgatgtgcccacctctcaggagcccggttgctgactggggttttgagatgggttatggggtagaaacactgcatccctgcagcagcacaggctaaaggcagtcgatggcagccccagggtcccaacagcatctggtcccccctcagcaagctctacccatggcaggactctatggccacaatagaactctatcccaccctgagtgctggcacctggcgctactgctagcatttctctgctcagcattttcaagggccagatgctcctgttacacaggcaccctctccccagggagtactggcctccagcctccacctactttccagagcaagcgagcctccctgaccacatggagtccccaaagccaactgcagccgcttctccatggcactccctgcttgatttcttccagccgctggtcccactctcttgcctgagttctcttctatgccaggcctgccctgggcactggggacacagaagccagctaccctctatgggcc

SEQ ID NO: 315892 - DNA, 665 bp, Homo sapiens
ttatgatatgtcaatacatcataaaccaaagagtggcctctctgaagacagggacagcatctccccgctgggacagaggcttccccagcagagtctctgttccctgccccatgccactcaccatcttaggccaggaaactctcccggggcacttgagagagctgatgtgcccacctctcaggagccyggttgctgactggggttttgagatgggttatggggtagaaacactgcatccctgcagcagcacaggctaaaggcagtcgatggcagccccagggtcccaacagcatctggtcccccctcagcaagctctacccatggcaggactctatggccacaatagaactctatcccaccctgagtgctggcacctggcgctactgctagcatttctctgctcagcattttcaagggccagatgctcctgttacacaggcaccctctccccagggagtactggcctccagcctccacctactttccagagcaagcgagcctccctgaccacatggagtccccaaagccaactgcagccgcttctccatggcactccctgcttgatttcttccagccgctggtcccactctcttgcctgagttctcttctatgccaggcctgccctgggcactggggacacagaagccagctaccctctatgggcc

SEQ ID NO: 315893 - DNA, 665 bp, Homo sapiens
ttatgatatgtcaatacatcataaaccaaagagtggcctctctgaagacagggacagcatctccccgctgggacagaggcttccccagcagagtctctgttccctgccccatgccactcaccatcttaggccaggaaactctcccggggcacttgagagagctgatgtgcccacctctcaggagcccggttgctgactggggttttgagatgggttatggggtagaaacactgcatccctgcagcagcacaggctaaaggcagtcgatggcagccccagggtcccaacagcatctggtcccccmtcagcaagctctacccatggcaggactctatggccacaatagaactctatcccaccctgagtgctggcacctggcgctactgctagcatttctctgctcagcattttcaagggccagatgctcctgttacacaggcaccctctccccagggagtactggcctccagcctccacctactttccagagcaagcgagcctccctgaccacatggagtccccaaagccaactgcagccgcttctccatggcactccctgcttgatttcttccagccgctggtcccactctcttgcctgagttctcttctatgccaggcctgccctgggcactggggacacagaagccagctaccctctatgggcc

SEQ ID NO: 315894 - DNA, 595 bp, Homo sapiens
agtggggtttttctttttttggtactttcattttgtttatttatttttaatggtggtataacctacatgcaataaaatgcattaatcttaagtatacagcttaatgaatttttacatatggatatgctcatgtaaccacctttatatcaagttatcacctgaatggcttagstcaattcttttttgtttgttttttgttttgagatagagactctcttcattgcccaggctggagtgcagtggcacaatctcagctcaccacaacctccacatcccaggtacaagtgatttttctgcctcagcctcccaagtagctgggactaaaggtgcccaccaccacatctggctaatttttgtattattattagtagtagtagagatggggtttcaccatcttggccaggctggtctcgaactcctgacctcaagagatctgcctgccttggcctcccaaagtgctgggaatacaggcttaagacaccacacctggccaggtcaattctttatggtcaaaaaattaatgaatctagaatggaagctgtacatagcaatggccatgtaggccccagatagcttctctccaattttggacaag

SEQ ID NO: 315895 - DNA, 595 bp, Homo sapiens
agtggggtttttctttttttggtactttcattttgtttatttatttttaatggtggtataacctacatgcaataaaatgcattaatcttaagtatacagcttaatgaatttttacatatggatatgctcatgtaaccacctttatatcaagttatcacctgaatggcttagctcaattcttttttgtttgttttttgttttgagatagagactctcttcattgcccaggctggagtgcagtggcacaatctcagctcaccacaacctccacatcccaggtacaagtgatttttctgcctcagcctcccaagtagctgggactaaaggtgcccrccaccacatctggctaatttttgtattattattagtagtagtagagatggggtttcaccatcttggccaggctggtctcgaactcctgacctcaagagatctgcctgccttggcctcccaaagtgctgggaatacaggcttaagacaccacacctggccaggtcaattctttatggtcaaaaaattaatgaatctagaatggaagctgtacatagcaatggccatgtaggccccagatagcttctctccaattttggacaag

SEQ ID NO: 315896 - DNA, 618 bp, Homo sapiens
ctcccctctcttgagttctttattgctggattatgtcttcaagtacatatttttcttctaggaagggaactgggtgcagtattctttggacccttacatatctgacaatagccttcgcacataggtggcaatttggctggtttgtgtttccattgtaggaccgtactgaataattttgttgccgtaaaaatcctctgtgatttgcccattcatctcgctctccctcctaacctctggcaaccactgatctgtttactgtttccatagttttgccttttccagaatgttatatagttgcagtcatatagcatgtagccttttcagactggcttctttcacttaataatatgcatttaagttttcctcacatcttttcatggcttgatagctcatttctttttagcagtgaaaaaatattccattgtctggatgtaccacrgtcgtttatacattcacctgctgaaggacatcctgttgcttccaggtttgggctattattaataaatctgctataaacttctgtgtgcaggttttggtatgaccatgatttcaattattttgggtagataccaaggattgcaactgctggatcatctggtacatggagtgtgcttagtt

SEQ ID NO: 315897 - DNA, 520 bp, Homo sapiens
caaggctctgtctgaggtcagggttggaattatactgtatttgggaagcaaagtaactatgggattgcataagaaatgaaccatgatgttctctaaggaaaaaaaccagggatgattccatggaggggctaagcttctagtaagaccttgaaagagaaacctggcagtggcagrggaagaccttgagggactgaaaagaatggctggacacaattgaaggtaatatcagtgcaagtccccaagagatgctgcctcctgatcagagtccagctcatcagcagatgctatgtgacctccctcctgagtgagaaggagaaggaagacacctgagctcccaggccaccctccctggccctgtgggggaagaggattctccactgggtttggccaagggcacctttccacacattcctggccctgagtgcccctcggcccggtgtttgcacttgggctgccagggcaggggctggtgtcaggcagggcggacacaacctggaaatagggagcggccgtggaaaca

SEQ ID NO: 315898 - DNA, 554 bp, Homo sapiens
atagtgtagcccattctgatgggcacaactggacactggaacattgcttgccttagttatgcttgcccaaggcaagagccaaagcagtgggaagatagcacttgctgcaattccactttccaaatcccacatccagggggcaaaacctgatttgcatccagaatcatagctttagagaagtctgggaaatgtagcttttagcttcccagcttctgtgatactaggtgtcactcccagtggattgataccaagggcccacccttgatatcacacccacsacagcatacccaccacagcaaacacaccctggggttctaagggtgttccagctcaaagccagggagagaggagtctgcaacctgatagttgggctgggtaaagggactcgaggtacaaaatcacatgagatggacttggaagggcaggtggaggggagagagccgggttagccttctacctcaaatgaagaccatgataatacacagagagggagagagagactatgtgttctatgtgatgcctgagaacatttcaaggaccctaggcctagctga

SEQ ID NO: 315899 - DNA, 569 bp, Homo sapiens
caatctactttctcaaggtccaccctacacaactggtgttgccaccactcccttcctgtaacattgtgaaggatgataaagtccttttcttcccacgcccctgtcattttaccactgtgcccctcttagttgatcagagttcagtgtatcctgccagttccacttgttgctttttgagagattaaattatcagccggcaagaatgtagcagtcatcctggctttagcagatgtccttgtaactgcagtcccatcactctggccagragctggcttccgacacttcagggccttgatcttggacttggagacatacttccccttcaccttccacaagagggccaggagctctcagcccccaaggaggggcctgggagagaaaagttgattaaaaggctgttttctcagagcaggtcttgcaatctgttggaagcagagaagtggagagtgccaggcttcaaatctcggatgcaccactcactggatgtgatttgggacaagttacttaacctctctgggcttcagtttccacatctgtagttgctagagctttcttgatctttcaaaaaa

SEQ ID NO: 315900 - DNA, 538 bp, Homo sapiens
ggtttagatgaggtcttgagagtagatgatgggattaagtttcctgtaagaagagggagagaccagagactttctgtccaccatgtgaaggcacagcaagaaggtggctgtctgaaagccagtaaatggccccttaccaggcactgagtccgctggcaccttgatcttgaacttcccagcctcgagaactgtgaagaatgtgtctgttgtttaagccactgagtctatggtattttgtcatagcagctcaaggtgactaagacaatgacctaattgaaatttatagaaagtctatacatcaacaaaatatatatcttttcaaaggcatatgacacagtcagcagacagatcatatgctcagccacttattcaaaaatctcaataaactagaaaaggattgaactttatagagtatgttatctggaaacaattgaactaaactagaaatcaataaaagaaagatatttggaaaacacccaagtgyttggaaattaaacaagtcatttataaataaccaatgggccaaagaagaaattac

SEQ ID NO: 315901 - DNA, 398 bp, Homo sapiens
aaagtaagactagctcataggggccctcattgccagatggcaggactttaggcagataatttgctctaaagaaatgtgatctgatatttttaagtcctgttaagaaattcctctggcattctggcaggaaccgtggccttcagccatgattaaaggtagccaggttagayaagaggaaggttgctggacctgagtaaccaagggaagacctagaatctcaccactgaaatgcaagggagtggacaagatgattcatggggccacacaccagacctaaagagcaagcgtcagattcctgttcagaacccatcctgcctgccaaacacctctcctgtcctggcagctgctgctcttcccccaccacccttccctcagtcttcatcctccatggccgagcc

SEQ ID NO: 315902 - DNA, 644 bp, Homo sapiens
tagcttgacaaattttgatgtgccatgctgttctgctctcatctctcatcattgttcagttctaaaaggttcataatttttattgtggtttcttctttaacccataaattagttggcagtgggattgttttgcttgtttgcttccaaatatatgggtctttttttaaaattttttttggaatagggcctccgttaatagtttgagttgtattgtgtggtggtcagaacacatggtctgtatctgtatcatattgataagacttcttttgacagacattgcaaktcaaatattttaaatgaccatatatacttagaaggagtatgtgctttctattgagtgcaaagtgctatatggctctattatatcaaatctcttgtgattttattacttaaatatttttatgatgttagaaattttgactgcatgttctgttcatctctgagagagcgacctactctgattgtggatttgtcaatttcttttttgatgctatcaattgcatactttaagcgcattgttagttgaatataaggcattatggttatgccattacattttaaaaaatttatttatttttatttatttatttgtttatttatttatttattttagagacagggtctcactctgtggcctgggctat

SEQ ID NO: 315903 - DNA, 523 bp, Homo sapiens
atgttctgttcatctctgagagagcgacctactctgattgtggatttgtcaatttcttttttgatgctatcaattgcatactttaagcgcattgttagttgaatataaggcattatggttatgccattacattttaaaaaatttatttatttttatttatttatttgtttatttatttatttattttagagacagggtctcactctgtggcctgggctataatgcagggtgccatcatagctcactgtaacaatgaacttccaggcctcagcctcctgagtagcagagactacaggcaagmgccacagtgcctggctaactttcattttattttatttttttgtagagacggagtcttgctatgttgcccaagtttgtcttgaactcctggcctcaagcaatccttccatctcagccttccaaagcgctaggattataggcatgagccaccctgcctggctgattttatttttttatttttaaagatggaggtcttgctatgttgcccaggctggagtgtgat

SEQ ID NO: 315904 - DNA, 590 bp, Homo sapiens
tagacagcagccaaggtggggctctggggggccagggcaggggctggtatagcaacctggaacagaaagctgaggcttccatcccagcagagagcagaaatggaagtagggaaccaggggcaggggcagaggacagtggggtgggggagggctgcctccagaggttcttggggatacttcagctctgccacaccagcctgctagaccaagacctgaagcctctggttgccagcaggggaagaggctccctgtgtccctctaggccaatcttctggctcrgagcctgggtgagctgaatccgaggctcacaggctaataatgctgtccatgaccagttcaggggcagacgttgggatggtggggtgcagtctgcgtgggaagggagtcaaaccctagcctggcctcacccagcagcagctccctgaaactttcagcctggaagctggtttgcacccatccagggggcaaattcagttaggttggtcttttgcccacctgggactgtaccttagaatgagtcctggggcctataatgagcatctcaggtgcatgggttggatctttgggcacctacatggctgccaggctgc

SEQ ID NO: 315905 - DNA, 599 bp, Homo sapiens
aaatgatttttatttaattgtgttaatgttgtctttgaaaataaagatrtttacacttttcatgtggttgaatctttcaatatttttcctttaagacatctgagtttcatgtgttgcctagcaaggtctttcccaccccataattagaaaaaaaatgtcaaaggataaaataaatatttctccagagcaaatatgcaaatggccaatacttatatgaaaagatgctcaacatcattatccatcagggaaatgtaaatcaaaacagcaaggaaatacctctacacacccatgaagatgactataatcaaaaggtcagataacagcatcttcaatgaatggtgctgggaaaactggatatccttatgcagaagaatgaaactagaaccttatctctcaccacttgcaaaaatcaactcaaaacagattaaagacttaaatgtgagacctgtaactgaagctactagaagaaaacagaagaaaagtaccgcatgacattcgtctgggcaaggactttttaaactaagatctctaaagcacaggcaacaaaagcaaaaatagacaaatggaattgcatcaaactaaaaagctgcatagcaaaa

SEQ ID NO: 315906 - DNA, 442 bp, Homo sapiens
tttggcatgtgtttgacattcaacatgtatgaactattatyacatgaacatcatctaggaatgtaagtgagttacaacactaaagtgcaatatttctgcatgttgcttgcggagcaattcatcactttgtggagcaattcatcactttacataggctcagtgagggccttttttttttttaacctcttcagtatctttaaatctttaaagttctgaaaaaaataccgtatttccctctgttggtctaaaagttactattaaattcttggatttcacatataattttatgctcatttagtaaatacatgcactttacacataacttttcaaagtattatcattttgaagtgaagagatgatggagactgaaaggttccattaaatatcttctgctcagtgaagaaagagacagcttgcagggcatgcttaagagacccaagga

SEQ ID NO: 315907 - DNA, 562 bp, Homo sapiens
taaggccactgccagtggatcatgagaaaagacaagagacattcaaagacacaattgctatctatgatgcatctggctctggcagaatgatagacataagccttcagctctgagagatggagaggattactgctttggaataaggccctgtaatctttgcattagtatatctgaagcaaatgaccttattattttgatattctaccttaccttctctgtaactgaaaatagaggacaccaaaacaactttgtttggcaatatttttcttcttcattagtgtttatttccccttagaacagttcaacattaactgttaaattctgatgaagactgttttattmttggtgatttcaagttacaagaaaagcacctggcacatagcaggtatataataaatgttataaaattgatttaataattaattaattatcaggcctcttctgccctaaaagagagatggcactctaaaaagaagaaaataaattctgtttctggaagagtaaagtgaaaggaaatctatcactgatgtgtgctgctttggcaatatgtgttttcttaatc

SEQ ID NO: 315908 - DNA, 562 bp, Homo sapiens
taaggccactgccagtggatcatgagaaaagacaagagacattcaaagacacaattgctatctatgatgcatctggctctggcagaatgatagacataagccttcagctctgagagatggagaggattactgctttggaataaggccctgtaatctttgcattagtatatctgaagcaaatgaccttattattttgatattctaccttaccttctctgtaactgaaaatagaggacaccaaaacaactttgtttggcaatatttttcttcttcattagtgtttatttccccttagaacagttcaacattaactgttaaattctgatgaagactgttttattcttggtgatttcaagttacaagaaaagcacctggcacatagcaggtatataataaatgttataaaattgatttaataattaattaaytatcaggcctcttctgccctaaaagagagatggcactctaaaaagaagaaaataaattctgtttctggaagagtaaagtgaaaggaaatctatcactgatgtgtgctgctttggcaatatgtgttttcttaatc

SEQ ID NO: 315909 - DNA, 562 bp, Homo sapiens
taaggccactgccagtggatcatgagaaaagacaagagacattcaaagacacaattgctatctatgatgcatctggctctggcagaatgatagacataagccttcagctctgagagatggagaggattactgctttggaataaggccctgtaatctttgcattagtatatctgaagcaaatgaccttattattttgatattctaccttaccttctctgtaactgaaaatagaggacaccaaaacaactttgtttggcaatatttttcttcttcattagtgtttatttccccttagaacagttcaacattaactgttaaattctgatgaagactgttttattcttggtgatttcaagttacaagaaaagcacctggcacatagcaggtatataataaatgttataaaattgatttaataattaattaattatcaggcctcttctgccctaaaagagagatggcactstaaaaagaagaaaataaattctgtttctggaagagtaaagtgaaaggaaatctatcactgatgtgtgctgctttggcaatatgtgttttcttaatc

SEQ ID NO: 315910 - DNA, 558 bp, Homo sapiens
aataaattagtaatacttctgtgaatgaaaagaattaatacaagaattctaaaagcaaaggtatgcctctgcttcattcccatgaatgtttcctataagtttacatgtgaaacagaactytgcaaattttaattttaatcaagaaactaagttgacagtttttatttaaaaatgaaatatatatttcacacactaagttttctaatttcatttgaatcttttacaaaacataaaagtattttataatatatggcacattacaaaacttgtcttgtttggaaagtatttaatgcataaagtttaataaatcataaatcagatatgatgtgtgactcattaataacaattggtttggaaaactctccctgaagcacaaattgttggcttgcttcccaatatcactgttcaatcaacagtgattgaagaatcactgttcttcaatgcctgaagctcaatgtctaaaaacagttattttatggttttgcttgttcatcatttgtttcaggtgggaggtaaatctggttccttgctggaagaagatgtcaaaaatattcagta

SEQ ID NO: 315911 - DNA, 558 bp, Homo sapiens
aataaattagtaatacttctgtgaatgaaaagaattaatacaagaattctaaaagcaaaggtatgcctctgcttcattcccatgaatgtttcctataagtttacatgtgaaacagaactctgcaaattttaattttaatcaagaaactaagttgacagtttttatttaaaaatgaaatatatatttcacacactaagttttctaatttcatttgaatcttttacaaaacataaamgtattttataatatatggcacattacaaaacttgtcttgtttggaaagtatttaatgcataaagtttaataaatcataaatcagatatgatgtgtgactcattaataacaattggtttggaaaactctccctgaagcacaaattgttggcttgcttcccaatatcactgttcaatcaacagtgattgaagaatcactgttcttcaatgcctgaagctcaatgtctaaaaacagttattttatggttttgcttgttcatcatttgtttcaggtgggaggtaaatctggttccttgctggaagaagatgtcaaaaatattcagta

SEQ ID NO: 315912 - DNA, 558 bp, Homo sapiens
aataaattagtaatacttctgtgaatgaaaagaattaatacaagaattctaaaagcaaaggtatgcctctgcttcattcccatgaatgtttcctataagtttacatgtgaaacagaactctgcaaattttaattttaatcaagaaactaagttgacagtttttatttaaaaatgaaatatatatttcacacactaagttttctaatttcatttgaatcttttacaaaacataaaagtattttataatatatggcacattacaaaacttgtcttgtttggaaagtatttaatgcataaagtttaataaatcataaatcagatatgatgtgtgactcattaataacaattggtttggaaaactctccctgaagcasaaattgttggcttgcttcccaatatcactgttcaatcaacagtgattgaagaatcactgttcttcaatgcctgaagctcaatgtctaaaaacagttattttatggttttgcttgttcatcatttgtttcaggtgggaggtaaatctggttccttgctggaagaagatgtcaaaaatattcagta

SEQ ID NO: 315913 - DNA, 576 bp, Homo sapiens
attaccagttgactagtattccttatttattatatatgctccagctattccaataattccaaacacacataaattacatatatataaaaatatatatatatttaattgaataaacttkattgtataattttggcttagtttttagatacatcatgagttggtacacttacttcttcagtttataaatttttaaaatatgtaaaataggtgtaatgtgcccagtaatgagatagcttggaaaatctactagtaaaaataattattcttcattaactccctttataaattatattagattatgcttgaagaccttttcagtgctacgtgctaggatgaaatgatatataattgagaaaataataaaagacatcaaaacaatagctccaggtcttaaaatatgagatatttcaaagcatactaagtgattgcccatctctccttaattactaagttcaattcccgagaagtgagaaagcagaggcgtaatattgatgatcacctattgtgttctttctggctagtctgaagctctgcatttttattaaatttccacaataactaaaatagttaatcttg

SEQ ID NO: 315914 - DNA, 614 bp, Homo sapiens
gaaatatgaaaacagaccaaaaaatatttacacaacaagtacatatgtggtttacctttcagttctttattataggagctttcttgcctaaagggtgggtttatatcatgaagaccgaatttataccctgttgtgaatcatttatcacacaggtgaattattagggatgttttggaaggggtgtaatctgaggctgttatttttaggattgttgtactgtcattaataatcatctcttgtacttgtagtcatctgaactggmaaagaaaagaaatagatagcccggatcatggtaaggcagctttttagtgtttctgattgaaaaaaataaaaagttagggacaaagaatcctgtcactaatgtccagttcctgggttttgatggcattcaccatccaatttgagaaaaatggtagatgggtggcatcaaaggcaagaaaactgactgctgttatgtaagtaataaccacagtacaatactgcttttataacattccaggctgtaataactactagaataaattactcaattcttaaagtaacagcttaggtgtaccattcagaatattaaatgtataactcttgattgtgaatccccttattcaataaaaata

SEQ ID NO: 315915 - DNA, 419 bp, Homo sapiens
cccgtcattcttggacctgtgcttaccctacatccacatctcccatcactgccctccacatgtgctatactgccgtcacactgagggtcagggccctttcactcttccacatctttgggtagaaagaacagcagggcatgcctgtttggagcacacatgccggagatccttgcctaaacaccctcatgctgagttccttgctcttctctttgcttctttttactatgtctcatcactatatattccatacttagagtctaagttwcttaattccaggctgaggctggagctatacagtagttaccacttatctgcaattttgctttccgtggttccagttaccagctgtcaatggtggtctgaaaatattaaatagaaaattccagaaataaaccatttgtaagttttatatcacacgc

SEQ ID NO: 315916 - DNA, 574 bp, Homo sapiens
aataaaaaggaggcagagctagtgttacacatttaaagagacttggaaaacataacagcaaataccatataaagactttgtttggattgtatgcaaacaaacacacaattaaaaaacttcttgagacaattgaggcaatgcaaatatggatatatgaactgaatcttaaattgcattaaaggattattattaattgtgttaggtgttatgacatggtgtttatgtatatacacattcttatcatttggacatgtatattcaagaatctgcaggagaaaagcattatgtctaatattcattttaaaatatgacctcctcaaataaattaatggatggaacaagatttgaaaattgctgacaattgttgaagctaggtaaagggtgcataagctctattgtactattcagtttcttttgtttgcgtttgaaattttcataataacaagctttacaaaaagcaaatgcattgattctttttatctcaaaaagagacatttgtgcctgccaggtaatgtgyccaagttttagaaatgtaactggaatgctcagatcaatttacatttatatgaaatca

SEQ ID NO: 315917 - DNA, 551 bp, Homo sapiens
accagaaagttcataaatgagctagttcaacttggagagaaagtggaagaagagtgagccttgggctatatcatgacactggggcatttgttttcaatgaaatatttatataaaaatgaaacaaggtgtgtcatattggtacccatagttggtgatgattaattatgtctggtcaggatcagaaaccggactatataaaccactgccagctaatgcatgtctcccagaagacatgagagggtggtgatggctttgctctttaatactggacttttgctccacatccctggaaggaatgggccatagggaggcttagaaatcttttctgccctttccaccaagggctcagatgagagcaagactaagggacctacttccctgtccttttttgcttgtctgctatcctttgtgctccttaggamtgggaagtcctcaggcctcctccaacccccagactagctggaggggagatgtggagtgtacaggcattgaagagaggtgtttgaagagtcaggagaagaagattttccatggaagttcaattcataagc

SEQ ID NO: 315918 - DNA, 586 bp, Homo sapiens
ctcacatgcaagttcatttgtcttcaaaatcctgggcttccaatctctgttccccttgcctccccacagtcttaaaataaatgtttcccaggcttccctctgctgctatcactgttggcataaagcgaatttcctcgactggtgaacctaaaattttctaacaacaatgatctgcataatttctcatagtttaaaaagttcttatgaaaacaatttccttttcagtcttcccacaatttcataaggtaggtaaaataaagactattattatcatctcattttatatacgaggcagggagggccctaattaatgtacttatttcaaagtctggcatctcttaacaataaacttatttcactctttgttaaactgaccagyatagtcatggactgagagtcagaaagtgtgtgttttatttattcattcattcacttgtgtaattacaaatccattgagtgtctatcacctatcaggcattattttaggtactgaaatatagcagtgatcacaacaaagaccctgtcctcttggggaatgcattctagtgaaagaaacagaaaatgcacaaggaaacaatgatttgag

SEQ ID NO: 315919 - DNA, 538 bp, Homo sapiens
gcaatacttttaggttctatgaccttgagtttaattaacctctttggggttaattagctttttttagcttatttttatttcaaaatacagttattaaaatccttacaastctgtaatgaaagaaaacttacaaaaaattacatatcctgaaatatataaaacgttaaataactgtttttctcttgccatagagaaaaatatacacagcggggacctaataagcacagaatttgattcagaaatggatttaaaacatacacactactacctgaaagcaagcatcaaatagttgtaagtgccaaagcaaccaaacttaccaccgacatatctatttcagtattgacagagctcttggttctggttaaataaattaaagatgggaaaagtgataaaatgtcaattaagaaagccaacaaaatcccctaaaggaagaagagaagccattcttctaacttcaaaactgatccttgctgaagacaaaacttccaagaatttgctcttattatacacatcattccttaaagggaaattgacagac

SEQ ID NO: 315920 - DNA, 515 bp, Homo sapiens
gtgagtcaattaaacctctctcctttataaattacccagtctcaggcagttctttataacagtgtgaaaataaactaatacagatgtcttcactctctaacttaccacaaatttatatttctcagacacacttggataatatctcaatcaggtcaatacagtaatcaacagtgttcactgtaatatacaataatcactaaagcaccttcatatggtgccacaaagcataccattttgaggaaatagaattaaaaatgggactttttataccagatgtaayatgacttggcaaagaaactgcacaatttttacagtaggacacaatggtgaataacttacattaccaaacacaccattaaatgggtagaatagctgtcacttctgctcagaattacatataaagagagagggtcactcacaatcttacactcatcaaaactcctattatgaactctaccactagcacatgactgatataatttataggcaaataaatatatactcagcaactcaac

SEQ ID NO: 315921 - DNA, 588 bp, Homo sapiens
atattataaacttgcagtggtaattctgaagtataatatatattcagggtcacaaaacagggcggcaaggatgataactctattagcatttaaaaagcataaaaatactaataagcacaaattttcctactatagtaactgtagcctgaagttaagaataatagcatagtgattgtaattaataataatatatatttgaaaattgatgagagattaaaactcaaatgttcttatcaaaaaatgataagtatgtaacgtattggatgtgttaattagctttaattatttcacaatgtatacacatatcaaaatgtcacattgyacaccataaatatatacactttttatttgtcaattataccctaataaagcttgaggaccaggagaggaaaaataagaatatacaaaaatggaaccagcatgatagttcacgtctgtaatcccagtgctttgtgagaccgaggcagaagaatcatttagcccaggagttccagaccagcctgggtgacacagcaagatcccatacctactacacgttaaaaagttagccaggcatggcattaaaaaattagccaggcatggtggcac

SEQ ID NO: 315922 - DNA, 588 bp, Homo sapiens
atattataaacttgcagtggtaattctgaagtataatatatattcagggtcacaaaacagggcggcaaggatgataactctattagcatttaaaaagcataaaaatactaataagcacaaattttcctactatagtaactgtagcctgaagttaagaataatagcatagtgattgtaattaataataatatatatttgaaaattgatgagagattaaaactcaaatgttcttatcaaaaaatgataagtatgtaacgtattggatgtgttaattagctttaattatttcacaatgtatacacatatcaaaatgtcacattgcacaccataaatatatacactttttatttgtcaattataccctrataaagcttgaggaccaggagaggaaaaataagaatatacaaaaatggaaccagcatgatagttcacgtctgtaatcccagtgctttgtgagaccgaggcagaagaatcatttagcccaggagttccagaccagcctgggtgacacagcaagatcccatacctactacacgttaaaaagttagccaggcatggcattaaaaaattagccaggcatggtggcac

SEQ ID NO: 315923 - DNA, 588 bp, Homo sapiens
atattataaacttgcagtggtaattctgaagtataatatatattcagggtcacaaaacagggcggcaaggatgataactctattagcatttaaaaagcataaaaatactaataagcacaaattttcctactatagtaactgtagcctgaagttaagaataatagcatagtgattgtaattaataataatatatatttgaaaattgatgagagattaaaactcaaatgttcttatcaaaaaatgataagtatgtaacgtattggatgtgttaattagctttaattatttcacaatgtatacacatatcaaaatgtcacattgcacaccataaatatatacactttttatttgtcaattataccctaataaagcttgaggaccaggagaggaaaaataagaatatacaaaaatggaaccagcaygatagttcacgtctgtaatcccagtgctttgtgagaccgaggcagaagaatcatttagcccaggagttccagaccagcctgggtgacacagcaagatcccatacctactacacgttaaaaagttagccaggcatggcattaaaaaattagccaggcatggtggcac

SEQ ID NO: 315924 - DNA, 548 bp, Homo sapiens
tgaaaacttatactacaaggatgatttactgttaaggctggtgtgatagtcaagccagcataaattgtccactaaaaggtagatcaatgagaagcacaacttttttaccttaagaaatttaccatccagaagattagatggaygagcaaataaataaatatagaagtgttagaggtgtagacctgttggaacttcgcaatgtcggtgttagggctgagacacacaaactttagttccagtaatattaagaggactataaacaactagtaataatgactttgtattatatacaaactacttttctggtatttgtccaaattatatatacattttatatgtatatctgtattacatagctatatatatacatagatgtatatatctgtagctctatatacataaaatgaagttcaataacttacctgagttcaaatacttagtaagttagaaagttaggatttgaatcctgaaagtctgccatcaaagtcttcaacttgcaacctatattgaggattctaaggacatcctgttttcatttatttgttttg

SEQ ID NO: 315925 - DNA, 623 bp, Homo sapiens
tagctttcgtaatctttgacattaatattggtcaaaagctatatgatamctgtttgttgcagggaggtagaggtagtgactaagaaattagtacaacagcactcactaaaatattaatatatattcactttcaaattgcttagttatgactttaacacgttaaaaacaagatagtaaatatttgttgaatgtgccaggtgcaagggagttacagaactgaacagggataaagacttcatgttcaggcccttagaacagcattgaagacacacttctgaactctggaatgctgtgatttctatgtcacatgtcaaccatttaacaaataagttccttccctccttctccctagaacaggggttagtaaaatacactccatggagtaaacttgacacactgcttatatttgtaaataaatctttttagaacaaaccacatccactcatttccttatcatctgtagtttcattcatcctacaatgacagagttgagtagttgtgaccgtgactatacgactgcaaagtttaaaatttctaccatggagcccactatagaaaatgtttgccaacccctccacttaatctggataagaatcttcttaaagataatctctatatacagc

SEQ ID NO: 315926 - DNA, 623 bp, Homo sapiens
tagctttcgtaatctttgacattaatattggtcaaaagctatatgataactgtttgttgcagggaggtagaggtagtgactaagaaattagtacaacagcactcactaaaatattaatatatattcactttcaaattgcttagttatgactttaacacgttaaaaacaagatagtaaatatttgttgaatgtgccaggtgcaagggagttacagaactgaayagggataaagacttcatgttcaggcccttagaacagcattgaagacacacttctgaactctggaatgctgtgatttctatgtcacatgtcaaccatttaacaaataagttccttccctccttctccctagaacaggggttagtaaaatacactccatggagtaaacttgacacactgcttatatttgtaaataaatctttttagaacaaaccacatccactcatttccttatcatctgtagtttcattcatcctacaatgacagagttgagtagttgtgaccgtgactatacgactgcaaagtttaaaatttctaccatggagcccactatagaaaatgtttgccaacccctccacttaatctggataagaatcttcttaaagataatctctatatacagc

SEQ ID NO: 315927 - DNA, 563 bp, Homo sapiens
cagctttaaaattactgatcctggaatttttttaaaggggctttaaaatggccaattatcacaacaggatggtatatttcaaaatttccttatatmaattcctgaaccaaccttcctgaaattctcccagttccatgtcttccctagtacttcatttttgacacaaaggttaaaagtaaagggatgaaggcctgctccagaagacagacaaagtgaattttagttccagtatatagcaggtttttgacgttagtaaaggtagtaaacgtgccatgcatcaagccggtaaatgtcacgacatctcttgagttgcccaagccagaacacctccctctatctcccaattccttgatcctaatccattatacagtcttatttattttagctataaaatatatccaagaagagtctacaactctccattcttacttcctctgttgtcacccaagcttttatcacttctcatctaaacaaccctctgggccagtcttcccacatccaacgtggatcctccccaatatgttcttcacacaacatccaaaaatctttgtacaatgcactgt

SEQ ID NO: 315928 - DNA, 563 bp, Homo sapiens
cagctttaaaattactgatcctggaatttttttaaaggggctttaaaatggccaattatcacaacaggatggtatatttcaaaatttccttatataaattcctgaaccaaccttcctgaaattctcccagttccatgtcttccctagtacttcatttttgacacaaaggttaaaagtaaagggatgaaggcctgctccagaagacagacaaagtgaattttagttccagtatatagcaggtttttgacgttagtaaaggtagtaaacgtgccatgcatcaagccggtaaatgtcacgacatctcttgagttgcccaagccagaacacctccctctatctcccamttccttgatcctaatccattatacagtcttatttattttagctataaaatatatccaagaagagtctacaactctccattcttacttcctctgttgtcacccaagcttttatcacttctcatctaaacaaccctctgggccagtcttcccacatccaacgtggatcctccccaatatgttcttcacacaacatccaaaaatctttgtacaatgcactgt

SEQ ID NO: 315929 - DNA, 602 bp, Homo sapiens
tgcctttcatatgcttaaatgttaccaaaacattatatactctggacctcttccaaacgaagctgcattagaggcttcaggtcaatgttttttaaggtacagtcccacaaaagttaaggtgggacaataaaatacatacattgtgtcawgtagcatcacagggtgttattcagtacaatatagcaccccatatagtatttagttactacttgcctgaaaagaacatctatgtctttccatcttgccgtttacaattctgtatttatttgaattatttcaacagtgacctgtagttattacattaatgttacttgtgtactcagaagtaaaaaagtgtgagaaaattgtactaaaaatttgtcaccaaggccagcaaaaattacttttatatagaagaatcttgttacaacctatgcaaaagagggagatgactgattaatattttagttatactctttcaataaatatgtagactacctgtcacatttcaggcactgtattcagcactgaaatacaactgtgcataaatgcacactattaacttctcaaagttcatgacctattgggttagacattaaacaagtaattatttttttaaaaaa

SEQ ID NO: 315930 - DNA, 602 bp, Homo sapiens
tgcctttcatatgcttaaatgttaccaaaacattatatactctggacctcttccaaacgaagctgcattagaggcttcaggtcaatgttttttaaggtacagtcccacaaaagttaaggtgggacaataaaatacatacattgtgtcatgtagcatcacagggtgttattcagtacaatatagcaccccatatagtatttagttactacttgcctgaaaagaasatctatgtctttccatcttgccgtttacaattctgtatttatttgaattatttcaacagtgacctgtagttattacattaatgttacttgtgtactcagaagtaaaaaagtgtgagaaaattgtactaaaaatttgtcaccaaggccagcaaaaattacttttatatagaagaatcttgttacaacctatgcaaaagagggagatgactgattaatattttagttatactctttcaataaatatgtagactacctgtcacatttcaggcactgtattcagcactgaaatacaactgtgcataaatgcacactattaacttctcaaagttcatgacctattgggttagacattaaacaagtaattatttttttaaaaaa

SEQ ID NO: 315931 - DNA, 602 bp, Homo sapiens
tgcctttcatatgcttaaatgttaccaaaacattatatactctggacctcttccaaacgaagctgcattagaggcttcaggtcaatgttttttaaggtacagtcccacaaaagttaaggtgggacaataaaatacatacattgtgtcatgtagcatcacagggtgttattcagtacaatatagcaccccatatagtatttagttactacttgcctgaaaagaacatctatgtctttccatcttgccgtttacaattctgtatttatttgaattatttcaacagtgacctgtagttattacattaatgttacttgtgtactcagaagtaaaaaagtgtgagaaaattgtactaaaaatttgtcaccaaggccagcaaaaattacttttatatagaagaatcttgttacaacctatgcaaaagagggagatgactgattaatattttagttatactctttcaataaatatgtagactacctgtcacatttcaggcactgtattcagcactgaaatacaactgtgcataaatgcacactattaacttctcaaagttcatgacctrttgggttagacattaaacaagtaattatttttttaaaaaa

SEQ ID NO: 315932 - DNA, 596 bp, Homo sapiens
atttttttaaaaaaacaaatcagaagttgaaagggaaaacatatgagaagtatcaaatatgcatggctaaagtatttttccatgaagatgaataggaatctatagacattaaaagagcagttcccaaccttttcagcaccagggatcggtttagtggaatacagtttttctacagacaaggagggttggatgggatagttktgggatgattcaagcacattatatttattgcactttatttctattattattacattatactatacgatgaaacaatcataccactcaccataatgtagaatcagtgggagccctgagcttgttttcctgcaactagatggtcccaccttgaggtgatgagagacagtgacagatcatcaggcattagattctcataaggagcatgcaacctagagcccttcacatgcacagttcacactagggttcatgtgtctatgagaatttaatgctgccactaatctgacagaaggtggtgctcaggaggtaatgcaagcaatgaggagcagctgtaaatacagacaaagcttcgcttgctcactgacactcatctcctgctgtgctgcctgattcctaac

SEQ ID NO: 315933 - DNA, 615 bp, Homo sapiens
aggcttcacagctcaaagatttcaaaaaatacatgttttctcagaagagcaataaagtccatgataaattgctctggatttgaaagcattttgtgatggttaattttatgtctcaacttgactgggctgtgggatacccaaatagctggtaaaacgctatttctgggtgtgtctgtgaggktgtttccagaagacattagcatttgagtaagtagactatgtaaagaagatcagattcaccaatgtgggtaggcattaatcattccattaagggctcaaataggacaaaaaggtggaggaagggcaaattcactttctatcttgagctgagacatccatcttctcctgctcttggacaccacagctcctcattatcaagccttcagactcaaaggctcaccccagtgccgctaacccctacctcggttctcaggcctttgattcaaattgaattacaccactggacttccaggttctccagcttgcagatggcagactgtggaatttctcagcctccataatacgtgatctaattcccataatgcataaattaaacacatacacacactattagttttatttctctggagaaccctaatatgcatatgttcacct

SEQ ID NO: 315934 - DNA, 447 bp, Homo sapiens
aggtaaacaaattcagaaagctgtgctcattgcaaaatggggaagggaaatacaggttttgttatcttttaataccaacaattaagttaacatgaaaattttttttagygccaacatattccattcccactttactcttactataagggacagagtaggcagcattagtcccactttaactaacagagaaagacatttaccacatgcttgacttgagccctctggctagaaaacacatggcaaaagtaacacaaatgagagaatcagggatttcttagtaaacagcaacacatttcagatttacaatactttaaaaagcaaagatcaaacatgctactcaatcctacttgataagctgcctccatttccaaggttaaagatggataagagtaaaacccaacatctgattattccatgaactctctcatccactatttgccatagggt

SEQ ID NO: 315935 - DNA, 544 bp, Homo sapiens
gcaccagcatgatcaatattttctctagggaaagtaattactaatcaccaattgtgttggatgtgtgcaaggatcccactgcctrtatttgtgtattgttggggagtatgcagggaaaataaagttgtttaatgctatccttgggaaaacacaaaacataattaggaagagaactatacaaatatcacagagtattagaaaacaaaaatgttcttttaatgatcagctaatttggattagatataactaccactagcagcaatatcaagaatcaagagttgcatgttcaataataacagatgtctttaatatttcagagatgtttgagcaaagccactgtcatttacaaagaaatataagtgaacagctcataagggcttaaaggttttcgagatgaaaccagttttggcacatggtaaggggactactaaaattcctaacagtaaagttacagaaaaatttagtttaaatgcaaaccagctcatcatgtgataagaacaaaaggttccttgatgagtgatgattccacaagcaactactggcc

SEQ ID NO: 315936 - DNA, 594 bp, Homo sapiens
gactgattgattaagggaagaaagttggcttctcttcaaggaatgacgagygtagtgattcccaagaagactcttctcacagtggagttttctctcaaagactgctcctctcaaaacatcgtggtgtgttctgtgtatctcagtgggaacagacattgttatgcctttcaaattgtcacaagttgcaaaattaaacatgtgcagcataaaaatagcacaccatggggctgcaaagagaagcagagcagagccttgcggcaaagtcacaggttttgaaagtgggtcttgataaaatatcagacttgctactgtccattagagaggaactccccagtgccaggtccattattattccagaagctgttcccctacttcactgagtaaagagcctgccatgacactaccaatgtttgcatcaactttggttatagctctgtgaatacaaagcaagtcaaaatcaaccctactggcataggaagtcctcctttagtgtggctaggtctaaattgaccacaaaccatacgataaacattttaggtaatgtctaaatgatgccattgttgaggctttctgccatagtctaatgtcacacaa

SEQ ID NO: 315937 - DNA, 564 bp, Homo sapiens
gggggaagaagaggtgtttggttagatgaataagttattcagtagtgatttctgagattttggtgcaatcatcacccaagcagtatacactgtacccaatgtgtagtcttgtatgcttcatccccctcccacctgtttagtatacttttataggaaacaaagagataatgagtaatacaatgcatattttttaaaacccaaatttagtagtcagaagaattgacaattatttagacaaaagttttaattttaaaattagaatataatggcttgattgaacaattcacattttataaatcaagttcaaccatgtgtaagaaaatatattttttagaccattayaatttatgtttacatacttttaaatgttaaacaatatattcctaaatcaatagcttcagtttaaacatcgcttattcccttattttgtaggcttttctatggtaagtattcatttagttattttagatcttcatgattcctctgatacaaaagagattctgaatcatttctattaaaaccatgcataaattgtaaaaaaagcttcctgtgagggaagtgcag

SEQ ID NO: 315938 - DNA, 472 bp, Homo sapiens
tactgtgtactcattaataaatgtgtatgccttttctcctgttaatctgcctcttcttagtaattttcagtgatacttcagagagcaactggaaacttttgccttggcctttacagtactctttaaccagctattcatttcttatacacaccagtatattttatttctgtctttttaactaatattttaaaatttcaacttttattctagatacagggggtacacgtgcagatttgttacatgggaataatggcatttgctgaaggtttggagtgtggatcctgtcatccaggtagtgagcacagtacttgataggtagatttttcacccaccctcccaccctctagtagtccacagtgcttgttgttcccatatttatgtccatgtttagcttccacttataagtaagaacatgcagtgtttrgttttctgttcctgcattaatttgacaagagttatggtctccagctcc

SEQ ID NO: 315939 - DNA, 626 bp, Homo sapiens
ggtataataccacctgaaggtaggcaataatatgtatttattataagtctgagaccaaccactataataacaaaacagacttatagctaataagtcaatagargaaataaaattaaaaataaagcagcaaaaagaggaaaaagaaaaaaaaaacagaaaaataagaatagaaacatggcagcgttaaatctaaccatatcaataatcatattaaaaataaatggtctataaacatgggagtgtaagtatccctttgagatagtgattttatatcctttaaatgtgtactcacatgtgggaatgtggaatcatacagtggttctattttcattgagcagagatcatgccactgcactccagcctgggcaatgagagcaaaactccatctcataaatagataagtaaagtcacacctgaaattaaggttgctaatcagctgaccttaaaataagaatagtaccataagttatttgggtggtccaatgtaatcacaagggtgcttaaatgtggaagagagaagcagaagaagagtaagtattagaaggatgcaatgagataaagacttgaatgtccattttgttgcctttggggaaagaagggttctacaagccaatgaatgtgagcag

SEQ ID NO: 315940 - DNA, 427 bp, Homo sapiens
gaaaacttttgaccctcagaactgcaaaaaaataaatttgtattgtttacacttattcaatttgtggcaatttcattagcaatggaaaatgaatataaagtttagtaccaggaagtgctgctttaacaaataactaaagacacagaagtgactttttaattgggtggtgtgcagacactggaagaatttttaggagcatgatagaaaaaaaaggagcgacattacctcaaatagaatttagaaatatgcatgttaatgactatgctattgaagacttgaatgtcaggatcatagaagataatatgcatgtatcttcttggaaactaagtcataataagcagactatatcataagaaacacttacrttgaagatactgctaatgagggctcatatggaaatgacaaatatgttcatggtaactgtaga

SEQ ID NO: 315941 - DNA, 627 bp, Homo sapiens
ctctatttatcctcatttggttggacctattttatttacttctattactcacagtaggagtataataactaactcttttggaatatatatataatattggaacatgagttagtttgatacaccaggtaagagtaatttatgttatgacaagaagggtaagttagttaagttccacattgaataactcataatgacctgttggtagtaggcaaatatttgaaaaattattattatttttaatatttaagaaatacatttttacttaaatagtaaaaaactatttatttcattaatacttttccagataattgttttattttagtagtcatgatctaaataatagtggctcccrttgctttaaacgttctgctcaaagattattactattatagtgttcattagcatgtgtcatcagtagtttaatatattagacaaagttaatacctgtcccaaatagccagttgttcttttttataaatttattcactgaaattttctacatgagcaccccttttagtaaatttacactgtaataaagaagataagatatgcatgagaaatgcatacatgataattttactaatgaaagtgtaaacaatctgtgcaacttgaaataatataatactt

SEQ ID NO: 315942 - DNA, 581 bp, Homo sapiens
gtgggtgaaatttttttattacaatcagtgcagtacatcctaagtgctcaatatatactttagaagtggygatggtggcagtaggggtggtggtagtaattcagtaatttcctttgaggagaaacaaagacttctgtttttactcagagccatttaaacttgctgtagccaaagctgtgaaaatagaattcatctgtggcattcttgaaccatttagcttttctgatacagctactaattcctcttttttctgcacataattctgacctgaggaggtaaaatggtaacctttgaccactactagaatgctaagagaattgtaaagccataagagatggcatcttgaacttttagtaattccaccaataactaacttgaggaaatttatattttaatccactcttgtcaaatgtttctgctacttccagctgaatgtattcctaaagaatatattcctttcccgtttaatttctctacttaccacttactagtatgtaaaattttctacaaatacatacatatgaatatatgtatagataatttatttaaattttataaaatatatatttatattcacatgc

SEQ ID NO: 315943 - DNA, 584 bp, Homo sapiens
acataaaattataattgactattcatgtataatttaatttactgataaatcaaatgactgagaaaagttgtttttattctaggggatttccaatccagaaaagacgacttaatatatttttgtgccagaagscaagtcagatgcttcatttaaaagcattaatttaattcaaaaaaaaccatcccacacatgatttccctaattttaacacctgagaaatagacttacaagcaggaatcttgagggacttataaaagacttatacacggtctcactgatagtgagggtagaatcattcagaattctgagagtttcagaattggaacctaggaacccctagtttaaatcgtcagcttttcctacctcacttgtctatctgatacatctcattgggaaattcagttgccacacattatttcttaatgcattttggagtgattagcgaaaagtaagtctaagttatgtagttacatgttatatgtgctggttcaaaaaataaaagttattatcttactctttttcattttaagaagttatattcttcagaaaaaaaattgtattttaagatacagactgaatgcaag

SEQ ID NO: 315944 - DNA, 584 bp, Homo sapiens
acataaaattataattgactattcatgtataatttaatttactgataaatcaaatgactgagaaaagttgtttttattctaggggatttccaatccagaaaagacgacttaatatatttttgtgccagaaggcaagtcagatgcttcatttaaaagcattaatttaattcaaaaaaaaccatcccacacatgatttccctaattttaacacctgagaaatagacttacaagcaggaatcttgagggacttataaaagacttatacacrgtctcactgatagtgagggtagaatcattcagaattctgagagtttcagaattggaacctaggaacccctagtttaaatcgtcagcttttcctacctcacttgtctatctgatacatctcattgggaaattcagttgccacacattatttcttaatgcattttggagtgattagcgaaaagtaagtctaagttatgtagttacatgttatatgtgctggttcaaaaaataaaagttattatcttactctttttcattttaagaagttatattcttcagaaaaaaaattgtattttaagatacagactgaatgcaag

SEQ ID NO: 315945 - DNA, 570 bp, Homo sapiens
ttaaaaatatgtacacatatatagcttgcattcagagactccaatggttttaataataaatagtttctatattgggatatttagcaagataaattgcataattgtaaaattttatacagaaatgaaaataaatacaacaaaaaattttaaataaaaaagtaaatagattcactcttactaggagcttatcatccaattaagcttgttaaaatagtttyctcattataatttttaatattagtcaacttttctacttttctctgtctttgttgtaaataagccaaatgcctatgagtgcccagggaagctgttaaaaaattgttcttttatttcttgaccataaaatagaaattataacatattcatacaaataactagactatcatctaactttctccttcatgaagctgatgcagatgcatgatagggtatattttgcattttacagaagacacttttactgtgattgcagaatagtctattcggacataatgcttcacatctttatgcactgtctcatcactggaaacccacggatgctatactatggctcaatataactcagcctaa

SEQ ID NO: 315946 - DNA, 570 bp, Homo sapiens
ttaaaaatatgtacacatatatagcttgcattcagagactccaatggttttaataataaatagtttctatattgggatatttagcaagataaattgcataattgtaaaattttatacagaaatgaaaataaatacaacaaaaaattttaaataaaaaagtaaatagattcactcttactaggagcttatcatccaattaagcttgttaaaatagtttcctcattatamtttttaatattagtcaacttttctacttttctctgtctttgttgtaaataagccaaatgcctatgagtgcccagggaagctgttaaaaaattgttcttttatttcttgaccataaaatagaaattataacatattcatacaaataactagactatcatctaactttctccttcatgaagctgatgcagatgcatgatagggtatattttgcattttacagaagacacttttactgtgattgcagaatagtctattcggacataatgcttcacatctttatgcactgtctcatcactggaaacccacggatgctatactatggctcaatataactcagcctaa

SEQ ID NO: 315947 - DNA, 559 bp, Homo sapiens
aatgaaagtattaaatgtattaaataaggtctaaaaattgttttgcttgtttttttaaagagtgataacatattaacttactcaaatatcaaaagtaaagtatttaaaaaagcttgacactaatggggaawggaaaattcccataaaaagaaaaaaaaaaaaactagtactactacaacatttgatattgatttagtaacattatatattgtgttaaatattggccatatgataaaaataagcacagtatgccttacaagtatgtaaagtcttttatatgcaataccacaataacaaaatatgaataatagtagtcagaatgggataggaccaaattttggtttctgttgaaaatatggtgtctgtgggagcagagttctgaaacaggttctaattttaacatacatcccattttcagcaggagagcactaactgtacttcatcctctattttctactgtgcaaatatgccttttactttgaacgcttgtccatcaaggtggaatataatctgcctcgctcagacacccgccatttacaatgtgctttcatttacaatg

SEQ ID NO: 315948 - DNA, 559 bp, Homo sapiens
aatgaaagtattaaatgtattaaataaggtctaaaaattgttttgcttgtttttttaaagagtgataacatattaacttactcaaatatcaaaagtaaagtatttaaaaaagcttgacactaatggggaaaggaaaattcccataaaawgaaaaaaaaaaaaactagtactactacaacatttgatattgatttagtaacattatatattgtgttaaatattggccatatgataaaaataagcacagtatgccttacaagtatgtaaagtcttttatatgcaataccacaataacaaaatatgaataatagtagtcagaatgggataggaccaaattttggtttctgttgaaaatatggtgtctgtgggagcagagttctgaaacaggttctaattttaacatacatcccattttcagcaggagagcactaactgtacttcatcctctattttctactgtgcaaatatgccttttactttgaacgcttgtccatcaaggtggaatataatctgcctcgctcagacacccgccatttacaatgtgctttcatttacaatg

SEQ ID NO: 315949 - DNA, 590 bp, Homo sapiens
tatatttttttaaatatgtaaatcatgtctgtccttatcctgaaagtacttatttcattatggtttagatagttttcgctgttgacttcacatcttcatctttctcaatatcccaaagtactttgaattattttgctatgtttaaaacaattattgtaaagagaacaaaatggtttttcatttattgtaattttcattaattgtttcacataaatgtatttttaggactagtgattctctaatggtacatttatwtattaagataaagaaataagtatagagggttttcataaatataactgagaattaaaaaattaactgcaggaaattctttagcaattaaaaattggagaatgtctataaaatatatgaactcataggtaggataagttttatttttagtataacaaacccatgtttttgaacactgtgattgatgatataaaggatataacttacaagaacaattgaatacttggaccattaggtggtttctgatgaaatctattatccttttatattacagatatcatcaaataaaataaaatagtgtgattttggtataacatttctaaaaatacaaaggtcat

SEQ ID NO: 315950 - DNA, 638 bp, Homo sapiens
gtgcaaatgaaaaccaaaagggaaggcatatttaaagtttttgattatgtttgttagaagaggaaaagtatgtgttaattataaaaataaagcaaggaaagggagaaaaggaggaaaaggcttacaattttagctaaaatgggtagggtaagcctcctcattaagaatgtaatattcaagtgaaaattctaagattcccactatttttggaacatttgttttctagaattctgatgctcacacatttttatggctctagatgcttaccacaatagttttcaattattcgacagacacctggcatcaaaattcctgagtttctatttttccttctcatcaaaagttgaaaaatagttaaaataaattacacttaggcctttaacgtattcacaatgaaaccaaaaagagccattcaagataattttgcattaatagtacattcarttagaagattattgtttaatttgtgtaaatggagaaatcaaaaagtacacttacttggagttgggacaagcaggtaggtgacaactgggccagtaagacaagaattaaagtgactggccataaagctcataaaggcaataaagctaatccaattggtatacaatttttatattgaaaattaataaattaatttt

SEQ ID NO: 315951 - DNA, 470 bp, Homo sapiens
gcttcaaaaagcaacctgatggaccattggcatgctacagagtaataggttgtgagttcccaaagataaagactttctgccagtatgaactaatttaatttattttcaggggagaatacatatttgtttgagacagaaggcttaagtcttgtataggttaaagttaaatatgaataaagtgcttgaagcctccacatgctaacaagtagaaaaatgtatagagtaactacagagacttggaaaaaaaataaaatgtaagcccaatgagtctcagttttttttttctcaaaaggctcaataatccatacctcatctaactatttttatcttacaattgtgcgtttgacattctctttgacatatcaactaamctgactccattcttgtattcctctgtctttttcacccaaactttttttctgtttctatctgaaattcctactttattatcaaaaatgcatcccaccttc

SEQ ID NO: 315952 - DNA, 484 bp, Homo sapiens
tcaacaaatattttcattttctgatttttccttaattcctacattcatcatatgtctatcaaaaattactttatggaaaacttatgttgtcactccttccttatataaactcaattattatcttttttattaaataaattgtagaatatctctgtgtcagacactgtgcctgacattagggacccaacaaaattaataccctaaagaattgatagttttgttatagaaaacatttacaaaataactacttgaaatgtagtataatgcatgctttaatagatacatataatgactcttatggaaattagtcagaaatatttaacaaaagaagtgtcatccaagatcagccttgtgtgacaaataggcattaggtagrtagaacagattatcagcatatttaggccagagagaacagcatagagcatgagagcataaccattcatgtaaggagcagaggagcaggcaataaaaagggagttacatt

SEQ ID NO: 315953 - DNA, 590 bp, Homo sapiens
tcccccacccaccaaattatccttaaaactccaattcctgaattttctgggagactaatttaagtaataataaaactccagtctcctgcacagccacctctgtgtgaattactctttctttattgcagttacactgtcttgataaattagctctgtctgggcagtggacaaggtgaacccattgggcagttcacatcagtaagtaaggacagtctcgcctaagaaagaagaacattatacatttgaataatcagaaattactgctgaatatttattggttgtttcatataaattatcacttatcatgatttaktaaccctataaacactaaacaaacttctaataactctatcagttcccaaagagcctgatactaagaaaaggagtgaggactatttcagtaactagaatgctctatgtctgatgggttaaacaatcagttttctctgagtttagctaatgaaagtttgtctttcggagtctgttctactctaggtgaactaatataactgaaattacagatagacttaaattataggaaacaaaataccctaatctaattaggatgttgaaagtggtgtgaatttatc

SEQ ID NO: 315954 - DNA, 573 bp, Homo sapiens
tacttattgagcaattagctgccaatgaaaaatgtacacagtatggactgctaacactagaggaaaaacaacaataaaaaactcttgaatattacaaatgtgatgaaaaatgtacaaatagtttttggtgtaagcagatcaacactccctrtaactgtgttgataaaatattagattggaatgtcatattagactttatatgaaaagcaagacaatccaactttacacaatcctgtgatatatcaaaaggattatttaactgaaattttcacaaaaaatcatataaaataaaagatataatttaatatgttggtgcattataaacaaaagaggatttaagtgtctttcattataacctgatccaaggtaggctcttaacaaataacaccttcataatgcaagcctttgttgcttctctgtcatgaggaacacatctactaaatctgtaattcatcctggcttccatggctctccctgttattatagccaaaattggaaatatctatcctttagatttctattatttgacctattaaggaatttatttcttatatcccaatgaatcaagtaaaa

SEQ ID NO: 315955 - DNA, 547 bp, Homo sapiens
gtcttgggcctgcaggtgcacagaggcaagaactgagatttgggcacctccagctagacttcagaggacgtatggaaatgtctgatgtccaggcagaagtctgctgcaaaggtggagtcctcatggataatctctactagggctatgcaaaggggaaatgtggagttggagctcccacacagagttcccactgatgcactacctagtggagttgtgagaagagggccaccatcttccagaccacagaatggtagatctgccaacagcttgcgccatgygcctggaaaagccacaggcactcaacactggcccatgaaagaagccacagagtctgtaccctgcagagtcacaagggcagagctgtccatggccttgggagcttacctcttacataagtgtgccctggatgtgagacatggagtcaaaggagctttattttagaagtgtaagatttaatgactgccctgctgtgttttgaacttccatagggcctgtagcacctctgttttggccaatttctccctttgggaatgggagcatttaccaa

SEQ ID NO: 315956 - DNA, 634 bp, Homo sapiens
gttttcttttgtagagatactgtaactttggggttagacatttgtattttaattctagctttgccatgtactaattgtgtaacattaaacaagctaaagtaaatgtctacatctcagtttttccagttgggaaatggaaataattatacagtccccaaagcatttggaggataactatataagataatgtatgcaaactgtttaatattatatatggtcagagaygttaaattggtggttgttactatccttttttatatagttagtttatctttctttagataatcttcaactatatttcaaatttctggtgtttagcattgagttttatacaattttttgtattcctcataattctaaatattttgctcttcacttagaagtattactttttatttttttcttaaataaatataagcaaaataggctcaaattgatgagctttatatacattcatggcacagagtcaagatataggattataaaccctcttagaaaaattttctgtaatataatatatatttgaaagaaatagctgtgagaattcagctaccctacatagtcatgcaaagcagacatactggcttgcagccaggtagaccaaaataactatactctcaaacctaataacaac

SEQ ID NO: 315957 - DNA, 634 bp, Homo sapiens
gttttcttttgtagagatactgtaactttggggttagacatttgtattttaattctagctttgccatgtactaattgtgtaacattaaacaagctaaagtaaatgtctacatctcagtttttccagttgggaaatggaaataattatacagtccccaaagcatttggaggataactatataagataatgtatgcaaactgtttaatattatatatggtcagagatgttaaattrgtggttgttactatccttttttatatagttagtttatctttctttagataatcttcaactatatttcaaatttctggtgtttagcattgagttttatacaattttttgtattcctcataattctaaatattttgctcttcacttagaagtattactttttatttttttcttaaataaatataagcaaaataggctcaaattgatgagctttatatacattcatggcacagagtcaagatataggattataaaccctcttagaaaaattttctgtaatataatatatatttgaaagaaatagctgtgagaattcagctaccctacatagtcatgcaaagcagacatactggcttgcagccaggtagaccaaaataactatactctcaaacctaataacaac

SEQ ID NO: 315958 - DNA, 597 bp, Homo sapiens
taactcctttcagcattacgaactttcctattattttttgttagacttgtctgctgggaataattctttcagtttttgtttgtctggttatattttcatttcaccttcctttttgaaagataataacactggatataggcagtatattttcctttttctccragcaattttaatgatatctcattgacttctggcctccatttctgatgagatgtcaataaccttttaggggttctcttgtatgtgatgagtcactcttatcttgttgccttcagtattttctccttgtgtttgactttaagtaattttaaatttgatgttgcaagtattttggattttgtacattttaataggtatgcagtggtatcacatttttgctttaatttgtaattctctaatgacttatgatgctgagcatctcctcatatgcttacttgtcatgtgcatatcattcccggtttggtgtctgtttcgatctttgatcagttttgaattgggttatttgttttcttattgctaaatttaaagtcttatttgtatattttggagaccagtcatttatcagatatatgttttccaaatatgttcttctaattg

SEQ ID NO: 315959 - DNA, 597 bp, Homo sapiens
taactcctttcagcattacgaactttcctattattttttgttagacttgtctgctgggaataattctttcagtttttgtttgtctggttatattttcatttcaccttcctttttgaaagataataacactggatataggcagtatattttcctttttctccgagcaattttaatgatatctcattgacttctggcctccatttctgatgagatgtcaataaccttttaggggttctcttgtatgtgatgagtcactcttatcttgttgccttcagtattttctccttgtgtttgactttaagtaattttaaatttgatgttgcaagtattttggattttgtacattttaataggtatgcagtggtatcacatttttgctttaatttgtaattctctaatgacttatgatgctgagcatctcctcatatgsttacttgtcatgtgcatatcattcccggtttggtgtctgtttcgatctttgatcagttttgaattgggttatttgttttcttattgctaaatttaaagtcttatttgtatattttggagaccagtcatttatcagatatatgttttccaaatatgttcttctaattg

SEQ ID NO: 315960 - DNA, 476 bp, Homo sapiens
ctgcagaccttttaataggcccttgtaccctctctgggttattttggtttgtgaatagctgtctatatttgtgtttttgtagggccataaaggctggtatctcctactccaccatcttggtgatgccactgtctagattttcatatatatatatatatatacttttaaagagtcatttgcatttctctaattgttcctcttcctgctttgaagcatacactatcttttactatatctctgaatattctaattttatagctttttcttgaaagttattttctactctttagttgtttatgactacaccagaatcagtttcttcaattcagacactgtcttttctgttgcgagtgtttaaactgaagtgatgaatcctggtkttgactcacttactagaatgaataattaggtggaatttcacaataatattaaagggagtgtccttttctgcattatacataaaaaaatgtttcacc

SEQ ID NO: 315961 - DNA, 581 bp, Homo sapiens
ggctggtatctcctactccaccatcttggtgatgccactgtctagattttcatatatatatatatatatacttttaaagagtcatttgcatttctctaattgttcctcttcctgctttgaagcatacactatcttttactatatctctgaatattctaattttatagctttttcttgaaagttattttctactctttagttgtttatgactacaccagaatcagtttcttcaattcagacactgtcttttctgttgcgagtgtttaaactgaagtgatgaatcctggtgttgactcacttactagaatgaataattaggtggaatttcacaataatattaaagggagtgtccttttctgcattatacataaaaaaatgtttcaccaaaacttcttctccttgggagggaaactgtatraggacaaaaccagggtgtgatagccctgctgttttatttgaatgtatccaggcagggagctgttttaactgctccactcccacaaagtaagaattctaagtgttaggtaaatatgagatattttatatagcaggcattgtgtatagaaagccttcattagccc

SEQ ID NO: 315962 - DNA, 511 bp, Homo sapiens
ccattgcttccattgccaccttaccctctctgctggctgccgcacatcttcccaatgcatgaatcttctctctgctccccacctccayactgtttctatttctttcactatagtgcttttatttcttttgtatcctatattgcagttccggtgcctcatctgactgtttgacctgaaagcctaaaaaggattttaaaatattatgtcttaaaatcgggaagttcccacatgaaagtaaaaagaaagaaaaaaagagccaacaaaatattgctgaattggcatagttgctatggaattttatatgtttgtttatatgtgaaatgaagatataaactgttgaaacaaagaatgacataaaggctacactgggcagtggatttcactttcaaaacatatataactaaatccataaattatttaaaatactgatgagaaaacaaaacaacataatttcttaagtcatatttttatattcgttttcaagtagaaaattattgaaataataaagcct

SEQ ID NO: 315963 - DNA, 538 bp, Homo sapiens
ttggtctttagtatcaatttctcctatttctgtgtaaaaaaataaatatgggggaagaaatgagtaagaaggaagaactgtgaggaaatttactgcagaactactgaattaagaatattattgccgtagcctaaaactcttctaaacaaygtgaccaccattgaggacaattgttcattcacaatgagaagaaatccagacatccagatgagaagcagtttctctctctctctctctctctctctctcactttctttctctctctctcctcacacacattcaagtcttgggaaattatcttttactctactgaaacctttaatgaacattttgttactatgcaattttgtcaggcatatatgtaagtagagtctccagatcagtcagattaaagtgggggcagaagaaacaaaataacttcagaagaggacaggaatttctgtgcctaatagaatagtgatatcttccatatattcatattcccaaagggaaccatggggtcatgatttataaagtatgaaagaattcgaagtgattt

SEQ ID NO: 315964 - DNA, 620 bp, Homo sapiens
atgaatatctagaaaatcataacttcatgcagaggttttctaacagttaacatattgaaataatatccctcctcaaggatagaacatatattttagacatacctatatgtaggaaaatttatttcatatagggatgttcaagtcaactgagaaaagtaaaaaaaaaactaagtaggagacagaaaaagaagttcattaatgtgcgtatatatcagtgcatgttttatatgacccaattacctgtctcattcctttctcttatctcttatgttttcccacagagtaatttataygtaattatggtttggaaaactgggacagagtctgtgaaagtcttaacacttgaagttttataatgttctgtttcaacttaaagttcagagagacattcttaacccaagtctgtctcttaaaaactctggttccaggataactggactataagaaagagcacgtatgagagatgcaaagaactgggaagtagcctaaatttagagattgaagacacaggattgggattatttccttcttcacagccaataatcaatcatatcctgagtattttataataaaaagagaattccaaaactactatttcctgtagtttcagaggcagcaag

SEQ ID NO: 315965 - DNA, 528 bp, Homo sapiens
gaaaaatgactagtaggtaatgtgtgaatttttaattaggtggcttctgccatccctaagactttataraagaaaattgaagtaaaataattttaatgaagaaaataatgtttttcttagaggcctatgatttattcctcctccactatctctctatggctctttttcacccctgcagttaattagaagtactccaaatttaattgccttttcaaaaattgtgcaactcatcactttgcctgtttttagtcctgaaccctaacttctctgtacttattatcattgatgacctctttgaccattctgtgtagttctctttccatgtgctggtttgaggtcactatcatttgacctctcacagggcctttcacccagttaagtaaaaatttacaactagttggtgagcctcaatcccttactgctaattagccttgctcttagtctgtgttggcatgccttgccatgtctgtagtactaattatgaaatgaagggatgcaatgtatagatggagtcattttaaaatttga

SEQ ID NO: 315966 - DNA, 578 bp, Homo sapiens
actagtaggtaatgtgtgaatttttaattaggtggcttctgccatccctaagactttatagaagaaaattgaagtaaaataattttaatgaagaaaataatgtttttcttagaggcctatgatttattcctcctccactatctctctatggctctttttcacccctgcagttaattagaagtactccaaatttaattgccttttcaaaaattgtgcaactcatcactttgcctgwttttagtcctgaaccctaacttctctgtacttattatcattgatgacctctttgaccattctgtgtagttctctttccatgtgctggtttgaggtcactatcatttgacctctcacagggcctttcacccagttaagtaaaaatttacaactagttggtgagcctcaatcccttactgctaattagccttgctcttagtctgtgttggcatgccttgccatgtctgtagtactaattatgaaatgaagggatgcaatgtatagatggagtcattttaaaatttgactttacatcagatatccaagtcattattcttgaggcaggtaagtcatgtctccttgtc

SEQ ID NO: 315967 - DNA, 493 bp, Homo sapiens
ttgtgttatcagctgcggggctttaatcttgagtactcatcagyttcttccttttttatttgctcttctccctgccctacacacccttcttgatagcatctgctattttcactatctccatgtgattagcttgctgtcccacagtgttcagctcactatgtattccaaatgattccaatttgcttttgattttaaattaaaattaaaacagctgttttcaaatgaacacctcctatatcccagggtttgtgcttgaacctgttggatatttagaaaaatatatagattctcctcccattactgaatacaaagcataaaggcaagagaaaatcctcttccttttttaactctaaagacttcacttggactgaagagcttaaattcttgaaactccctctgtcccatttttacagtgattgtaggccaatatcttatgcaagagtttcatcatacctcggggctaacttaaggaaataaaaaaatatatatcatg

SEQ ID NO: 315968 - DNA, 475 bp, Homo sapiens
aattttagttttaatggctaacacttgagtttagttagattttggggaaaattcgagcatattatattgaaattgttgaggtctgaagatatttatgtaagttcaatattttatgatagaataataaagctaaagggaagatattacctcaatggatatcacagccacaatgttaattaatagcatagtttttggactttggtgctcagttttaataagaaattagattattattgttctatcttacctttaaygcaaactttgatctccatatttctggtgggattttgcaaacttaaaagaataaactatctttacgcaagcttaccatagtttcgtctttcagtaaaataaattctgtataatcctgtctcagtttgaagttctaaatctctgggagctgatggaagcctgtatatataatcagaaatgaagtataaaaccagaaaagtaatgagcatgtattgtgtgtgca

SEQ ID NO: 315969 - DNA, 630 bp, Homo sapiens
gctaaaaaggattctgttctctgcaacaaagcttgaaagatataggagtacctttaactaaatttcctattctcctcttctcaaatctgtctcattttagtaacatgagcacagaagctattaaataataatttttaatactgactcccacatgtagatttatgagggtaagtctcaatgatttcctagattttgtctttcttttacagttgtatcatttggctttctctctgtgttagaattatgggatstaaatcattacctctaatttattggccatatttatttccagaacaccccttggattccaaaatccacagatgctcaagtctcatttttatttttaattttttaaatttgccgcttttccttgtttgttcttatccatagcaatctgacttgaggatacattatggagagtgtatatgttttaacatttcaaataattgtagtttaacctgtcaaataatttttaatctttcttcattttcgggtactacacatcgtttattaacctacaactcttttactgaacctttggtatccgtggatataaaacttaccttgtcatttctttgcttgttgcccacgttctttgttctatttctgaccatcttaatttccaaggta

SEQ ID NO: 315970 - DNA, 505 bp, Homo sapiens
gtgcaagtaaaaaagaaatataaattagtccaaaagtcaagggacagcttttctgagaaaatgaagggtgaatataggttacctaagttgaggagagagtgggaattgtttcaggwaatcactacacaaagtccccatgggggttgggacctattgtactggagcacagcggtagtttacagcaagaagaaaaacagtgagagatgagtctagataggtaagcaggaatcagaccacgcaagaccttataggccataggaagaatgtagttgctgtcttaagaacaattggaaattattgacgaacattaaccatggaagtgacataattaaaattatgtttgaaaaggacactctggtgtgtacttctggaaagtagatgaaaggactaagagttaatgcttggcaagcaagaggtgattgcagtagtataaaatataactgagtttctcaagtatatttatgccatccttattcccaatcaatgttcatgcctctggatgaag

SEQ ID NO: 315971 - DNA, 505 bp, Homo sapiens
gtgcaagtaaaaaagaaatataaattagtccaaaagtcaagggacagcttttctgagaaaatgaagggtgaatataggttacctaagttgaggagagagtgggaattgtttcaggtaatcactacacaaagtccccatgggggttgggacctattgtactggagcacagcggtagtttacagcaagaagaaaaacagtgagagatgagtctagataggtaagcaggaatcagaccacgcaagaccttataggccataggaagaatgtagttgytgtcttaagaacaattggaaattattgacgaacattaaccatggaagtgacataattaaaattatgtttgaaaaggacactctggtgtgtacttctggaaagtagatgaaaggactaagagttaatgcttggcaagcaagaggtgattgcagtagtataaaatataactgagtttctcaagtatatttatgccatccttattcccaatcaatgttcatgcctctggatgaag

SEQ ID NO: 315972 - DNA, 521 bp, Homo sapiens
ggggctcaagtgatcctctcagctcagcctccagagtagctgggactacaggcttgtgccaccatgcctggctaattttttgtatttttttttttttgtggagtcagagtctcactttgttgcccaggctagggggaccaaatttyaacatgagatttggaggggaaaaatatccaaactatatcagcagtatgttgtcttatgaagtaatgctatttatgataagttacaatacattctcatttagctatattcaatgcagtttcttgaaggttaacttccaaaagaagtgtctcatcatttaaaaaagaaactgctaaagtgcataaaatgttcatggcaatttctgtatgaagtccatagaatattatgatctttacttaaacatgtgttgcttagctacacaattttcagttttgctatccatttataaaaaatataattttgatttttaaaattggttatgtttgcattttacatatttattaacctactcatgttcaccaaattgcttatctgac

SEQ ID NO: 315973 - DNA, 564 bp, Homo sapiens
gttttcattgtagacatcttcccttcttggttaagttaattgcctagtattttatttcattcgtagctgttgtagatgggattactttcttgatttcttttccaatttgcttgctattggcatatagtaatgctactgatttttgtatattgattttgtatcctgcaacgttaccaaatttgtttattggttctaatagtattttggtgaagtcttcaggtttttccaaatataatatcttatcatctgcaaacaaggataatttgacttcttcttttccaatttggataccctttatatctttctcttgtctgaattgctttagctaggaattccagtactatgttgaataacagtggtgaaagtgggcatccttgcattccayatcttagaggaaagactttcaacctttcctcatccaatatgatagcagctaaaagtctatcacatatggcttttattatgttgattgatgttctttcataccaaaatttttaatgtttttatcatgaagtgatgctgaattcaagcaaatgatttttcaacatcaattgaaatgatcat

SEQ ID NO: 315974 - DNA, 568 bp, Homo sapiens
ctaactgccattggaatatggataatgactgatcttagctactttctgctgacagggggcattgttttggagagaatgacattcagatttcttccagaggtctacctaagggtccctggcaaaagagagccatcatctgaggctccagttgtctgactgtttggagtttgatggcctctaggcaagaagaaacaagctttacaaggttaagtawgcatggattaaatatgtgtattgcacaacaaggggttaaaaagagagaatctagtaccaaagattacagaaagaagaaatgaaataggataaacattctgaaaatgacatagaacagaacaaaggtaagaacagcaagcatagagaagactataaagaggaaactcatgggaggttaattattaatacttaccttttatgttttttagcttgaggtccctgatctcttcacattggtactttgggagttcttctgggttgacggaggtaactgtcagcttcccaggcctttattcagttacaataaatccaagaatctattacagtgactttcactgccataagagtagaagga

SEQ ID NO: 315975 - DNA, 559 bp, Homo sapiens
aaactccactcactcagacctgctgcattacacccctcacaggagggagcacacaggggagtgggtgcagtagctggagctagtgctttttggcactggcaagagtgaactccatgcaggccatatggtagcatccaggcagggtgccggagacttctgaagccccagggcacatgttacagtgctcttttagctccgctgtctgcagagggcttaagtgttaacagctcagtgggcccttcgccctttcacatgaggcagctgcccttggccagtgagagcaaagggccagtgtgacagcaatttgtatccacacttgtggttctcaagcatccaggaacaatgaggtcacaygaacaaattgaaggatggtaaatgcagaggatgttgttgccgatgaaagtggctctcagcaggaagaggatctaaaaaggggattgggtgggtaggtaattttcctttggagttcagccatctccagccagactcttcgccaaagttacactgtcaaactgtccctctaaagtcaaactgcttctcttcaacatccagccgtagt

SEQ ID NO: 315976 - DNA, 574 bp, Homo sapiens
cattcttttctgcccagaatttctttgcccccgaccttatcacttcgaggtgattggatcatgggggtgaatctctcaggaatggcttgggccatccccttggtgataagtgagctcttactcctagctcacacaagatttggtggtttaaaaatgtgtggcayctccccacccattctctctctttttctctctcttttgcttgctcatgcttcctctatatgaagtgcctgctcctgctttgtcttccaacttgattgtaagcttcctgaggcctccctacaacctgatgccagaaccatgagccaattaaatctctcttttaaaataaattactcactgtcaggtatttctttatagcaaggcaagaaaggcctaataaaataatgttaataatctgagtcacccaagttttttttttggtaaattgtttacaaagaccacatagttgtgcaaagtaataattcagtgttttttacactataatcccatagtgtctgtttaaacatcagaccatcccttaaactagtcttgtgaaagtctttttttgtagccatttcagtagttgttcata

SEQ ID NO: 315977 - DNA, 451 bp, Homo sapiens
catgtgtgttcaacgtatagctcccacttataactgagaatatgtagcacttggctttttgtttctgcattaattcgcttaggattattatttcygactccacctacaatgctgcaaagaacattatttcattctttttggctgcatagtatttcatggttcatatgaactacattttatttatccaacccactatttatgtgcacctaggttggttccatatctttgctattgtgaatagtgtggcaattaacatacaagtgcatgtgtgtttttggtataatgatttatatgatttatagttctttgagtatatacccaatagtgtgacattactgggtcaaatgatagctgtgttttaagttttttttcttttttgagaaaaccccaaactgctttctacagtggctaaactaatttacattcctgccaatagtgtataagtacaccc

SEQ ID NO: 315978 - DNA, 580 bp, Homo sapiens
ttaggtgtgtctgagctcagattctccttgggtgggccttactgtgtctgctgtggaggttggggtttgtggtctctggtcaatgaagttatgttcccaaaaggattatggttgcctctgctgtgtcatgcagttcaccaaaaaagtgtgggaaagccagcagttaacaagcctcacccagctgccatgcaacccaaaaggctgttctcactcccaccgtaccccacccctaactgcactgcgtttgtttccagggagtggtcaagcacagctttgagcttctatgtctccctgcctgcccctgtctgcacaccagattcactccctccccatagttctgtcgaagaaacttcatgttcagttggaatgcttaccaagtttagctggagccttccttctgcctgtggcctttttccaattcctctggcacctctccctaaggacccctgtgaaacaaagtcagaaatgccttccttggggatcaagagagcccacaggactcttcccaccgctttctctaatcctatattttgttttrctctctaaattatctcagctctaggtaaggtcaaattcttct

SEQ ID NO: 315979 - DNA, 515 bp, Homo sapiens
aaccatataatgtcttttatcatataaaattatctttttttataaattttctctccaaaaatgcattttcatatacattactttcctcacatctctctcccctacttactagttccttactactatgtttcataaataaccttttaaagtctataatttaaattaactttaatataacttctgaattagataacataattctttgtcccactaataacacatctttaggtatattttatatatataactatatattaactataattcttatccttggtaaccttaaattttagtgaaaaccaaggaagtaagatttagtgaaaaccaagaaagcaagaaatcctaagctgcctatcagrtattagcattttatgaatgtgaagaattccacattttttagaacatgtttctaaccttttctgaattagaaatgatgtaaccatttgataaaaatattttaaattgcacaaaaacttcacctacagcacttatacattcatattttaagagtttat

SEQ ID NO: 315980 - DNA, 515 bp, Homo sapiens
aaccatataatgtcttttatcatataaaattatctttttttataaattttctctccaaaaatgcattttcatatacattactttcctcacatctctctcccctacttactagttccttactactatgtttcataaataaccttttaaagtctataatttaaattaactttaatataacttctgaattagataacataattctttgtcccactaataacacatctttaggtatattttatatatataactatatattaactataattcttatccttggtaaccttaaattttagtgaaaaccaaggaagtaagatttagtgaaaaccaagaaagcaagaaatcctaagctgcctatcaggtattagcattttatgaatgtgaagaattccacattttttagaacatgtttctaaccttttctgaattagaaatgatgtaaccatttgataaaaatattttaaattrcacaaaaacttcacctacagcacttatacattcatattttaagagtttat

SEQ ID NO: 315981 - DNA, 605 bp, Homo sapiens
aacagtgtaagcttaagactgggrcctggtctggtggctaatgagcaatgctaatttcaagtgcaataagtcctcacttaatggcatcagtaggttcttggaaactatgactttaagcaaaatgatgcccaacaagacccatttgttttccttatccaatgttatggtgaagcattgaatgaaagagcattatttgagtacctgtgatataatatgttgtttcacttaaattagcagttttgaagaacctatagaaaacgttaagggaggacttgctatatctgaagggtgactacaagagaggggttagatttgttctgtttggagctggaagatggaacaaagaccatggaggttagcaagaggagatttcaaaatccagcaaaaaaattaccaaaaactttacatagccttcacatttcacataaccttccctgtgaacaccattcccatttcagaaaaggaaactaaaactttgagtaaatctgtcacttacagataatgtagtataacatttggctaaaatccttgtgtcaggcccatgggaagcatggtttaagaaggagtttagtgagacaaactagagccccattactgtggttgac

SEQ ID NO: 315982 - DNA, 588 bp, Homo sapiens
gctttgaattcctggtcagactgctggagacacataggaggctgcaaggataaagtaaggaaaagtaagccagcaaggcagcatttctgtaagggaagagcagacggggaaggggaatggcaggtactgagtcaaccagttttctggatccaacttcacctktcccattactctgcaggcaggaccatggtttttcctctttcagccaagtactaactctggcttctcaggggagtcttatttatagacctagaataagttgattacagggctccatgggatctttaaaacttttactacaaggttaacaagcctaatgacgacttttgtgctctgtttctggagagataaaagggaagaagcttaaaggctgttcttttcccctttatttcttcccctcctctcttttcctaatttactttccttttctccctattttttttctctttttctgtctcttcttatgattttctctttgttaagtacatagatttcctaggtacttgtttctctctcttttttttttcctattactcttttcccagccgtcacacttgtggttggttaattatctgactgctgaataaa

SEQ ID NO: 315983 - DNA, 658 bp, Homo sapiens
ctggaatggctatatcattattggacaaaatagattttaaatattagagaaaaagccatttcataataaaaggtccaatgtatgaggaagatacaagagttaaaatagacatgcacataacaaaaaggccccaagtatattaatctaaaacagaattgaaaggagtaggcaattcaacaattagagatggagatttcaataccacatttacaatatttgaaaaaacagatgaaaagtcagccacaaaatagaagasttgaataaccttaccaatcaatgttacataactgatatttatagaacataccaacccaaaagagaagattatgtattcttttcaagagcacttaaaacattttctagtctgggcacagtggctcatacctgtaatcccagcactttgggaggccgaggtggttggatcaccagaggtcagaagtttgagaccagcccggccaacatgatgaaaccttgtttgtactaaaaatacaaaaattaacctggtgtggcagcaggcgcctgtaatcccagctactcggcaggctgaggcgggaaaatcactcaaacccgggaggtggaggttgtagtgagccgagatggtgccactgcactccagcctgggcaatggagcaagactccatctaaaaaaaaattccaa

SEQ ID NO: 315984 - DNA, 575 bp, Homo sapiens
ccagcctatatcacactgcctttgccacatcccaatgaaattatcacaaaacacaagacaaattgaatcatcaaaaatcagtagcaccgtaggggtgcaggggatgaggttattaattcctgctgaagggattgggataagctgtgtgaatgtaaaccaggcttcattgtagagatcatgctcgaatagctgggtgccacagcagaagcccctcgaggtggaggacctagcagtaagtgctgtttgagaaaaggaagggcaagagagaaacctggaaggggagtccatggggtcagggtgtagagaacactaaatacccagaayttccagtgggggcttgtcactggattcttgaagatggccaagaaacattgaagggagaaaattacctgagagcagagaggcagtcacagggaagatgatacaaacaccttaaagagccaggttagaactaacgcaacccaagccatctccatctggccagatctcttttggatacaatcattaacactggagggatggaggggtggaggggtggaggggagctctccaaggaactgtcagcaccagagagt

SEQ ID NO: 315985 - DNA, 670 bp, Homo sapiens
aatagtttgttctggtttactgctgagtactgctccatcatgtagaggtaccatagtttctttattcattcatcctttaaaggatgtttggattggttccagtcattgatgattatgaatagagcttttgcaaacattcatgtgcaggtttttgtataaacctcaatgttcaatgccctagggtaaacctccaggactgggtcatatggagatacacgtttaactttataagcaactgctaaactacttctagagaggctgtgctcttttccattcccaccagtaatgtatgagagttccagtggctctggattcttggtagcatttggtatcatccatattttttattttaaacattgtaataagtgtgtagtgggatatcactgtgcctttaatttgtatttctcaaatgcctaatgatgttgaacagttttttcatgtacttrtcatctatttggtacagtatgcgttaagtcttttgcccattttaaaatggggatttctgttttcttacaattgagttttaagggttctttattttgggtcatgtactttggtggatacatgagccacaaatattttctcccaggctgtagcttgtcttttcattctttcagcagcgtctttttaagagctttaattttaatattgtataatttacaatttttct

SEQ ID NO: 315986 - DNA, 546 bp, Homo sapiens
atattaacatgttgaaagaaaggtgttagttaaaaagggctggtgaaaagtggaatcataggaagagaagactcatgggacaacacggtcagtgcccatctgagttttgtccaggagaggcatgaactttgaatctcagggtcccattggctggatcacctatctccaggtagtagatagatgcatgaggccaccttaatctgattccattaaaaattcaattatttcacctctctttgttctggtttcataattaccaggcaaatttccttataagcaattttcttttaattatgaaagcaagaactagcgggtaacaatgggaaattaaacacatgcatctcattttgcttccttatgaaactctactaaattcacagtaaagggatttttcagaaaggcataaagaagaacaagaatgagtgaggagaaaayagaaacaaaaatttgaaggtggaaagcatgtagattaatactctattaccaagcacagggaaccagaatactacggaggcagtgagaaaatggaaagcagctagctttatg

SEQ ID NO: 315987 - DNA, 526 bp, Homo sapiens
cattcttggacccccaataacttgcagtgtctaccccgactggcaagtgcatctccttaccccttgtcttgggctttggctctgtgacttactttggcctggtggaatgtgggcagaagtgatgcatgcagaggctagagatgtgctcctgcagttgggcttgccctcttatgcttctgccatgataaaagatgcctggatagcataggcactggagagatgtgtggaccaggacctcccctgcagccctattgccttgcttccctcaggagagacatcctaataacacacaaaaaacaagtgcttcttataggctttggggtattctgttaaacagcattttgtggtaacagctaattgatacctaacgctgatacctagattcctgccctttaagactttttctatagaagcatgtctgatttctccatatagggatcatactatcatactatgctgttttgtaatttttgacttaacgtrtcacctcttcttcatgtaactatgcattcttcttattgttctt

SEQ ID NO: 315988 - DNA, 609 bp, Homo sapiens
acctcttcttcatgtaactatgcattcttcttattgttctttcttctttcttcttccttcttcttttttcttctttttaaatggagtctcatgctgttgccctggctggaaagcagtggtgcgatctcagctcactgcaagctccgactcccgggttcaagttattctcctgcctcagccycccaagtagctggaattacaggtgtctgctaccatgcctggctaatttttgtatttttggtagaggtgggtttcaccatattagccaggctggtctagaatgcctggccttaagtgatctgcctgacttggcctcccaaagtgctgggattacaggggtaagccaccatgcctggcctctttgtgttcttctatagcatattcttaaaaataattgtactgtttgctgtttaaataatcatctactggtcaacattacactttttctgtgttttttcatttcacaagtatttatgtgataaacattgtcatacaaaatttttttatagattcatggttatattaaattccaaggtatgtgatcaagtaataaggcttttatagttattgtcaaatttattagaattctatataaatgcccattttcca

SEQ ID NO: 315989 - DNA, 609 bp, Homo sapiens
acctcttcttcatgtaactatgcattcttcttattgttctttcttctttcttcttccttcttcttttttcttctttttaaatggagtctcatgctgttgccctggctggaaagcagtggtgcgatctcagctcactgcaagctccgactcccgggttcaagttattctcctgcctcagcctcccragtagctggaattacaggtgtctgctaccatgcctggctaatttttgtatttttggtagaggtgggtttcaccatattagccaggctggtctagaatgcctggccttaagtgatctgcctgacttggcctcccaaagtgctgggattacaggggtaagccaccatgcctggcctctttgtgttcttctatagcatattcttaaaaataattgtactgtttgctgtttaaataatcatctactggtcaacattacactttttctgtgttttttcatttcacaagtatttatgtgataaacattgtcatacaaaatttttttatagattcatggttatattaaattccaaggtatgtgatcaagtaataaggcttttatagttattgtcaaatttattagaattctatataaatgcccattttcca

SEQ ID NO: 315990 - DNA, 609 bp, Homo sapiens
acctcttcttcatgtaactatgcattcttcttattgttctttcttctttcttcttccttcttcttttttcttctttttaaatggagtctcatgctgttgccctggctggaaagcagtggtgcgatctcagctcactgcaagctccgactcccgggttcaagttattctcctgcctcagcctcccaagtagctggaattacaggtgtctgctaccatgcctggctaatttttgtatttttggtagaggtgggtttcaccatattagccaggctggtctagaatgcctggccttaagtgatctgcctgacttggcctcccaaagtgctgggattacaggggtaagccaccatgcctggcctctttgtgttcttctatagcatattcttaaaaataattgtactgtttgctgtttaaataatcatctactggtcaacattacactttttctgtkttttttcatttcacaagtatttatgtgataaacattgtcatacaaaatttttttatagattcatggttatattaaattccaaggtatgtgatcaagtaataaggcttttatagttattgtcaaatttattagaattctatataaatgcccattttcca

SEQ ID NO: 315991 - DNA, 599 bp, Homo sapiens
tcctcattgctctagtctttcagatatgcctgccaatggcagtgctgggagcgaggactggaggcgtgcacggggtgacctctcagatccttctctccgtttctcacccagactcccctcctgcccacctgcattgattctggagttccatgttgcttctccatgagagtctgtgggtggacggcctttattagaaggggatgatatgtgatataaaaatcacacacatraaatcaattttgcaggggcctagaaaaagccataaatgacaggtccatagatagttattttaaaaaatccaggttaaatattcacaaggctgagtggctcagtggtctcaaagcctgctcctgtctgattctatgaggctatctcactatttaacaaatatatacctgactgaaattctcaatagaccaggaatcaaggatttaatgagaaaggaccaaagccatctgaaggcatcagaaaagacagagatgttcttagagtctgattgggctggtgttccctgcctctacctgacaggcttgccttcaaattaattaaaaagtcaaatttgactgtcatcccagtatctggtgaaggaacaagctgtc

SEQ ID NO: 315992 - DNA, 558 bp, Homo sapiens
gcaaaggtcagaaagacacagttcaaaaaaaaaccagaaatagcacagtcaaaacagacattagagaaatatttgatatcagttttaatgaaagatatgtaaattttgaaggaatataatttatcatcaatcatattgtacgtattaaatgcacattcagaaatatgtaaattacttttaggctctgctttatgctatctggacacactggtgaatgagtgatcatttatcagtttatgtttattctactggatggatttaaccaataagtcttttgtttccttttagcttttttaactgatacattaataatcgtacatatttattaggtacatgggatattttgatacctgcatacaatatacaacaatcaaatwagagtaattaggatatccatcacctgaaacacttatcatttctttgtgctggtaatattccaaatcttctcttctagctattttgaaatatacagtaagttattgttaactatcatcaccccactgtgctagcaaacactacaatttattccttctgtttttgtacccattagccaatacc

SEQ ID NO: 315993 - DNA, 558 bp, Homo sapiens
gcaaaggtcagaaagacacagttcaaaaaaaaaccagaaatagcacagtcaaaacagacattagagaaatatttgatatcagttttaatgaaagatatgtaaattttgaaggaatataatttatcatcaatcatattgtacgtattaaatgcacattcagaaatatgtaaattacttttaggctctgctttatgctatctggacacactggtgaatgagtgatcatttatcagtttatgtttattctactggatggatttaaccaataagtcttttgtttccttttagcttttttaactgatacattaataatcgtacatatttattaggtacatgggatattttgatacctgcatacaatatacaacaatcaaattagagtaattaggatatccatcacctgaaacacttatcatttctttgtgctggtaatattccaaatcttctcttctagctattttgaaatatacagtaagttattgttaactatmatcaccccactgtgctagcaaacactacaatttattccttctgtttttgtacccattagccaatacc

SEQ ID NO: 315994 - DNA, 558 bp, Homo sapiens
gcaaaggtcagaaagacacagttcaaaaaaaaaccagaaatagcacagtcaaaacagacattagagaaatatttgatatcagttttaatgaaagatatgtaaattttgaaggaatataatttatcatcaatcatattgtacgtattaaatgcacattcagaaatatgtaaattacttttaggctctgctttatgctatctggacacactggtgaatgagtgatcatttatcagtttatgtttattctactggatggatttaaccaataagtcttttgtttccttttagcttttttaactgatacattaataatcgtacatatttattaggtacatgggatattttgatacctgcatacaatatacaacaatcaaattagagtaattaggatatccatcacctgaaacacttatcatttctttgtgctggtaatattccaaatcttctcttctagctattttgaaatatacagtaagttattgttaactatcatcaccccactgtgctagcaaacacyacaatttattccttctgtttttgtacccattagccaatacc

SEQ ID NO: 315995 - DNA, 539 bp, Homo sapiens
cagatacaaaaattctatgatggaggtgggtgtggtaaccttgccaaaataagaatggctacagtgctgcaggccaccaccatgtgccaggcactgtactccaggttctagggtcaaaataccctttcatcttcatgtcatccctgggatataagcatcaatgtcaccatttcatttatgtatgaggaaagagaggctcagagcgtttgagcactgtgcccaacacaacacagctatacaaaggactaayatttggcctctgatctgcctgtttccaaagccctggggttagttgctgtgataaaccaacctgcaggtaaccatataggcagttaccctgctttcctgatatcagttgtaaaacaatcctctctcacccaccctccttacgcctgtcccatgacaaagtgccttcgtaggcattatctcatctgataactgcctgacaaggtggtcaggaaatcaagtaagagccatgaataatttttaaaaatttttaatcaaaggaattgttattaataatgtttggagaaaggaga

SEQ ID NO: 315996 - DNA, 601 bp, Homo sapiens
ctgggcttactttcatctataagttgatttgggagtaggatagaggaactctacttttccttttatatctgattctctttattgctgttgctcttccaggatattccaataatttacagtcaagaggcagatacaaaaattctatgatggaggtgggtgtggtaaccttgccaaaataagaatggctacagtgctgcaggccaccaccatgtgccaggcactgtactccaggttctagggtcaaaataccctttcatcttcatgtcatccctgggatataagcatcaatgtcaccatttcatttatgtatgaggaaagagaggctcagagcgtttgagcactgtgcccaacacaacacagctatacaaaggactaatatttggcctctgatctgcctgtttccaaagccctggggttagttgctgtgataaaccaacctgcaggtaaccrtataggcagttaccctgctttcctgatatcagttgtaaaacaatcctctctcacccaccctccttacgcctgtcccatgacaaagtgccttcgtaggcattatctcatctgataactgcctgacaaggtggtcaggaaatcaagtaagagc

SEQ ID NO: 315997 - DNA, 605 bp, Homo sapiens
ccaagagaagtgaaaaaatatgaccacaaaatgtcttgtacaagaatgttcataacagctttattcatgacagtcaaaaacaacaaaaagtgtatcagcaatggaaaaaaccaattataatatattcaaaaatcgaatgttttttctattagcaactactcagcaataaaggaacagaggatatgggaatcaaaagtagaggaataactactgatataacaatgacataaaaaggttctcagaaatagtatcttcaatgaaagaagccagacacaaagaagcccacactgtattatttcatttttgtgaagtccargaataaggaaaactaatctatagtgagaggaatctgaacagtgtagtccatggaggtgaagattgactggaatagggcaaaaggaaactttctaggaggatggagatattcttgattgggagcttgctaacatgggtgtctacatttctcaaaactcatcaaattctccatttaatatattctcctgtgtgtaaattttaataaaataaaataaatttcaataaaataatacttttactatagttttaatgaagtttagagagtaaatgaaaataataaatccaaacca

SEQ ID NO: 315998 - DNA, 497 bp, Homo sapiens
ctcctcaatctcctcttctagaaccatttctaaatgtgaaaactgggctttaggctcactgaatttccatatttctctatatgatcacattctcacgattattctgtgctttgcacatgcacatcccactatgtggcatcagcccaaacacaaactttcttgcacatttgtgtcatcttctctgcatcctttccttttggaaactgctttctcctcaytttgtgtgatttgggttaggaaccctgaaagtgatacaaccagtcattatattcatcatgagcttgaattaaagcaagactttaaatctgaaattttggagatagagaaataaggtgaaggaaaccccaagaagcaattagacatctactcaaaacataagacactctatagaacaagtgactaggtttttacaagaagccaatgacatttttaaaaggtcattggctttaaaaggaactgtctaggttaaaaaagacctaagaaacataacaaccaaa

SEQ ID NO: 315999 - DNA, 593 bp, Homo sapiens
ctgcctactacatagaactactctttcaaaataaattcagagattagctactaatggctgtcacaaatatgatttggcaacttatttctggttctaaactctcaaaaatagaatattcctgatacaggaataaatctgaaacattccatgacaacagaaactttcttcacctgtctgtaagatctttccatgtctgcttcatagacaggtgggagaaaaaataactagtcaaaacacaatttttttttctttttargcaaggtctcactctgtcaccccagctggagtgcagtggtgcaatcatggcttactgcagcctcaacctcccaggcccaggcaatcctctaacctcagacccgcaagaagctgtgaccacaggcatgggctaccacacctggataattttgtttataaaatacaaaaatattaatggccaaagaaacaatgagatacattcaggccaagatgtgaatacagacctctttggttttctccaacaatagtctcacactgacagaggaaagtagttcaacaaagtaaacaaaatggtacaaccaaaccatgccctttagaatggaaatgccatcactaca

SEQ ID NO: 316000 - DNA, 593 bp, Homo sapiens
ctgcctactacatagaactactctttcaaaataaattcagagattagctactaatggctgtcacaaatatgatttggcaacttatttctggttctaaactctcaaaaatagaatattcctgatacaggaataaatctgaaacattccatgacaacagaaactttcttcacctgtctgtaagatctttccatgtctgcttcatagacaggtgggagaaaaaataactagtcaaaacacaatttttttttctttttaggcaaggtctcactctgtcaccccagctggagtgcagtggtgcaatcatggcttactgcagcctcaacctcccaggcccaggcaatcctcyaacctcagacccgcaagaagctgtgaccacaggcatgggctaccacacctggataattttgtttataaaatacaaaaatattaatggccaaagaaacaatgagatacattcaggccaagatgtgaatacagacctctttggttttctccaacaatagtctcacactgacagaggaaagtagttcaacaaagtaaacaaaatggtacaaccaaaccatgccctttagaatggaaatgccatcactaca

SEQ ID NO: 316001 - DNA, 605 bp, Homo sapiens
ccaagagaagtgaaaaaatatgaccacaaaatgtcttgtacaagaatgttcataacagctttattcatgacagtcaaaaacaacaaaaastgtatcagcaatggaaaaaaccaattataatatattcaaaaatcgaatgttttttctattagcaactactcagcaataaaggaacagaggatatgggaatcaaaagtagaggaataactactgatataacaatgacataaaaaggttctcagaaatagtatcttcaatgaaagaagccagacacaaagaagcccacactgtattatttcatttttgtgaagtccaggaataaggaaaactaatctatagtgagaggaatctgaacagtgtagtccatggaggtgaagattgactggaatagggcaaaaggaaactttctaggaggatggagatattcttgattgggagcttgctaacatgggtgtctacatttctcaaaactcatcaaattctccatttaatatattctcctgtgtgtaaattttaataaaataaaataaatttcaataaaataatacttttactatagttttaatgaagtttagagagtaaatgaaaataataaatccaaacca

SEQ ID NO: 316002 - DNA, 537 bp, Homo sapiens
ccaactggttaacattgtttggaccaaaagatactgaatataaaaatggagatttcctaataaattacactagtgtttagggggataaaagaataacttattggaatgcttagagtccaaagagtagtcttaaggtatttggggtaagagtggaaagaagtttaaagactagaatatgtgatttgttttgttatcatactaaacttagatgatgcaaactgtatcataacattggccagttatttggggtacagaagaactatgttccaaattcatggacatacatattcctgaagccagatggaaatcaaagaaatgcataatgacactgagccatcacgaagcctatgtgtgtttatcctaatctatacatattaygtaaaaacaattcaaagtgtatgctcttgccagtgtcatctctatgttcatgtgtttaacagatttacagttgacttcctgacaaagcttttgaaattgccccatgaggtgtgaatttataaacatgcgaatatgttctaagaaatcactggatataag

SEQ ID NO: 316003 - DNA, 535 bp, Homo sapiens
tctcaccattaggcagagcacaggaaatagaatccagctaagatgtgaaaacgatgttaacttcatcctgttgtctctaggtatactcgaggaagctctaccacatttctctggcatggatacatgcaaaagctaaagctataaatcttctttctatagaggagaaaaattcctctaaatgaaattcagaattaaaattttcctagttgtctgaataaaaatatattttacgaacactacttccttctgtttatatccatgtaaaactcygtataatatagtcaagagatcagttaccaccagaaaattatttttatatttaatattaaaaaataagtttacatttctatttgcttaaaaatgcaaagggaacaatagattaagctaggcttagagttttttgcttaaacttaggaaaaatttaaataagactatcaatattattttatcaaacacaaaaagagaatgagcaattgaagaaaagtggaagctggttttacaagaatcaggaaactctcatataatgagaactgat

SEQ ID NO: 316004 - DNA, 592 bp, Homo sapiens
catactagtgatcatttaagtgatcatcaacatagcaatcgtctagataagttcagcaatrttgttataaagagtcagccaagcagcagggcatcacataagagtcacattcttttgaaggaaaggcaagtgttttgatttctggatctcttattggatttacattaaggtccttgattttccaattttctataacatgaattgtcttgtctgatctgtgctgacatcgtttgctcattccaaggttatacaccactcgattgtgtcgaatgaaggtggaattgaagttgtatgcaggagaaaatcatttactaatgaacaaagaagttgaagaggttgtaagagaaaaaaatttcccatcaaaatctttactttgcccttttacttaaagagttggaggaaacagtcatgtcctgagggttgtccaatacctgatgaaagtaaagaaggtgaatatcaacattatccactaaggcccctgtgcatgtacttaaaacgctgttggtagaatttctgaatatctaaaatattccattcagcaatcactatatgtgaaaaaaagcagtcattgtatttatgttcaatattctgt

SEQ ID NO: 316005 - DNA, 616 bp, Homo sapiens
aactatcttaaccaagagtttaagcaaggacgatttttaacttttagatctactttagataagttgataattatttgcatatgttaaagtctattgttttgggaatagcttgagtggaaagaactcaaactcaccttgagttctgtggataaatgaagagacacatcaggatgaatttgaagtgtcatttcttccacttttcagcagtttatcagagacagcaggtcagagttagcttaaggaagcagagtcaattgctaaaccctggtctakgaatgccttaccagcaaggcctagccttccagaatacgaaaattctatggctgtatagttacatcaaaaatttctatgttacagtaggtagcaagtcaggcatgagcagggcaggaaagagcccccccaccacacccccaccaggaatgtcaggcgaccatcaggtgatggtcaggcagtttttaagctgtttctctaaaataaaaattggtcacagccagcaccagggaaaggcagtctcccaatagatagaaaaaaacctgaaacctctgattagcagcttcccgataaaatctcaggagttagttgagtgagctcaagcatgcccatgaagaggcaaaat

SEQ ID NO: 316006 - DNA, 616 bp, Homo sapiens
aactatcttaaccaagagtttaagcaaggacgatttttaacttttagatctactttagataagttgataattatttgcatatgttaaagtctattgttttgggaatagcttgagtggaaagaactcaaactcaccttgagttctgtggataaatgaagagacacatcaggatgaatttgaagtgtcatttcttccacttttcagcagtttatcagagacagcaggtcagagttagcttaaggaagcagagtcaattgctaaaccctggtctaggaatgccttaccagcaaggccyagccttccagaatacgaaaattctatggctgtatagttacatcaaaaatttctatgttacagtaggtagcaagtcaggcatgagcagggcaggaaagagcccccccaccacacccccaccaggaatgtcaggcgaccatcaggtgatggtcaggcagtttttaagctgtttctctaaaataaaaattggtcacagccagcaccagggaaaggcagtctcccaatagatagaaaaaaacctgaaacctctgattagcagcttcccgataaaatctcaggagttagttgagtgagctcaagcatgcccatgaagaggcaaaat

SEQ ID NO: 316007 - DNA, 563 bp, Homo sapiens
gtcatttcttccacttttcagcagtttatcagagacagcaggtcagagttagcttaaggaagcagagtcaattgctaaaccctggtctaggaatgccttaccagcaaggcctagccttccagaatacgaaaattctatggctgtatagttacatcaaaaatttctatgttacartaggtagcaagtcaggcatgagcagggcaggaaagagcccccccaccacacccccaccaggaatgtcaggcgaccatcaggtgatggtcaggcagtttttaagctgtttctctaaaataaaaattggtcacagccagcaccagggaaaggcagtctcccaatagatagaaaaaaacctgaaacctctgattagcagcttcccgataaaatctcaggagttagttgagtgagctcaagcatgcccatgaagaggcaaaatggcggagtttaactggtgtctgaccttcttctaggaatgctggattgttggggaagaatgcctcaagtgagcatgcatacaactccagtaaacacactgagcacgtgcccctccaagcgctggcaggcca

SEQ ID NO: 316008 - DNA, 563 bp, Homo sapiens
gtcatttcttccacttttcagcagtttatcagagacagcaggtcagagttagcttaaggaagcagagtcaattgctaaaccctggtctaggaatgccttaccagcaaggcctagccttccagaatacgaaaattctatggctgtatagttacatcaaaaatttctatgttacagtaggtagcaagtcaggcatgagcagggcaggaaagagcccccccaccacacccccaccaggaatgtcaggcgaccatcaggtgatggtcaggcagtttttaagctgtttctctaaaataaaaattggtcacagccagcaccagggaaaggcagtctcccaatagatagaaaaaaacctgaaacctctgattagcagcttcccgataaaatctcaggagttagttgagtgagctcaagcatgcccatgaagaggcaaaatggcrgagtttaactggtgtctgaccttcttctaggaatgctggattgttggggaagaatgcctcaagtgagcatgcatacaactccagtaaacacactgagcacgtgcccctccaagcgctggcaggcca

SEQ ID NO: 316009 - DNA, 541 bp, Homo sapiens
ctaatgtagattatgggttgatgggtgcagcaaaccaccatggcatgtgtataccgatgtaacaaacctgtatgttctgcacatgtayctcagaactggaagtataatcataataataaaaaagtccaaccacacacttgatcttgcaaggcactgcttggccctcttccaagtgtactttacttcctttcgttcctgccctaaaatttttaaataaactttcactcctgctttgaaacttacctccatctctcattctgccttatgctccttggtcaaattctttcttctgaggaggcaaaaattgaggttgctgtagactcatacagctttcccactgctaacatacttttgtgcactgctcacttccacaaagcaaactttggagtagaacctctttctccactggccactgaccacctgatatgcaaggtttaggcccagcctaacacctttcttcattaaataacatggtctcaaggaagtgtgtttacttcgctacacctctgctatttccccaatacctcttattttacatatt

SEQ ID NO: 316010 - DNA, 541 bp, Homo sapiens
ctaatgtagattatgggttgatgggtgcagcaaaccaccatggcatgtgtataccgatgtaacaaacctgtatgttctgcacatgtatstcagaactggaagtataatcataataataaaaaagtccaaccacacacttgatcttgcaaggcactgcttggccctcttccaagtgtactttacttcctttcgttcctgccctaaaatttttaaataaactttcactcctgctttgaaacttacctccatctctcattctgccttatgctccttggtcaaattctttcttctgaggaggcaaaaattgaggttgctgtagactcatacagctttcccactgctaacatacttttgtgcactgctcacttccacaaagcaaactttggagtagaacctctttctccactggccactgaccacctgatatgcaaggtttaggcccagcctaacacctttcttcattaaataacatggtctcaaggaagtgtgtttacttcgctacacctctgctatttccccaatacctcttattttacatatt

SEQ ID NO: 316011 - DNA, 541 bp, Homo sapiens
ctaatgtagattatgggttgatgggtgcagcaaaccaccatggcatgtgtataccgatgtaacaaacctgtatgttctgcacatgtatctcagaactggaagtataatcataataataaaaaagtccaaccacacacttgatcttgcaaggcactgcttggccctcttccaagtgtactttacttcctttcrttcctgccctaaaatttttaaataaactttcactcctgctttgaaacttacctccatctctcattctgccttatgctccttggtcaaattctttcttctgaggaggcaaaaattgaggttgctgtagactcatacagctttcccactgctaacatacttttgtgcactgctcacttccacaaagcaaactttggagtagaacctctttctccactggccactgaccacctgatatgcaaggtttaggcccagcctaacacctttcttcattaaataacatggtctcaaggaagtgtgtttacttcgctacacctctgctatttccccaatacctcttattttacatatt

SEQ ID NO: 316012 - DNA, 539 bp, Homo sapiens
aagtgtgtttacttcgctacacctctgctatttccccaatacctcttatttyacatatttatcttgtgtacagtttgtgtgtgtctgtgtgtgtgtgtgtgtgtgtgtattctctctgcagggcaaaatttaaccatttcttcatcctctgacgctaggctactgacatatgaaaacatcaatacttcaatgtaagtgtagacatgtttaatccaactctgcttaatcgcttataggctcttttcctcattgcttaaaagtggatctaaaacggcaagcgtcatgaattctcagaatgacactatagcaatttttgtttctgacattctctctcctctagagttcttcaataacctgagggatgttgatcgcaagctgttggaagtgaaaaacccatctgtaatgagagagaataaagaggaagaaaagagaaaagactttgatgattcctggattcagttttctccaaagttcgtttctctcctgcactttctgtttgttatttaagccaaagaggtgtgatgaaaatggggatatgc

SEQ ID NO: 316013 - DNA, 620 bp, Homo sapiens
ttctgacattctctctcctctagagttcttcaataacctgagggatgttgatcgcaagctgttggaagtgaaaaacccatctgtaatgagagagaataaagaggaagaaaagagaaaagactttgatgattcctggattcagttttctccaaagttcgtttctctcctgcactttctgtttgttatttaagccaaagaggtgtgatgaaaatggggatatgcaagaatgcttgagatgcgycctgcaagaggagtagatgtccaagtctttgtgccacgtatgtgtaggttgggaatggcgagggccagagggggaaacagcagtggtcctgggatgggagagaaatttggcaccaaaatgcggggaggaacatgtgcaaagggagccacggggaaaggcgcgccacattcaaagaaccccatataattcattcagtgggacttaggcattgggaggtgggatctacggggtaggaaaaaataatgggtggaagattgcttactatgcaccaacactgctcttagcatatacatatattaggttcattttctctaatcatagcaacactatgaaacaggcactattatggtccctctgtttgggatattccgaggggtat

SEQ ID NO: 316014 - DNA, 620 bp, Homo sapiens
ttctgacattctctctcctctagagttcttcaataacctgagggatgttgatcgcaagctgttggaagtgaaaaacccatctgtaatgagagagaataaagaggaagaaaagagaaaagactttgatgattcctggattcagttttctccaaagttcgtttctctcctgcactttctgtttgttatttaagccaaagaggtgtgatgaaaatggggatatgcaagaatgcttgagatgcgtcctgcaagaggagtagatgtccaagtctttgtgccacgtatgtgtaggttgggaatggcgagggccagagggggaaacagcagtggtcctgggatgggagagaaatttggcaccaaaatgcggggaggaacatgtgcaaagggagccacggggaaaggcgcgccacattcaaagaaccmcatataattcattcagtgggacttaggcattgggaggtgggatctacggggtaggaaaaaataatgggtggaagattgcttactatgcaccaacactgctcttagcatatacatatattaggttcattttctctaatcatagcaacactatgaaacaggcactattatggtccctctgtttgggatattccgaggggtat

SEQ ID NO: 316015 - DNA, 504 bp, Homo sapiens
cctaaatcatttgagtgaaaatttttcacttgaacaaatgatattgaggaataagtgagtacttccatatttgattgtatgtaattgtgattgttcactaatgcartctgagtggagaaggccccggaagaggcccacacactaatctctgcaacctgtaaatatgtccagttccatggcaaaggagaattaagtttgcagataaagttaagaataattatcggctgactttgagatggggagaagatcctggattatccaggtgggtataatatattcaggagggtccttattagggaaagagggaggaagagagagagagaacaagagggaggcagggtggaaagatcacagcctcctcttgctggctttgaagatggtgggagagaaatgcaagcatgaaatgcaggtggcttcgagaagctagaaaagcaaggttgtgattcttcccaagagccaccccagggaatgtagccctgctgacatattgattttagctaaatg

SEQ ID NO: 316016 - DNA, 565 bp, Homo sapiens
atacaaagtgcatgtcaaaaaaaagttaacacgtgcaatgccagccctcaaatacccctttttcattacaatagcaataagtgtgccctgaggacaaaaataacaggtgctctgtatttaaggtctctggtaaaagtaaagtatcctcacaaaacttgggtcgctaaccaaattccctagagcagtgattctagaacagcagttctcaaattagttgctgaaaagttctacaaatccagcaaatgctgtcagargtcttcaatatcctcccttttcaactttatatacttaaatccaaataacatgttacaataaattgaatgtgcaactaggagagataaattagttatctttctattaaggtgaacattgaagagattttcaaagatataatgcaccacaatatttctcattaattttttagaaatttaataattgtatttattttaaaaataaatatacaccttaaggttaatatgatttgtattattactattgaatgaattaataaatgaatattctaaacattctaagtgttaaaatctattacagtaaatcttgatag

SEQ ID NO: 316017 - DNA, 527 bp, Homo sapiens
tgaatgtgcaactaggagagataaattagttatctttctattaaggtgaacattgaagagattttcaaagatataatgcaccacaatatttctcattaattttttagaaatttaataattgtatttattttaaaaataaatatacaccttaaggttaatatgatttgtattattactattgaatgaattaataaatgaatattctaaacattctaagtgttaaaatctattacagtaaatcttgatagatatagtcaatataaacaaaaaatctttaaagcacctcaatttttaaaggagtaaggatcttgagatttaaaaaaacaactttagaactgatattcctgaagtttttatttttcatattgtatttcttcaccttaacataaatataaaagaaaacaagtgtcataattaaaatgtatatttccctaaacccagttayctcaaaattatcaaaatatttctctaaaacacagttttctaaaaattgaggcatttatccttcacaagcataattaactcaa

SEQ ID NO: 316018 - DNA, 547 bp, Homo sapiens
ccagctactagtgagctgaggtgggaggatagtttgagcccagaggtggagggtgcagtgagccgagattgcaccactgcactcaaggcttggtgacagagagactctctcaaaaaaaaaaagagaaaaaaaggtatgaagtttagaccagataacaaataaattatagacagactatcaagaacaggaagagggtgggtgatataatggtccacactggcttcaggccacaaggagataaactgtctatacagatttttaaaattataataaaaatgacaagatgttggttactttttatcaacatgaactggaattctaaacaatgtgagtgaaaaaggatttctaactttcataacagtaattcctatttccctcttttgttatgctggtgagattattaaaaagtaaattaagcaagacagtatggtggtaacrcaaatgtagacaaaacttccaataggatcaaatagtccagaactggcgcaaatataacattggctttgtgacaaaggtggcactctctagcagtagaaaaggatggtct

SEQ ID NO: 316019 - DNA, 597 bp, Homo sapiens
atggacaaattctaagacacatacagtctaccaagactgaaccatgaagaaatataaagtttgaatagatcaatcactagtaagaagattgaatcaataataaacaaagtctatcatcaaagaaaggcccaggacctgatgacttcactgctgaagtctaccatttaaagatctaataatctagcatttaaataacaaataatcccttagtctatttagtgttgttataacagactgaggttgggtaatttataaagaaagtaagtgtattttgctaacaattctggtgactgcaaggttcaaaattgggcagytgcatctggagaggacctcacattgcttcaactcatggtgagaagtggaaggggagcacatgtgtgccgagagatgatatcgtgagagaggaagcaagagagagaaaccagagaaaccagattatttataacaacccatgccagtgataattaatccatcctcacaagaggaagaacacactaacccctgtgggagggtcttaatcttaatttattcatgagagatgtaacccatgacccaaacaccttttactaggctccactccccaaaactgccacactg

SEQ ID NO: 316020 - DNA, 583 bp, Homo sapiens
cttcagggtctgtagtaatagcctattactgattattttaatttgtgycatgtctctcttttctattcatgctagaggtatgttccacaaattttgatatttaatattcatacatctacttagttaaatataattttgtatattgaccttgagactttctttttgagccatggtttctttagaagtgtgttattttatttctaagcacttggaaattttcccactttattttgattattaatttatactttgattccattgtgatccaagaacacattccgtgtggtttcggttattttaaattaaattaggttgtttcacagagatagatatgttctatcttgctatattgtccatggccatttgaaaagagtaagtattttgagtgaaacattttaagacgttgatttggtcctgtagatggatggtattgttggattgttctatattctttctaatttcctgtctagttcagttaattgttaagaaaaagaagtttcagtctccaacaataattattcatttgtctatttctcctttcagttctgtcagttttctcttgtaaattttatagctctgttat

SEQ ID NO: 316021 - DNA, 582 bp, Homo sapiens
aattgcttgaatctgttaggcggaggttgcagtgagccgagatcttgccactgccctccatactgggcgacacagtgagactctgtctcaraaacaaacaaacaaacaaacaaacagaccagtctatttcaagttccttaccatacggttgaggtacaaaattaaatagcaagctaatgaagataggtacagtgtagcaataccattattttttttaacaccaatcttctgactctttttacaatgtccttttgattgattattttagaaacttttatcttcctttgttttaattccagggaacctttctttaaattgaatctcctgtggaatctgctgcataaaactgaaaagtcccactgagctgaagtgggaattcagagctttgcttgctccccaccacctgttcttgtcttgtttgacatctctgtgctatttcatgcatctctttttagagttacatttcccttagcatctgtgacacaagacccctctaattctcatgctacttcataatgtcttattttttaaccttatttaacagggggtggggacagggaactgcaaatcttcatctgctca

SEQ ID NO: 316022 - DNA, 575 bp, Homo sapiens
acagttaacgctccaaggatccagagaaatgtgtgctttcactttgaaaggtggtgtggaatattggagttgtagcctgtggcatccattactcacatgttaatatatcttgattcagtactaacctttttttcttgaatttttggaattaagggcttggtacatatttgaccattggaaatccaaatacttcctgttttatatcacagaaatgttggtgccttcatagcaccaagacatgtaattcatcaaaatagtacatatagttcctttccttttttctgtatccttgattcttgtcccacatcttatgtgtacactttgttagaagcagatctttgagcagcaactaaagaagtgttcagctagtcctgtgtctgctgttataggaagaagtgtgtttcctcaaagttggagtagatgtagccaagtagatcgtgagtagctactgaagtgctagcagcagcagtatgatgcaaaaaagcacacgctggcacccctttttgataaactagcagatacaatgattttttctttcyattataaatacaactatttgggcagatacagcagta

SEQ ID NO: 316023 - DNA, 587 bp, Homo sapiens
atgtgtatatttaggatgtgcgtgcttgcttggttttgcttgtgctcctgttttcgtcttggcttatctgcctggctttgtgtcctgggaggctggccctagggactccaggtgcttcctgccctcaggcttctggctgggcttggttaatggaaggtgctggagatgatactgtaaggacagagaygtggggttcttatttctcctattccatccctgccttggttttgcagggactacattcctttgcaatgccagagcacgttaatttttggcagggttatcaatctctgtgagtaattcactagaagctcctcatcaacactacactaaactttgggatgagaaggtttgggtggttggtaagtaagacaatgataccatcttttatgatgccctacatgaaagatttatgataaaaaatttactcatgcaaatatagagactgggaggtcccaagatccagagtcagtaagctggcaaaccaggagaaccaaaggtgggagtgctagtctgaaagcccacaggctcaagactcaggaaaagccagtttcttatttcaagtctgaagtcaagaaaagactgat

SEQ ID NO: 316024 - DNA, 587 bp, Homo sapiens
atgtgtatatttaggatgtgcgtgcttgcttggttttgcttgtgctcctgttttcgtcttggcttatctgcctggctttgtgtcctgggaggctggccctagggactccaggtgcttcctgccctcaggcttctggctgggcttggttaatggaaggtgctggagatgatactgtaaggacagagatgtggggttcttatttctcctattccatccctgccttggttttgcagggactacattcctttgcaatgccagagcacgttaatttttggcagggttatcaatctctgtgagtaattcactagaagctcctcatcaacactacactaaactttgggatgagaaggtttgggtggttggtaagtaagacaatgataccatcttttatgatgccctacatgaaasatttatgataaaaaatttactcatgcaaatatagagactgggaggtcccaagatccagagtcagtaagctggcaaaccaggagaaccaaaggtgggagtgctagtctgaaagcccacaggctcaagactcaggaaaagccagtttcttatttcaagtctgaagtcaagaaaagactgat

SEQ ID NO: 316025 - DNA, 598 bp, Homo sapiens
taaacagcagcctaaataaaattatagatttttaaagaaagtttatttcaattgagaaataattcaggttaaatacttgacttttttaagtacacaatttttctgtagattaaaaaaatcacagaaactaacacaattcttcattttttgtagctaatgcccaagagagtaaataagaatgctatttttttggtgtaggtgggcctaaaagactgagtttttctttgtaaaattttgaaaaagtccagtgaaatagtataaaatatatagtttctatatgaatgaactgctataagcagcattttattcaaccatttttacgaggattaaaatatttctgtgcattgaaatttgccttgtctataacttctaaacattatctctggttttctttattttttgtttctgtattttttttaatttgagacagagttttattctgtcacctaggctggagcgcaatgtggctcawtctcagctcactgcaacctccgcctcctgggtttaagggattctcatgcttcaaccttccaagtacctgggagtacaggtgcctgccaccacacccggctaacttctgtattttcagttgagacga

SEQ ID NO: 316026 - DNA, 549 bp, Homo sapiens
ataattgcagagcacataactaaaagtttcaagtaatgtttaatcaaacagatcaaaaccccgaccctaaaaggggaggaaattcaaaagaaaaaaaaaagtaagaaagatttattagtcagggatttccagagggacagaactaataggatggatgtatatataaaggagagtttattaaggagtattgactcacagggtcacaaggtgaggtcccacaataggtcctctgcaggctgaggagcaaggaagccagttcgagtcccaaaacctcaaaagtagagaagacggcagtgcagccttcagtctgtggtsgaaggtccaagagtcccaaagctgaagaacttgaagtgcgatgttccagggcaggaagcatccagcacaggaaaaagatggaggccagaagactcagccagtccagtccttccccactcctctgcctgcctttatccaagctgcagtggcagctgattcgatggtgcccacccagtctgaggatgagtctgcctctcccagtttactgacttaaatgatagcactaatgttgga

SEQ ID NO: 316027 - DNA, 582 bp, Homo sapiens
tgtagacctcacaggggttgttagaaatttaaagttagctagagtatgacaataggtagcaaattgctacacatttctggtctatatctggtatattttggcatctcaatagtttgaaaaagcaattttcatttgaagtaagtgaaaataaacatgcacatattaatagtaaatttctaaagaccccaataaagctaaattgagctccctgataatagattattttatataaggtggatacattgatgttattcatccatatgtacaaactgtcacccctgcatgacatcactttggattatctgatgaggaggagatggcagaggagattaaaaaaggaagtaaaatattgatatgaaactcatttctctgttatagtaygtttttctaccattgcataatctttagctgaaggaaatggtgatattttaatttttttgatgccattatttcttccagcaactttgctctttttttttctaattggctatatttatatacattactttacagataatttttattacttttaccattttaatcaataactaaatgatccaaataattagctgtcttattcat

SEQ ID NO: 316028 - DNA, 582 bp, Homo sapiens
tgtagacctcacaggggttgttagaaatttaaagttagctagagtatgacaataggtagcaaattgctacacatttctggtctatatctggtatattttggcatctcaatagtttgaaaaagcaattttcatttgaagtaagtgaaaataaacatgcacatattaatagtaaatttctaaagaccccaataaagctaaattgagctccctgataatagattattttatataaggtggatacattgatgttattcatccatatgtacaaactgtcacccctgcatgacatcactttggattatctgatgaggaggagatggcagaggagattaaaaaaggaagtaaaatattgatatgaaactcatttctctgttatagtatgtttttctaccattgcataatctttagctgaaggaaatggtgatattttaatttttttgatgccattatttcttccagcaactttgctctttttttttctaattggctayatttatatacattactttacagataatttttattacttttaccattttaatcaataactaaatgatccaaataattagctgtcttattcat

SEQ ID NO: 316029 - DNA, 582 bp, Homo sapiens
tgtagacctcacaggggttgttagaaatttaaagttagctagagtatgacaataggtagcaaattgctacacatttctggtctatatctggtatattttggcatctcaatagtttgaaaaagcaattttcatttgaagtaagtgaaaataaacatgcacatattaatagtaaatttctaaagaccccaataaagctaaattgagctccctgataatagattattttatataaggtggatacattgatgttattcatccatatgtacaaactgtcacccctgcatgacatcactttggattatctgatgaggaggagatggcagaggagattaaaaaaggaagtaaaatattgatatgaaactcatttctctgttatagtatgtttttctaccattgcataatctttagctgaaggaaatggtgatattttaatttttttgatgccattatttcttccagcaactttgctctttttttttctaattggctatatttatatrcattactttacagataatttttattacttttaccattttaatcaataactaaatgatccaaataattagctgtcttattcat

SEQ ID NO: 316030 - DNA, 569 bp, Homo sapiens
  misc_feature (1)...(569): n = A,T,C or G
cttaatagtctttgccaatcagtagtttcctgattagccatgactgtgtcaatctattttttagcactgggattatttgtctggtcctatagttttaaaaaacaggcatgccactgaagtgaggctgaaatgtgaacttggtaagactgtagcttcccttcctattnantatctcccctttcacctggtgataatatgatgctggcaatagctgctttgtctttacctaattgttttaataccacttaatcttcaacaatgagtattttaaaagctcatgtagcaaatgagctgggggtgtacacaggcctttatggacagaatttgagctgcatcttttgatggtattgctttataaagctagcttaaaatgagaaaaaattaaaaccttgcatcttcgtatactgttaattctaaaccattttaaggcaataattaccagaggcaggaaccacagctatgccgagttcctctctatcratagaagggtgtgttacataggttggcatatcactgaccttttctgcagtcactgtaatgccagcttttcataactattgttttctgtt

SEQ ID NO: 316031 - DNA, 423 bp, Homo sapiens
aacattgggtatacatgggcataaagatgagaacaatagacgctggcaggtactggtggggggaatgatggaggggtgcaagggctgaaaaagtacctactagggactatgctcactacctgggtgttgggatcagtcataccccaaagctcagtatcatgcaatatacccatgtaacaaacctgcacatgtaccccctgaatctaaactaaaaattaaaattattattkaaaaaaagaaatgagtacaaatggaacaatgtctttaggctggctcctttcaagggttgaatctctaatatccaaataggattttaactccaagaaattgaaatgtccaaaaaagacaggagcctcccctgtacttacttgtatgactcatctcacccatcacacccaaatccttgtccatttgaactttttg

SEQ ID NO: 316032 - DNA, 423 bp, Homo sapiens
aacattgggtatacatgggcataaagatgagaacaatagacgctggcaggtactggtggggggaatgatggaggggtgcaagggctgaaaaagtacctactagggactatgctcactacctgggtgttgggatcagtcataccccaaagctcagtatcatgcaatatacccatgtaacaaacctgcacatgtaccccctgaatctaaactaaaaattaaaattattattgaaaaaaagaaatgagtacaaatggaacaatgtctttaggctggctcctttcaagrgttgaatctctaatatccaaataggattttaactccaagaaattgaaatgtccaaaaaagacaggagcctcccctgtacttacttgtatgactcatctcacccatcacacccaaatccttgtccatttgaactttttg

SEQ ID NO: 316033 - DNA, 591 bp, Homo sapiens
gactgcatcactcacgccatcctagtggtaatacaattaatattacatttggttcttgggctatcttaaaagaccttaattacaatgtagattttgtcaagatcatggtaaccacattaatttttgaattggattaaattttgaatttgaaggacaaggaatatttagccagaaaaaatacatatttagtatggaagggagagatgtgtgtgggagagatacagactttctggtgtgtatggcaaaaccaacatatgacagttgcagaaggaaaaatttgttccccacataagaacctcccaatttaaacaattaaagttgttcaaaacatcgcattatcttgtagggtgatgatttatgcctcagtaaatgttcaayggaaggcctgtcttttctccagtatgttgtgaaggttttcagacccatggagaaagactgtagctagtgctcccaaacaactagacaagatgaagttccacttgccaaaaccatactaaagtaataataaaaggatgttgagaatcaatacatctttcatacatgataataagaggccagcaaaaagaaagtattctagttggccaaccacag

SEQ ID NO: 316034 - DNA, 644 bp, Homo sapiens
tacaaaattacacttaggcaggaagaataagttttggtgctctattacacagtagggtgactatagcaaataacaatgtagtgtatatttcargatagctagaagaggagattttgaatgccgttaccgcaaagacatgataaatgtttaaagtgatggatacggtaattgccctgatttgttcattatattatatatacatgcattgaaacatcacatcataccttataaatatatacaactataaggtgccaattataaataggaaaataaattctagatgctgtaggtgatattaacaagaagaaatgtctggagcctcagtggatcagtaatcttggtggacaacacacacatgccccctggtgggaagagtactgcattatatggggcaatggttatgaggctggcctttgagccagactgccctggccccgttgcatcttagcagttctttagtcttcaaaattcaaatttttaccattttcattatgtaataagctttcctataaatgtgatcatcattcttagaacacgtatcttcagactggcttctctcctaaattcctgtatggtattctgaacagcctttgtgacatctccacgtgaatattgaataaacatctcaaattcatcatgtcaaa

SEQ ID NO: 316035 - DNA, 644 bp, Homo sapiens
tacaaaattacacttaggcaggaagaataagttttggtgctctattacacagtagggtgactatagcaaataacaatgtagtgtatatttcaagatagctagaagaggagattttgaatgcygttaccgcaaagacatgataaatgtttaaagtgatggatacggtaattgccctgatttgttcattatattatatatacatgcattgaaacatcacatcataccttataaatatatacaactataaggtgccaattataaataggaaaataaattctagatgctgtaggtgatattaacaagaagaaatgtctggagcctcagtggatcagtaatcttggtggacaacacacacatgccccctggtgggaagagtactgcattatatggggcaatggttatgaggctggcctttgagccagactgccctggccccgttgcatcttagcagttctttagtcttcaaaattcaaatttttaccattttcattatgtaataagctttcctataaatgtgatcatcattcttagaacacgtatcttcagactggcttctctcctaaattcctgtatggtattctgaacagcctttgtgacatctccacgtgaatattgaataaacatctcaaattcatcatgtcaaa

SEQ ID NO: 316036 - DNA, 591 bp, Homo sapiens
aggatcgaaataaaattccttgtcataggctttacaagatcttatatgatctggccaccccagttacttctctgtcttcctttcctatttccttgcccatctttacayatcctcctctagttcacagacctccttgttgctcctcaaacataccaagcatgcgcaggccttaggctttgctaggctctctgcctggaatgctcagaacccttcctccagagagcagaacaccccacttccttccttcagttggattctagccaaagccactacatcagagacaccagccctgactacactggtgtagaagaccgcgtatcttttagttggctttcataaaaaccatttttatttagtactcatcaccacttaccatataacatatttacctatttttttattgattattatcttgtctagtgaatattttaagctctaggtaagtatggacatttttgtctgtttgcttggttggttttagtggtttgtttgcttgatctactctctgacagtgacttaatttctgagatattgcaaccaactaaaaaatatgagagcggaaatggataaaaggatcttacattagttcat

SEQ ID NO: 316037 - DNA, 591 bp, Homo sapiens
aggatcgaaataaaattccttgtcataggctttacaagatcttatatgatctggccaccccagttacttctctgtcttcctttcctatttccttgcccatctttacatatcctcctctagttcacagacctccttgttgctcctcaaacataccaagcatgcgcaggccttaggctttgctaggctctctgmctggaatgctcagaacccttcctccagagagcagaacaccccacttccttccttcagttggattctagccaaagccactacatcagagacaccagccctgactacactggtgtagaagaccgcgtatcttttagttggctttcataaaaaccatttttatttagtactcatcaccacttaccatataacatatttacctatttttttattgattattatcttgtctagtgaatattttaagctctaggtaagtatggacatttttgtctgtttgcttggttggttttagtggtttgtttgcttgatctactctctgacagtgacttaatttctgagatattgcaaccaactaaaaaatatgagagcggaaatggataaaaggatcttacattagttcat

SEQ ID NO: 316038 - DNA, 562 bp, Homo sapiens
aaaggggggaaaagagataccatgttcacactaatcaaaatcttttgaaatagtatctaatacagaagcaatattaagtttaggcaaggcagacttcataacaagcaagkttatcagggataatggaaagcattatctaaagagatcaattcttcaacaacaataaattgattatgaagatcacttttctattacaatcctaaatgtgtaagcacttaacaacagaatgttaaaatacataaggcaaaactagagagaactgaaaggaaaaataaactcattattacagttacaaacttcaacaccactttttcattaattgacagaccaaataagcagcagaaaatcaagcagtcagaatatagttgacctgaaaagtactatcaatatataaattgatagtatatcaatgatataaattgacatttatataatgttctatccaacaacagcagagtaaattattctaaagcatacatgaaatattcatcaagatcaaacacatcttgtgtcataaaatagatcttaaatctaaaagaacagaaatcatacaaagtatatt

SEQ ID NO: 316039 - DNA, 607 bp, Homo sapiens
ataaggggtttcccccttcactgggcactcatttttttctctcctgccaccttgtgaagaaagacatgtttacttttccttccaccatgattgtaaatttcctgaggccttagcctccctagccttgcagaactgtgagtcaattaaacctctttcctttataaattacccagtctcgagtatgtccttatagcagagggataattgacgaatacaactgggaatttaggaggaggtggttatcaaaaagcggaatgggggaaggtagaatttttaggggtgatagaatcatcgtgtatcttgattgtgtgggtggtgggtgtagtggttacacaactgtataagattcaaatctcatagaattstatactaacaagaattttactgtatataaatcacacttcattaaatataaaacaaatcaataaaaaaaaacaatctactcaatacaacacccaagactgatctgaatgtgatctgaatctgaaagcctgataattctctcatcctttcaggtcaacctttcatctctgaatgaggtaaggacattataaaggactataaaaaaaactttataattatagcaatacttgcctggggtttgatc

SEQ ID NO: 316040 - DNA, 554 bp, Homo sapiens
catgttagcaggccgatcttcaactgctgacctcaggtggtccaccagcctyggcctcccaaagtgctgggattataggcacgagccactgctcccatcctgaatcagaaattgtaaaaactacaaaagatatggctagatgacaggaaattatgaaaggagaacagagagatgtcagaaaagaatttggaaaaatgagtttcaaaaatgaagacttaattagaaggaacatgggagcaaatagatattcttaggaagcacagaaataaaaatagagggtgaaaaggagaaaaataataaaaaaaagaaggtgatatagtgaattaaaggaatgtaggacacaggcaaaggaggttcaatatatgtataattagtgtccagggacagaaaaacaaagcaatagaatagcataaatatttagaactataatgcacgaaaaccttcctaaaataagatttgaaaggttacattgtgtaactgggaaaaatcaatgtagaatagtcagcattgacatgtttccctgtaaataatggattttaaagataaggagaaaa

SEQ ID NO: 316041 - DNA, 526 bp, Homo sapiens
acattggcatgctggtttatgtagggacatacgcttccaaatcagttcagtttcaaatcacctgagtgtgattgttgactctgatagtaagactatgtttaggctgggcacagtggctcatgtctgtaatcccagcattttgggaggccgaggagtgtggattgcttgagcccaggagttcaagaccagcctgggcaacatgatgaaaccctgtgtttccaaaatatacaaagattagccaggcctcatggcatgcaccgtgtagtcccagatactaaggaggctgaggatggrggatctcttgagcctgggaggcagaggttgcagtgaggtaagatcacaccacgcactctagccggggcaacagagtgagacccctgtctcaaaaaaaaaagaaaaagactaggtttagttttgtaagaaagcgcaaattctcttccaaagtggctgtaccatttttgcattcccaccaataaatgaacattcctgttgctccacatcccctccagcagttggtattgttggt

SEQ ID NO: 316042 - DNA, 565 bp, Homo sapiens
cccctttgtgctttcaatgtcataaaatatatctgagagttccattaacttaaagtgtttccccaccaccaccttttttttttttttctagagttacttcctctggggtatcttcttcattctttttgtcatgaccttttccctcatttatgtctgtaagtttattgtcaataagtccttctggctgtatatctagagtttctccgaaggtggcagggtcaacattcacatgatcagctatgtcttccataactccacatggtcagctatttcttctataactccatttacatcccattcaaatttcacttccatctttaacactttttgtttcttttgtgtactttcatctttgttggccaatttgaccttctrattatctgtttttataaaatgccacctgggtttatcactgagaatcaccgaggcagcacaactacacactttgctggcagtgcaattgaatgacatatgcacaatgaccaatcactgcagattttgaaagaacttgctgcgattggtcaccaagcactgcaggtgttggaataaaggtcatgattggtaa

SEQ ID NO: 316043 - DNA, 503 bp, Homo sapiens
ttggaaattgatccacatctgtatctctaaatctgactcattttttaaaagtcattttattttaaataaaatgtggattcagggcagggcatggtagcacatgcctgtaatcccagcactttgggagaccaaggcaggcagatcacctgaggtcaggagttcaagaccagcctggccaacatggtgaaaccctgtctctacaaaaatacaaaaactagctgggcatgatgggggggtgcctataatcccagctactcrggaggctgaggtaggagaattgcttgaacctgggaggcagaggttgcagtgagccgagagcaccattgcactccagcttgggtgacagagtgagacaccatatcaaaagaaaaaaataaaatatggattcagaaaactgcaaaataaaatatatggcttaatgaattatttgaaggtaaatactacctaggataagaaatagaactttgccagccaccccagaagcacctccatattccctacct

SEQ ID NO: 316044 - DNA, 563 bp, Homo sapiens
aagtgcctattaagtgtttctacttcttaacccttgttgttatatatcttgcatgcataatttacttatataaatcatctaccattaaaataagaaacataataatagtaataacagttactaacatttactgagtacttacttggaaccaaaaataattcttaagagctttacagcttacaacaagaacttaaattctcacaactctaagaaggagycactgttactttctcctattaaagagaaaaaatggcccatgcttagagatgttacttaaagtacagggctaaactgcttataaatggcagagccaggtgttacttaatcattgtgcttcactgcttctcttagtctggctctaattttgcagatttctacaccaactatatataacgtttatatgcaaaacaaaacaaacattataaaacaatcttcagcctaacttctgctggaattcttacaatgcttgagtaaatttagcctaaattaaagatgctttaatgcatgactgaaagaacttgggagtgcattaacaacttacagtgcaattcgatttacattga

SEQ ID NO: 316045 - DNA, 563 bp, Homo sapiens
aagtgcctattaagtgtttctacttcttaacccttgttgttatatatcttgcatgcataatttacttatataaatcatctaccattaaaataagaaacataataatagtaataacagttactaacatttactgagtacttacttggaaccaaaaataattcttaagagctttacagcttacaacaagaacttaaattctcacaactctaagaaggagccaytgttactttctcctattaaagagaaaaaatggcccatgcttagagatgttacttaaagtacagggctaaactgcttataaatggcagagccaggtgttacttaatcattgtgcttcactgcttctcttagtctggctctaattttgcagatttctacaccaactatatataacgtttatatgcaaaacaaaacaaacattataaaacaatcttcagcctaacttctgctggaattcttacaatgcttgagtaaatttagcctaaattaaagatgctttaatgcatgactgaaagaacttgggagtgcattaacaacttacagtgcaattcgatttacattga

SEQ ID NO: 316046 - DNA, 562 bp, Homo sapiens
gtaagtgtgatgcataagaaatgtctgattcaaagcatttcctccattagatgtaaaaatgcaaggtagaagagaagggcctctttagcaacatacgtgagaatgatttatgggacttagcctacagtaaaaatgacatgggttaaccatgacatgtagtgcccaagccaaacaaaacaaacaaaagcaatactacattgggtagcattaaccagagtagagtgtccagaaataggaagatgctcatacagttctcctctgtataggtcagattacacaaagcagactaggatacaagaaaagtggccatgacagctaggcgaactataacctatactagaaagagagttacagataaaggaattagagaattttattagtagaatagcagaaaaagaaattatsctatgtattctatatcctagtacttaaaagtgttcatatggaagacagctgagagttaattttgtgagaaataacaggtagaaataaaaatccacagttgaagtcattaaaacacattttttgttattaaaatctgttcacataaggaatgtgtatc

SEQ ID NO: 316047 - DNA, 566 bp, Homo sapiens
gctaatttgcaatcaaaaataaaagcaaatatagaaagtgaataaatttgaaatctctagggtttgaaaaatcctactgcttctggacaacaaagatcagaagataatattgggggaaatctgtaaacaaacatatagtaagaaagacccagtcttgtcatgaatatcagattaagggtgggtgtgagagtgtcagctactaaccatcactttgagtagtcaccatgtacagaagcaaggggatgaggaagcaaagaaagataaagacagattacctgggaacttaaaaaagggtctttggatttagttgttgacccaggaaattaactggaaagaaacagacgagaagcatgccacgtrctggaaggatgtaattgaaaaaaaaataaaattcaacctaggctaagctatttgactagtcaaaagttaaaacaatctctttaggttaccgtattttcatgagcaagaagcaggcttcaaaaacttaaacctactctcctgtagacatagcaaatgggatcatggaaaacagaaaataactatctgaatgaagtcatgaagaaaaa

SEQ ID NO: 316048 - DNA, 568 bp, Homo sapiens
aggtgatggatgacctaaaatctctgacctgactactgtgtaatctatgtatgtaacaagaaattgcactggcactccataattttctatccaaaaaaaattaaaaacaactcagaaaaaaaagaccaatgacaagtatgtgcaaggatatgggaaaaaaaaggaacacttatacactgttggtaagaatgtaaattattacaggcattttggaaaattaaacaagtcccttagaaaacaaaaaatagaatcatcatataatccagcaatccacttccaggtatatagccaaagaaattgaaatagagatatcaaatatataactgcattttcatgttcgtttcagcattattcacaatatccatgatatggaagcaaactaagtttctatcaatgaatgaatgaagaaaatgtggcatatatacacaatggaatactatacagccttaagaaagaaggaaattctgtcgtttgcaacygcatgaatgaaactagagaatattatgttaagtgaaataagccaggcacagaaaggcaaatactgtctgatatcacttatatgcaaaaa

SEQ ID NO: 316049 - DNA, 536 bp, Homo sapiens
gctgagtaagtattggttgattatctactaagcgttaaagactaagcactaggggcccagggattggtaacatagacacctgtttaccttcaagagcttaaaggctagaagggaaataaactgattaaattatcagtcatagtaaaatatgataatgccatgacaggggcttcatatagaagaaagaacaggagtaaattgcctattctagagaggatcaaaaatgagattttgtctgagtggagaactagaagatatacaggaatttgccaactgaataagtragagaatgtttcagatagaaggaacagcaattgagggtatcaagaagatggtcatcagcctgaggatgaagacttcctcttatgtagtgtagctcgagtgagactgaggtcacctcaagacccacaccaaatggaaatatggatgcagcaggtagaaggcaattttactttcttattctttataatcatgaggaaatcagagaagttcactgtaggccagaacactgatagcagccctctcaggaaagacaa

SEQ ID NO: 316050 - DNA, 555 bp, Homo sapiens
agactaactatatagagttgacatgccctttacaaagtctcattaggtgtctcatttgaaaaatatgaaccaaatgaacaaagtacaggtttaattttgtttcattagattgtgaagagatcaacatgaattaattagtgttaactacaacatgcttcactaatatcctgccaacacaaaaatttcytacagtgccaagatgagagacatgttcaggatgacaagagagaaatgtaagtgagttgatgcaattattacaattattgctgcaaagagttttaattgaaaggagattttgcattttgggggtaataagttccattaagatctttggctagatatttaatttagttttaatggcataattcatgttaaacagatgcaaaataattattaaagcatatttattgtttttatgcacccaggctataacatcttaaaatgacaaaacagggacttttgaagggtaattcagccacttagcctctcattgagttgaagtgataagttgataagaagccttggataagatgacttaccatttacgtggtgaag

SEQ ID NO: 316051 - DNA, 577 bp, Homo sapiens
ggatacaatggccccagagaattaggaccaatatgatttgtttagaaagaatttgaaaatatattggttggtgtgacttgaataatggtagaggactgccaccatcacaccacaccaccaccattgccatcactttacaagccaaattgaaacatcagagttctcaagagtctataatttggagaatgatcgactttataaaattatttatgcttatggatgctaacaatgaaacaagtctttyagtaaaaagatcctatggcagccctatgaaaacagaattttatctccacagcttcatatactttagaacacaaagaatttgggaacattttagtgtctactttaaaattatgaaaaaatatttaaatatttgtggactgctcaaatttagaaaaagttaaaatataactttaataaataaaatataactataataaataaatttttatataacttgttaattgtatatgctaaattttcatttatttttaaaattattattttagagcagttttagattcacagaaaaatcaagaggaacttacagacatttcccatatatcccctaacccca

SEQ ID NO: 316052 - DNA, 502 bp, Homo sapiens
ttagtccattcttgcattgctgtaaagaactacttgaaactggataatatataaagaaaagaggtttaattgactcacagttctgtaggctgtacagaagcatggctgcggaggtctcaggaaacttataatcgtggtggaaggcaaaggggaagcaggcatgtcttcacatggcgcagcaggagagagagagagaatgggtaagtgttacacacttttaaacaaccagatatcatgaggacttagctactgtgagaacagcaaggggaagcctgttcccatgatccaatcacctcataccaggccccttctccaacattaaggattacaattagacatgagatttgggtggggacacagagccaaaamaaattttatatataaatatatatatatatataacattttttatttgtctaataatagacatctaggttgcttccatatttcagctattgtgaataatgctgcaataaacatgggagtgcaggtatctcttcag

SEQ ID NO: 316053 - DNA, 593 bp, Homo sapiens
tgtaaacgttcacagatatattttaaactcattaraatattggcctgttgctgggagaagaataaatctggaatgaagaaacatgagagtaatgaataagtaaatcatggaggaactgatgattattttgtcttgaactaaagaatatgagtaacttttcatcttcattgtttaaaaagaaaaataaaaaataaatttttctaaatcaacaaaccaaaaacatcaaaaaaatcaaggagatttggctatacacaattctcaacaggctaaagggaagctattttgtgtgtgtgtgacttttttagtgcattttatatttggttccagagtttggttctcttaattaaaatatgttcctgctattttgagtatgttaggtaaagatagtgtgacttattctcaaaatatagttttgtttttttaagcgccaggttcctctaaattattataagcaatagcttctctttgcaaattaaccttggatattattttaaaaacttttttttccacgcagcaatacaaatcactgaacacaatgttcaatcttaagtaattatatttattcagaaggaagttgtgtgaaaattttcctt

SEQ ID NO: 316054 - DNA, 593 bp, Homo sapiens
tgtaaacgttcacagatatattttaaactcattaaaatattggcctgttgctgggagaagaataaatctggaatgaagaaacatgagagtaatgaataagtaaatcatggaggaactgatgattattttgtcttgaactaaagaatatgagtaacttttcatcttcattgtttaaaaagaaaaataaaaaataaatttttctaaatcaacaaaccaaaaacatcaaaaaaatcaaggagatttggctatacacaattctcaacaggctaaaggsaagctattttgtgtgtgtgtgacttttttagtgcattttatatttggttccagagtttggttctcttaattaaaatatgttcctgctattttgagtatgttaggtaaagatagtgtgacttattctcaaaatatagttttgtttttttaagcgccaggttcctctaaattattataagcaatagcttctctttgcaaattaaccttggatattattttaaaaacttttttttccacgcagcaatacaaatcactgaacacaatgttcaatcttaagtaattatatttattcagaaggaagttgtgtgaaaattttcctt

SEQ ID NO: 316055 - DNA, 622 bp, Homo sapiens
tatctcaattttttggcaccccttaaaatttgtacctgatatgttgattaccctggttcctgccctgctaaggagaaacattaataaatttaaaaaaatccatagtccatatttgatattctgttatattctgaatacaacttgggaagtaaaacaatgttctctagttccagaggaccccaacctctgtctcctatggtttcccaaggccatggtgtgtggaattgaacattgcacaatctaaggaagacagcaaaactttatagttttttttcctctggctgctttgaagagtttctctttattttaagccatttagttacattatgccttartaaaattttcttcttgcttcttatacttggggctggttgagcttcttgaatctacaggtttatagctttcatcaaacctagaaaaattaaagccattatttatttaaaacatttttctgaacccctacttctcatcagggactccagtacttcaattacacatatattgggctgcttgaaggttcccgatgctctgttcatttgtgttttcagtcttttttctgtaggggttttattatagatggctctattgctatgccttcaagttcactatcctattttattta

SEQ ID NO: 316056 - DNA, 592 bp, Homo sapiens
caaggtgatctgtcagtaatttaactgcctgctgcaagaaaaagcatcactcttccaaaaaaaagaaagaatccatattctatatactatatcaacatatttacagtgttagtatacaataaaaaataatttgacaagtaaagaaataagatggtcaagagagcaatcaatcaatagaaacagaccctcagataatttagatattagaatttgcaggtgaggattttaaaataattatggtaaacgtattaaatggtctacaggaaaatattaataaaatgagtgaagatatagaaaatttcagaaaagacatagaaaccattaaaaaagaatcaaatgaaagttctagatctgggaaattataatagctataattcaaaagtcatggaatgggataacaattgattggatataacagaagaaaraattagtaaatttgaagacaggtcaacagaaatcatctaaactaaagcacagagaaaaaaaagattgagaataaatcaacagagtcccagtggcctatgggacagcattaagcagtctaatatatatgtatttagagtcccagaaaagaataaaaagatccaaaata

SEQ ID NO: 316057 - DNA, 577 bp, Homo sapiens
tttgattcctgagagtgttattagtgtggaaggtgatagaagcaccttttcttttgaaaatctgttgttttttatataagaccttaggagactttaattctaatcacttcctccagatatcggtgctattttataaatgttcttatttatctttaaccaatggaattcctaatattgttttacacaggttatgtctgtttagttgcacatattctcctccctctgtttcctcctgcatctcaaggtaagatctcatggattccatccatctggagcacattcctttggcctagagtccatattttagaacttcytttagttagaggtctactgctagcaaagtgtctcagttttctcagaagatacttcagttggtaaattattctaggttgatagttattttcacctagtatagtgaggatgtcattccactctgtttgggtttttgctgttcctgttgggaagtcagcgttcagcctaattattcttttgaagacaagagggtaatttatttccctctgggatagtttttgagatagtctctgttcctggtgttgctcagtttcactgtggtggg

SEQ ID NO: 316058 - DNA, 567 bp, Homo sapiens
gaaaaaacttgaaagtaatggattagtagtgatactaaacaaaagcaaccaaaggaaagctggaatgtcaaaatcagacatagtgaaatttgaagtagaaacactaaaaaaattaatagagaaagtatgcaatgaaagatcataatttatgagtaattataaccatccaaaatctatatgcaccaagtaatatagtaacttatatctaaaaaatatttgaattgcaagtagagcctaataaaaatacaattatggtgaaagatttgggtacatttctctttttctctcagagttgaactgatctagtagaaaaaaataartcaggctatagaagaataaaaccatgataagaaacttgatttaataaatgtgtatagaaacttacacaactcaaaagagatgatacacatttctttctatatctatagaatatttacagaacttgattgcatttaagttggtcacaaaaaaaccacattagaaacaacaaaataacaaaataaatgagcaataaaagagttttaacttatcagaaattaagcaataccactcccaattagctgttgg

SEQ ID NO: 316059 - DNA, 510 bp, Homo sapiens
aatagcctaggcgagtggccccatgacaatgggctggtgcttgatatccttattctagccatgcagatcctagaatgagcagcttctgtaaggtgaatgaatgccaaccaggtgcttacaggcagtgtgcagagaatcttcctgttgttctacctaagtcctgtctggatggaagtggttgtaagtcctgagaggtctttgtaatttagctactgtttctctagagctcaggcaaccaatrttcatgtcctaccctcatgcagggcttgggttttgcagtgaggcttttgctgctccaacttttcagcatctgacattcaagtccatcctgatcttaccaatgatactttgccttaatggattttgaccattttactctcagattttttttctttctagaccagagaggccccaaactagcagcctgtcctcctcagtagccccagcatcccttcatcattttgttgcccttctatgggcctagtttaggtctgagaggcatagttttaa

SEQ ID NO: 316060 - DNA, 429 bp, Homo sapiens
ctaattaatagttaaccttctgaactgtctgcctgaagtacattgccatcttattttcaagaaaattggggtttgttagcaaagtgagtgggaagtcatagttgtagtgcaagcagcgaaccgtgtctgcaattctaaacgtctccatcacagcagtgcacttaagaaacatgcccatactgaattgaataatgagaacacatggacacaggaaggggaacatcacacaccggggcctgttgtggggtggggggaggtgggagggatagcattaggagatatacctaatgtaaatgatgagttaatgggtgcagcacaccaacatggcacatgtatacatatgtaacaaacctgcacgttgtgcacatgtaccctagaacttaaagtrtaataaaaaaataaaaaggaaaccataaaaaaaaaaaaaag

SEQ ID NO: 316061 - DNA, 579 bp, Homo sapiens
gagattcggttgctccatatcttcactagcacttggtagtatcagtctttttaatttgagtcattctggtggctatgtattagtatttcatggtggttttaatttgcattcccctaatgcccaaggagtttagaaattttccacatatttttaggccagttagatagcttattttgtgaagtgcctgctcaagtctcttgcccagttttctattggattctgtatctttctcttatkggtataggaattctttatatattttggaagtgagtcccttgtcaatcctcgtggcttgccttttttatactcttaatgatgttttgtgatgactagaagttattaatttttagtggtttaacttatcaactttttcccttaatggttagtgctttttatgttatgcataagacatctctgcctacttcaaagctatgaagatattatcctttgtttgtgttctaaaagctttattgtttgccctttcacaagttgaccttgaattcacctaggattgatttttgttaatggagtgaggtcgtggttatgatgcagttttcccacatggatattcaattgact

SEQ ID NO: 316062 - DNA, 579 bp, Homo sapiens
gagattcggttgctccatatcttcactagcacttggtagtatcagtctttttaatttgagtcattctggtggctatgtattagtatttcatggtggttttaatttgcattcccctaatgcccaaggagtttagaaattttccacatatttttaggccagttagatagcttattttgtgaagtgcctgctcaagtctcttgcccagttttctattggattctgtatctttctcttattggtataggaattctttatatattttggaagtgagtcccttgtcaatcctcgtggcttgccttttttatactcttaatgatgttttgtgatgactagaagttattaatttttagtggtttaacttatcaactttttcccttaatggttagtgctttttatgttatgcataagacatctctgcytacttcaaagctatgaagatattatcctttgtttgtgttctaaaagctttattgtttgccctttcacaagttgaccttgaattcacctaggattgatttttgttaatggagtgaggtcgtggttatgatgcagttttcccacatggatattcaattgact

SEQ ID NO: 316063 - DNA, 578 bp, Homo sapiens
tcagtttgcacacacatttaaaaagacttctgaattttgattggaattgcattgaacttaaaactcaattttggaacaatttatatcttcataatattgactcttcaaattcataaatttgctatataccatcatttgtttaggtcttcctcatttcctctctcccttcttttgttcttttcctttcttctttcctttgttcctttaagtctttaatttccatgaaagttttgccagtttttgtgtatatagattttgcaacatcttttgttagctttattcctagataatttgtttatggatgctatcataaatgatagcatttaaaaacttaatttctatgtgtgtgttgctcgcacaatcaatttctgcatattaagcatrtatccaatgaccttaaattcactttgctgaatattctttccaattttctaatatttgaacacgtgtttgactaatggtagttttgttttttcttcctttatccttaaacttttattttttgccttattgtagtgattaagaccttcagtacaatgttgaatcaaagttatagtaggcaatcttgtctcattccc

SEQ ID NO: 316064 - DNA, 578 bp, Homo sapiens
tcagtttgcacacacatttaaaaagacttctgaattttgattggaattgcattgaacttaaaactcaattttggaacaatttatatcttcataatattgactcttcaaattcataaatttgctatataccatcatttgtttaggtcttcctcatttcctctctcccttcttttgttcttttcctttcttctttcctttgttcctttaagtctttaatttccatgaaagttttgccagtttttgtgtatatagattttgcaacatcttttgttagctttattcctagataatttgtttatggatgctatcataaatgatagcatttaaaaacttaatttctatgtgtgtgttgctcgcacaatcaatttctgcatattaagcatgtatccaatgaccttaaattcactttgctgaatattctttccaattttctaatatttgaacacgtgtttgactaatggtagttttgttttttcttcctttatccttaaacttttattttttgccttattgtagtgattaagaccttcrgtacaatgttgaatcaaagttatagtaggcaatcttgtctcattccc

SEQ ID NO: 316065 - DNA, 608 bp, Homo sapiens
cattgatttagatggcatcagtcctcacaattgtatgatttttctttagcaatattttaygtattaattaatttccccagttattgagtgtctgctctgaaccaggcacaggactaggcacttgggacaaattggtgaacaaaacagacaatgattcttatccttggagcttataatctagctgggaagacacaacataaccatgagcgaaattacatcatatgtcagaaggggataggtcatatggaaaaaaggaaaattagagcagctgaagaggtttggaggtggcgtggaagcaggttgtagtgttcagtgggggctggggtcagggaaagtgaaatttgagcaaagacttggagcaggagagagagctaaccaagccggtgtctgggggaagagtgtccaggcaaagggaatactaaagtctaaggtgggagcatggcttgggtgtttgaggaacagcaagaaggctgatgtggctggcacagagggagtgagggaaagaaacagaagagaaaaggttaaagaggtagagggggatagctcacctagggctgtatttgccattgtaggggcttcagctgacaatgagtgagatgatagccatt

SEQ ID NO: 316066 - DNA, 535 bp, Homo sapiens
cttgctccatataaaaatacaaaagttcaggccaggcacagtggctcatgcctgtaatcctagcactttgggaggcctcggcaggaggatcacctatgatcaggagttcaagaccagcctggccagcatggcaaaaccccgtctctactaaaaatacaaaaattagccggaaatggtggtgtgcacatgtaatctcagggaacaacctactcaggaggctgaggcaggagaatgatgtgaacccatgaggctgaggttgcagtgagctgagactgcccactgcactccaccccggcaacagagtgagactctgtctcaaagacaaaacagaacaaaacaaaacaaaacaaaaaaaagctcagtgcatcacagcaatatgttcttctgaacaggattcctgggtttgtattrtttatgaaaataatctgctgctctcagttcacttgtaaagttgactgaccagtggccatgagaaaaatatttacatacagaatttcaagactgagtttcttttgtggaagataagtgagtgttg

SEQ ID NO: 316067 - DNA, 567 bp, Homo sapiens
tctgatccttcggtatctgggtgctggtggctctctgcatatgccctgtctatgcatagtggtcatagcaacaaggaaaactcaagtgtgactgagatttggtactttctatttaatataatgattcaawaacattaagtaacaataaagaatcattgactgttatcttacagatcaaggagaactcccatatctcttacctcatgtaattaccaatcattaaatggcctgtacaagactatatcattaggaaatggcagagcaagggttcagcgccaagtctgcactgtcagtcttgtatcagtgttttccaaaccttcgtgaattttgtgcaccacctatccaattaattaattaatctttttctttcaattgattacccttcataaaacaatacatcgattttcaagtttcgtgtcactctgtaaatggaaaataagtattccttgaccaaaataagaaaaaaaactataaaaacaaatacagtgggcacaagacaatgttattaacagctagcttgatgctgtcctttgcagaaggttctgagccagaggatggcattagatg

SEQ ID NO: 316068 - DNA, 584 bp, Homo sapiens
gacacaagcatccctgtggctaacactgctgggaaggcaccaggtcagacctgaaaccagcacagcactgggtcttgcccaaggccttgggtgactactgcctggctattgcatatgttcactcgaggcccaagggctttacagtcagcaggtagtgaatcctgccaggcttgtgtcctttacttcattgtggcaagttcctcctaccctgggcagatccagagatgccatccagaagctatggcctggaattgaggaccttaggaatctacttgatgctctattctactgtggctgagctggcacccaagctgcaagagagtatacttcccactcttccctcttttttccgtaagcaggaggaatctctccctgtggcaccgcagcttgggatgtgctgaatcacacctgaagtcagcatggcccaatgcctgttcagtactgcctagcaaccactgatgtttattcaaggcccaagggctttttagtyggcagatgataattcctgccaggactgagtccttcccttcaaggaagcaagttcccttctggcccagggtgtgtctagaaatgtcatttgggag

SEQ ID NO: 316069 - DNA, 595 bp, Homo sapiens
tttttaaataagaacaaagttggaggactcaaactactggatccaaggcctactactatagagtcgcagtaataaaatagtgtgatgttggcataaggatagacatatagaccaagattcatttatatggttaattgttttccataaagggaccaaggtaactcaacgtgaaattttggggttttttttttgacagagtcttactctgttgcccaggctggagtgcagtggcatgatctcagctcactgcaacctctgcctcctgggttcaagtgattctgctgcctcagactcctgagtagctgggattacagaagtgtaccaccacaaatggctttttttttttttaaattttaagtagagatggggtttcaacatgtaggccagactggtctcgaactcctgatgtcaggcgatctgcccaccttggcctcccaaagtcctgggattacaggtgtgagccacagtscccagcctgaaattttggtcttttgaataactggtactggaacaattcattagccatatagaaaaaatgaactctaacccttacctcccaccatacataaaaattaatttataatagattgtagac

SEQ ID NO: 316070 - DNA, 539 bp, Homo sapiens
actttcctcttaaaggcaccataggatggttgaggtggaggtgatatcagcaaaaaaggtggagcagggacctccaaaaatcatctcctctatagaaacaatgagatcatcggcaaaaatggtcagagtcaacgtttgctgaagttaaccaaaggcttgcagcaatctggggagcatttattcaagaaaaacggckgtatctttgtatgaaatgcaagctttatggcaatctaattggccttattactattgcccactcctgagctccgtagtagtaaccttgaaaaccaatagtctgcaatcatggtgaaaaccagtggcctggcagaccctggaaagggaagaacagagctgaagctccttcaaagcctcatttccagagaattgccactatctaacttgtctagtcgtttctggaagacccccacacaaggctgtctttatttgatctgactggtagctcatccagtgtgaacagctttttttccccagggacagttgtctaaaacaattaggcaattgtttaacattacagcttc

SEQ ID NO: 316071 - DNA, 539 bp, Homo sapiens
actttcctcttaaaggcaccataggatggttgaggtggaggtgatatcagcaaaaaaggtggagcagggacctccaaaaatcatctcctctatagaaacaatgagatcatcggcaaaaatggtcagagtcaacgtttgctgaagttaaccaaaggcttgcagcaatctggggagcatttattcaagaaaaacggcggtatctttgtatgaaatgcaagctttatggcaatctaattggccttattactattgcccactcctgagctccgtagtagtaaccttgaaaaccaatagtctgcaatcatggtgaaaaccagtggcctggcagaccctggaaagggaagaacagagctgaagctccttcaaagcctcatttccagagaattgccactatctracttgtctagtcgtttctggaagacccccacacaaggctgtctttatttgatctgactggtagctcatccagtgtgaacagctttttttccccagggacagttgtctaaaacaattaggcaattgtttaacattacagcttc

SEQ ID NO: 316072 - DNA, 539 bp, Homo sapiens
actttcctcttaaaggcaccataggatggttgaggtggaggtgatatcagcaaaaaaggtggagcagggacctccaaaaatcatctcctctatagaaacaatgagatcatcggcaaaaatggtcagagtcaacgtttgctgaagttaaccaaaggcttgcagcaatctggggagcatttattcaagaaaaacggcggtatctttgtatgaaatgcaagctttatggcaatctaattggccttattactattgcccactcctgagctccgtagtagtaaccttgaaaaccaatagtctgcaatcatggtgaaaaccagtggcctggcagaccctggaaagggaagaacagagctgaagctccttcaaagcctcatttccagagaattgccactatctaacttgtctagtsgtttctggaagacccccacacaaggctgtctttatttgatctgactggtagctcatccagtgtgaacagctttttttccccagggacagttgtctaaaacaattaggcaattgtttaacattacagcttc

SEQ ID NO: 316073 - DNA, 553 bp, Homo sapiens
tcaccaaaaatagaatatcaaaagagatagaaattatgagaaaggaccaaatagaaaatctcaaattgaaaagtacaattactgaaataaaaaatttatcagagaggcttaacaacagatttgagcatgtcagtaagataattttccagtccaaggataaagagagagaggaaaaaacaacaacaacaaagaagtgaacagccttgagatctgtgggattccatgaagcataccaacatacgcatactgtgaatgccagaaggagaggagagagaggatggggcaagaaaatatttaaaaaagtaatcaccccaaactttcctaatttgatgaaaaacatcactgtatatattcaaaaagctcarcaaacatcaaataaactgaaaggagattcacacctaaatatatcatacccaaactgttaaaagccaaagacatagaggaaatcttaaaagcagccaggaagaggctactcatcacatacacaggattctcaacaagatttatcagaaactatgggagccaggagtcagtgagtgacatattcaaaatg

SEQ ID NO: 316074 - DNA, 568 bp, Homo sapiens
gagtaaagagattaaattagtaatcaacaaacttcccacaaataaatgcccaggaccaaatgacttcactgctaaattctaccaaaccttgaagaagaatgaacaccagtccttcacttagtcaagcatagaagaggagggatcactttctaactcatttaagaggccagcgttactcagatatctgtaaccagataaagatattacaagaaaaaactacagaccaacattccttatgaatatagagacaaaaaccctcaacaaaatactagtaaaccaaatccagcaacatatgaaaaggataatatgccatgacctagtgggatttatcctaagggcacaaggttggatcaacatggaaatcaatgtcatataccayatgaatggaataaaggacaaaacccacctgatcatctcaatagactcagaaagaccctatgtccaattcctctctgccacttgctaactttgttgcattgagcaaatgccttgaggtctctgagccttagtttcttcaatggttaaggattaaatcagttaatataactagcataatcaatatatgcta

SEQ ID NO: 316075 - DNA, 585 bp, Homo sapiens
aaacatgcctgtttcccagaggcccgccaaaatggtgttatcaaacatgtttctcttccaatcgattagttgaaaaatgaagtctgtttttatttgcatttctcatattgtgaatgaggttagcctcattttttcatatgtttaagagcaatttgtatttctttttctgtaaactatctgttcataagctttatctgttttcctatctttttttgttttttcttatctgttcctagaagctcttaacataaggtgctatggtttgaatgtatcctcccaagttcatgtgttagaagtctaatccctaatgtaacagtgttgagggggtgacttttaagaggtaattaggtcatgagggggctctgccctcataaatggattaatgccattatcgtgggagtgagttcattatctcaakagtgaatttgttataaaagcaagctcagccatctcttaccctctcctgcacattctcttgctacatgatgatttctgccatgttatgacacagcaagaaggccctcatcagatgcagctccttgatcctggacttcccaaccttgagaactgtgagccaaatacatt

SEQ ID NO: 316076 - DNA, 557 bp, Homo sapiens
aaacaccaggaattccttgccattacatttgctagtccatcttcccaaacacccaacctgcttgtcttttgtcattttaattaagctttttattgaaatgtgacatccataaagaaaggcacaccattcataagtagccttatgaagttttaaaaaccgaggacctccagataatcatccctagctcaagatctagaacattgcagcatccaagaaggcctctcagactctctcccagtctctgttcccactcacaatttctatcagcagattagttcactcgttgttaagatttatatcaattaaagatatatgtactcttttgcatgtgactcctttcttttgtgttgtgcttgtgagaktcatccgtgttgttccacattgagtccttcatttgtttttgttgctgtatagtgttccattgtgtgaatgtaacacaatgcattgcttcattttaatgctgctatttggattgtttctagtttgggactattacatgtactgaagctatcaacatccttggcaggtctttagatgcatctttgtgagcttttcta

SEQ ID NO: 316077 - DNA, 535 bp, Homo sapiens
gtactaaaaatacaaaaattagccaggtgtggtggctgtggtggcaggtgcctgtaatcccagttactcgggaggctgaggcaggagaatcactttaaactgggagatggaggttgcactgagccaagatcgtgccactgcactctaatctgggcaacaagagtgaaactctgtctcaaaaaaaagaaaaagatggcttctcatacatacctctagggatgtatgtagacatcctcttctacctaaattgaatcagtctgtagcaaattcctctaatgcccaacatcacattccctggactgcctctgatttcagccacaactggagtgggcagttctgtgtgagctacaactcccattgcacaggctgtccatcttttcaccttctgtctcctgtccttcaatcaggggacaagggacaatgctggaacccttccttacacttctcaggaggtcccaactgaagcaagccccttgccacactatgtgaaratcatactccctttgctcctcccctcattctcgttactccctca

SEQ ID NO: 316078 - DNA, 546 bp, Homo sapiens
ctaaacactgagtacacatgaacacattatgggaacgacagacaccagggccttcttgagagtggagggtgggaagaggtgaaagtcaaaaaactacctatccagtagtacgctcactaccagggtttgtacaccaaaccccagaaacacacaattttctcctgtaatgaatctgtacatgcacctcctgaacctaaaataaamgatgaaaaaagagaacttgttgaaacaataatagaatttactagttcttgtaactaacaaaataagctttagattaggcttgatccagcagccccaaataatgctaccaagaacttcatttttctttctctttctactctgtctttttgggcatctgcatatattgttttgaggcccatccaaaagctaaaaagagtttattgccaccccaagacatatggctaatagtgggagaatggtaacctctcaaaggggaatcaggatactattgagggaatcgcttctggaaaagcaaccaacaaatgtccatgcaccaccttcataaggtagttgcttcattca

SEQ ID NO: 316079 - DNA, 582 bp, Homo sapiens
agttgaaagtgaacgctcaggttgggtatttggttgaaaattgaagctagaagtttggctatgaaaatacagagatagaaattttggagtcatcagagtgaggatgatagctgaagccagaaatatgacattagtgatgtctaaagaataagaaggacttgaaaatatggtttgtgttaaaggagcaatattayaaagagataaatgagcagagacttcgtgaaaatccactattcaggagagaagagagagagaaggaaaagaaacaaagtctccagagaagaagagatcagagagagagagagaaagagagcagggtggtaagtgtggggaaagaaggcaagagtttgaaggtggtagggtctaacgcagcgccaaaaatggaggaggataagaaagcgctgctggcggagtgtctggaatggaaaccgggttggaacgagcgaagggcagtgaaagaaatggaaataagccaggagtgtcccagaaggctgcagctctgtgccgtgcaccagctataggccaatcagttcatcctccccgctctttggggtgggtattaccatccctgccccaggggaa

SEQ ID NO: 316080 - DNA, 546 bp, Homo sapiens
ctaaacactgagtacacatgaacacattatgggaacgacagacaccagggccttcttgagagtggagggtgggaagaggtgaaagtcaaaaaactacctatccagtagtacgctcactaccagggtttgtacaccaaaccccagaaacacacaattttctcctgtaatgaatctgtacatgcacctcctgaacctaaaataaaagatgaaaaaagagaacttgttgaaacaataatagaatttactagttcttgtaactaacaaaataagctttagattaggcttgatccagcagccccaaataatgctaccaagaacttcatttttctttctctttctactctgtctttttgggcatctgcatatattgttttgaggcccatccaaaagctaaaaagagtttattgccaccccaagacatatggctaatagtgggagaatggtaacctctcaaaggggaatcaggatactattgagggaatygcttctggaaaagcaaccaacaaatgtccatgcaccaccttcataaggtagttgcttcattca

SEQ ID NO: 316081 - DNA, 610 bp, Homo sapiens
agccaatggctacaaaatatacattcttctctttagcacatggattattatgaaggacagaccatatgttaggccacaaaacaagtctttaaaaattcagaaaaattaaaatcatatcaagtaacttccctgaccacaatggaataaaactttaagtcaataacaagaggaactgaaactacacagaaacatgaaaattaaacaacatgctctggaataaccagtggatcaatgaagcaattaagaacaaaatttaaaattttctgaaacaaatgataatgaaaacacaaaataccaaaatctgtgggatacagtgaaagcaatattaacagggaagtttttacctataagtgcctacactaaaaaaaaaaaaaagaaagaaagaaaaacttcaaagaagcaacctaatgrtgcagtctaaagcaatagaaaaacaagaacaaaccaaactcaaaataagtagaagaaaacaaaaataaagatcagagaagaaataaattaacctgaaacaaaaaaatacaaacgaccaatgaaatgaaaagttggtttttgaaaagataaagtcaaccaacctttagccaggctaaggaaaaaagaaagagaacccaaa

SEQ ID NO: 316082 - DNA, 610 bp, Homo sapiens
agccaatggctacaaaatatacattcttctctttagcacatggattattatgaaggacagaccatatgttaggccacaaaacaagtctttaaaaattcagaaaaattaaaatcatatcaagtaacttccctgaccacaatggaataaaactttaagtcaataacaagaggaactgaaactacacagaaacatgaaaattaaacaacatgctctggaataaccagtggatcaatgaagcaattaagaacaaaatttaaaattttctgaaacaaatgataatgaaaacacaaaataccaaaatctgtgggatacagtgaaagcaatattaacagggaagtttttacctataagtgcctacactaaaaaaaaaaaaaagaaagaaagaaaaacttcaaagaagcaacctaatgatgcagtctaaagmaatagaaaaacaagaacaaaccaaactcaaaataagtagaagaaaacaaaaataaagatcagagaagaaataaattaacctgaaacaaaaaaatacaaacgaccaatgaaatgaaaagttggtttttgaaaagataaagtcaaccaacctttagccaggctaaggaaaaaagaaagagaacccaaa

SEQ ID NO: 316083 - DNA, 610 bp, Homo sapiens
agccaatggctacaaaatatacattcttctctttagcacatggattattatgaaggacagaccatatgttaggccacaaaacaagtctttaaaaattcagaaaaattaaaatcatatcaagtaacttccctgaccacaatggaataaaactttaagtcaataacaagaggaactgaaactacacagaaacatgaaaattaaacaacatgctctggaataaccagtggatcaatgaagcaattaagaacaaaatttaaaattttctgaaacaaatgataatgaaaacacaaaataccaaaatctgtgggatacagtgaaagcaatattaacagggaagtttttacctataagtgcctacactaaaaaaaaaaaaaagaaagaaagaaaaacttcaaagaagcaacctaatgatgcagtctaaagcaatagaaaaacaagaacaaaccaaactcaaaataagtagaagaaaacaaaaataaagatcagagaagaaataaattaacctgaaacaaaaaaatacaaaygaccaatgaaatgaaaagttggtttttgaaaagataaagtcaaccaacctttagccaggctaaggaaaaaagaaagagaacccaaa

SEQ ID NO: 316084 - DNA, 531 bp, Homo sapiens
ttgctgggattttccccttgaacagtttaaataatgcctctttgtcttttatttttgccgtacattcttttagtaaaataaccaggaagtaagcagtcctcaggcaggcttcatgtgaaagtcttctttggagaagggagctttggctgggagctccagggtcccaggagaatggctctgcttctttgtatctgacaaataaggccaaaatgatagatctcttggcttaaggacatcttacatatttatggactgacatctttctccatcaagattcatgatctagattttcagctgccaagagggacctcggccattgttctaccaagtggtgcattaatacgaccttttcattgttcaaattcagagagcagagtgaataaaaatcagtggcatgcagatatatagttggaagacaacaacaatgacaaaatcttcctccttccgatttcaaatrcagcatgtcagagaacctatttcacctaaaaaactttagcacaatttgggaacggttttataaacagcatttta

SEQ ID NO: 316085 - DNA, 609 bp, Homo sapiens
gctattgctaagtgactaaaaagctaaaagctttcaataatcttactttgcagcagaggtaaaattagactgctggacagatgaggagaaatgacagcaaaaaaatcatgcattcagtttagacttattaagcactatgtcctataataaaatgcaaaaccagaaaaagataacccctacaacaccggctcaaaacatctgagttgtttatagagacaagtaatttgcccttactctaactctgtcagggaacaaactaattcttcytaaaggaaaaggaaaataaaaataaaaatacatagtaaaattttcatataggaagtacaatatgcaatttttaaaaatttcagtattaacatgaaaaacaaatcaaaagattaaaaccaaggaaaactcctacaataaaaacagctctacaggtgatctagataacgaagtcattagacatggaatttaaaacaaacctgattatagtattcctcccttatccatggcggatatgatccaaaatccgcagtatagttccaaaccatatatatatatactagcatttttatccttaataacttgagagctttcacctgttaactaacgaacaaacttaatggc

SEQ ID NO: 316086 - DNA, 584 bp, Homo sapiens
ttcttcagcccttattcttagagaattcctgattccctgaaatatatgggttccagtgctagagaatctgtcatgaaatcacatctcraattattctattgccttagaatattcttgtctaaattctgacaaagactttctataagagaatagtataggctgtcatctctcaataatatatataaaaacatatgctaagccaaacaaaagccaattaaatttacttacacagaaaaatatatcaaagatgaactgagtttatgctaggattttaaaaaggtttaactttcaaaagcaataaatgcatatcagtatatcaatgtaataaagaagaaatatgataatctcaatggagaatcaataatgttcttaacttgatttaaaaaaaacattaaaccaacatatccaaaatgttcagaatggcattttctgctaagattggaagcaaaacaagttcagaatcaaaacactacttctcttcaacttctgttaatgtttctagccagttcagtaaacaaacaaaaaagtaataagatttggaaatgaagaagaaataattgttgtaattggcacataatatatac

SEQ ID NO: 316087 - DNA, 584 bp, Homo sapiens
ttcttcagcccttattcttagagaattcctgattccctgaaatatatgggttccagtgctagagaatctgtcatgaaatcacatctcgaattattctattgccttagaatattcttgtctaaattctgacaaagactttctataagagaatagtataggctgtcatctctcaataatatatataaaaacatatgctaagycaaacaaaagccaattaaatttacttacacagaaaaatatatcaaagatgaactgagtttatgctaggattttaaaaaggtttaactttcaaaagcaataaatgcatatcagtatatcaatgtaataaagaagaaatatgataatctcaatggagaatcaataatgttcttaacttgatttaaaaaaaacattaaaccaacatatccaaaatgttcagaatggcattttctgctaagattggaagcaaaacaagttcagaatcaaaacactacttctcttcaacttctgttaatgtttctagccagttcagtaaacaaacaaaaaagtaataagatttggaaatgaagaagaaataattgttgtaattggcacataatatatac

SEQ ID NO: 316088 - DNA, 584 bp, Homo sapiens
ttcttcagcccttattcttagagaattcctgattccctgaaatatatgggttccagtgctagagaatctgtcatgaaatcacatctcgaattattctattgccttagaatattcttgtctaaattctgacaaagactttctataagagaatagtataggctgtcatctctcaataatatatataaaaacatatgctaagccaaacaaaagccaattaaatttacttacacagaaaaatatatcaaagatgaactgagtttatgctaggattttaaaaaggtttaactttcaaaagcaataaatgcatatcagtatatcaatgtaataaagaagaaatatgataatctcaatggagaatcaataatgttcttaacttgatttaaaaaaaacattaaaccaacatatccaaaatgttcagaatggcrttttctgctaagattggaagcaaaacaagttcagaatcaaaacactacttctcttcaacttctgttaatgtttctagccagttcagtaaacaaacaaaaaagtaataagatttggaaatgaagaagaaataattgttgtaattggcacataatatatac

SEQ ID NO: 316089 - DNA, 594 bp, Homo sapiens
tttggcctgagtcattaattcctattaatttyttgtgaaacaatgcagtttaattgttaaatgagccaaaataagtatttttaaacattaatatttaaattaactcttcagaaataaaatggaactggttgataattaaaggttaatccacatccagaaagacaaattgagtaattttgatatttatgactcgtaaaaaatggcacagttccttgactccctgccaagctacaaaatcttgcttagtaaataaaggaaattttgacaaacacagttttagttcacccagtttggctgataaatctgttcttacatagacatggctttggtcatgtaactatttcccctctcccttttaaaaagcaaacaatgagcagagatataatacacttttatagggttaaaataaatcaaaagacaatgtttaattttatctgataacatggaaattaattcactagtactatgcctccattttttaaatgtgcacttcacatgcataagccttaaagcaaaatatatgaaacttctggattctaaaagaaaatgcaatctaagtaatgaagggacactaactcttaaattttaattggg

SEQ ID NO: 316090 - DNA, 661 bp, Homo sapiens
tgttctctgtaataataattacatgtattataaaaatcataactgtaataaacagtataatgaaaggaaagactatttctctaattttcaaaaatgaaatattgaactaatgaatagattcttaagataagtcttgttattactggagagatcttataattttttcaaattattcattacctaaggaaatcatgttttttcttagtctacctatagtttttgatgaaatgattaataatcaaaggtgcttatttctcactgaagcgagcaactcagtgttgttctagagtgttgtgggaaaagtgattttcttttgttgtatttctcratagaaaaattttgctatgatatttctactgtagcttatttaatttttttccaatgttgtgaagctatggctcaggccaatgggtgaagaaagatatataggactataatcgttttgacaactccatatgactgtgagccttttgataaggctagtcatcatctgaccacttagaattgaataaaattttgaggaacaaggtttttagtacaatgatgtattactttcttcatatatccacagtatttttacctaacagattcatggaagaatgatgatgtatgccagaacaccagatttgatcaatctttgagattaggtaataataagacc

SEQ ID NO: 316091 - DNA, 668 bp, Homo sapiens
gccatattaaaatatgcctttagtctacggccaattaaagaaattagtgttaaaagaagaaatctgggtgattctgagatttagtttataatctgggaggagtgcaaatattattaatattataaattagtagtatgaaccataataataaaaataataaagcttctcatgtaaactccccaaatataataattatgttttataggtatctgactcagggcagaaaatagatcagctttataatattgactgtctaatgactacaacttcctttgttttaataaaaaattaagatggccaaataacaatgaaattgtgacattcaaatatacttttcaattataagcactgaggcaccccaaactctgtgggcacaactttttttgttttactccaactttaacaatatttttttttaatcactcaaataaagaattaaattaaccaagtcaagatggattaaagacttaaacataagacctaaaaccataaaaaccctagaagaaaacctaggcaataccattcagracataggcatgggcaaagacttcatgactaaaacaacaaaagcaatggcaacaaaagccaacattgacaaatgggatctaatcaaactaaaaagcttctgcatatcaaaagaaactattatcagagtgaacaggcaacct

SEQ ID NO: 316092 - DNA, 668 bp, Homo sapiens
gccatattaaaatatgcctttagtctacggccaattaaagaaattagtgttaaaagaagaaatctgggtgattctgagatttagtttataatctgggaggagtgcaaatattattaatattataaattagtagtatgaaccataataataaaaataataaagcttctcatgtaaactccccaaatataataattatgttttataggtatctgactcagggcagaaaatagatcagctttataatattgactgtctaatgactacaacttcctttgttttaataaaaaattaagatggccaaataacaatgaaattgtgacattcaaatatacttttcaattataagcactgaggcaccccaaactctgtgggcacaactttttttgttttactccaactttaacaatatttttttttaatcactcaaataaagaattaaattaaccaagtcaagatggattaaagacttaaacataagacctaaaaccataaaaaccctagaagaaaacctaggcaataccattcaggacataggcatgrgcaaagacttcatgactaaaacaacaaaagcaatggcaacaaaagccaacattgacaaatgggatctaatcaaactaaaaagcttctgcatatcaaaagaaactattatcagagtgaacaggcaacct

SEQ ID NO: 316093 - DNA, 398 bp, Homo sapiens
attcccctatgttgctcttcctttatcagtatttctcatccaactcattctctctaaggaaaagcacctgsgaaatgtgattcttcataatagaagaagccaacttactctgtaagattcatatcacaaataaataattttaaccaagttttcttttatttttgttcaactttatggagaactaatcattaaagaaattttgaaggctgtaattcaaatgtgcatcttttagatactctaacccatcataatctttcggttttctaaatattttctaacttcctagaaaataagtttccaaaaaaatttactttctaaaaattagtacttgaaaatttcattttagtgctaaattaatgagttactcagctccattgctggtgtggctttgctactac

SEQ ID NO: 316094 - DNA, 398 bp, Homo sapiens
attcccctatgttgctcttcctttatcagtatttctcatccaactcattctctctaaggaaaagcacctgggaaatgtgattcttcataatagaagaagccaacttactctgtaagattcatatcacaaatamataattttaaccaagttttcttttatttttgttcaactttatggagaactaatcattaaagaaattttgaaggctgtaattcaaatgtgcatcttttagatactctaacccatcataatctttcggttttctaaatattttctaacttcctagaaaataagtttccaaaaaaatttactttctaaaaattagtacttgaaaatttcattttagtgctaaattaatgagttactcagctccattgctggtgtggctttgctactac

SEQ ID NO: 316095 - DNA, 622 bp, Homo sapiens
agggaccatgtggtattttcagctaaggtctctaaaatcagcaagcgctgtatgaagggaagaaaaaaatggatagatctttactgatagatcattatggttaatagaaagttagctgcttacatttcttacctttgattatcagacatgtgaattcaggccctgggaaaacagcaacatattaatatttggtcactaattcagaacaaagaccacatcttggtggacattaayggaatcacacactgtattaatcactagatggttctagatatgagacttcaaggcttgttgttagataagggatgctgtgttattagtcatcccaacttagggtgataagaaaaagactagtgaattcccagagtcagagctaattgcttaatttctgactaatgttgggcatatctatagaagctatacattctagacgtgaggaaataaacacacaatgtgtttttggactcactgttaccaccaggaaccaaagctccattgagtactttaattccattagcccatattcttaaatcaccaggaatgattgtcaattcgctattagtgaattcccaccaaatttgttatatttcctaccctattacatagtaaatggtcaaagact

SEQ ID NO: 316096 - DNA, 620 bp, Homo sapiens
cttcctggcttctgaggaatgttagcaaacactggaatttcctggtttgtagatacattagtccaatctctgcctccctcatcatgttacaagtagaagagatcccagttaccctgagttagcggtggtatatctgtacaggtctgcagcaacttcagtcctttctcctcagaagaaagaatttgacttaggagcataaagcagaaaaagataccaaggcaagtttcaaccaggagtggaagtttatttaaaaaggctttagaacaggaaagaatggaaagttcacttggaagagactcaagagggtgcctgaaggtgaaagagggaagagagtgtttaccctttatctaagggctttctaaactcacctctttccccatgattcttccctttgagtgggctttccacktgcatggtgctctccttacccttgggaattgagcacacacagtgtgtttaggaaggggtacacatgcccatctgaggcttttttccctttttctggtgaagtgaatccagaacgtcatactttgccatttttttgtgtgccatttggtgtgtgcaaacccaggcagtttcttctccttggagtctgcattcatttaacactaatgttaata

SEQ ID NO: 316097 - DNA, 583 bp, Homo sapiens
aatctatagcattatacacataaacccataacaatcaaattataaactaactggctattaatatttttattagaacattcacaatgtaaatattaatttatatagaaagtacaaaatattctgtgcaaaaaactttactgcttctagactaacatttcttacatatgcatatggttatatggtcaagttattagatatgcaatgaaattcatggtatgtctggtttcatcacatgctgataaataaacrttcttactttttgtgcagtttaatgtatattaatggatcttcacacagtcactcttaaataataataatcattaccctttactattaagtagcgtttccaaagttataacctctcacaggatgccctttctgaaggataatatctgcatactcaaaatattttctttcttaaatgtctagattttgatctgtcttatgacacatattataaatctgaaaaatgacaacaaaacagcaataattttagtaacagaatccctaattctataatcttttctctacaataggtatactttttaaaattttcagtcgaactaaagagctttactaacta

SEQ ID NO: 316098 - DNA, 586 bp, Homo sapiens
tccaacagcttagatgcggcaagtaggaattccaaggaacccgtacttcttccaggcctactgcaaatttgggtgttttcaaaacctgaactcagatttgacaatttgtttgattaacacacaaaacttagaaaggcactataataattacagctttactttaaaagatgcaaataaacaaactaataatgtggtacataaggtgacatccagaagggtcctgagcacacagaagcttcactccccagggtagctggagtgtgtcagactcccagcaggtaaatgtgttcaccaacctgcatgcttacccaaatctttctatttagagttttgtttttgttttttttcgtggtttcatgacaagtttcatagtttcaagtaggtataatctaacccttgagcttggtgccctggctcatgcctataatcctagagactcaggaagctgaggtggaagtatcacttgtggttactaggagttcaagtccagtctgacaacatagtgaaacctcatctcaaaaaaaaaaaaaaaaraaagaaagaaagaaaaagaagaatacagaaattagctgagtgtgcccctgta

SEQ ID NO: 316099 - DNA, 543 bp, Homo sapiens
tgtttgagtatactctacaatgtttgcattataaaatcacctaacaatgcatttctcagaccatatcctcatcattaagttaagcaatgcatgactgtataagattctgtattagcagactacagagagtatccacctggccttgaagcaaaatcccacctctggagagcgccttgttgcatagaatggtgagtgggctccaggatctgagtatggctccagttgacaactaatgagaaaccaggaaccactgtcctttaactgcaagtgatatggagcaaaaaactgtcttagagggctgcagtccccccagcatgaaaataaagaaaaatctttagttccatcaagggaaattccaggcrtctagctagctctgcaaagtaaatgagcaacttgataaacatagaggaatagtagcttaaaaaacagcaaagcatgccaggtgcagtggctcacgcctgtaatcccagcactttgggaggctgaggcaggtgaatcacctgagatcaggagtttgagaccagcctggcaaacatggtgaaa

SEQ ID NO: 316100 - DNA, 543 bp, Homo sapiens
tgtttgagtatactctacaatgtttgcattataaaatcacctaacaatgcatttctcagaccatatcctcatcattaagttaagcaatgcatgactgtataagattctgtattagcagactacagagagtatccacctggccttgaagcaaaatcccacctctggagagcgccttgttgcatagaatggtgagtgggctccaggatctgagtatggctccagttgacaactaatgagaaaccaggaaccactgtcctttaactgcaagtgatatggagcaaaaaactgtcttagagggctgcagtccccccagcatgaaaataaagaaaaatctttagttccatcaagggaaattccaggcatytagctagctctgcaaagtaaatgagcaacttgataaacatagaggaatagtagcttaaaaaacagcaaagcatgccaggtgcagtggctcacgcctgtaatcccagcactttgggaggctgaggcaggtgaatcacctgagatcaggagtttgagaccagcctggcaaacatggtgaaa

SEQ ID NO: 316101 - DNA, 638 bp, Homo sapiens
attgatgtttaccaactttgagtctgtaatgtaataaatgtaataacattaaaccgccgatcttggaaaattataaagaaatatgtagaataatttgattattttcaaagtttaccattttgttgacacagttgatactttcaaatatttcttcataagtcaaatttcttccagaaatatctatttaattactcatcatttatctcaacaaatgatgttatgtgctatattctatattctagaaatatagcaatgaataggaacaaattaattaaatagtcaagataagcatggcttttcaatgtagaattaataggaaaggtaactaattgagtgttgagaaatgaactgcaccttttttcctctaggagaaacccaaaatttataccttctaaatccctaacacacacacacacacacacacacacacacacacwctctctctctctctctctctctctctctctctttcatgcacacaaagttcaacaacaaagaattcacatttatatatagacaaagcacacacacacacaaaactcacacacacacataatcttgtcttaaaggattaaaaaaatagatgaacatgtctgagattgactgtttgagtaggatgtgcataaatgaaactgatg

SEQ ID NO: 316102 - DNA, 598 bp, Homo sapiens
attgaaaacagtaatatctgaaataaaaatttcactataacagatggcacacagccaaaggaaaggtcagcgagtgtgcaggccgatccatagagtctttaactgaaggagtaaagggtgctggatatgataaatatgtggttaacataaaaggcttttgtggtcagaagactccataggtaatgcattcaattyattctctccttgtatgtatattccactcccttttaggggatcaagtttattagaagacagcaaaagtgacatgctggtactctgccaacctttgaaaactttggcatcttctactttttttctctttgatggcagtcaccacgctttaagaggcccaagctgaagggaaaggccacctgtatcactcaaataaactgtcgccgatgaaatcccagcaaagagcagcagcaactgccagccatgtgaatgagccattttggctgtttattcccaggcaagcccagatgcctgcagcctcagctgacctcatgtgctgcagcactatctacctgagcccatccaagccactatatttctgccatcttccaaagccaaagtttatcatataagtttggcttgtata

SEQ ID NO: 316103 - DNA, 598 bp, Homo sapiens
attgaaaacagtaatatctgaaataaaaatttcactataacagatggcacacagccaaaggaaaggtcagcgagtgtgcaggccgatccatagagtctttaactgaaggagtaaagggtgctggatatgataaatatgtggttaacataaaaggcttttgtggtcagaagactccataggtaatgcattcaatttattctctccttgtatgtatattccactcccttttaggggatcaagtttattagaagacagcaaaagtgacatgctggtactctgccaacctttgaaaastttggcatcttctactttttttctctttgatggcagtcaccacgctttaagaggcccaagctgaagggaaaggccacctgtatcactcaaataaactgtcgccgatgaaatcccagcaaagagcagcagcaactgccagccatgtgaatgagccattttggctgtttattcccaggcaagcccagatgcctgcagcctcagctgacctcatgtgctgcagcactatctacctgagcccatccaagccactatatttctgccatcttccaaagccaaagtttatcatataagtttggcttgtata

SEQ ID NO: 316104 - DNA, 453 bp, Homo sapiens
tattaagaaaatataatattcttgttgtgagaattaaatgaggaacacctagaagtgaacataatatgtagaaattattaaataattgttatatttcaaccctatttatataaaagggcatttacaataactcagtgctttttgattatttttccctggactgatggtaaggaaagcattttatattgatctagtatacaaagaagcaaatacacatakacatatatatgcagtttcatacatacttatcgcaaaaaacaaattctcagaacatttactccatggatacagtacctgatttttcccttgtatcttatgttatgtcatgctatgctattctttaccatagtccactattttattctacattttaaaatgttggtcatgacccactaaatcaatttcatgattggctaaagtgtgcttataatgctctcaaagatattacatgac

SEQ ID NO: 316105 - DNA, 568 bp, Homo sapiens
ttttaaattttaaaaacgtttttattgtaaaatacattgtaaataaattgaataaaattaatctatttagattaatcacactaaaaatatatakgtattcattgctcacactaagcaatctttccttgtatcccagaaggtggttttcttgatgataccaatgaataaccgctaatgtgcatattcatcttcactagaattaccaaaaacaataaaacacaatggaatgtaggaattacactcccactattggtgagatgaaaacttctagttgttctaatatttacatgcttgatattaatagatttcaattattataaatttgctgaatgtaaaataaattttattatacatttaaattttttttctgatattcaatgggctactcattttttgtttgttcgtttttttgttgttttttttccaatattcaatgggttatgctttttgttttgttttgttttgttgttttgttttttcataggctatggtttatttaactttcttctgtgaaatactattgatgttttcaaccatcttttgataaagtgagttgtttgtagtgatt

SEQ ID NO: 316106 - DNA, 590 bp, Homo sapiens
tacaattcaagataagttgtgggtggggacacagccaaaccatattaccagtatataagatttttgaagattttagtaagataaaccttttcttagcaaaatttatcataaaagctagatatgggatagaataaaatatgtccagcggaaccagggccagagggctcagaagctccagaatsctgatcccactaatttctttttctggtggtcttagagaagtttgaaaaccactattagaatggaaaagatactggtccaaatttagaaagtaggtgttataattctgagagaaacccccttaactctagggccattgttgacatggctgatctcttggcactgaactttctcattgatccactaaatgggtaagaataaaaagatataaacgactactaatttctggtcaagctatgacattgtatctgggatgctctgtgagtacttatttacaaaaatgacaatatttaggactttggagattaatgaatttttgtaatctgaaatgatgaaatccctagaggaaatatagccataagtcctttccaagacacttatgcaacaataagtaagaccattcccttggc

SEQ ID NO: 316107 - DNA, 550 bp, Homo sapiens
ataaactatcttacttttaaaatgttaaaattcctaacttgtttgaaaaatttgtgcctgcctaatatttgagaataatgttaataatgtgattgacaagaactaaattccttgtaattactgaaaatgtgagaatacaccatggaatttaatcaatctctcctgcaaaaatttaacaaataaaatttcagtattaagtaatgaaaacaattgccttcttggtatgtggttcactaagaagttttgaccataactataaacaacaatatcacaggcataaaagttrgagtcacttcaaagagattttcacaaaaaagtaactagaagcctgctaatgttttctatcaagcaggtttcttgagttgctaaaataaaagttaatgttatcattaaataaatatttataccataatatgtgttataaaaacttttgaatgaagtttctaaagcaaaatggtgcctaaataaatcagtgattgatgttaatgaacaaaagtaaaaatcgataacattgtaatgtataggaataaattaaattacagaagtaacc

SEQ ID NO: 316108 - DNA, 524 bp, Homo sapiens
aaaattcctaacttgtttgaaaaatttgtgcctgcctaatatttgagaataatgttaataatgtgattgacaagaactaaattccttgtaattactgaaaatgtgagaatacaccatggaatttaatcaatctctcctgcaaaaatttaacaaataaaatttcagtattaagtaatgaaaacaattgccttcttggtatgtggttcactaagaagttttgaccataactataaacaacaatatcacaggcataaaagttggagtcacttcaaagagattttcacaaaaaagtaactagaagcctgctaatgttttctatcaagcaggtttcttgagttgctaaaataaaarttaatgttatcattaaataaatatttataccataatatgtgttataaaaacttttgaatgaagtttctaaagcaaaatggtgcctaaataaatcagtgattgatgttaatgaacaaaagtaaaaatcgataacattgtaatgtataggaataaattaaattacagaagtaacc

SEQ ID NO: 316109 - DNA, 293 bp, Homo sapiens
tttatggagaaccctttcacgaggcaggaatatataatcactgggtagtcaaagcaacttcaattctttgaaggtcttgctgcctagatggtaaaataatgaaaatagtgtagaatttttgatgcaatggcagcagtargccattgtagagacttgagttctgatttccatattatcctttaaatataaataaaacttaaggtacaacaaatgtcattttatattagatttattgatcagaatttgagtgccttttaaaaactacgagttctcctccattttcaacatggaaa

SEQ ID NO: 316110 - DNA, 583 bp, Homo sapiens
ccagcatacaattgtggaacaagaataggatgccaactacagacattgcaggtcaaaaggtaagaaatacaaggtaaaggaagggtcactggtccatgacaggtttgaaatacagctgtgctaactctacctgtatttccttgattagatttcagttcttaggaaaaatattgttcatggctttcagctatgttctttacatttttagttccagtcatcaaatagtccttccttttttataaaatttagcacatgtttatatcttagttttatcagtcacattccttccaatctgtagagtttttggtgtctggaaatgtcctttaattatgtatactctctttccttttggtccaagctagtggtgtttgtactgaactgaatttctaaggaagtctatgagtcctccatagacttccctggaatttactccattagacaaaawgttatggccgcagatcattctgagataatttttctgtaccttggcctattgctgggatagctgagggacaccacccttaaattacctacagactctctaatttgattaagacgatctgtaagtcacacccttaatgtt

SEQ ID NO: 316111 - DNA, 567 bp, Homo sapiens
tgttgaccttctgctgagccctttcttgatctgggtgtcaatgaaactaacagcctgccatctgagcagtaggttgagatgtggaatatgctatctccaggacttgaaaattcctaccaggtgttatgctttcttagwaagtggaggtatgcagtgcaagtattttttctttattctgcaataaataaaccagcatgctctggataactagattcttgaaactattgaagtgctgggcaagtgaatatttataagtttatctccagatttgggaggaacttccatcttataaaggtctctcatgtgtttgccacatcttccttttatgaacctatgataatgtcaaaaatacaatggaccaatataatgttctgtagaatgtccagatggcttcagatccctttggtctatattaagacagagggcagagaaattatcatagcctttctgctaaactgttaccatttttgttatctttttgttacacaccacatacacaccacagtgtttggaggctattaatctggactagaagatgacacattagaacctacagctgcaacatgg

SEQ ID NO: 316112 - DNA, 627 bp, Homo sapiens
cttgaacttcagttaagccctctgtattagtccgttctcatattgctataaataactacctgagacttggtaatttataaagaaaagaagattaattggttcatggttctgcaggctatataaaaagcatggctggggaggccccagaaaacttacaatcatgacagaaggcaaaggaaaagcaagcacaatcttcgcatggcagagaaaagagagaaagacagagagagagagagaagagtaaagtactatatgcttgaaataaccagatcttgtgagaactctgttagaaggcagcactrgtgggaaggtgctaaaccattagaaaccacacacctgatccatcgcctcccaccaggccccgattccaacactcagaatcataattcagcgtgagatgtgggtggggacacagagtcaaaccatatcattccacctttgggccctcacaaatctcatgttcacctcacatctcaaaacacaagcacattttccaaaccatcccccattgtcttcagtcattccagtagtacctcaaaggtccacagtccaaagtctcatctgagacaaggcaagacccttgcacctatgagcctataaaataaaaaacaacttagttacttccaa

SEQ ID NO: 316113 - DNA, 544 bp, Homo sapiens
taaagagaaactcatatttgatgtctattttcttttatttttttcttttcaatggtataaaaaaagttacatagtgactttaccaattttaaattcaaaccgaatacaaattctggttacatcaacattaatgatcaattataattaattaaatgagaaaaatcaatgaatggtggccattagtaagccagtatcattttcagtgtctattttgaattttattccagttccaactgatatggttttagaagtaagtccttgatgactctatagatccttaactctgatgactttatttttcttagtaggaagaatatggcttataaagaactatgatttatactttaattgtaaattccacttgctctgtttatggcgttttattttgggtcaggatagttctctattccatracctattaccatttagtttgtattgctggcaaacagtttcctatttataacacaaaactatttactccctggggagtgttgactctcagttaaattaaccaccgctaaagcaattaccattttaaggagcc

SEQ ID NO: 316114 - DNA, 632 bp, Homo sapiens
aggtctaatgtatggcacataatattgacttaataaatagtaagcattatattttactccacacaaataactcaaagataattttttattgtaatcctcagtttgaggacatgtacttgatgtttctcgtacttgtctggttgttggaagtaccagacataatcatttgattggtctgtggatacggctgggcaactgtagttgttaaagcttcctaggtgattctgctgtacagtgatagttgcaaaccactgacctagaggctgctggaggatgacaacatcctgctcccctctgcgtcctgacctacctcagtaagaatttaagtaagtggcgaaatcgccaaagggcaggtaaaagaaggtacacactggggtgttacaggaacctgatagatttatatagtgtgtccttagggccctgtttgtactgyattttcagtctgtttggtgagagtttctaaccagatgtgaatattcagtttccctcatccctgggatcccattacatctttgcagaattcattgacaccaagagtggaaattactctttaaagtcattaataggcacactgttgcatcataaaatgttaatacatttaatagtctcccagcatcctgaataaagcctat

SEQ ID NO: 316115 - DNA, 602 bp, Homo sapiens
gcaatgtttgctcaaggtcattgtgttagtctgttctcacgctgccaataaagacatacccaagactgggtaatttataaaggaaagagatttaattgactcacagttcggtatggctgggagacctcaggaaacttatatatgtgatggaaatgaagccaacatgcccttcttcaaatgacggcaggaaagagaagaaagaatgcctagcgaagggaaaagctccttgtaaaatcatcagatctttgtgagaactaactcactatcatgagaacagratagaggaaaccacctccattattcagttatctccccttggtccctctcatgacatatggggatgtgtcagttcaagatgagatttgggtggggacacagctaaaccatatcagtcatatgtctaatttgtgggatattttcaaaacatgttccattttcctattgcaccacagtgtgattgaaaggaattaacagacagattgttggatgatgaaatttggtgcagcctctctgaaaggaaatatacttgattgttcagagggcggaatctggactactgagagtaaatatctgcatattaatgataacaaaaaggtaataaa

SEQ ID NO: 316116 - DNA, 617 bp, Homo sapiens
gccaattttatcatttatttaaaatggcatttaagaaggaatttatctctaggttaaaaagtaagttttccatcaataagattatatttttacagaaataatagtataaaagtggtgcttttacacttttacagtgaaaaaattgtacattctttagttttgtygaaagacactaaaaaatgtagtatgtcttaaaaagtagtccttctcttaaaaaaaaaaaaaaactaacaaaaattacctttgttttttgcttaaataacacttagttcctgagataaaaggactggtgtctttaaacttactgtgatttccaacagctctaatttcaattcagaatagcaaacataatatgtcctaaaaagaagtgtgcattgtttatacttttttgttttgtatttaactgttttttaagagtgaaactagataaaattttaagtgtctcctgctcccactgtttgaaatttaattccaaaccaaagcttctctctcatatggactgcaagcaggtatctacgcgcttcttaagaattccagtattataagattaagttaattgagcgaaagaccatatctatctgttgagcttgaaaatgatatatttgtttttttttaag

SEQ ID NO: 316117 - DNA, 643 bp, Homo sapiens
aaattgctaattttggaagatataaattataatatgtatttgtcttgccaattcatatctctgaagccaattttatcatttatttaaaatggcatttaagaaggaatttatctctaggttaaaaagtaagttttccatcaataagattatatttttacagaaataatagtataaaagtggtgcttttacacttttacagtgaaaaaattgtacattctttagttttgtcgaaagacactaaaaaawgtagtatgtcttaaaaagtagtccttctcttaaaaaaaaaaaaaaactaacaaaaattacctttgttttttgcttaaataacacttagttcctgagataaaaggactggtgtctttaaacttactgtgatttccaacagctctaatttcaattcagaatagcaaacataatatgtcctaaaaagaagtgtgcattgtttatacttttttgttttgtatttaactgttttttaagagtgaaactagataaaattttaagtgtctcctgctcccactgtttgaaatttaattccaaaccaaagcttctctctcatatggactgcaagcaggtatctacgcgcttcttaagaattccagtattataagattaagttaattgagcgaaagaccatatctat

SEQ ID NO: 316118 - DNA, 586 bp, Homo sapiens
cagtcaggaagggtgtatgcctggaaaaagtgaagaacaagaagaatgaaggtacaaagatgcacataaaatttcagaaagttcctcatgactgaaaaggcacaatttaacctattacctatccaatgactttgaaaactaaatgaaataatgtaaaaaagaaaattctaaaatgctgtaactaatggaatgtttaaggtagactcatgtacccagctaaatggaaatacatacatatacacatacatacatgtatacctgacttcaggatcacagcgagttcgtgctctaaagttgcctcagaaaattgttatatctaagctacaaagcgtttgttcatcaacacattggattatgtaaggcttctgacctctccctartattgatttaagcaaccttcaaattcactgtagcttgctataatttactttttgctgtgtagcaacagaaaaactgacaatatttgctaaagtttgtatatttttttcaatggaaacttaaaaataaactgcttagtcgctcagtatccacttttattagtgtatctatgttccattaatcttattgggttagttctccaaattag

SEQ ID NO: 316119 - DNA, 579 bp, Homo sapiens
acatacatatacacatacatacatgtatacctgacttcaggatcacagcgagttcgtgctctaaagttgcctcagaaaattgttatatctaagctacaaagcgtttgttcatcaacacattggattatgtaaggcttctgacctctccctagtattgatttaagcaaccttcaaattcactgtagcttgctataatttactttttgctgtgtagcaacagmaaaactgacaatatttgctaaagtttgtatatttttttcaatggaaacttaaaaataaactgcttagtcgctcagtatccacttttattagtgtatctatgttccattaatcttattgggttagttctccaaattagtaatcttttatgattctgttaattccctacaaaatgttcagtgatgagaggaatcaagctccaatctcatctgtaaatgagagcaccgttgcattcagaggtagatgtttgctatttaccatgtgttacctttcacgtccttatgcattctataagaaatctgtctaccttgctggcacacacatatataatggaggtttactcttttataccaaatccca

SEQ ID NO: 316120 - DNA, 579 bp, Homo sapiens
acatacatatacacatacatacatgtatacctgacttcaggatcacagcgagttcgtgctctaaagttgcctcagaaaattgttatatctaagctacaaagcgtttgttcatcaacacattggattatgtaaggcttctgacctctccctagtattgatttaagcaaccttcaaattcactgtagcttgctataatttactttttgctgtgtagcaacagaaaaactgacaatatttgctaaagtttgtatatttttttcaatggaaacttaaaaataaactkcttagtcgctcagtatccacttttattagtgtatctatgttccattaatcttattgggttagttctccaaattagtaatcttttatgattctgttaattccctacaaaatgttcagtgatgagaggaatcaagctccaatctcatctgtaaatgagagcaccgttgcattcagaggtagatgtttgctatttaccatgtgttacctttcacgtccttatgcattctataagaaatctgtctaccttgctggcacacacatatataatggaggtttactcttttataccaaatccca

SEQ ID NO: 316121 - DNA, 579 bp, Homo sapiens
acatacatatacacatacatacatgtatacctgacttcaggatcacagcgagttcgtgctctaaagttgcctcagaaaattgttatatctaagctacaaagcgtttgttcatcaacacattggattatgtaaggcttctgacctctccctagtattgatttaagcaaccttcaaattcactgtagcttgctataatttactttttgctgtgtagcaacagaaaaactgacaatatttgctaaagtttgtatatttttttcaatggaaacttaaaaataaactgcttagtcsctcagtatccacttttattagtgtatctatgttccattaatcttattgggttagttctccaaattagtaatcttttatgattctgttaattccctacaaaatgttcagtgatgagaggaatcaagctccaatctcatctgtaaatgagagcaccgttgcattcagaggtagatgtttgctatttaccatgtgttacctttcacgtccttatgcattctataagaaatctgtctaccttgctggcacacacatatataatggaggtttactcttttataccaaatccca

SEQ ID NO: 316122 - DNA, 576 bp, Homo sapiens
ttgattttactgttttcagtttatttaatgtgtgtgtttcccataacccattctaattataaccaaaatgagtatggaaggcaaagcagcttaaatgggaaaaaccataactggaaacctgaagggttgtccttcatgaaagaaactgaggtagtaaatctcatagctaaagggagaaagccrcaaatatttgacttccttatccatgacactgggagcaataggatgctcatttgagaagcttttgctgcataataaaactctattagcaaacaagagtagacagctatttctcaatctcactttgactgttagtttgtgtggctctgcttgaggctttttgttgagtctggtactaaagtctggttctactacccagatctcattccagggcaaagctggagacataatattcacccaggtcttgcttttttttatggtgatcattaaaaatttcagagggatgtccaaaaacactcattgcctcttaagatataggctgggaattggttctctctcacttccacctacatagttttgaacaaagccagccacatagtcaaggccaacattgtt

SEQ ID NO: 316123 - DNA, 559 bp, Homo sapiens
cactgcctaatttagtacccttgtattttagctttaatggcatttctcccataagtcttttgtatatctaatcttatattggtagcagactttatgagaatctaacctgacacagtcattagaacttacagaagcagaaaatagagtggaggttggcagaagatagggaagttgtagttcaatgggtataatgttacatttatacaaggtgagtaagttttagagagatactctacaacatagtgcctatactaaagatattgagagaggagaaaaggwaaaaaaaaaacaggcagacagttaaggcaggtcctcagtagaattcttttaaacagagaaacagcatgaaaaatcaagctgtagctgcacagataagtgagcaagacccaacaaagaaatgcctttgtactttgtgtaatcagcgggctcccaggaaaatgtttcctccccttctatggatgtatacattgtgggctccatgggaacttgtcttgcacagggaggaggcttgcttaagacgtgctcacagctgcacagataagggcacttaacacaggca

SEQ ID NO: 316124 - DNA, 620 bp, Homo sapiens
cctgtgagttaatggtccagtaaattttcttctttagacatagagaaccacacaaattctgttaattttgttagtgcttttgtcactgatatgatactaatgttgttgagtgattgtcagtgatataatcactcctgtccttagggaaaacaaaaacaagagtacaggctaaataagaggaggaggagaatgtttataaggttccatgcattatgaatgacatgagtcaagtgacacaagcgagttgccggatttggggtcaagaatcagtgctggggttagcaggtgagagcacactcaatgtcwgggaggagatgaaatacatttacagatcaagagcaatctgaatactgttattataaattattgtttgttcttcattgtatcatgtattctgcaattcttaaaaataatgactattgaattccttaaagaatagtcaataaatgctattattaacaataaaagcaaataaataaaaacatgtcaggctatcataacatagaaagttaatcccagaagttcataaaattgaatgaaaatgaagggaatttggaggttaaaaaattgattgtggagtaagaagactttgaaaaaaataaatacatccaagtgcattg

SEQ ID NO: 316125 - DNA, 619 bp, Homo sapiens
gggtcatatattttgcactacacatttttatcatctgtagagtcaatggtttctgaagctcagagactctaaatattaaattctgagtttaatctttacatytttctgctctaccacagctgcaaaaaaggttgtctttgtaagcaaccaaggaggattctgactttcatgcatggttttcaatttttggtgaacagtcctgcttttcatttgttgtagggtgtcaaagcaacttaagagcgtcagcctacattgtatgcatggtacgcattgtcctctctccctgtacttttcaaattcctgacttattttactgaacaagacaactcccaccatggaacatacttctaagtatttgtaggtttaaaaattaattatattttggaaagtttatgatttcaacattgagttgtaaattttccgtttaaaaaattcaaccagatttatttaaaaataacagccacatcaaatattatctctaatactaaccaaatacaaaattattttataaaaaatacatattatgcatgaacatagatgccaaaataataaactgtgtaaacctgtaatgaatttctgtccattataagaattttaattataaatttaaaataaaaaa

SEQ ID NO: 316126 - DNA, 619 bp, Homo sapiens
gggtcatatattttgcactacacatttttatcatctgtagagtcaatggtttctgaagctcagagactctaaatattaaattctgagtttaatctttacatttttctgctctaccacagctgcaaaaaaggttgtctttgtaagcaaccaaggaggattctgactttcatgcatggttttcaatttttggtgaacagtcctgcttttcatttgttgtagggtgtcaaagcaacttaagagcgtcagccwacattgtatgcatggtacgcattgtcctctctccctgtacttttcaaattcctgacttattttactgaacaagacaactcccaccatggaacatacttctaagtatttgtaggtttaaaaattaattatattttggaaagtttatgatttcaacattgagttgtaaattttccgtttaaaaaattcaaccagatttatttaaaaataacagccacatcaaatattatctctaatactaaccaaatacaaaattattttataaaaaatacatattatgcatgaacatagatgccaaaataataaactgtgtaaacctgtaatgaatttctgtccattataagaattttaattataaatttaaaataaaaaa

SEQ ID NO: 316127 - DNA, 523 bp, Homo sapiens
aggcatgagtagtagtgccgccagccataagttcaatattaatgaatcaatgacatagatttaatagggcatctttaaagagaaacacccataaaagaagattatttattgatcagttgatgaaaatactgtaactataagctagggggaatctaaccatgaatttcccccaagagcaatgattctgggttcaytaattcagtgttctcagcaaagttatagaatataagtaccacgaataacaaatatcaactatacttctcaagctgttgtccatctttgaatatttttcagtgttctaaaattgttgtttatgatagtatggctagttatagtatactctttttttctacagtagattccctgaacttctcatgttgtcatttctgaaagtagagtatgctgcttatcttatattattttttcaatattaatatattttttggattttacagtttatctcatagcttcattttgttatattattagctatgaaaattacatgaaaagaatgatttgagag

SEQ ID NO: 316128 - DNA, 584 bp, Homo sapiens
gtatcccagaacttaaaataaaatttttttaaaaaagaaatacacatttaaaaaaggaaaatatcttctggttctttagggcctctttggaggaagcaggggcaacatcayaaactttacaattgctgaataatcggtatgtatactaagcttttgtgtaaggaaccagtaaagcaagtgctcaacacgtagaataatttatttaaaaatatatatctgaaaataagaattaggaattgacactttggtacttatttatagaattatttcagttttgaatgttttcgtgtgtttgttttctcattttaatgtagcaaagaagatcatccttatttttagtgtttaaattaaggctgctaaatatctaatgtctttcttgggactttgaaaccctctgctgcttctattactgcaattctaatgctttctattttatatattgagttcacacatagattttctagaaaaactgttcttattgccgaaaaaagctttgatataagcattgtctttaaaaaatttgataaagccactcttccacatggttggcattgtcctgctaatggaattttaggatacttaca

SEQ ID NO: 316129 - DNA, 584 bp, Homo sapiens
gtatcccagaacttaaaataaaatttttttaaaaaagaaatacacatttaaaaaaggaaaatatcttctggttctttagggcctctttggaggaagcaggggcaacatcataaactttacaattgctgaataatcggtatgtatactaagcttttgtgtaaggaaccagtaaagcaagtgctcaacacgtagaataatttatttaaaaatatatatctgaaaataagaattaggaattgacactttggtacttatttatagaattatttcagttttgaatgttttcgtgtgtttgttttctcattttaatgtagcaaagaagatcatccttatttttagtgtttaaattaaggctgctaaatatctaatgtctttcttgggactttgaaaccctctgctgcttctattactgcaattctaatgctttctattttatatattgagttcacacatagattttctagaaaaactgttcttattgccgaaaaaagctktgatataagcattgtctttaaaaaatttgataaagccactcttccacatggttggcattgtcctgctaatggaattttaggatacttaca

SEQ ID NO: 316130 - DNA, 527 bp, Homo sapiens
aaaaaaaaagtacttttaatttggaaattgggctacatagatgcttagagagatataaagggaaacagggaatgtaagkttccccagaaataagtcccaccagaaagtcactagatacccagaaccagaaggtcagagggagggagtagtgctattgcagggcagggtctagatcactcagaaaatgtggcaatcaagtgatcccactcaatgtcaaatgaaaccatataacagatatagctagtagtagaaatggagggaaagaaaggagatgcaaagaaagagaggcagaaataacctgacttatctctttcttccatcctcccaactcccaataataccacattgcctgatcccatccagaattcagctgacattggagtgttatacaagcagtctgtaagccagcccctacaatgcagaggagaatagaaaagggctctggggaagaacagacactagataagcacagtcagtctctcccatgtttcttgatctgtaaaatataaattatagtaaccaccaca

SEQ ID NO: 316131 - DNA, 527 bp, Homo sapiens
aaaaaaaaagtacttttaatttggaaattgggctacatagatgcttagagagatataaagggaaacagggaatgtaagtttccccagaaataagtcccaccagaaagtcactagatacccagaaccagaaggtcagagggagggagtagtgctattgcagggcagggtctagatcactcagaaaatgtggcaatcaagtgatcccactcaatgtcaaatgaaaccatataacagatatagctagtagtagaaatggagggaaagaaaggagatgcaaagaaagagaggcagaaataacctgacttatctctttcttccatcctcccaactcccaataataccacattgcctgatcccatccagaattcagctgacattggagtgttatacaagcastctgtaagccagcccctacaatgcagaggagaatagaaaagggctctggggaagaacagacactagataagcacagtcagtctctcccatgtttcttgatctgtaaaatataaattatagtaaccaccaca

SEQ ID NO: 316132 - DNA, 616 bp, Homo sapiens
gattcctgttcaccctcactgtcttgttcataaagtggaggttaagtgttgggaaagaaaaagctcataaaactagggccccaggcaaccacctctctctcttctgagtactcagctactaaagtagggatggcactctgagagaaggacggcactgtccttgatcccagctccagaaccatggctcagatattttgctgaggcagagaggcagaacctaacaaacagcttaaatctctcctaaaagaaattactttattggcagcaaactgtgggaatgttaagcccaaggwtactttcaaaaacaatggtgtttgtagtaaacagaagttaaaaagagaattgtagcttcattggtgataagagccaaatcatgtaccagttactttacaagagagaaccaggaaaagaaacaagaaagtagaactttgctcggaatcacaacaactctccatcactgactccatgaagtatcactgcaaagaggccaaattttaattggatcagtctgtggaacaattaatgtcaaaaaatactttgtggaaatcgaaagcaatcaactaacaaatagtgaaattctcttctggtgtgatcaggaaaagagacagtcaaatgt

SEQ ID NO: 316133 - DNA, 616 bp, Homo sapiens
gattcctgttcaccctcactgtcttgttcataaagtggaggttaagtgttgggaaagaaaaagctcataaaactagggccccaggcaaccacctctctctcttctgagtactcagctactaaagtagggatggcactctgagagaaggacggcactgtccttgatcccagctccagaaccatggctcagatattttgctgaggcagagaggcagaacctaacaaacagcttaaatctctcctaaaagaaattactttattggcagcaaactgtgggaatgttaagcccaaggawactttcaaaaacaatggtgtttgtagtaaacagaagttaaaaagagaattgtagcttcattggtgataagagccaaatcatgtaccagttactttacaagagagaaccaggaaaagaaacaagaaagtagaactttgctcggaatcacaacaactctccatcactgactccatgaagtatcactgcaaagaggccaaattttaattggatcagtctgtggaacaattaatgtcaaaaaatactttgtggaaatcgaaagcaatcaactaacaaatagtgaaattctcttctggtgtgatcaggaaaagagacagtcaaatgt

SEQ ID NO: 316134 - DNA, 578 bp, Homo sapiens
agcttctaaaacatacattttcaatgcagtcgtcagtggttttctcttctgtctctcccacaaagctacaagttccttgagagaaataattatggcatattcctgtagtctagtacctagtataatatttgggcctgagaaaatgctwatataatacatagatgattatcttaatgtagaaactcatagaattcttatctttaagaaattacctatcaccagaagaaatttgttatagtctttctgattttttgataattgccttaaaaatgttacagattaagtagtaaaaaagaaaaaaaatggaaaaatggaaacgtttagatgcacttaatattatacattatctatatttctaaaagtatttttaatattgttcttagactcaggtaattaagtccccttatatgagccctgagttttagaatgcttgcaacaggcacttcccttttcagacttgaatccagccctagcatagacctaatggaatgccattacccaagacacgtgacttctcctgcctgatcaatctgttttaaacctctgtttaagctggaccgcagttcttactgctcttg

SEQ ID NO: 316135 - DNA, 531 bp, Homo sapiens
aacatgttgttggaaggctgtgcaaaatttgagtaactgaaccacagctccagtaatcctttagacctgggtgtaagagaagagtgaaaagctgtttagtgactaattgagtgtgctgtgctgtttcattagtattaagcagtggttctttattttaatctgtttatatcagagtgatatatcaccttaacatcatcagttactcagcaagcttcacacagttcctctatccataaatataactaaaataaaagatcaatagaaaggcttaaatcttgtgtatgtgtgtgtgtttgcgtgtgtgtgtttgtgtgtgtgtgtgtgacagagagagagagagagagagagagagagagagaaccagagaaacagagagagacatagcactcaaagcayaaacaaccaaaactttatcagaaatatgaagctgacattaggtcaacgtttatataaatcatgtagaatatggctcatgggcaatacagatactgaagagcaaatcttgatctattgtcctgcatcaattcaggt

SEQ ID NO: 316136 - DNA, 608 bp, Homo sapiens
tgaaaattcatgtataattcaatagcacgaccaaaaaaatagaatgcttctattaaagccaataaaaagattgttataattttaagggtaagaatgggtgagttggcaatgaaacagacttttattggaatgttgttcaagttgagtcttaacatttaaagaaaagtataaagcatgtaccaaaataaacgtgagaaggagacacagttggggagtagagactttctgttacagggaaaagtatgtacaaaagcccatgttcaagggaaaacagtctgtttagcaaaaggagasatttcattgagtagaacttacaaattagaggagcggagactggcataccttagtaacaaacaaggttgtgaattattttgcatgatacagcagataatgtacacttttacattaaatatgatttgttaaatttccagtgcttgtgggacatctattcatattttgggctctcagatcatgtaccgcctcacctctaataatcttttaatctgcttaactacaataacacatcctcggagccttactctagaccatgcaaacccaactgaatcatctctgaaattcaacatcaagctttttggtctctgtgaaac

SEQ ID NO: 316137 - DNA, 275 bp, Homo sapiens
tcagaatggggtatcttcaccaaaagccaattacatgaccagagggctagggattttgagctagcctgacctccagggagctgatgggggctagaaattgagttcattaatcacatggccaatggttatgataccaagagatagaaagaaattatttaggcagacagtaagggtaaaagagtmctcagcaaaatttcccttttgacaaaaaaaaagcagcccccaaatcatttcttttctaacaaagagcagcctgaaaaattgaactgcaaaca

SEQ ID NO: 316138 - DNA, 598 bp, Homo sapiens
acatgcttaccatttataagtttttttttattgctgagtagtgttatattgtatractggttcttttttttttggtgatatacagttgaattgtttccagtcttcatatataatgaataaaaattccataagcatttatatgtacatacattcttattttcttaggaaaaattcagtggggtataatttcagggtcagagaatagatgtatatttaattttacataagaaactgtgaaaaaattttcccaagccattgcactactttacaattctactaagccatgtgtatgtgatataatcactgatatatttgacattaaatctatcgtcttactcttttctacttgttctgcctgtgatatttcttttttatgcaagttttttcatatttattgcatttcataaaatattttatcactccactttcctttctttaactttgtaggtagacattagttacaaaccgtattagaagtcactgtatgtatccttaacctataagactctaatataaattgtatctttatcacctcttataccttatggagatcttagaccctttaacaccagttactgtcattcttgctttttggatt

SEQ ID NO: 316139 - DNA, 598 bp, Homo sapiens
acatgcttaccatttataagtttttttttattgctgagtagtgttatattgtataactggttcttttttttttggtgatatacagttgaattgtttccagtcttcatayataatgaataaaaattccataagcatttatatgtacatacattcttattttcttaggaaaaattcagtggggtataatttcagggtcagagaatagatgtatatttaattttacataagaaactgtgaaaaaattttcccaagccattgcactactttacaattctactaagccatgtgtatgtgatataatcactgatatatttgacattaaatctatcgtcttactcttttctacttgttctgcctgtgatatttcttttttatgcaagttttttcatatttattgcatttcataaaatattttatcactccactttcctttctttaactttgtaggtagacattagttacaaaccgtattagaagtcactgtatgtatccttaacctataagactctaatataaattgtatctttatcacctcttataccttatggagatcttagaccctttaacaccagttactgtcattcttgctttttggatt

SEQ ID NO: 316140 - DNA, 598 bp, Homo sapiens
acatgcttaccatttataagtttttttttattgctgagtagtgttatattgtataactggttcttttttttttggtgatatacagttgaattgtttccagtcttcatatataatgaataaaaattccataagcatttatatgtacatacattcttattttcttaggaaaaattcagtggggtataatttcagggtcagagaatagatgtatatttaattttacataagaaactgtgaaaaaattttcccaagccattgcactactttacaattctactaagccatgtgtatgtgatataatcactgatatatttgacattaaatctatcgtcttactcttttctacttgttctgcctgtgatatttcttttttatgcaagttttttcrtatttattgcatttcataaaatattttatcactccactttcctttctttaactttgtaggtagacattagttacaaaccgtattagaagtcactgtatgtatccttaacctataagactctaatataaattgtatctttatcacctcttataccttatggagatcttagaccctttaacaccagttactgtcattcttgctttttggatt

SEQ ID NO: 316141 - DNA, 574 bp, Homo sapiens
ttatttctattgagaaatttactatgaaaagtattttgccccttgaaagtaaaagcttgtaatttttctgtagcagctttggaggttacctcttttcttttgttttcagtagattttactaatttactgaggcatggttttcattgtatttactctactttgggttcatatcgctttttgaatctgtgggttgataacttttattagttttgaagagatcctggctattatcttcataaatgttgttcgttttacttttgttctttctttcctttgggactctaatcaccttggcatcttgyctcacgttctctgaagtctttgttctgtatattctagctttgttctccctctgttttaatctggatattttttgtagtcacctgttttccagatcattgtcttttcttcagttgtgtctaacctgtcattatggcgatctattgcatgtttattttagtttattttaatttttagatctagagatttcttcttctttgaatagatttcagttttcaaatgcaattcctcattttgccaagtatgttcttgagttattggaaagtctgcctca

SEQ ID NO: 316142 - DNA, 520 bp, Homo sapiens
ctcatctcaatgaatttctctgatctttgtgatcttgactcctttaggtcggggctgctctgctagctctctaaaactttcaggcaaattctaatttttttttttttttttttttttagacattgtcttgctctgttgccaaagatagagtcactggcgtgctcatggctcactgttagcctcaacctcccaggcacgggctatcttctcacctcagtctcctgagtagctgggaccatgcctggyttattaattttttttttttttttttgtaaaaacaaggtctccctgtgttgcccaggctggtctcaaacttctggcctcaagtgatccttctgcctcggccttccaaagtgttgggattacaggcatgagccacacgccagcctcaagcagattcttgaaaagtattttgttaagcttttctagttgttctgggtatgaagaccagtcaacactagtctgtcatagccaatggtatgtaccttatgctttcatagtgaagctaaatgatttaata

SEQ ID NO: 316143 - DNA, 608 bp, Homo sapiens
tcctctccccacccccataaagaattatcccacagttgagaaaccctgctccatctgaatggatagccactgaactattttatgcaggactctgggtggagagttagggtaggttgagggagggaggacagtgagagtgatcttttgcatttcaaaagtatcttgctctggagaaagctaatagtagatacaggttgacatcaaagggttcataaagaaattactgtcactattagccatgtgaagcctaaagtaaaattygtttactatcttatatagtagtattaattttttttttttttaccatgactataaaaactgcacccatccctcaggaggatggagaaagtcagtgacattattcattcaaatggcttaacataggggagaaaattaaaacatggataatattggtcgtttagttatctcattccgatgacgtgtgttgcagattttcatgaaattaaggaatctattttctatcaactcaactttcaggcctgtaaacattttcaggtaagaaagcaatgcaacaaattcccccaaatttccatatggttaaaagctgttgaagtctagctctacaggaagtcataaatattctagtg

SEQ ID NO: 316144 - DNA, 530 bp, Homo sapiens
gatgacttatgattttttcagcgatctctagtagtaaacgctttcttaagttggacatgtaccttttgctcaagagcaggctgagtgctggatgtatgaggacttctgtgcacagactctggaccaagatgagttgggttcaaacttcagctttgtagctttctagctgtgtggcattgggcacataacttatctaggcctcagctgtttcttcacctgtaaaataagaataaaaacagtgyctgctatcaatcatatcagttttgtaagtcatcttatatgtatgaaagtacttacaacagtgtgtaccatgtagttgatactttgtaagtgctggttaatggaaacagatgaaaagagagtattgaacaacatatcttaatgtgcacacttggagcatccaacctaaagatgccacactagttaaagtcccatagggatataagtttgggatatgctgaatgctatatacagatgcatactgtgtgcatgtatgtactctatctatgcagatatatgataattagcat

SEQ ID NO: 316145 - DNA, 530 bp, Homo sapiens
gatgacttatgattttttcagcgatctctagtagtaaacgctttcttaagttggacatgtaccttttgctcaagagcaggctgagtgctggatgtatgaggacttctgtgcacagactctggaccaagatgagttgggttcaaacttcagctttgtagctttctagctgtgtggcattgggcacataacttatctaggcctcagctgtttcttcacctgtaaaataagaataaaaacagtgtctgctatcaatcatatcagttttgtaagtcatcttatatgtatgaaagtacttacaacagtgtgtaccatgtagttgatactttgtaagtgctggttaatggaaacagatgaaaagagagtattgaacaacatatctyaatgtgcacacttggagcatccaacctaaagatgccacactagttaaagtcccatagggatataagtttgggatatgctgaatgctatatacagatgcatactgtgtgcatgtatgtactctatctatgcagatatatgataattagcat

SEQ ID NO: 316146 - DNA, 600 bp, Homo sapiens
ttcttatagtttccattggattacataagattgttttatcctgatagataatctggactttcttcaccaaaagaaggttaatattcctacaaattttaaaccaaaacattaaattttatactgaaaatacatcttccttgaggtcaagactgtaggggaaggcagatttttggtgtccttatccaaatgatagccttgcaaaccaggctgttttcatgagaggattttcttactttatttaaatcttctctgagcgtaacaggaaataaatctggagactccagcttctggagcttttccacaaagaagataatctttctgatttaaagacacaataaacccttctttctccatgttcttcaaaatccatagagctcaaataaccacttcttttcattcgctatagaacagcattatttccaaaattgcatttaaatcatctacatacagaaggttaaatttgtttaaaaatgaataattacattcatttctttacatttgtactctgaataatgtggaatttaaactargtgtggttacactttagctatgagacattgggccggtcacttattctcttcagaggattaaaaggataaa

SEQ ID NO: 316147 - DNA, 507 bp, Homo sapiens
catcatcaatactctgtatggcaccgaggatgacttatggaaaaacagagttatcaatgactttttgttggaaattatccaaaagagtaagattctgcaaagaagtttgtgaatttatttaccagtttatttttatttctattttcattttacgaktgcctgagagtgatatttgaaaagtgttatattcatatatgtctaaatttttcaacaagtatcaaataaagattctaagttataagaaagcattgtgtcagtttaattgtatgatttcttaaaattagctccacatgaatgaacggtacatctaaaattgataatttgataattgtctcagatttgaggaaatactatcctccattatagacaaaggctagaaggacctgggaatggggagggggactatgtaacagacaaatattccaatctcagatgattattcttccactctccttttttctctgagtctaagctcatcttttactgtccctctggactttaacaggc

SEQ ID NO: 316148 - DNA, 597 bp, Homo sapiens
tggagaaatgaaaattatcactctgaataacccctagccaacttttactagccatccctagcttgttatacagctgctcctacaattgctcttgtaagaaggtgacatcgaaggcaactatgggttgacaaactaaagaactggcttttgctgtttgcgacattgatagcagttgtgggtagaaaggaatttagatgatcagacattaccacaccacatgctttttctagtgctgatatgctggctstctctttgctctctgaatggtgactgcaagccgatcacaaaatctgatctttctcttacacagtgtagacagtgttgagcatgtcccctcccatggttctaggttctaggtttatctacacttaggtgtggccatatcactatgcttttggcaaaacaatgtaggcagaagtgatggatgtctttttagtcttataatgaaataagactgtgccttaaaaccatgaacatatctgttccatgctctctttcttttttcttcttgctgcaacccagacaaggcagcagttcagcattgtgattgccccagaggatgcctgtattagttcgtttttacactgctataaagta

SEQ ID NO: 316149 - DNA, 599 bp, Homo sapiens
gtgtgataggaaaaatacaccaagcttttggacagtttagtagaaattagacagcatcatctctgataccattttgactttggagttcmggatgcacagctcaccttgcatcacaaacaaatcatagtgtactgggctgtgctgaactgcaacattaatgtattacctggccttcacacagaagacagcagaactccctttggagttttctacactgaagagatatccaagagatatagaaaatttgttgctatgaaagaataactcagtctgaactaaaatgctttgcagaccatgaaggaaagtggcagggctgtaaacactaatggaccttgtaaacagtggtttcagacattatacccaaccactgtggcagatgagtcacattttttttttttgtatttagtgtcagatgcaagcacaagaaaaaaaaacattactggaagcttcattgaaagctaatgataaattttatggaatataaaaggaaagaggatgtcagggaaagttaaaatgatattttcattcagatcacttgaagttaaaaaattcttgcttaaatgaggtgcttaactccttattagaaaggttaacttggg

SEQ ID NO: 316150 - DNA, 576 bp, Homo sapiens
taacaatagtagtaaaaacatatataatgtcactctgtgctaggcattcttcctaatatttctttatattgattcattttaaccctcacagcaatgctatgatgtaattactctcattarcgtatccattctacagatgagaaaaactgaggggttatgtaacctgccccaggtcacacagctggtgagaggtgaatttggtttgaattctcacattaggctcaagtctgctggttggcttaatgttggaagagatgataagtggtccatttcaaagataattttgtgtatacatgtaataaaaacaacaaatgtgaattagatttgtgcagaatgattctaattatgaagcaattgctttttaagtagcattattttgttcacactaatagttttttctcaaaattaattatttcttccataatctcttctgacaaataatgctagttttgcatgtaagtagaagcaaattttacagaaatagaacgtgtaggtttttacaggacagtgtaacatttctgctttttaatttatagatgattaaaaatcttctattgataggggcctctcctctcc

SEQ ID NO: 316151 - DNA, 576 bp, Homo sapiens
taacaatagtagtaaaaacatatataatgtcactctgtgctaggcattcttcctaatatttctttatattgattcattttaaccctcacagcaatgctatgatgtaattactctcattaacgtatccattctacagatgagaaaaactgaggggttatgtaacctgccccaggtcacacagctggtgagaggtgaatttggtttgaattctcacattaggctcaagtctgctggttggcttaatgttggaagagatgataagtggtccatttcaaagataattttgtgtatacatgtaataaaaacaacaaatgtgaattagatttgtgcagaatgattctaattatgaagcaattgctttttaagtagcattattttgttcacactaatagttttttctcaaaattaattatttcttccataatctcttctgacaaataatgctagttttgcatgtaagtagaagcaaattttacagaaatagaacgtgtaggtttttacaggacagtgtaacmtttctgctttttaatttatagatgattaaaaatcttctattgataggggcctctcctctcc

SEQ ID NO: 316152 - DNA, 614 bp, Homo sapiens
aggtaagctttctaatgacttcacaaataaccaacctcaatcaactttggtaattgataaaatcatcacttaactttctgatataatggcaataattatctgagaaaaaaaagtggtgaaagattaaatttgcatttctctcagaatcttgaaggatatttgaataattcaaaagcggaatcagtagtatcagccraagaaactcacttagctagaacgttggacccatggatctaagtccctgcccttccactaaccagctgaatggttttgtgtaaacctcctacacgcttgggcttggtcacctcatttgtcaaagtaaaggctgaaataggaagataatgaaccgtgtctttttggtctcttttccatccattactctgattttacaaagaggcctgtattcccctggtgaggttgaagatgaatcaggtttgaaagccccctggaagtggacaaatgattatcagaagacctctcaaagtgtaactagttcactgagcacctactactttcttcacaggtctctgaaaggccagcaggatgctacctccttatccctgtcagtgccacacccactagcaatgggtaatgtgatctcattagagtccata

SEQ ID NO: 316153 - DNA, 614 bp, Homo sapiens
aggtaagctttctaatgacttcacaaataaccaacctcaatcaactttggtaattgataaaatcatcacttaactttctgatataatggcaataattatctgagaaaaaaaagtggtgaaagattaaatttgcatttctctcagaatcttgaaggatatttgaataattcaaaagcggaatcagtagtatcagccgaagaaactcacttagctagaacgttggacccatggatctaagtccctgcccttccactaaccagctgaatggttttgtgtaaacctcctacacgcttgggcttggtcacctcatttgtcaaagtaawggctgaaataggaagataatgaaccgtgtctttttggtctcttttccatccattactctgattttacaaagaggcctgtattcccctggtgaggttgaagatgaatcaggtttgaaagccccctggaagtggacaaatgattatcagaagacctctcaaagtgtaactagttcactgagcacctactactttcttcacaggtctctgaaaggccagcaggatgctacctccttatccctgtcagtgccacacccactagcaatgggtaatgtgatctcattagagtccata

SEQ ID NO: 316154 - DNA, 595 bp, Homo sapiens
atttgggtgaacatggttggtttattaggaaatatatccaggaaaaacacatagatgggcggrgacctgaaacagagatgggaaaggaagtgaaggaaagggaagaaatccaaacaagcttgcattatatagttagacttcatggaaaacatctgtggctcaatccagtaaagaggatgtggagataaggcctgtcacttcttagatttgttcccatcagggatgagggtgctgaagtatttacaactgcaccatcagtcatgatggggatatgtacgtttctaggcatgtttgctttttcctgtgtgtagtcagagggttctggcagatggaggtaggcctccaacaaagagagcacgtgctgcctcagagaataaaaatgaaagacataagcaaagagatgtgagagttacaggcagaatactgacaaggtccgctgcaggtctgttctatttacattccacgagcaatcatgaagctgatgaaatattatttaatgaagttattttgtacaaagaacagggcagtagatcctgttcatctgttttacagattaatatctgtattgatgagggcattgcaggaagcagatggt

SEQ ID NO: 316155 - DNA, 541 bp, Homo sapiens
atctaaacattttcctcaggatcttcaataataaaaatctatttatcaaacatgaacttctttttctaccctttaccagacttccctacttacttgtctagagcagttactaagagagaaataacctgatccttagtagttctttcttattacctgkcaatgaggcctttcccagtgcctcaagatttgacctttgacttcatttcctatttatctcataatgcctgagtttttatggccttctcaacataaaacattttctttggtcacatacattcctttcttttttcttaagattaaataggttatttcttataattacatagtgtatgtttactataaataataccaattttgaaaaatgctaataaaattacctttagtccaccaaccagggaataataactcataacacattgctgtatatccatccaatatttttcagttcacatatgcaagtgtgtgcacacacagcctttcttgtaaaaatgggaacgtttacaaaataatttgcattatttcctttgataactcacagaaa

SEQ ID NO: 316156 - DNA, 541 bp, Homo sapiens
atctaaacattttcctcaggatcttcaataataaaaatctatttatcaaacatgaacttctttttctaccctttaccagacttccctacttacttgtctagagcagttactaagagagaaataacctgatccttagtagttctttcttattacctggcaatgaggcctttcccagtgcctcaagatttgacctttgacttcatttcctatttatctcataatgcctgagtttttatggccttctcaacataaaacattttctttggtcacatacattcctttcttttttcttaagatkaaataggttatttcttataattacatagtgtatgtttactataaataataccaattttgaaaaatgctaataaaattacctttagtccaccaaccagggaataataactcataacacattgctgtatatccatccaatatttttcagttcacatatgcaagtgtgtgcacacacagcctttcttgtaaaaatgggaacgtttacaaaataatttgcattatttcctttgataactcacagaaa

SEQ ID NO: 316157 - DNA, 541 bp, Homo sapiens
atctaaacattttcctcaggatcttcaataataaaaatctatttatcaaacatgaacttctttttctaccctttaccagacttccctacttacttgtctagagcagttactaagagagaaataacctgatccttagtagttctttcttattacctggcaatgaggcctttcccagtgcctcaagatttgacctttgacttcatttcctatttatctcataatgcctgagtttttatggccttctcaacataaaacattttctttggtcacatacattcctttcttttttcttaagattaaataggttatttcttataattacatagtrtatgtttactataaataataccaattttgaaaaatgctaataaaattacctttagtccaccaaccagggaataataactcataacacattgctgtatatccatccaatatttttcagttcacatatgcaagtgtgtgcacacacagcctttcttgtaaaaatgggaacgtttacaaaataatttgcattatttcctttgataactcacagaaa

SEQ ID NO: 316158 - DNA, 621 bp, Homo sapiens
caccattttcctgagttgttctagcaaattatcgaacatgaaggggtcatgggaatgcttgaatttatagttgattggacgtccgggtggcgcaggagccccccaaatgcaggyggagtctgaagaacagtcttgaggaagaccgaaactttaagcctgtggagtctgatgttaactctgggtagttagtttcagaattgtattgcagtacatccatccagttgagggtgaaacagaacaaacatgtatattacatcaggaggtggcattgtgtttactggtaaaacataagaaatatttccattaaaactggaacatctactgttatatcagtattttctttttatttaatactgttgataaaaatatgaattttcatatagtagaacactggttttgctgaattttacaagttttgatttgcttgcctcttaatatttttacatattcttcagtttggatgttgatgtcttctttgattcaagagttaatacttttcttttaatttcagaagctttgtttttgttttcaaattagttttgaaaaaaatactgtgactccagtgcattgtaaacagagtgccttgactccttgtacctaactgagatctcaaagttaaaa

SEQ ID NO: 316159 - DNA, 584 bp, Homo sapiens
accagaacacttcaaattaaaaaaagcagacaaatcaaaatatgttcattcagatgtgttcatttattgatttttgataatattaaaatgtgttcattaattgattttgatcatatawgccagataattaaaacctcatgtttaatatgtttgattttgaatgtaagacgtgcctctgctgcactatatatttgtttctgtagcataaaacattcttttgcataggacagaaatctcagcatggttaatgaagattagccagcttagaaatttaaaaggctttgacctgtgtatctacatgtgaaatagttagatttagtactcaaaagatttgtgtgttctactgacaatttacattttaattaccatggcacacaattaaaaaaaagactcttcaatactataattttaaaaactgcatagatttattttctcagaatatacatgcgtgattaattgcatgcaaaactccaaggagatccttagtactttgcttcagcatacaaagtttttattaaaaaaaagtataatgactcattaaggattcatctgaaaattttttgcattttaaatattgtttggta

SEQ ID NO: 316160 - DNA, 497 bp, Homo sapiens
tctggctaatctggtttaatcgctcctgttttgattcttactgctgccaagatgattgcaactatactatctcattgctccagtagatggcagaagtatactgtgcaccaaattgaagtaagttagaaaacttgtatatacaaggcgtgagcaaatggtctcaacttgttttaaaaatctgcctttgttgtgtttgggacaccgtggatgtaaagggaattgtagcattccattacagactcctctgattccaacagattttgctgatacttggcagaataaaaaaatagttcataggaatgkgtgatatcatgtagaattaagtcaggccttatatgctcatcttgtagtctattcaataaggctttcttccttgttttcatcttaataaagcaaactggatataatatggaaatcattttaattaaaagaaaggcatatggcattttgtaattagaaaccatgaggatcagttatttagatagtggtgttctgca

SEQ ID NO: 316161 - DNA, 628 bp, Homo sapiens
gccctgcaatttgagttataactatgtatatctatctatctatctatatatatatgaaaacaaaacgtatttgtttgctttacatgtttttagataattggtgttccgctgaaaaatgccacatgtgattayatgctatggatgaattgctcgatgcatgaccatgtcaataccttcttccaattcattttataagttccaggactttcactggtttatggtgactggcccactttgaaagcacaatgaaattgccttgcctacgtgagctagtattaaaaactgtaggttaaaatggagatttaagtgaagcaaagtcataacactgattaagagcagagatatctcttttcagttttttatttccaatagcaagttaaaaactgttagatcttgcaatcttctctcctttccatctcttttgacccaagataaatttcaattacctaaatcctatttcctgttgctaatcacctactccagtcagtattctttaaatagtcattaaggctgggatgagatctctgtcagttctgaaactaagaaaatttggagcagcccattaacataacaggaaattccctaatatcctcaggatatgtatagaaacccatcatgattaaataca

SEQ ID NO: 316162 - DNA, 628 bp, Homo sapiens
gccctgcaatttgagttataactatgtatatctatctatctatctatatatatatgaaaacaaaacgtatttgtttgctttacatgtttttagataattggtgttccgctgaaaaatgccacatgtgattacrtgctatggatgaattgctcgatgcatgaccatgtcaataccttcttccaattcattttataagttccaggactttcactggtttatggtgactggcccactttgaaagcacaatgaaattgccttgcctacgtgagctagtattaaaaactgtaggttaaaatggagatttaagtgaagcaaagtcataacactgattaagagcagagatatctcttttcagttttttatttccaatagcaagttaaaaactgttagatcttgcaatcttctctcctttccatctcttttgacccaagataaatttcaattacctaaatcctatttcctgttgctaatcacctactccagtcagtattctttaaatagtcattaaggctgggatgagatctctgtcagttctgaaactaagaaaatttggagcagcccattaacataacaggaaattccctaatatcctcaggatatgtatagaaacccatcatgattaaataca

SEQ ID NO: 316163 - DNA, 559 bp, Homo sapiens
gccattctcctgcctcagcatcccaagtagctgggactacaggtgcccgccaccacgcccagctaatttttgaatttttagtagagacggggttttaccatgttaaccaggttggtcttgatctcctgaccttgtgatccgcccgccttggcctccgaaagtgctgggattgcaggtgtgagccaccgcgcccggccattaaggttctttaaagccatgtgaagaagtttagattttatacaaagggcatttagaaattgtcgagggactgaaacaggataatatgataatatttgctttttaatgaaataaatttgggtgtagtaagcaaaatgaactggaatgagccagtctgtaggttactgtagaaacacaagttgagagatagggtcyctgatgatggtagtgcagtagaaaaggaaaaagaagtaaatcgatttggaagactttaggaggtagaagcaatatatttgattactttgccacattggtgaaggagagatgggttcaggacttaaccacatttgtagcttggactggaggtatggaggtggcgctc

SEQ ID NO: 316164 - DNA, 551 bp, Homo sapiens
aaataatctaaatataccaattaaaagagagagtttgagagagtgaatgaaaaatatcaaactatgcagccatccctcagtatctttggatttgttccagggtgcctgtggatcccaaaatctgaggattttgcatgtaacgtatgcatatcctcctgtaggatttaaataatctctatattactttttataccaggtatagtgcaaacgytatgtgattagttgttatactgtattattttttaattgctattatttcttattgctgtattgttgctgttatttttattttttgagggttcttgaacagttggttaaatctgctgatgcagaacctgtgaatccagaggaccagctgtattctggctgtaagaaattcactccaaatataatgatatgggtagactgaaagtaaaatgatgaaaaatatgtataccatgcaaatattaatcaagagaaagcaggagtggctgtattaatatcagataaattggacttcagaacaaagtaaattaccagagacagaaagcaatatgacataatgacaaagg

SEQ ID NO: 316165 - DNA, 573 bp, Homo sapiens
ctttcttccctcactacccacatttactacattaacttcagactataccaaatctggccccttctcacaatttcgacttcttttaccttaatataagccaccatcttctgctatgaagacttcagctatgtcttcctcccttatcccccagtttcctcctctcactctccatggtccagtctccacacagatgccagaatgatgttttttttcytaaggtacaacaacagaccatgtaaatctcctaataaaaagtatctaatgaccttccattataagtggaatagcataagttacaagtccttactgtggctcagaaggctaaaagtaatctgattttgtctacatctttgatgttttctaccactcttctctttgctcaccatatagtactcacactggtcatcctcctgctcctttttacaagtgtcattaaaaacaacatctcattttaactgggattcctctatttgtgagaataagcatagttttaaatgtttattgacaattcgtatttcttcttcttggacaaacccattcaaaatgatctcatttcctctaacaaaggaaaga

SEQ ID NO: 316166 - DNA, 523 bp, Homo sapiens
acatctcattttaactgggattcctctatttgtgagaataagcatagttttaartgtttattgacaattcgtatttcttcttcttggacaaacccattcaaaatgatctcatttcctctaacaaaggaaagatcctggtgatccttggttctgctccttggttctgccagtcctgttctttcctcggagtctttaccattgctgatgcctctgtctggaatggcctgtcctaggtgttttacggttggttcatccgcatcagtcatgtctttgctccagtgtcatcttccctcctgtctaaggtacacaccccactgactacctaacactttagctcctatttcttattttcttcatagcacttagaactttcaaaatttatgtcattcatttgtttgtttgtggttagctttcccttctacaatgtaaactttataagtttagggacttgtatgacttcttacccacttccccagggtacagaatgtctgacatatagtctgtgctcaatatatatttattg

SEQ ID NO: 316167 - DNA, 554 bp, Homo sapiens
tgtcacccagactggagtgcaatggcacgatctcggctcactgcaacctctgcctcccagcttcaagtgattcttccgccttagcctccagaggagctgggattacaggcacataccaccatgccaggctaatttttaaatttttgaagaaatggggtttcatcatcttggccaggctggtcttgaactcctgacctcagrtgatccaccctgctctgcctcccaaagtgttgagattaccggtgtgagccaccgcaccaggccagttgatttttaagatatcattatttccaactttttacttgaatgaatgattgattattggcctttctttataataatttaccagagtgttattctgtatgaaattttatgatgataagtatttaacttcacaaattaaaattggtaatttctaaaaaaaaattataaagtaaataaagataatttagtcatttatagattatggatatagtaataatcatattactattaccaaatctatttaatcattagtgaagacatggcatcttcttcacacagtgatgtaagtt

SEQ ID NO: 316168 - DNA, 612 bp, Homo sapiens
tgaaaacaattgtttgaaaaccattcccctcaatgactatgttggactcttctgcctctcaaatgtttgattctgtcttttttcctttctttctttttttttgagacagaatcttgctctgttgctcaggctggagagcaatggcacaatcacggctcactgcagccttcacctcccgggttcaagcaawtctcctgtttcagcctcctgagtagctgagactacaggcacgtgccaccacaccaagctaatttttgtattttgagtagagatggagtttcgccatgttggccaatctggtctcgaactcctgacatcaggtgatctgcctgcctcggcctcccaaagtgctgggattacaggcatgagccacagcattgggccgtgattccatcttaattattctgtcttaatttatatgttattttaggaatttaaaaaaatactcatgcaatctattatgctgtgctagctgaaacctctcgtatccctgtctacaaaatgtggttgtttgcctctgtacatcatgttcttatgtaggtcacctggaaccagtgcattgctcccaatccttcactcccaatttgtgaaccatccttctccatgacactg

SEQ ID NO: 316169 - DNA, 612 bp, Homo sapiens
tgaaaacaattgtttgaaaaccattcccctcaatgactatgttggactcttctgcctctcaaatgtttgattctgtcttttttcctttctttctttttttttgagacagaatcttgctctgttgctcaggctggagagcaatggcacaatcacggctcactgcagccttcacctcccgggttcaagcaaatctcctgtttcagcctcctgagtagctgagactacaggcacgtgccaccacaccaagctaatttttgtattttgagtagagatggagtttcgccatgttggccaatctggtctcgaactcctgacatcaggtgatctgcctgcctcggcctcccaaagtgctgggattacaggcatgagccacagcattgggccgtgattccatcttaattattctgtcttaatttatatgttattttaggaattwaaaaaaatactcatgcaatctattatgctgtgctagctgaaacctctcgtatccctgtctacaaaatgtggttgtttgcctctgtacatcatgttcttatgtaggtcacctggaaccagtgcattgctcccaatccttcactcccaatttgtgaaccatccttctccatgacactg

SEQ ID NO: 316170 - DNA, 638 bp, Homo sapiens
gcactcaaaaactattgctcttctgagactagagtattttgtggggcaattgagactttttctggattttggtaataatagtaataattatttatttttctttccctttttttccttttctttcccttccattttctttatttcctatttgcatatacccctctatttttttattttcaaacttaccgtgagagttcayagtttctccttggtcgcttaaaggctagatctaaatttaaatagtaaatatttcttaaggaatctagaactgccatcaggttctttagcagactgggtatctccaggaatgacatttttggggtaaaataaataaataaacatataaatagtgcttaatcacctagaaagatatatttaatatatgaagtgattgtctttaatgcatgttgtgcaattgaaactgacaatattattaaagcatcctattttggacttttttttagtttgcaaagtaaatgacaatcacaaatattattataaaactctggaaagcacacaagaaagttatctttactgctgttttacagatgaatgtatttagtgccaaggaattaaaaatttgtacctaaatcaagcaaatgttaagtggctagaggaacatttggtagaagtttttc

SEQ ID NO: 316171 - DNA, 638 bp, Homo sapiens
gcactcaaaaactattgctcttctgagactagagtattttgtggggcaattgagactttttctggattttggtaataatagtaataattatttatttttctttccctttttttccttttctttcccttccattttctttatttcctatttgcatatacccctctatttttttattttcaaacttaccgtgagagttcacagtttctccttggtygcttaaaggctagatctaaatttaaatagtaaatatttcttaaggaatctagaactgccatcaggttctttagcagactgggtatctccaggaatgacatttttggggtaaaataaataaataaacatataaatagtgcttaatcacctagaaagatatatttaatatatgaagtgattgtctttaatgcatgttgtgcaattgaaactgacaatattattaaagcatcctattttggacttttttttagtttgcaaagtaaatgacaatcacaaatattattataaaactctggaaagcacacaagaaagttatctttactgctgttttacagatgaatgtatttagtgccaaggaattaaaaatttgtacctaaatcaagcaaatgttaagtggctagaggaacatttggtagaagtttttc

SEQ ID NO: 316172 - DNA, 558 bp, Homo sapiens
tagctaatttagttgttatttttagttggcagtaagctttaataagctatttgatcattcttgcttttcatgtctgtagaagatttgttttatttattgttacaatgttttgaatcaagttttgcctggaaaatcttttaaggctaatgagtcataatatttttgttgggctattatacatagatgaaacatttccttgatcctacattcactactcaaagttctttccttcaattatttataaatattaattcatcattttactatatctggagatgctgttaggaagtttgccgtaaatctgatttttgttcttttaaaagtgatttcctatttctttgtttttctttgacataaattttatcatgttttctatattctgactrcttttaatttgaaaactgttatctttctttaattcttgaaagtgtgtattcattaatatgtcaaatgttgtgtctcctttttaaaaaccattttccctatttgggaatatgtataaccctcctcagtatttttatcctatatttaatatcatttcatcattttctgctactt

SEQ ID NO: 316173 - DNA, 505 bp, Homo sapiens
aatattctccatgatttcactctcccttcttgctgaattagcattactgacattaaaatttttctgaattagatataatattgagatttttcaatagartattcagttaatctataacagtcaaaaaatttatttcagaagatcatctttagataattttattgttgcttactgctaatacacagagatttctaaacactgtctagaaaactatcaaggtttcataaatttagtaaattaaaattatattgtattattttgtcatcaaacaataaataattcatgtaatttatcagatttataagaaaattcaatagctttccatttgaaataggcattagttttgtttcaaagactatactatacaactctgttttgttttaccaatcatatgtatgtttcttttcaattattcctttttgttagtttttaatatgtgcaaccatttttgttataatcaatctattttcatcacaaaatacatttctttgaaggaaaatgttca

SEQ ID NO: 316174 - DNA, 577 bp, Homo sapiens
ctatatattattacatatttttaattatcttcagttccagaatttccaaattttatttttagctctagcaaaaaaagttgcctatcaatatccaaataatctaccaagtttcatttcaattctcacctacacaaattcttaattatctgtaatgattgtgatttatctaaatacattaaaatttttattgacaaataatttaaatctatttatttaattgatttaattgattatgttattcagaaataattggatttcttgccatagaatagataagaggaaattacctagaaatttgtgtttattttttcctgatacttcagaccattttcccagcaagtcactggcaccatatgtacacagttcaataaggttttcatataaataygtcttgaagaaaactttccaaaatgaaaaagtatataattttagatgctaatctgctcagttccagaaaatcaagaaaaaatacactatttttaaagtcttgaaattaccattgttgtcattatcaatgattcataaggaagagcagagtgttgtcaatgtatggaattttatgtcttgatttagaagt

SEQ ID NO: 316175 - DNA, 439 bp, Homo sapiens
attatatttaatttagtaagatttcaaaagaaaaggttttagtggttgtttcaaggattttttttaaaaaatggctraagatcaaattttaaatttgtgaatgtcacctgagaaaggtttgctgacttaacaagatttattctcactgagtacttgtgagacatatggttggcatctattatgtcatgctttttctttcactcatacatgtctgttgcactgcaacaggagaaaaggtgaaatagtaaaatttttagaaagacagtcattttattgtttacaactaaagaaaaatatgtgtatatgctatagtgacacatatatattaatgtcttcaagaacactcttcacattatcatatgcaaattagtgaagggcacttttgttagatgtatttatgttggttctagttttcttctagtaattagcatagaatcac

SEQ ID NO: 316176 - DNA, 454 bp, Homo sapiens
tttctttcactcatacatgtctgttgcactgcaacaggagaaaaggtgaaatagtaaaatttttagaaagacagtcattttattgtttacaactaaagaaaaatatgtgtatatgctatagtgacacatatatattaatgtcttcaagaacactcttcacattatcatatgcaaattagtgaagggcacttttgttagatgtatttatgttggttctagttttcttctagtaattagcatagaatcaccaaataacaccccatttagagaaagtggattttaaagaagagatgttttagagattctagagattctaggagagatatttctagagagtcagctttagcaaatcatactggaggatatacytttaaagtgtgttaaaagagtaatgccacaaagattactttttattgtgagagtcttttattcttttttctgtgatcataatgtt

SEQ ID NO: 316177 - DNA, 583 bp, Homo sapiens
taaatagatatatgaaaaggtgsatatacagatggaggtaattagtttcctagagctgctatagaaagaactccagactaggtagctttaaaacaacaaaaatttattctgtttcagttctagaagttagaagtctgaaatcaagatgtcagtagggtcatgcttcctccaagactccaggtagaatttgttcttgcttcttcctagcttctgttggtggccatcaatcttcggtattccttggctttcagatgtgttacttcaatctctgcttctgttgtcacacagtgctctctctatgtatctctctttttgtaagaataacgactgatgtccttattggagtaaggtcccacctgacaccaataggacctcatcttaactatttacatttgcaataatcctatttccaattactatcacattttaagtgttgagagttgggacttcaacataattttttggggcacacaattcaacccataacagatgatagataatagatagatagatagatagatcacagacagaaatataaagatgtcattctagacagttttatggctcattattttttattatc

SEQ ID NO: 316178 - DNA, 529 bp, Homo sapiens
atgttgattaattatgtctaatggcactcaacatcttttttgcattggccattaatacggcttgtcatttggagtatctagaaaaaactttttcctttacatttgcaaatgtatttattgttttatcttattttattgagatataagaagtgttcatttatttgtcaatacaagtcagttgtcagatttatgtttcacattttcaaaaattttatcttttacctttatgttttcttaaaaataatttttgagaaacaaaaatttgtttttaaaaatgttgactatgactattttattaatttttattttattgtttccactttgtatcttatttaagaaatctttaactcaattttgatttcatcaatagtctatagttttacctcttatatttagttctgtgatccattgtaacttaatttgsatacattgtaagtaaaggtctaaattcatagtttttttttttacaaagatatcgagttatttcagcaccataggttgaaacatctttttcttattaaatgacttt

SEQ ID NO: 316179 - DNA, 570 bp, Homo sapiens
aatcaattataatctaaattcccaattactctaataaaagggaaatgaattagcaagatctgtatgttatataattctgaagcttcatctttataatagatgaattgtaaatgtaytagatcaaattttaaatttgtactagataaattgattgtgctagatcaaattgtaaagttgatcatttatctgatccatcatttattcatgaagtgctgaagttgttgtgcctggtaaaaatgagtgtcaaataaaagtctaccatgacttctgcataaaacctacagtaagtacaggaagattctcagtcaacaaaaacaactataattgagccttgaggtataagctatgtccacttaatactccaattttcttctacctctttcacccctgaaacaataagaccaactactcttcctcattcacctcagcctagtgaacagtaagtctattatgatggaaaccttaatgatgattcacttccacttaataaacagtaaatatattttttcttcctttgatattctcagtagcattttctattctttagcttactttattgtaagaatacag

SEQ ID NO: 316180 - DNA, 584 bp, Homo sapiens
actgatccacctctctactccccattgccataagcaatctacctaaaaactaaatatgaccaggcaattgccttttttttttttcaaataaatatcttggctagtaagtgtcttagccagttttggctgctataacaaaatatcatgacttggtgsttgcaacaacagaaatgtatttctcacagttctggaggctgagaagtccaagatcaatgctggtagatctgatgtctggtgagggtcagctccctggtttgcaaatagtcatcttttcatcatttccttacatggcagagagcagagagcatctttcttttgtgtcttcttttaaagacataatcccattcacaatggctccagccttattacctaatcacttcccaaaggtcccacctctcaaaaccatcacatgagatgttaggatttcaacatatgaatttggaggaaacacaagcattcagtccacaatggtaactttttatttttgtaatttttttagctttaacatccaaagatggcataactattctttacaatgcttttggaaagcaatttaacaatatcataattgactcagtcatttc

SEQ ID NO: 316181 - DNA, 581 bp, Homo sapiens
ggatggctaaattgagctaattaatatatgcattatctcacaagcttattatttttatgataaaacacttaaaatatcttagcaatttcaagaatattgttatgaactgtagtcaccatgttgtgcaatagattttttgaatgttttccttttatttaatsgaaattttctatcctttgatccacagctttgtaaaccttctctccccacagtgcctaccagccctgggtgggctactattttctgcttctatgagttcaactttttcagatttaatatagaagcgagatcatgcaatattttttttgcgtctgttttatttcaattaacataaacttccccaggtttatccatgttattgcaaataacaggacttccttcgttttaaaggctgactagaattccattgtggacatatgttacattttccttattcattcatccttaatggacttagatagctttatatcttggccattgtgaaaagtgctacaagaaacatgggaacatcgatatcttttccacatactgatttcatttattttaggtatacacacagtagtaggattgctggatcacat

SEQ ID NO: 316182 - DNA, 246 bp, Homo sapiens
ctgcagggtatacctgggtcatgggcccatgggaattggcatagagcctgtgccttctaggggggtactggagccttggtccagagaggccagattggctttggggtttattgggctagaccctatccaggacayacggactatagcaggacacagccctgtcctatagactcaggtttcaagcccactctagcaccagcccagccccagtggactcagcctccaggcatgtcccagtggacccag

SEQ ID NO: 316183 - DNA, 584 bp, Homo sapiens
aagtatgtccccaggagaaatataaaaagttgtctagtgatcgttcatagcaactctacttataatagtcaaagactggaaataaacccagtgtctatgaccagaatgtaaataaacaacctgtggtatatccttacaatggaatattattcaacataaaagaaaacagattgcttacacacacaataacttgaatctcaaaagtattatgctaagttaaataaattagactagaaactacataatgtgtgattctgttgatataaattctagaaaatgcaaatcaatacatggtagcaaaaagcagatagtggtttcttgggacagaggttaagaaacagatgaatttcaaagggacaagaggcaacttttgaagttgatgacattttttgttattttacttrtgatggtaatttctcagaaaaaaaataacgtttctcaaattgtgtatttgagtaagtataatttattgaacttcaaatatactccccaaaattgttgtgtatgtatgtgtgtgtttgtatacacattgtaaaaaatgaatctataatgaatctacatatagaatgaatagtatttatgtg

SEQ ID NO: 316184 - DNA, 593 bp, Homo sapiens
tgtttttttcaaaaggtgtaaacctgtgacacrtatttccatatttatacattcgaagtgaacctaagacttgatatataaatgcactttgattttgggggcccagggggtactgggcagcctgtaatcattggcttaattatagcctaaagaaagtgattagagtgataagaaagtagaaaacatatggagaagcagggcatttaaatagagataagaaataaaagtggaacatgatcatggttctctgtgtgacatggagggaataaaattaaaaatacatcagctcaaaaagtaactatgtcaccatcttgttctatgaacttgggtatattacttaattttctaaatggctttttcttcttatataaaatgttgttactaacacaatcttcaaagtgttctgagagctaagttaaaaagcaagtaaacaactgctgattaacattttatgtaagaactgacaattttaagatatttttctttatacacctgaccttatctcaatcaatttagacttaatgatctctatgattttggggtagaatgccggagaacaaaaagaaaaaaaatgtttaaactttaaacagata

SEQ ID NO: 316185 - DNA, 475 bp, Homo sapiens
acctgcatgttttgtacatgtatcccagaacttaaagtaaaatttaaagaaatttaaatttaaaaacaagtgaaaaaaggaaaaaagaaattaaattctttttgtgtggaaatatagaaatagaaatataagactgatgagataaattaggagtcacataattctgaaggccaattggaaatagaagtttaaactttgttttgtctgtctgaacccatggctggagttatcccagaagtgttggcatggaattctcacaggaktctgccccaaactgtcacaaaatgggattggaattgttggaattccaaagaaagaagcactgagtaccagggagatcagtccaaaggattcttaagggaaacttacacagggagtgctacagtgacccttgcgatgggcagacagaaaacagatgtacctacgtatgtcccctataaagtttatataaaagtttgaggaatttaggttaggg

SEQ ID NO: 316186 - DNA, 562 bp, Homo sapiens
aactgaaagtcttttgaactaacccagtcaaatataaagaaaaaagaatttaaaaaataaaatgaatgtttgagaartatggttttatgtagtgatcaaatctatgaattattggtgtttctgagagagaaggagaaaaagtaaacaacctggaaaatatgcttgagggaatgattcaataaaatgtttctaattttcctagaaatccagagaacacctgcgagatactacacaaaatgaacctcacaaaggcatgtagtcattagactgtctatgatcgatgctaaagaaaaaaatcttaaaaatacctagaaaaaaatggacagatcatgtacagatagattcctatcaggctaacagcagagttctcaacagagtcttataagccaggagagattaggggcctattttcagcatacttaaacaaaagaaccaaccaaattccaaccgagaattttatattctgccaaactaagcttcataagcaaaggagaaataaaatcttttccagaaaagcaagcactaaaggaatttgttaccactagactagccttacaagaga

SEQ ID NO: 316187 - DNA, 562 bp, Homo sapiens
aactgaaagtcttttgaactaacccagtcaaatataaagaaaaaagaatttaaaaaataaaatgaatgtttgagaaatatggttttatgtagtgatcaaatctatgaattattggtgtttctgagagagaaggagaaaaagtaaacaacctggaaaatatgcttgagggaatgattcaataaaatgtttctaattttcctagaaatccagagaacacctgcgagatactacacaaaatgaaccycacaaaggcatgtagtcattagactgtctatgatcgatgctaaagaaaaaaatcttaaaaatacctagaaaaaaatggacagatcatgtacagatagattcctatcaggctaacagcagagttctcaacagagtcttataagccaggagagattaggggcctattttcagcatacttaaacaaaagaaccaaccaaattccaaccgagaattttatattctgccaaactaagcttcataagcaaaggagaaataaaatcttttccagaaaagcaagcactaaaggaatttgttaccactagactagccttacaagaga

SEQ ID NO: 316188 - DNA, 562 bp, Homo sapiens
aactgaaagtcttttgaactaacccagtcaaatataaagaaaaaagaatttaaaaaataaaatgaatgtttgagaaatatggttttatgtagtgatcaaatctatgaattattggtgtttctgagagagaaggagaaaaagtaaacaacctggaaaatatgcttgagggaatgattcaataaaatgtttctaattttcctagaaatccagagaacacctgcgagatactacacaaaatgaacctcacaaaggcwtgtagtcattagactgtctatgatcgatgctaaagaaaaaaatcttaaaaatacctagaaaaaaatggacagatcatgtacagatagattcctatcaggctaacagcagagttctcaacagagtcttataagccaggagagattaggggcctattttcagcatacttaaacaaaagaaccaaccaaattccaaccgagaattttatattctgccaaactaagcttcataagcaaaggagaaataaaatcttttccagaaaagcaagcactaaaggaatttgttaccactagactagccttacaagaga

SEQ ID NO: 316189 - DNA, 562 bp, Homo sapiens
aactgaaagtcttttgaactaacccagtcaaatataaagaaaaaagaatttaaaaaataaaatgaatgtttgagaaatatggttttatgtagtgatcaaatctatgaattattggtgtttctgagagagaaggagaaaaagtaaacaacctggaaaatatgcttgagggaatgattcaataaaatgtttctaattttcctagaaatccagagaacacctgcgagatactacacaaaatgaacctcacaaaggcatgtagtcatyagactgtctatgatcgatgctaaagaaaaaaatcttaaaaatacctagaaaaaaatggacagatcatgtacagatagattcctatcaggctaacagcagagttctcaacagagtcttataagccaggagagattaggggcctattttcagcatacttaaacaaaagaaccaaccaaattccaaccgagaattttatattctgccaaactaagcttcataagcaaaggagaaataaaatcttttccagaaaagcaagcactaaaggaatttgttaccactagactagccttacaagaga

SEQ ID NO: 316190 - DNA, 526 bp, Homo sapiens
agatataatctacatgcatttcagccttttaaactgtccaatttactagtgttttttaaacagaattgtgcaactatccccagtatctgcaaccgtcaccagtatctaattctagaaaaaaattatcacsttgattagaaacccatacccattaacttctccttcactcttcagtgaaatttctactgaatatagaattttggttcacagatttttccttttctttcaatattgtaaatatatcactctgttctcttcttgtttgcatgctttctactgagaagtttcctgtaatccttatttttatttctctataggtaaggtgtcctctgctccctcaatctaccccaacctcccaaaacctttgagactctctctttctcctttattttcagcagacacagcagtggcagtgtcacagaggagagggtcacctaatattctgattggttcttggtgttttattggaactgtgtcttagaggtttggtcttcagaagtgtttctgtttcttgtccccaagagaa

SEQ ID NO: 316191 - DNA, 535 bp, Homo sapiens
gtcaccatatacatgcaaagtcatccaccaatgcagttatttttaacaaaaaatgaataataattttaccaaaaaatgaagaatatttttgggcagttggggtagtagtgagaagggggaacatgtctataggatcaggttaatccctgtatagataaaaactgagaaacgcgtgtgactgaaaatctgtataaaacttctaagtccattgtaacacataggacaggaaaaaaaaacagtaatttcaaggcagacattcattatgatctcatcatctctatcctgcactattttctaaaatttcttaaattgtctacctgccttcagggaggaarttgaggcttagaaaatatgagatattcatccaaagtcacacatttattctgagcaaagagggggtccttagagttttatcagatatttcaaaaaaatacaggaattctgtggatgtatatccattactgaatatggatttagagtaaattgctataaaacaatagtagctttttaacagatttgagaaatatctttgaca

SEQ ID NO: 316192 - DNA, 534 bp, Homo sapiens
atatttcaaaaaaatacaggaattctgtggatgtatatccattactgaatatggatttagagtaaattgctataaaacaatagtagctttttaacagatttgagaaatatctttgacaaacattgatcttccctctttccctcatccctcagtaatggctrtctccattcagaactactccaatagactcatcattgtgtcagaagaaaataaaaggatgttgcctaatggcaatgaaatataacaaaatttaataggaaattgaaaatatccttatgaacaaatgtaagattttagttaaaaaggcatgttgttgttggcattacaatattttatattttttctatgaagaaaatattccttttgatttgtgaccaaaacaaaacattaactgaagagcagtcttggacccacacttagatatttcagacagtttcctttaacttctgttatgttgaaaacttttagaaactatttttatagatcaaatgaggaccactttgaaaagctcagcttgattaagaacagacaaca

SEQ ID NO: 316193 - DNA, 534 bp, Homo sapiens
atatttcaaaaaaatacaggaattctgtggatgtatatccattactgaatatggatttagagtaaattgctataaaacaatagtagctttttaacagatttgagaaatatctttgacaaacattgatcttccctctttccctcatccctcagtaatggctatctccattcagaactactcyaatagactcatcattgtgtcagaagaaaataaaaggatgttgcctaatggcaatgaaatataacaaaatttaataggaaattgaaaatatccttatgaacaaatgtaagattttagttaaaaaggcatgttgttgttggcattacaatattttatattttttctatgaagaaaatattccttttgatttgtgaccaaaacaaaacattaactgaagagcagtcttggacccacacttagatatttcagacagtttcctttaacttctgttatgttgaaaacttttagaaactatttttatagatcaaatgaggaccactttgaaaagctcagcttgattaagaacagacaaca

SEQ ID NO: 316194 - DNA, 564 bp, Homo sapiens
gggtttgcaccacaggagaggagtcccaaaattgtgatactgaaacctgtacatagaatggctgacacatttgtttctcctcagctccagagaaaggaagggatactttgcagtgtaaatgcacttatctgtgaagagcagggaaagtctgcaccttaccgctctgaaaggtaagtatgtgacagaggagagacaagagwtaatatctctttggagtcctctgggactgctgttcaaatgtcctttaactcagatatcagtactctttgttcagaaagccccaaccatgcagaaatgtgaaaatattcattgaggtttgtttcctgcccaaatctttaattgtctttcctgtatttccccatcattcactatgctgcagcaacaactgctgtgcagtccctcctatgtgagagcctttgccattgttgcccattgctgaaatgtcgtctccctcagatcttgtggctttctccctgatttcattcagatctcagctcaaaggcaactccacagagaaatcatcactgctcaccctatgcagcaaagcttcctcagagacacact

SEQ ID NO: 316195 - DNA, 554 bp, Homo sapiens
aatgcttaagttaatgctcccaagcaaaatggctagcatgtaaaaagcaggctattacttagttctgttaggtagtggtcttctccgttaacgttatttatacctctaaaaaatatactcagatatatagctagacacctatctctacctmtctctattatatgtctttatcatatagaaatattaaaatctctactacattggtatcaatctctatatagataagcaattatataatatatatgaggtcttcatatagatactctcttgaaacttctttttacttatccgaatttcctgtatcattattagtgaatatgtaaaataaaacaactatagagtaatcacttctgtgaaatgtaatttaatagacctttttctttgaaatttgagttgtttgtcttccacaaatatttatctatggttttgtttcacccagtgacatgaagttctgaaataaataaacttggctataaatttatgctcccaaacaacttttgaattttgatttttttttccattttgatttgacttagggcaaaagcatcaatcaa

SEQ ID NO: 316196 - DNA, 600 bp, Homo sapiens
aagtaaaactccaagatatttatgcatgaacagctcataaaaatcatatccttgtatagtttattttctgaatgtctatgttgtgtaatataagaaacataatcacctgtcgtcagtcaaaattggatttccactcttactccagaatttacagtttgtatcttccatcctgatattaagcttacttgaaaattgaaatcgtattatctacaccagtggctgtcaaactgttttggtaaagggccagataataaatattttaaggtttgctggtcatatgtttagttgtacgtattcaatttcaccrtcatagcatgacagcagtcatagacaatacaaagtaatgggcaagatggcagtccaataaaactgtatttacaagaagatagcaagctgaatttagactggggcagcattttgtcaatccctgacctacaaaatggtagttaaaatgagattgaacatacataatctacagaatggtgttaagcacataatagaatttctggaaatattagatattttaatgtgtttcacagtgtttgggcttttcatttccttaagaaaaggaaataaaggatggaattaatattttagagc

SEQ ID NO: 316197 - DNA, 600 bp, Homo sapiens
aagtaaaactccaagatatttatgcatgaacagctcataaaaatcatatccttgtatagtttattttctgaatgtctatgttgtgtaatataagaaacataatcacctgtcgtcagtcaaaattggatttccactcttactccagaatttacagtttgtatcttccatcctgatattaagcttacttgaaaattgaaatcgtattatctacaccagtggctgtcaaactgttttggtaaagggccagataataaatattttaaggtttgctggtcatatgtttagttgtacgtattcaatttcaccgtcatagcatgacagcagtcatagacaatacaaagtaatgggcaagatggcagtccaataaaactgtatttacaagaagatagcaagctgaatttagactggggcagcattttgtcaatccctgacctacaaaatggtagttaaaatgagattgaacatacataatctacagaatggtgttaagcacatmatagaatttctggaaatattagatattttaatgtgtttcacagtgtttgggcttttcatttccttaagaaaaggaaataaaggatggaattaatattttagagc

SEQ ID NO: 316198 - DNA, 526 bp, Homo sapiens
cttaccaagtatttcaggaccctttgtttcaccctttattggtgattttcctcttccccttcatcaactcaccgatatggacttctagctgcaccgggtcactgagggtggagaggtttgtctggcacctgtactctccactgtcgttgactgtggcagcgtcaatgaagtagctcgaggcctggcttgagatgaggytctcattgtgaaaccactgtgtggaattgtcctcaggggagtaggctccctggcacttcagagtcacactgtccttctcaagcacgctgtaccattgaggctccaggaacaccacagcctttgggagatcttctgaggagccaagataatgtggggtgaggacagggagaggagcaggctctacactgccattcccagggagcctcaaagccagaatgagctcattgcaaacccatgcttggtggctcagtcttagagcatcttggccccatttttggcctgttcagtatcttaaggaaagctggccagagaagcacagggccaagtt

SEQ ID NO: 316199 - DNA, 552 bp, Homo sapiens
agggctaactgaagccagcctatggcaggtgttggttataggtccctgtccctatatgtctcccaagacagggcagcctgaacactgatccacttagcgattgcgcagtgtcaatctggccccacacagctgtggctagccactaccagtcagtactaccctttggttcttcttgccygtgggcactgcagcctctgtgggaccttagtactaagagtcagagaatatcagggagaacaggtgggcagtaacaggttacattggaggcataagctagatgctgtggcctccactggcacagctggtcctcttgttacaggatggaggctgtggggcagatgagagcataagggaggtttggagctaaagggtggctgaggtgcagatgttctttcttcccatccctgttgaatttcacctccattttagggaatgagacttaaaatctcaaacatcatcccactacaggcattaacaatggaccctcctggcaatgtttatacatttgtaatatatgtttatatattaacccattgaagaattaaaattatc

SEQ ID NO: 316200 - DNA, 552 bp, Homo sapiens
agggctaactgaagccagcctatggcaggtgttggttataggtccctgtccctatatgtctcccaagacagggcagcctgaacactgatccacttagcgattgcgcagtgtcaatctggccccacacagctgtggctagccactaccagtcagtactaccctttggttcttcttgcctgtgggcactgcagcctctgtgggaccttagtactaagagtcagagaatatcagggagarcaggtgggcagtaacaggttacattggaggcataagctagatgctgtggcctccactggcacagctggtcctcttgttacaggatggaggctgtggggcagatgagagcataagggaggtttggagctaaagggtggctgaggtgcagatgttctttcttcccatccctgttgaatttcacctccattttagggaatgagacttaaaatctcaaacatcatcccactacaggcattaacaatggaccctcctggcaatgtttatacatttgtaatatatgtttatatattaacccattgaagaattaaaattatc

SEQ ID NO: 316201 - DNA, 552 bp, Homo sapiens
agggctaactgaagccagcctatggcaggtgttggttataggtccctgtccctatatgtctcccaagacagggcagcctgaacactgatccacttagcgattgcgcagtgtcaatctggccccacacagctgtggctagccactaccagtcagtactaccctttggttcttcttgcctgtgggcactgcagcctctgtgggaccttagtactaagagtcagagaatatcagggagaacaggtgggcagtaacaggttacattgraggcataagctagatgctgtggcctccactggcacagctggtcctcttgttacaggatggaggctgtggggcagatgagagcataagggaggtttggagctaaagggtggctgaggtgcagatgttctttcttcccatccctgttgaatttcacctccattttagggaatgagacttaaaatctcaaacatcatcccactacaggcattaacaatggaccctcctggcaatgtttatacatttgtaatatatgtttatatattaacccattgaagaattaaaattatc

SEQ ID NO: 316202 - DNA, 595 bp, Homo sapiens
cagtactttctctttctgtcttccttttaatgccatggagtactatattcttcaaagttccaacaaagatgcactacatttggacaatgtggaaatggccctcagccttctcttcctgatgtggtcagcaaaaatctggactttacttcactctgatgctgaacaccctgctccacrtcttccccagtatctcagatccccaagctgtctggtttgcttctaggaaagctcagcaattccctgaaaagagtgtggcccaagtgactgcttccctccaccagtgtggcccgtggggaaggctgtggctgggtgaccccaagggtgggtacatgaggccatatttacttagcccttggccttacaggactgtgtcaaggggtcagtagtccttgctttgagtctggttatggttttgcagcctcagcatcagcgtgggcaggcccttttcaacagcagtgccctggctaatccttttctttttccccacagccaattccactgatcctgtgaaggctgcccaatttgagatgagtaatcccagccatctccttttcttcctgccttgtcccttctctcctgtttcctctctttttgc

SEQ ID NO: 316203 - DNA, 595 bp, Homo sapiens
cagtactttctctttctgtcttccttttaatgccatggagtactatattcttcaaagttccaacaaagatgcactacatttggacaatgtggaaatggccctcagccttctcttcctgatgtggtcagcaaaaatctggactttacttcactctgatgctgaacaccctgctccacatcttccccagtatctcagatccccaagctgtctggtttgcttctaggaaagctcagcaattccctgaaaagagtgtggcccaagtgactgcttccctccaccagtgtggcccgtggggaaggctgtggctgggtgaccccaagggtgggtacatgaggccatatttacttagcccttggccttacaggactgtgtcaaggggtcagtagtccttgctttgagtctggttatggttttgcagcctcagcatcagcgtgggcaggcccttttcaacagcagtgccctggctaatcyttttctttttccccacagccaattccactgatcctgtgaaggctgcccaatttgagatgagtaatcccagccatctccttttcttcctgccttgtcccttctctcctgtttcctctctttttgc

SEQ ID NO: 316204 - DNA, 468 bp, Homo sapiens
agagtctgggactcctccatctgaaacacagtgatttctatgttcagataatatgggcccagaacctgtgactttctagagaaataggtgtgccttacctattgagccttaccagagatgacttaaagttgcaatggtcacagtgaggatrtttaaatctagaaaaaattgttcatttaagggatgtattgggaaaaaatgagatcccaaatgtctcagaaacaatgataaataattttgattggtatgtaaaggtttctaaaagaatgatttaaaaaaatagtctctctaagtaaatctttacaatgtgctaataagaaagtattctaaacctattaacctctttgattgcttgctttttccatctgaacctactcaatgctaacctccttaaaaaattagatcctcaaatgagccaggagtatctacaacaactaaatttaactcttgttattgcacacatgaact

SEQ ID NO: 316205 - DNA, 468 bp, Homo sapiens
agagtctgggactcctccatctgaaacacagtgatttctatgttcagataatatgggcccagaacctgtgactttctagagaaataggtgtgccttacctattgagccttaccagagatgacttaaagttgcaatggtcacagtgaggatatttaaatctagaaaaaattgttcatttaagggatgyattgggaaaaaatgagatcccaaatgtctcagaaacaatgataaataattttgattggtatgtaaaggtttctaaaagaatgatttaaaaaaatagtctctctaagtaaatctttacaatgtgctaataagaaagtattctaaacctattaacctctttgattgcttgctttttccatctgaacctactcaatgctaacctccttaaaaaattagatcctcaaatgagccaggagtatctacaacaactaaatttaactcttgttattgcacacatgaact

SEQ ID NO: 316206 - DNA, 468 bp, Homo sapiens
agagtctgggactcctccatctgaaacacagtgatttctatgttcagataatatgggcccagaacctgtgactttctagagaaataggtgtgccttacctattgagccttaccagagatgacttaaagttgcaatggtcacagtgaggatatttaaatctagaaaaaattgttcatttaagggatgtattgggaaaaaatgagatcccaaatgtctcagaaacaatgataaataattttgattggtatgtaaaggtttctaaaagaatgatttaaaaaaatagtctctctaagtaaatctttacaatgtgctaataagaaagtattctaaacctattaacctctttgattgcttgctttttccatctgaacctactcaatgctaacstccttaaaaaattagatcctcaaatgagccaggagtatctacaacaactaaatttaactcttgttattgcacacatgaact

SEQ ID NO: 316207 - DNA, 561 bp, Homo sapiens
ggctacaccagatttattctgggaagctctgaatcttctaggagggaaagactgagaggaaagagggtggaaagggaggagcctgtgataaaacagaacatttctttttcacttcccctttcagactccagaatttgtttgccctctagggtagaatccgccaagctttgagagaaggctgtgactgctgtgctctgggcgccagctcgctccagggagtgatgggaatcctgtcattcttacctgtccttgccactgagagtgactgggctgactgcaagtccccccagccttggggtcatatgcttctgtggacagctgtgctattcctgggtgagtcagggcccccaggagggagagaggaacgggaacctcagttggggataaccctgggcaaggatgaggggtggcatgggaagaccgtcaggacacccaggggagggaaggcaggctggtgaagatgaaamcctgatgactctgctggctttggaaagtcatccaatgtggcagagttcagggttttttcagtgtctttcacccaatcttactgaacacccagac

SEQ ID NO: 316208 - DNA, 550 bp, Homo sapiens
ggtgatatcttcatttttagaagttctacttggtcatttttttttcctatctgtttttgtgtttcatagtgtcttgttatgttattattttttataacttattttgggtatttaataattttaaacaygtctattatatagtcttatgtgatagctcttgtatgtctacactcactctttgttatacctgctgactcttttatggtggaattgtgttcttgtgggttttgttgttttagattgtgagctcatgtttggtgggacattgtctactggagtcctgttctgctagtttatgggcacatcactatagagtagatttatttttgcttctgcctgctacttcagggctagtcatcttcaaaccactttttatattactttctgtgattgagatttgcatgacatttgggtagtacaaatttacacctcaattatgtacatggatagagtcaatgtttacaaatactgaaggaagacttttcccacccatagttcaggtagaaaggcaagtttctttgacattcctattagtgatagcttcaggttt

SEQ ID NO: 316209 - DNA, 590 bp, Homo sapiens
tgggatttttttcagcctcacaaagccctctgttgttcctctttaacagtcagctaactgaagttagggagaagtggtggggagcacttctgccctctccctctcctttagattttaagaggcttccagcagcttgaccttaccttttgtgtaaaatatatttagtcactcattacaagttgcaatccctttttggtccttgggttccagatggggaattgaaaagagtttttagatgtcaggcatcaaaggaaattgaggaaagtatctgcattattctttcctctcctctgaatcttctgactttcctagaggctgtgccccaagtctctggtactttctcctttcatatctgcctttaggaggaaaaccttaaaaagattagtaattcttttctgttttctattcttttaatcctattgtaaacatgttgatgataaagtcacatcctttgcttctctctgaatggtgatacagattttttgttgtagttaattttctttcctgtttttacccatcctagatagtggtgttataaaacagtactttgcaagattgtgctaygtaattaatgaaaatcaaggtactcc

SEQ ID NO: 316210 - DNA, 434 bp, Homo sapiens
ccaaaattttaaaaataatcaccaagtacagaaaatcttacttaagttataaaatatgcgttrgcatgctttattttctcaaaacctacctccccttctccaccttgaccttttctacttctcataccactatttccttcctcattgaatcagattgtttatcctctggctgcccaagcacaggctgactgggcaaggtttaattgtatgagacatgattagcctatacgaacaaattctgaagggagatattgtagtttccttttaatgtttactggtctcttatatagaggagggagtacatttgtcctattttgccattgaaagaacagagctggacaaatatgagccagttttagatagaaagtttgggcccaattaaaaagctttaaacaactgggaatgtccaatacaagagcaaaaagcagtgagct

SEQ ID NO: 316211 - DNA, 434 bp, Homo sapiens
ccaaaattttaaaaataatcaccaagtacagaaaatcttacttaagttataaaatatgcgttagcatsctttattttctcaaaacctacctccccttctccaccttgaccttttctacttctcataccactatttccttcctcattgaatcagattgtttatcctctggctgcccaagcacaggctgactgggcaaggtttaattgtatgagacatgattagcctatacgaacaaattctgaagggagatattgtagtttccttttaatgtttactggtctcttatatagaggagggagtacatttgtcctattttgccattgaaagaacagagctggacaaatatgagccagttttagatagaaagtttgggcccaattaaaaagctttaaacaactgggaatgtccaatacaagagcaaaaagcagtgagct

SEQ ID NO: 316212 - DNA, 434 bp, Homo sapiens
ccaaaattttaaaaataatcaccaagtacagaaaatcttacttaagttataaaatatgcgttagcatgctttattttctcaaaacctacctccccttctccaccttgaccttttctacttctcataccactatttccttcctcattgaatcagattgtttatcctctggctgcccaagcacaggctgactgggcaaggtttaattgtatgagacatgattagcctatacraacaaattctgaagggagatattgtagtttccttttaatgtttactggtctcttatatagaggagggagtacatttgtcctattttgccattgaaagaacagagctggacaaatatgagccagttttagatagaaagtttgggcccaattaaaaagctttaaacaactgggaatgtccaatacaagagcaaaaagcagtgagct

SEQ ID NO: 316213 - DNA, 586 bp, Homo sapiens
caatagcctaactagtcttttcccccttccagcctgttttccacatgtcaacaagagtgatcctgctaaaacataagtgagataatttcattcctctgctcaaagccctccattgccttctcacggctcaagtcctcacaatgacttataaggctctaagtgatctggccattctgctgcctcatgcttactctactcctcatgcttactctactcctcatgcttactctactcatgcttactcccctctacctcttgcttactctactccagccacatagatcactttttctcaaacatgccrggcgttctccccattagggatttcactcttgctattcccttggcctgaaagtctcatcccttagatacttgaatggctggcttcctcacctccatcaagtctttgctcaaatgttcctttgctgtacaccttccctgacctattaaatgttgcaaccattcctctccttcacccccctcatccagcactcctcattccccttctttgtcacacttttctccatggcacgtagcaccttctgacgtacattttgcttactgatcttctcctctatctcctccc

SEQ ID NO: 316214 - DNA, 573 bp, Homo sapiens
catatttcctacctctgaggaatttattgtaaatataaacatctagtatgatatccttagacagcaaacttatctatgtaaaatttattatcatcactcaatcaaactttctaatggaaatctcctttttaagtcaatgactccttaattctctaggtcccactataaaaattttgaagcttggccaggygcggtggctcatgcctgtaatcccagcactttgggaggccaaggcaggcagatcacaaggtcaggagatcgagaccatcctggctaacatggtgaaaccccacctctattaaaaatacaaaaaattagccgggtgtggtggcttctgtagtcctagctactcgggaggctgaggcaggagaatcgcttgaacccgggaggcagaggtgtggagataatgaggtttgactggtattgaatctgctagttttctgagggccttagacaagtttgccttttactaagatgataaaataattatttataatgaattttttttttgctgtacttggatttgattaagcatatgtgctattaattacaaactcttgaactggggcatac

SEQ ID NO: 316215 - DNA, 238 bp, Homo sapiens
ttcatagggaatattcaagaaaaatgcagytttaattttaatatgcacatgatatcaattaatatattcacatatgcaaatatgaaggcaatgaccctgattctgaagcttgttatttctggagttggcatatggctctttctaacagcagacataatgatttcaataaattagctgctaatgccatgtaatgaactctgatttgtgttaatttggccattacttagtaattttatgt

SEQ ID NO: 316216 - DNA, 541 bp, Homo sapiens
agacatcatttcacccaattaaagtagcttttatccaaaagacaggcaaaagagaatgctggcagggatgtggagaaaagagaacgcttatacactcttgatggaaatatatcttagtatagtcactatgaacaccagttccttataaagctaaaagtagaactaccataagatccagcaatcccactgctcagtatatacccaaaagaaaagaattcagcctgggcatggcagctcacacctgtaatcccagcattttgggaggccaaggtgggcagatcaggaattcaggagttcaggaccagcctggccaaaatrgagaaaccctgtctctactaaaaaatacaaaaattagctgggtgtggtagtgaacacctgtaatcccagctactcaggaggctgagccaagagaattgcttgaacccgggaggtgggggttgcagtgagccgagatagtgcaattgcactccagctctgggtgacagcaaaactctgtctcagaaaaaaaaggaaaagaaatcaaagagctatctacactccc

SEQ ID NO: 316217 - DNA, 472 bp, Homo sapiens
tggtagtgatatctacttcaaagagttattaagaaaattaaatatgttaaggcagcggtctccaacgttttyggcaccagggactggtttagtggaataaaatttctccacagactggcatgggggggttggtttccaaatgattcagtgcattacacttattgtgcattttattattattattatactgtaatatatagtgaaataattatacaactcaccataatgtagaatcgatgggatccctgagcttgttttcatgcaactagacagtcccatctggggatgatggaagacagtgacagctcatcaggtattagattctcataaggagagcacaacctagagctcttgcatgtgcagttaacaaaacattttgagttcctataagaatccaatgctgccactgatctgactggaggtggaggtcggaaggtaacgcaagtggagttcagatggtaatgcaagcggt

SEQ ID NO: 316218 - DNA, 462 bp, Homo sapiens
atatagtgaaacttactatttttcataggctctgaactctgaggatataggctccattaacaatcaactcatatgtgtcaaaatcttccttaayttatatgcaaatagtgagcagctatttatagaaataaacaattcatattgcagaatttgtaaagaaaaacatatgcactctgaccatctctgtaaattgtgagttcaaggactcaaacgcttgtctaaagggaattcccaaaaccaggttttgaggcagttataaaaacattcaggggaaaatatttaagaaaaaccaaatgcctttccacccatagtagagtatatccctgataacttgctcagtagacatccccaatatttaacaaaattgttgagttgcagatgcaattttttttgttttactaatattttgtgaacagtcttgaagttaatctgacataaaaatagaaaaatacgtgatacttt

SEQ ID NO: 316219 - DNA, 462 bp, Homo sapiens
atatagtgaaacttactatttttcataggctctgaactctgaggatataggctccattaacaatcaactcatatgtgtcaaaatcttccttaatttatatgcaaatagtgagcagctatttatagaaataaacaattcatattgcagaatttgtaaagaaaaacatatgcactctgaccatctctgtaaattgtgagttcaaggactcaaacgcttgtctaaagggaattcccaaaaccaggttttgaggcagttataaaaacattcaggggaaaatatttaagaaaaaccaaatgcctttccacccatagtagagtatatccctgataacttgctcagtagacawccccaatatttaacaaaattgttgagttgcagatgcaattttttttgttttactaatattttgtgaacagtcttgaagttaatctgacataaaaatagaaaaatacgtgatacttt

SEQ ID NO: 316220 - DNA, 472 bp, Homo sapiens
tggtagtgatatctacttcaaagagttattaagaaaattaaatatgttaaggcagcggtctccaacgtttttggcaccagggactggtttagtggaataaaatttctccacagactggcatgggggggttggtttccaaatgattcagtgcattacacttattgtgcattttattattattattatactgtaatatatagtgaaataattatacaactcaccataatgtagaatcgatgggatccctgagcttgttttcatgcaactagacagtcccatctggggatgatggaagacagtgacagctcatcaggtattagattctcataagsagagcacaacctagagctcttgcatgtgcagttaacaaaacattttgagttcctataagaatccaatgctgccactgatctgactggaggtggaggtcggaaggtaacgcaagtggagttcagatggtaatgcaagcggt

SEQ ID NO: 316221 - DNA, 472 bp, Homo sapiens
tggtagtgatatctacttcaaagagttattaagaaaattaaatatgttaaggcagcggtctccaacgtttttggcaccagggactggtttagtggaataaaatttctccacagactggcatgggggggttggtttccaaatgattcagtgcattacacttattgtgcattttattattattattatactgtaatatatagtgaaataattatacaactcaccataatgtagaatcgatgggatccctgagcttgttttcatgcaactagacagtcccatctggggatgatggaagacagtgacagctcatcaggtattagattctcataaggagagcacaacctagagctcttgcatgtgcagttmacaaaacattttgagttcctataagaatccaatgctgccactgatctgactggaggtggaggtcggaaggtaacgcaagtggagttcagatggtaatgcaagcggt

SEQ ID NO: 316222 - DNA, 548 bp, Homo sapiens
agtagtataactcccagtgacaaaactgacccctgttccattcctacaattattaagttcggccaagctgagttatctcaagacattgagggtgatacataaagagctgtttccacttgaagtatattgtgtgctttatcctagaattctttccatctacrcattcttcattcagcaattgtttattatattcctattctatgtcaggctcagctcttaaacctgggaatataaaacaattgctctatatctccaggattcacctcatgccatgcacattctagttggagtcatgcagtgcactgtgtaagtgtaaggttaggttaagatgtaccccagcccagtgggagtggtctctaggaagtgtccaggcaggactacagtgctatcatgtcattcttttaagtctgcacctagaaagaggacagttgagcttgccgtgaagttctgacttggctctccctgtctcatatttatgatctaccactgtgtgtctgttctggagaccgagaagttaatgcttcatctatttcttgagaatgtttcta

SEQ ID NO: 316223 - DNA, 551 bp, Homo sapiens
tattttaatcacttgctcaaaagtctttaagattccacagaacactttgaattaaaactaaatattctttttaaaaacattcttaaactccctatctcccactacttccttaaacaaattgttctacatctgaccattccctcaattattcttttttacttttactcataccatacacaactccaagaatacctaccttcctctacccctcacatccttaattatagtccttyccatttcagatactgcaagttcagacattatgctgctacactgaaaaccgtgagtgatgtctaatcacaatctgtgataggtatttgctttaaggtgcatctaataacatgacagtgattttcatctcatataaccttcattaactctggttccctgctaagataaagccttccctataagccaactgagaatactgtagtcagaatttacaggtacttcccattgtggttgttcaccttatttgtgccagtttttcttcttctttattcataccttttgccatgtgaatttgcatttcttctgggttggagtcaagt

SEQ ID NO: 316224 - DNA, 551 bp, Homo sapiens
tattttaatcacttgctcaaaagtctttaagattccacagaacactttgaattaaaactaaatattctttttaaaaacattcttaaactccctatctcccactacttccttaaacaaattgttctacatctgaccattccctcaattattcttttttacttttactcataccatacacaactccaagaatacctaccttcctctacccctcacatccttaattatagtcctttccatttcagatactgcaagttcagacattatgctgctacactgaaaaccgtgagtgatgtctaatcacaatctgtgataggtatttgctttaaggtgcatctaataacatgacagtgattttcatctcatataaccttcattaaytctggttccctgctaagataaagccttccctataagccaactgagaatactgtagtcagaatttacaggtacttcccattgtggttgttcaccttatttgtgccagtttttcttcttctttattcataccttttgccatgtgaatttgcatttcttctgggttggagtcaagt

SEQ ID NO: 316225 - DNA, 576 bp, Homo sapiens
gcaagttcagacattatgctgctacactgaaaaccgtgagtgatgtctaatcacaatctgtgataggtatttgctttaaggtgcatctaataacatgacagtgattttcatctcatataaccttcattaactctggttccctgctaagataaagccttccctataagccaactgagaatactgtagtcagaatttacaggtacttcccattgtggttgttcaccttatttgtgccagtttttcttcttctttattcataccttttgccatgtgaatttgcatttcttctgggttggagtcaagtatatatttatcctttttacctttgactctgaggctggccaaaggaataaggtggatgtgacaaggtacaatttctgagcctagcccttagaggccttccatgtttccacttgttctcttgcayttgcgacgttgctgtcaaaagaacatgcaatggctagctagcagcctgtgcacctgcagtgagaaccagagccacccagttgctgcagcctgagaccaagctgctcagctaagcatagcttagatcaccattgagttctgaggtggttt

SEQ ID NO: 316226 - DNA, 576 bp, Homo sapiens
gcaagttcagacattatgctgctacactgaaaaccgtgagtgatgtctaatcacaatctgtgataggtatttgctttaaggtgcatctaataacatgacagtgattttcatctcatataaccttcattaactctggttccctgctaagataaagccttccctataagccaactgagaatactgtagtcagaatttacaggtacttcccattgtggttgttcaccttatttgtgccagtttttcttcttctttattcataccttttgccatgtgaatttgcatttcttctgggttggagtcaagtatatatttatcctttttacctttgactctgaggctggccaaaggaataaggtggatgtgacaaggtacaatttctgagcctagcccttagaggccttccatgtttccacttgttctcttgcacktgcgacgttgctgtcaaaagaacatgcaatggctagctagcagcctgtgcacctgcagtgagaaccagagccacccagttgctgcagcctgagaccaagctgctcagctaagcatagcttagatcaccattgagttctgaggtggttt

SEQ ID NO: 316227 - DNA, 573 bp, Homo sapiens
  misc_feature (1)...(573): n = A,T,C or G
nnnnnnnnnnnnnnnnnnnnnncttatagtgcaagacatggggcaccaactaggagtgtaaaacagagtagaaacacattcacttttgctttctagaacatacacctagaaaaggcttattagaaaggtgattactgatggtaggtttctgaggccctgagtagctccaatgtatggtatgtggaatcrccctcctaggtgttgttgaatggcttcttggcatgcagacacagtacagaagaacacctggagcaaaaggctcctagcctggagaaacataggaagcaaagtctgagactatggaccatcttggatgattagtgaaaaaaaaaaatctaaaaatatttgggtgtgactagaattctggaatctgcttggggacttggagactcttcttgatatttattatgatacactgaagggaggtacaattattaaaggggttaaagaagtgaacaaaaactaatgagtctatgactcttttaaaaaaatcctggggtcccctttatttaattaagaacaggatagatagataaatagatttcaggtggcacaaaaataaattttccatct

SEQ ID NO: 316228 - DNA, 613 bp, Homo sapiens
cagttgccacattcccacatccatcatttrctcctgtgccaagcatcttgtgggctgctcccagctaataatgagtgtgacccagatagtatgattttcacttagactccccatgggccttgctgaatttccttagaactgtgctgaaatttaagactcatcccccaaacagttttttccttccttctcttcttcctaaggatcagacacacatgacagtctgatggctctaccagcctcccttgtctcacttcccatactctttcatggtcatttcccttaataaatcacttccttgtttgatgttatcttgtctactcttcagaagacttaaactatcatgttcatgtgtacccaaagatgtcagagaaaacaagcagttagatggggattttggaccgacccacagggccaataaactataacatgtaattaggggctgagtgggagccactaattaagaattaagtggcatgtaccatcaggactcaaggaagtatttctaggagtgaatatattttttattaaagttccaaagaatttattatcaaaactaaaaacaaaactccagttgtacataaagtaacaaacctttacaacagctgttgaggga

SEQ ID NO: 316229 - DNA, 613 bp, Homo sapiens
cagttgccacattcccacatccatcatttactcctgtgccaagcatcttgtgggctgctcccagctaataatgagtgtgacccagatagtatgattttcacttagactccccatgggccttgctgaatttccttagaactgtgctgaaatttaagactcatcccccaaacagttttttccttccttctcttcttcctaaggatcagacacacatgacagtctgatggctctaccagcctcccttgtctcacttcccatactctttcatggtcatttcccttaataaatcacttccttgtttgatgttatcttgtctactcttcagaagacttaaactatcatgttcatgtgtacccaaagatgtcagagaaaacaagcagttagatggggattttggaccgacccacagggccaataaactataacatgtaattaggggctgagtgggagccactaattaagaattaagtggcatgtaccatcaggactcaagkaagtatttctaggagtgaatatattttttattaaagttccaaagaatttattatcaaaactaaaaacaaaactccagttgtacataaagtaacaaacctttacaacagctgttgaggga

SEQ ID NO: 316230 - DNA, 644 bp, Homo sapiens
atggtaattggtgatcctgacaagacaaaggaaaggctctttatagtgggattaagagagaagggaaaaacaggaagtagagacagtgtgtctaaagaattgtttggcagaattttactagaaaagctagatgattatgggagaagtagctgcagagtaagggcttttttgtctctctctctctctctctctctctctgtgtgtatgtgtgttttaagatggtggatgttacagcatgcttgtgtgatgatgtaatgaagctagtagaaaggtaagtcaggataatgtgagagagatggggtggggagatatgaagaggtaagagggtgaattgattaggtaaatagagtagaattcttgagcagcttgaaatttgtactcataaataaaatagcgttagccagcaggcttgtattttattctgtagccatgcttagctatgtagaagcactagaggaaagtagtaggtggagaatatgtttgccaagcaagtgttacagaggggaaaaggaggagagaatgtaggcaagggatgactacaataatgaattatgaaatctaagcagggtaagaagaaggtaaaaacaaaaggagattaataaatggggaagatgtggcagratgaatggattcttggtgagata

SEQ ID NO: 316231 - DNA, 517 bp, Homo sapiens
tgatacaggtaatatagcaagcatttataaaatatttgaaatttttctcttttagttgaagtcatgttcagagctttcttcaagtcaattctgggaacctttgatatattgtgtactttctaaaataacttgtgagtttttttaaaagtaagttggagaacttcaatagagaaaaagaaaagaaaactgactgttaaaattattttcagatacatataaaagccacatataacaggcttgcaaagcagagagccacgcactgatttctgaagcttttttttttttcctaagtgtcagcagcactgtgacctaraagcaacctttcccttttattgctttggcttcacatcttaagtagttcccctttgcatgtctttgaaggaagcagtatatggatctgtcccaaccttacttctccaggcttctttcccatcttgccaactcaaaaagcctgtatcaacaccaggttactttacttataataccctaaatatagactattcatgaattactctca

SEQ ID NO: 316232 - DNA, 601 bp, Homo sapiens
gtagcaattgtgggatatatggccttgcatagtattatgcatatagcatgtttcccaaattttgtggtgaaaaagttaataagtgagctgcaatcaaaaggaagtagcatcgagagtttccctggcattatttaaaattgatcctaatatttactgaacagtagggtaaacctttgcccagtagggacattgtacttcatcttagaatgagttgagtttagctgataggactaaaatcatggctttgaatttggcttctggcatatcctcagctctaagttcttaaaatcaggaatgacatttttccttgtgtctcctattcaagtaagggtagaaataaaagaaacaaaagaagtagaaagagagaaattcmagaaagataagaggacatttataggcaaacttagcaaaaggaggcagcaattccaaggattaccatagaagttgcaaatcgcacaaactgcagtgttcatccaagaataccaatgtctagtgataaaagtactaaatgagctaccaagagcttagcctgacattgttattagccacccactgttcttagcctgacaacttctagtgctacccctgccaaagatttgat

SEQ ID NO: 316233 - DNA, 533 bp, Homo sapiens
ataggactaaaatcatggctttgaatttggcttctggcatatcctcagctctaagttcttaaaatcaggaatgacatttttccttgtgtctcctattcaagtaagggtagaaataaaagaaacaaaagaagtagaaagagagaaattcaagaaagataagaggacatttataggcaaacttagcaaaaggaggcagcaattccaaggattaccatagaagttgcaaatcgcacamactgcagtgttcatccaagaataccaatgtctagtgataaaagtactaaatgagctaccaagagcttagcctgacattgttattagccacccactgttcttagcctgacaacttctagtgctacccctgccaaagatttgatatcctttggaaatacgataaccagtatcatttccaaaatgaccccagccattattactagtaccggaactactcgagaattctgttttcattatctaccacaatgtatagagaagtaaagttcatttatctttaagctgccttatatttataggag

SEQ ID NO: 316234 - DNA, 667 bp, Homo sapiens
ataacaaaaacattgaaatagattcaaggctttgttacagtaggtagctagtcagtcatgagcagggcaggaaagggccccgctccacacactcacaccccccagaatgtcagatgaccaccaggtgatgattagacggttattagctgtctctctaaaatagtaattgttcacagctrgcaccaaggactggcaatctcccaaaacatagaaaacaccgaaactggtgacagctgcttcccgatatcaccctctcttgccttcctgctttctgccatgaattgatgccgcacaaggatgccagcaccatgcacttgaacttcccagcctctagaaccatgagccaaatacatttctctttattataaatctttcacagctactctgggggctcaggcaggaggataacttcaggccaggagtttgagaccagcctgggtaatatagcaaaactcctatctttttaaaaaaagagagagaaattctctatctcccacagttccctctacagatgtctatgttgcattctttttcttatgggcaacttctgtgtgtttatctctatgttaaaacccacatggtgtgcttattcaatgtttgtcaaatgaaatattgagtgaggagatgaatctgtgtgaggatgtaaagtgagtgaaaacaaagctgt

SEQ ID NO: 316235 - DNA, 667 bp, Homo sapiens
ataacaaaaacattgaaatagattcaaggctttgttacagtaggtagctagtcagtcatgagcagggcaggaaagggccccgctccacacactcacaccccccagaatgtcagatgaccaccaggtgatgattagacggttattagctgtctctctaaaatagtaattgttcacagctagcaccaaggamtggcaatctcccaaaacatagaaaacaccgaaactggtgacagctgcttcccgatatcaccctctcttgccttcctgctttctgccatgaattgatgccgcacaaggatgccagcaccatgcacttgaacttcccagcctctagaaccatgagccaaatacatttctctttattataaatctttcacagctactctgggggctcaggcaggaggataacttcaggccaggagtttgagaccagcctgggtaatatagcaaaactcctatctttttaaaaaaagagagagaaattctctatctcccacagttccctctacagatgtctatgttgcattctttttcttatgggcaacttctgtgtgtttatctctatgttaaaacccacatggtgtgcttattcaatgtttgtcaaatgaaatattgagtgaggagatgaatctgtgtgaggatgtaaagtgagtgaaaacaaagctgt

SEQ ID NO: 316236 - DNA, 667 bp, Homo sapiens
ataacaaaaacattgaaatagattcaaggctttgttacagtaggtagctagtcagtcatgagcagggcaggaaagggccccgctccacacactcacaccccccagaatgtcagatgaccaccaggtgatgattagacggttattagctgtctctctaaaatagtaattgttcacagctagcaccaaggactggcaatctcccaaaacatagaaaacaccgaaactggtgacagctgcttcccgatatcaccctctcttgccttcctgctttctgccatgaattgatgccgcacaaggatgccagcaccatgcacttgaacttcccagmctctagaaccatgagccaaatacatttctctttattataaatctttcacagctactctgggggctcaggcaggaggataacttcaggccaggagtttgagaccagcctgggtaatatagcaaaactcctatctttttaaaaaaagagagagaaattctctatctcccacagttccctctacagatgtctatgttgcattctttttcttatgggcaacttctgtgtgtttatctctatgttaaaacccacatggtgtgcttattcaatgtttgtcaaatgaaatattgagtgaggagatgaatctgtgtgaggatgtaaagtgagtgaaaacaaagctgt

SEQ ID NO: 316237 - DNA, 667 bp, Homo sapiens
ataacaaaaacattgaaatagattcaaggctttgttacagtaggtagctagtcagtcatgagcagggcaggaaagggccccgctccacacactcacaccccccagaatgtcagatgaccaccaggtgatgattagacggttattagctgtctctctaaaatagtaattgttcacagctagcaccaaggactggcaatctcccaaaacatagaaaacaccgaaactggtgacagctgcttcccgatatcaccctctcttgccttcctgctttctgccatgaattgatgccgcacaaggatgccagcaccatgcacttgaacttcccagcctctagaaccatgagccaaatacatttctctttattataaatctttcacagctactctgggggctcaggcaggaggataacttcaggccaggagtttgagaccagcctgggtaatatagcaaaactcctatctttttaaaaaaagagagagaaattctctatctcccacagttccctctacagatgtctatgttgcattctttttcttatgggcaacttctgtgtgtttatctctatgttaaaacmcacatggtgtgcttattcaatgtttgtcaaatgaaatattgagtgaggagatgaatctgtgtgaggatgtaaagtgagtgaaaacaaagctgt

SEQ ID NO: 316238 - DNA, 567 bp, Homo sapiens
aatctgtgtgaggatgtaaagtgagtgaaaacaaagctgtgtgaacaaatgaatatatttctcttcattatttgctcccattaattatgtgtctattttatgaaggatgccctgtattgacattgcagatttggggtaaaagtagaattttaaaaatattcaaggacactttaaggaaacaccaggtacgaaaatgacataaaaatctccccactgtacttgaactaatagtggaactttttaatagtgaagcattaatgcaatgggattttaaatagagccaatccaraagtgcttaatctgaatgatgcaattagtttagaatgttggaaggtaaattatgaagaaaacattttattagtcataaataagttgccaatcatttctttgttgttaacttaagaagttttctaaaaaaggatatttttgaaatgtggaatttaactaccatacattaatgagattaaataactcactaaaagtggcagtttttaatttgctgaattttaagttacaatatcttatttcattttagtaacacccataactttttaaaattatttaata

SEQ ID NO: 316239 - DNA, 426 bp, Homo sapiens
actttgtcatcacagaaaccttgtcatgtcttgtcaacattatatcccttccttatgattacgtcctagaaaaatataaagtagccatactgggctaaccctgagcaggaaattatcaagcatcccctcaccagttctactgatgctcattgcaatgaaacgacagcacaaggaggccagaagttaggttggcaggtccctcacaggtgccgttcaaagcaaaaaaaaaaaaaaagcattggtgaattacagagctacatgcctcaacaatgtgagttagtaacacaaaggagagagaagagaactgctttaagataaaaataattcaggttaaaagtgccagtcataacttcataatccacaagtagaaaacaasgtcaggtattacttcatggaacttcctaaataatgagaaaatattctgac

SEQ ID NO: 316240 - DNA, 586 bp, Homo sapiens
aggggttttaattggcaagatctttagtaaaatttgcaaattagtgatccaccggctgatgttatgacaatgtctaaacactatcagtgccattttaaaataatctttcatcgatacaacattcattttaattagccaggaaatgttggtcccaaaggaagctgcctacagttttatagatttagcacggggttatsggacagcttgataaacttcatttatttggaaaaaagagatttattgaagtcgtttatatttcattcaacttatgaggcgctggtcagagtttagaatgattggaacacagacccagggatacaggtggaaaatgcccttctctttgatggagtggcatggtatgagtatcagcctgagagtcctgaaacctgggttttcatcctggcttagcaagaatttgtttgtataatctggggaagaacaacagcaactacatgtgactgagcacctactctacaccaggtgccctacacccattgttccattccttgcaacaatatgaggtgagaaccactggcatcttcatttttgaaaagaagaaacaagctgaggctcagggggtagaatt

SEQ ID NO: 316241 - DNA, 586 bp, Homo sapiens
aggggttttaattggcaagatctttagtaaaatttgcaaattagtgatccaccggctgatgttatgacaatgtctaaacactatcagtgccattttaaaataatctttcatcgatacaacattcattttaattagccaggaaatgttggtcccaaaggaagctgcctacagttttatagatttagcacggggttatgggacagcttgataaacttcatttatttggaaaaaagagatttattgaagtcgtttatatttcattcaacttatgaggcgctggtcagagtttagaatgattggaacacagacccagggatacaggtggaaaatgcccttctctttgatggagtggcatggtatgagtatcagcctgagagtcctgaaacctgggttttcatcctggcttagcaagaatttgtttgtataatctgggraagaacaacagcaactacatgtgactgagcacctactctacaccaggtgccctacacccattgttccattccttgcaacaatatgaggtgagaaccactggcatcttcatttttgaaaagaagaaacaagctgaggctcagggggtagaatt

SEQ ID NO: 316242 - DNA, 518 bp, Homo sapiens
gttagctatccaagtatacaaatgggtgccaaaactcttcctagcatccactgtgccaacccagccagagtcatggcacaaagttactgagcccraagttacaatatgatgtaaacatatcctacagcaccaagaaccagaacaagatgggtagtagaggagaacggtttaaaatgtatgagccaagtgctggcctatggaaagttcttccagtcaaaagagctatgaaattataaagtaaatcattcagctttcattgatgcctactcaaaatgaaagtgcttccaagccaggaaatataccaattaatatattcaacttccagaaaatcattattttttatcctgtttcttaaaggtagctctcaaaattaaattaggcctctcaccacaagccttgtgttcttccctgctgtacccaacaggggcacggatgtgctgaaagaatggtgctagacctgtggggacctaacatgcaggagaacaaggacacagagggaaacacgtggacagagacaa

SEQ ID NO: 316243 - DNA, 530 bp, Homo sapiens
caacccaaatgcccatcaatcaacaagtggataaagaagctgtggtatatatataacaaggaataccactcagtcataaaaaggaatgaattaacagcatttgcagtgacttasatgatattagagactactaaatgaagtaactcaagaatggacaaccaaatattgtatgttctcattgatacgtaggaactaggctatgaggacgcaaaagcataagaatgatacaacggacttaggggatttggggggaagagtggggggagcaaaagataaaagactacaaatagggtgcagtgtatactgctcgggtgaggagtgcaccaaaatctcacaaatcaccactaaagaacttactcatctaatcaaacaccacctgtaccccaaaaacctatggaaaaatttaaaaaattaaaattgaaaaaagttgaatacagaaaaagaagcttagaaaggaaagtgagaagaagcaactgtggcagggacccttagagagaagaacctttcaggtagtagggtgtcaacagggc

SEQ ID NO: 316244 - DNA, 522 bp, Homo sapiens
cagagtaaagtaactcagtcgctacaggcaatgggaaaaactgactgaaggaacggkgcatgtggaatttgaaggctcccaatcttatctttggatataagtggatacagtcatttctaactatctttatttttcttttgaggcccatgtcaatctttttccctggtgcattgggtttcaaaagaaccaagcactcggctgcggctggaagtagtctaagaggttagctggcacccagccttctagtactcagatgatacaacagagcctccagaggggagggtgaacagacaaaagacctcttagaacccagctcttggccgctctcatcagcattcttcttttcataccaaatgtgggagggacacatatttccccctcaaacattttcagtttctatttagaacagtccaggtaacaacaacaacaaaaatgtatacagcacattttttttccctaagaataaaaaataagtttgtggtaatttgctatgtaaagggcaaaagagttcaagacaatata

SEQ ID NO: 316245 - DNA, 538 bp, Homo sapiens
ttttacttactttgtgccccacagaaggctttgcatggggtaggtactgaaattgtttgttataattagtttaaaaattggacacagaaaaaatatatgaagcaactctatcaacacattaatggaaattttaaagctaaatgcaagtcttcagattcaatgcaaagaatgaacacccagaacacccagatttatcaattatgtcaaatttggtgttctatacaatgaattgggctgatagccatagacatttgagtgtgtgtatgtgtgtaatggttcaagctaagttgaagggaagggttttgataattctcaaaacaaggctggatttttttttttacaacatagaaattactgtcttgcttcaaataatacatttgaatataaatgcatgcatgttcatttcctaccttcagcttctcccttgcaggtctggggtcctaaaacattgcacgactgtgttttcctccagctcaggcttctctacctttcttyctttggagcatctgttatgcaacgtattgaaaagcaaattgcc

SEQ ID NO: 316246 - DNA, 506 bp, Homo sapiens
atacagtctttgaggctgcacagagtagaggcaactaaaattcgaatatgagccttgtaatatgataactcatgaaaagctactaatttatgtgtgatgattagttaatggaaactgactaattttttttaagtccaaagtgtatttattataactataatgcaatatctttcagactttgtgttcataagcttgtttttttctttcttatttgtcttttatttttgaaaacataactgagttattattttgagcacgttgggggaaaataagcatatcaataaataaaagaaggtaaacaaatcccaagacataaatatcaagaaaggaagacattaactgtcccaggtcgggagagaacagttagcacagctgcttggaagtgtgacgatcatcctcacccttcaggctcatcacattattagaattatttaacggtcaaggtgtgaaggaktaggataaccagctctcagtaattagcactatacaacctgttttgattggaa

SEQ ID NO: 316247 - DNA, 550 bp, Homo sapiens
ctttaaagtatctaatctttggaattctgggttgtaatgtggagaaataatgacatctgatttgccttccctgtcattccataaaatattcttgaaacccaaaaaagagaaatagtgactcaacattatttttattccctcagtttaaaattcttctttaggctccatttaatcagctcttaccactttcgtcttttaacttttttctttctttcttttttgaaatagggtcttgccctgtttcccaaggtggagtgcagtggtgtgatcacagctcactaggctcaaacccgtagccttgagcaatcccctcayctcagcctcctgagtagctaggactacaggtgtgccccatcacacctggctaatttttaaatttttttaatggagaaatgggatctctctatgttgcccaggctggtctcaaactcctagtctcaagcaatcttccagcctaggcctcccaaagtactgggattacacgcatgagctacctaccatgcccagccttcttcttttccattattttcacaatattttgtaagtccaa

SEQ ID NO: 316248 - DNA, 590 bp, Homo sapiens
gttcttcccttctttgtacctatcttcaacacgtatgctctctttactaattccattcatttaatctatgtctagcatgcctcagagtctatttttacttacaatcaatcctgagtattttagtccatttgagctgctataacagaataccatagattaggtggcctatgaaaaacagaaatttattttccacagttctgtatgatgggaagtctaagatcaagtcaccagcagatttggctcctggtgagggacttcttcctagtacatagaaggccatgtcctcactataacctcacatggcacacggggtgattgagctccygcatgcctcctttataaggtccctgttcccattcatgaggactctgtcctaatcacccatgacctaatcgcctccaaagacctgaccttctaatagcatcactttactgtcaggacttcaacacatgaatttggaggaggatgaaaatattcaaatcaaatcactaaattttatttatctgtttatcttattgtttacagcaaatttgaatttttttaaatattcattaaacatatgttttctaaagttgtaacgatatctagta

SEQ ID NO: 316249 - DNA, 590 bp, Homo sapiens
gttcttcccttctttgtacctatcttcaacacgtatgctctctttactaattccattcatttaatctatgtctagcatgcctcagagtctatttttacttacaatcaatcctgagtattttagtccatttgagctgctataacagaataccatagattaggtggcctatgaaaaacagaaatttattttccacagttctgtatgatgggaagtctaagatcaagtcaccagcagatttggctcctggtgagggacttcttcctagtacatagaaggccatgtcctcactataacctcacatggcacacggggtgattgagctcctgcatgcctcctttataaggtccctgttcccattcatgaggactctgtcctaatcacccatgacctaatcgcctccaaagacctgaccttctaatagcatcactttactgtcaggacttcaacacatgaatttggaggaggatgaaaatattcaaatcaaatcactaaattttatttatytgtttatcttattgtttacagcaaatttgaatttttttaaatattcattaaacatatgttttctaaagttgtaacgatatctagta

SEQ ID NO: 316250 - DNA, 589 bp, Homo sapiens
tttgtgttcattgtagattctggatattagccctttgtcagattttagtagcgacggggtttcacggtgttaatccakgatggtctcgatctcctgtccttgtgatccgcctgcctcagcctcccaaagtgttaggattacagacgtgagccaccgcacccggcctgttagttttaataaaagaaaacaaatatttttaatagatcaaataataggaaagtttttataaaggaggtggtatgaagatcagtcttcagggactaatgagtgtgaaaatggaaaatgcagagaattccaggtacacccggtttctcagagaagcccggcatttatcagggtgttagtagaggaaaagtggccttgagtttcttaatcaagtttatgcacaagcatttaagttagcaaatgttttcaaagagaataataacttgatctgatgttaatctgacgtaagtcagagaaagatgtctttaattttgcctatacagagtgtacctgggaattagaagtagagagagaatcacttttgagaaaaactaagttattgtgaaaatatagtgagtgcaacctctgtgagtgagaaaaaaaa

SEQ ID NO: 316251 - DNA, 506 bp, Homo sapiens
ttcttaatcaagtttatgcacaagcatttaagttagcaaatgttttcaaagagaataataacttgatctgatgttaatctgacgtaagtcagagaaagatgtctttaattttgcctatacagagtgtacctgggaattagaagtagagagagaatcacttttgagaaaaactaagttattgtgaaaatatagtgagtgcaacctctgtgagtgagaaaaaaaaattcagtcttgaggaaaaaatcagcatttaaggaaaagttaaaaaaatgatttggagaaggaaacacaaaagcatctcttktaagtgcaaggaatatattgcattccagaaaataaaggaaaatttaatatgttgctgagaggtcaaggcagatgaatagtgagaaaaagtatattggatttggtgtttaggatttatccaccattttagtaagttggtagcaaaagccggttgtaaactgttaatactgtgtagatgtgaatcaaggttaagagaggactac

SEQ ID NO: 316252 - DNA, 518 bp, Homo sapiens
atatatttccaggaatttgtccatcacctctaggttttctagtttgtgcatgtaaaggtgttcatagtagccttgaatactcttttgcatttctgtggtgtcagttgtaatatctcccatttcatttctaattgaacttatttggatcctccctcttsttttcttggttaatctcactaatagtctgacaatattgtttatcttttcaaagaaccagctttttgtttcatttatattctgtatctttttgccattgtttcaatttcatttagttttgttctgatcttggttatttcttttcttctgctgggtttgggtttggtttatttttgtttctctagttccttgaggtgtgaccttagatgtctatttgtgctctttcagattgtttgatgtaggcatttgatgctatgaaccttcttcttagcactgcttttgctgtatcccagaggttttgataggttgtatcactattatcattcagttcaaagaattttttagtttttatcttgatttca

SEQ ID NO: 316253 - DNA, 588 bp, Homo sapiens
acaaaaaagcagactcatgttcctgtcaggttacatgcatttctatgtcaaaggacaactactgtttaaaagaggaaactgatattttaaagagcataattaggatgttcttcaatgacagcaactaaaatttgaggaggaaaattggcttggtctatagcatacatttgtggatgatcatatcaaaatgtgggagattgttttacatttctttcaccttcattttggaatttgttgctatcacctcaaacagagttctcaaggcaaaatttgagagtttggggtattattaagccctcttgttttccctgatctccttttgcagaggggactaataagaaacttaagaaggtctccaggtccttccatatatcactgtagacaagtgatagaaaggacgaaaaccactctggctaagcaaaacttgtgtaagaggcccagccttakaaaccttttcaggaactgccaacaattctaatggggctttttagttaaagaagcctggagactggaactatgtagacacagaggaaatcttgttaactgtcaccaggttaatcattcggcccagcgttctttaagtgagag

SEQ ID NO: 316254 - DNA, 547 bp, Homo sapiens
agggtgggtctgcctctcccagtccactgactcaaatgttaatctcctttgacaacaccctcacaggcacactcaggaacaatactttgcatccttcagtccaatcaagttgacactcaatattaaccatcagagtcacacagttctctaaaacaaaattatttcctaagctctctgtaatttatctttatgattttaaaatgtatatttcagataagttcagacgctttttcattgattgcaattcagattccttcaaatgtcttcctttctccaagtagatggctatctttgtttctctactctattccacctccccactcccactccctcccagagaagaatttttcataaatttaaagggccacacatttttcccaaggtgmtaagatttgctccagacagatcattagggctttctgcaacttatcctacaacctgaacccagcccacaccatcctcattagaaggcagcctacagagcatcagcaaaaaaagctgaattttttaaaggagaatgcccttccataggacagagacaacagaa

SEQ ID NO: 316255 - DNA, 635 bp, Homo sapiens
caagcactaacacaagtgccaaggttaaaaaaatgatacccaggctttggctttgggaacccagagtctagtaggggagatatataaatacacaaatacagcacagaacaatacatgtaataacagactgtagccaaagtaataaacatttagacaaataataaacaggctggcccacagagacagggtcattacgctactcaaagccttgtgttctgctctgcaacttctgtgactaaatcaaatcatcttaagttgggtcagccaaaagctgtctgccattccagtccttcagtaccacctccttcaaagagactactggtaggattaaattcctgagttctcaggcctgtaattcctgtttaatccagccaatatccaaagtctcagtgacatcctttttaaaaaaatagtattaatacaatctatgtgccacattttctttatccagcctatcattgatgggcatttggtttggttccaagtctttgctattgtaaatagtgctgcaataaacgtacatgaccatggccataatcatgaccataaccatgattgactataaccataaccataaccgtgwtcataaccaatacgataaccatgaccataactttaaccatgaccataaccat

SEQ ID NO: 316256 - DNA, 472 bp, Homo sapiens
tgtgatgagagttctgatgacaaatctttaagcatccaccttacaatcctaatttggcttggctccttctacctttgttttcttaaaacatctgtaaaaggtgcccattttttttagttaataatatgtgtgtgtgtatatatacacacatatataaaatatacgtacatgtatatatatgatatacgtgtgtgtgtrtatatatatatatatatatatataaaatttggtttatttagaaagccttgtctttgagctctgaagttctttcttctatctgtttattcttttgctaagacttcccagtgtattttgcatttctctaagtgtgtccttcatttccagaagttgtgattatttttcatttatgctatctatttctatgagagttctgacaagaaatcattaagcatccaccttacaatcctgatttggttctttctacctttgttttctttcttaattttaaaat

SEQ ID NO: 316257 - DNA, 633 bp, Homo sapiens
tgtgtatatatacacacatatataaaatatacgtacatgtatatatatgatatacgtgtgtgtgtatatatatatatatatatatatataaaatttggtttatttagaaagccttgtctttgagctctgaagttctttcttctatctgtttattcttttgctaagacttcccagtgtattttgcatttctctaagtgtgtccttcatttccagaagttgtgattatttttcatttatgctatctatttctatgagagttctgacaagaaatcattaagcatccaccttacaatcctgatttggttctttctacctttgttttctttcttaattttaaaatatctgtaaaaggtgcccatttttttcagttaataataataatatattgggttatttagaaagcctggtctttgagttctgaatctaaatattgrgttatttagaaaaccttgtctttgagctctgaaatcagagctgtagtcttttatatatacatacaaacaaaggtagaagtcattcatatatgtatatgtatatatatatatatgactacattgacatggttaaattcccaggactcagttatttagggatggagaaaatggctctttaacttgatgaagcttatgttga

SEQ ID NO: 316258 - DNA, 633 bp, Homo sapiens
tgtgtatatatacacacatatataaaatatacgtacatgtatatatatgatatacgtgtgtgtgtatatatatatatatatatatatataaaatttggtttatttagaaagccttgtctttgagctctgaagttctttcttctatctgtttattcttttgctaagacttcccagtgtattttgcatttctctaagtgtgtccttcatttccagaagttgtgattatttttcatttatgctatctatttctatgagagttctgacaagaaatcattaagcatccaccttacaatcctgatttggttctttctacctttgttttctttcttaattttaaaatatctgtaaaaggtgcccatttttttcagttaataataataatatattgggttatttagaaagcctggtctttgagttctgaatctaaatattgagttatttagaaaaccttgtctttgagctctgaaatcagagctgtagwcttttatatatacatacaaacaaaggtagaagtcattcatatatgtatatgtatatatatatatatgactacattgacatggttaaattcccaggactcagttatttagggatggagaaaatggctctttaacttgatgaagcttatgttga

SEQ ID NO: 316259 - DNA, 323 bp, Homo sapiens
gatctccataaatgacaagtcctgaaagcaaacttagctttgagcagctgtttctcttctgtaactttttatatttcatacagttcagcttcattggtctccctgacaatatccccattcaaaatacagaagtaaagcagaaacaatgttatcaaccacacgtgctaaaaccatgatgtttctccacctccatattggcctgacccttctcatttgtcataccttggcctcgtctcaacttcctctagacatcccctatgctaytggaaaaatatgttggaggagaacatggcaaaatacggcccttctttggctaaatatac

SEQ ID NO: 316260 - DNA, 558 bp, Homo sapiens
caaagtaggcaaagttagttataaatgcataaaagcctcagtttcatcttttagttagattctaaggatgtagatacagcagttgaacaactgggaaaactgtgaaaacaccttcagtagaagagtctgtcctatttagacattagaattggatttaaagagaccctgggatatgattgattgtcattatgttgaaaggaatactcagcattttgctccaagagctttttttttccccctgtaagatttggaccaaacataagttactttctcagggaattcatggggaatgctttgaagagtttcatctctttagtgtaaaacattatttaacaagaatttggctttgatcaatactctttgaataaggataggktattaccccagttcgtttttttcttttatcagtccttgtattaaattagaaattacattggaaatctcattttcttggggaggggatccttggaaaatgtcgaagtgagatttaactgtgtattgtttagttattcattttaagagtggtttatgaaagatttgttaaagttttttcatttt

SEQ ID NO: 316261 - DNA, 598 bp, Homo sapiens
tcatcgcaatcatcttctatttttcctcaaatcttcactagaattaagtcatttggaacacgtgagatgttttcaaattttgggttagggataagggagggagtttgtacagacatagaaaggacaaaatawcccccccgagacttggttttagcacatattgtgtcttttaaatcttctcactgcccaggtctgacccatatgtcacaaatgatttgagagattaatgctgaataaatatctattcaagctataacttggcctgtctttcagatttacatcattttataagttcctaaatgttaaaaaaaatcttccttgttcagagttaagtatgaatatgcatttccttctgaagaaatcatttttgtgaatttaaacttattgaaaatagaatactgtgtgtctggcttactcataatagatttgcctagaattttttttctctgctttaagtaaggtcttgataacccaaattctcataagattataaaattagagaattaaataagttaggaatgaccttgcagagtaattttatctgctctaggcaagaatatactcaaaccctttcagaaaaggtgaagatacagtctgt

SEQ ID NO: 316262 - DNA, 570 bp, Homo sapiens
acttgctgcttcactttgtacttttatgttatggagacagcttgtttccttaaatcacatgaaccaacttctgctagcttccaactttacttctgcaacttcctcacttctctcagccttcatagacttgaagagttagggacttgctctggattaggctttggcttaagagaatgttgtgctggcttgatctctcatgcagagcyctgaactttttccatatcaacaagaagtctttcttattatttgtgtgttctctagaggtgcactcttaatttccttcaagaacgttttctatgcaatcacagcttggctaactgttggcacaagaggcccagctttcagcctatttcagcttttgaccttccttccccatttaatcatttctagcttttgatttaaagtgggagacatgcaactcttcctttcacttgaacacatagaggccattgcaggataattatttggtgtaatttcaataatgctgtgtctcgggcaatagggaggcctgagtacatggaaaaagttggcagaagggctacttggtggagcagtcagaacacacacata

SEQ ID NO: 316263 - DNA, 563 bp, Homo sapiens
gatgtcttcttccaatagaaggccattttatctacattgaaaatctgttgtttagtgtagccaccttcatcaatgagcttcactagatcttctagatagcttgctgcagcttctccattagcacttgctgcttcactttgtacttttatgttatggagacagcttgtttccttaaatcacatgaaccaacttctgctagcttccaactttacttctgcaacttcctcacttctctcagccttcatagacttgaagagttagggacttgctctggattaggctttggcttaagagaatgttgtgctggcttgatctctcatgcagagccctgaactttttccatatcaacaagaagyctttcttattatttgtgtgttctctagaggtgcactcttaatttccttcaagaacgttttctatgcaatcacagcttggctaactgttggcacaagaggcccagctttcagcctatttcagcttttgaccttccttccccatttaatcatttctagcttttgatttaaagtgggagacatgcaactcttcctttcacttgaacacat

SEQ ID NO: 316264 - DNA, 617 bp, Homo sapiens
caaatatttattgagctcctatctgttgtagttcctggagatgctctggaaaagaaaaataaaagaaagaaaatctatttttcacagagtttacattctagcaagagagtaacagaaaataaataactacgtcataggcaagtagtacgtgcagtgtcaggggatagtgatgaaggacgggacaggacagaggtctttttaattaagtgagcagaaacctgaaagttgtaggagtgagctagagaagatgaaggratgtgcattccaggcagagggaaaaggaagtccacaagcgccaaggtaggattccatcagaatgactggagtgggcacgaggctaggagtgtggaggaaaggagttcaaaggggcagcctggggcagctgagaaagaaaagggaaaataaggctaggaacagaaattgaagcagaaaatgatgcattgtatatgatgaagagacattggactaaagtctgtgaggcttctcttagggaactctcatgacatagtatccagatgtcagatgaaggtcaggcctggggtgccatcagtaagaatgaagacaaagtaatggatcagaaactattcagaaaaagaatgaagggcttggaaagttgg

SEQ ID NO: 316265 - DNA, 549 bp, Homo sapiens
tgacacaaaccttcaatttgtaaaaaacacagtatctgtgaagcacaataaagtgagatgtacctgtgtgtgaagagagtttcagtgtcttgccttgcaaagcactgagccatgccttttatggctctgctgtagatattcaacttcacactccctcatataaaatgatgatcggcatgacaatggcatgtttcttaaacaagtcttatatattctatctgacaatgccccacaatgttcagacattacttgggcaagttttaggacctgtgatagaacacaaattcytaggtgagaacactttgattagttttctattgctgcccaacaaattatcacaaacctagtagcttaaaacaagacaaatgtattatattatcacagattctgtgggtgaggattccagcacatttctgttgcatcctgtactcacagtctcataaagctgcaatcaaaatgtcagccaggactgcactttaagtttggcttaaagttctaaggcttaagttcttcttccaggctctttggttgttgccagaatttggttcc

SEQ ID NO: 316266 - DNA, 604 bp, Homo sapiens
ggcttaaagttctaaggcttaagttcttcttccaggctctttggttgttgccagaatttggttcctttggctaaaggaccraggtactctctttcttgctggcatcacctggaacctgcttttggtttcctggaggccactcatggtttcctgcatggcctctacagcatggcttgttgcttcttcaaggccagaagggcagcaactctcttgctgtctctccatctatcctgctatgatgaggtcttctataccataatgtaatcacaggactgacaagttcatcaggggcacaggtgccaccaataatcaagcagaggggcctgtacaggacaggtacacttggtgggaagacgtaatgcctcatagatcatctcataattctacctacctcaatggaaccattgagggaagtttcttccagaagagacacaagtcatccatttttctaaggttatcacagtggacaattaattagattaatcaaatcacaaatgcagcaattgcttttgtcagtgcacaatttttcaacactgtgagcctcgtgggatgttcaagttgggtgtgagatgcctataggaactggtggtcataaattgaatgc

SEQ ID NO: 316267 - DNA, 525 bp, Homo sapiens
ttttgagcagtgatccaaaatgatttttgagtccctagaagcattgatttggtctagtgtacggtcacctatcaaatgcaggcaggcatgtctcaggaagatctagaaaacttttacagtattcagttgtggcagtgttgaagagtactttctcaaaaggacccagtcttccttttgatcaaagaactccaagtctgtgaacgcctttaggttcaggaagtagatgagaaattgtgaatactcaagtccgatttctgcccatcaaacatagagttctcttattatgctgattaagtaacactttagaaatctgcttatctattttcctcctaagtcatttcatttctaaggaattaagtgagcatagacaaaggtctctgcaggtcaattctgatttctaattcttcctcrctatcttcacagaaattacataactcttacttattgaagtgagtattacttcttgacttcactactctgcgatcccatgatatacactgaaattagggatcctttttcaataat

SEQ ID NO: 316268 - DNA, 616 bp, Homo sapiens
tactggcacacgctctagaaaaagggatgtcttctgggccctctaaacaaatagagaggggtggtgggtgtgcaagtttcacgagtaaagtccactctaacattcctacatccctaagccatttttgacaccaggccaggaaaattctcatccaaccttcctgcaagaaggccaccattgaatccartaaattaaacaattgttagaacaattttagtctgctcaacctatcatattaaatctgaaagaagtatacctgagaaattttatgtgctacaatgtcacattccattctttttggtctaacatgatattattatacatatgctataatcacatatatcccctaggttcatgtcaatatgatttagaaaaatacagcaattcttttggagtataacttatttcttcttacactggatttttcacttggccctgttacttagattgctttagcggtataggcctagacacagtagaggtggtaagtcttgaggagaataagcatctcgttgaaaggaatgctcagagtggattcaaggttttcaactttatgttccatcagatatccctatttctttccaatcagtcttaattttcacttaggacacttgca

SEQ ID NO: 316269 - DNA, 639 bp, Homo sapiens
gaaattaaaagtgatacttcagtgaacacatgagtgataagaaagcaaaacaggcatgttgctgatatggagaaggttttagcagtctgcatagaagattaaactagccacatttccttaagccaaagcccacttcagagcaagaccttaactctmttcaattcagtgaaggctgaaagaggtgaggaagctgcagaagaaatgtttcaaattgtagaggttcgtttatgaggtttaaggaaagaagccgcccctataacataaaagtacaagaggaagcagcaaatgctgacgtagaaactgcaatattagttatccagaatatctacctgagataacttgtaaaggtggttacactaaatgacaaattttcaatgcagataaaacagtcttacacagtatttgaagaagatgctatctaagatgctatcatagactttgcctgactttaaagctttaaaggacaggctgactctcttgtcaggtgcaaatgcagctggtgactttaacttggagctaatgcccacttaccattctgaaaatcctagagcccttaagaataatgttaggtctactctgtgctctataaatggaacaaaatccagatgacagcacatctgtttacagcatggtttgctg

SEQ ID NO: 316270 - DNA, 639 bp, Homo sapiens
gaaattaaaagtgatacttcagtgaacacatgagtgataagaaagcaaaacaggcatgttgctgatatggagaaggttttagcagtctgcatagaagattaaactagccacatttccttaagccaaagcccacttcagagcaagaccttaactctattcaaytcagtgaaggctgaaagaggtgaggaagctgcagaagaaatgtttcaaattgtagaggttcgtttatgaggtttaaggaaagaagccgcccctataacataaaagtacaagaggaagcagcaaatgctgacgtagaaactgcaatattagttatccagaatatctacctgagataacttgtaaaggtggttacactaaatgacaaattttcaatgcagataaaacagtcttacacagtatttgaagaagatgctatctaagatgctatcatagactttgcctgactttaaagctttaaaggacaggctgactctcttgtcaggtgcaaatgcagctggtgactttaacttggagctaatgcccacttaccattctgaaaatcctagagcccttaagaataatgttaggtctactctgtgctctataaatggaacaaaatccagatgacagcacatctgtttacagcatggtttgctg

SEQ ID NO: 316271 - DNA, 639 bp, Homo sapiens
gaaattaaaagtgatacttcagtgaacacatgagtgataagaaagcaaaacaggcatgttgctgatatggagaaggttttagcagtctgcatagaagattaaactagccacatttccttaagccaaagcccacttcagagcaagaccttaactctattcaattcagtgaaggctgaaagaggtgaggaagctgcagaagaaatgtttcaaattgtagaggttcgtttatgaggtttaaggaaagaagccgcccctataacataaaagtacaagaggaagcagcaaatgctgacgtagaaactgcaatattagttatccagaatatctacctgagataacttgtaaaggtggttacactaaaygacaaattttcaatgcagataaaacagtcttacacagtatttgaagaagatgctatctaagatgctatcatagactttgcctgactttaaagctttaaaggacaggctgactctcttgtcaggtgcaaatgcagctggtgactttaacttggagctaatgcccacttaccattctgaaaatcctagagcccttaagaataatgttaggtctactctgtgctctataaatggaacaaaatccagatgacagcacatctgtttacagcatggtttgctg

SEQ ID NO: 316272 - DNA, 597 bp, Homo sapiens
ggtcttcttcaatttctttcatcagtgtttttatagggttaattatagagatctttcaattctttggttaatccctaagtatttaattttatgtatagctattgtaaatgggattacttttttaaatttctttttcacattgttcactgttggcatatagaaatgttactgatttttgtatattgattttgtattctgacactttgctgaattcgtttcatcagttctaatagttttcttgtaaagtaggcttttccaaatataaaatcaygtcatctgaaaataaggataatttgacttcttcctttacaatttggatgccctttatatcattctcttgtctgatcactctagctagaacttccattactctgctgaacaacagtggtgacagtattgtgttccagttcttaaaggaaaggctttcagtttttcccatgcattatgatactagctgtgggtctgtcatacatggctttcattaaaatataactgttatatacgctgggaaaaaatatttgtatgactcactttattgtgatactccctttattgtggtggtctggaaccgatcctgcaatatctgcaaggtatatg

SEQ ID NO: 316273 - DNA, 597 bp, Homo sapiens
ggtcttcttcaatttctttcatcagtgtttttatagggttaattatagagatctttcaattctttggttaatccctaagtatttaattttatgtatagctattgtaaatgggattacttttttaaatttctttttcacattgttcactgttggcatatagaaatgttactgatttttgtatattgattttgtattctgacactttgctgaattcgtttcatcagttctaatagttttcttgtaaagtaggcttttccaaatataaaatcacgtcatctgaaaataaggataatttgacttcttcctttacaatttggakgccctttatatcattctcttgtctgatcactctagctagaacttccattactctgctgaacaacagtggtgacagtattgtgttccagttcttaaaggaaaggctttcagtttttcccatgcattatgatactagctgtgggtctgtcatacatggctttcattaaaatataactgttatatacgctgggaaaaaatatttgtatgactcactttattgtgatactccctttattgtggtggtctggaaccgatcctgcaatatctgcaaggtatatg

SEQ ID NO: 316274 - DNA, 589 bp, Homo sapiens
ggcacaaaagtcttgcttacgtgattcctttatttcagattgtgcagctttaaaaaaaagtctaaacctgcactgcaggaactaggaattttctatttccatcaatttaggggcttctggaggacagtggtgaccacattctaccacacatttaaagaagtcagttcttttgtgactgtatagtcttctgggcattgaccaaaagaaaatagaatagaaaattgaaagaaagtggtatatgtaaacatgtaattataataaaacatgagaaagtgacacaataaaaatatgaacaaattgctttggtggaacagaaaaaagggaactaactctccctggggaaagttttaagttggaagataaataccagaacaaattggaaagtcatgcaaatggaagttaaaacatttagatcattgtacaaataatagaaagcagaaaacaaaaackaacagtttctgaactgagacatttaatgtgggggaagaactcagagctcattaaaaagacttcctgtgccaagtaactcatgaagaacactgagggtaaagagtcattgttactgagtttggagtcacatagcattgcc

SEQ ID NO: 316275 - DNA, 562 bp, Homo sapiens
tttctgtgacatattagaagctattatttatttaaacttaccatttcaagtttaaaagatactgtcttagctrcaagggttgtcataacaaaataccgcagacaggatggcttaaacaacagaaattaattttctcatagttctggaggctagaagtccatggtcaagatgccagcaaattcagcgtctggtggtggtgcttttcctggtttgaaaaagctaactagcatttctctttgtcctcacatggcctttccttggttcaggcattgagggagagagggagggacagcagagtgcatgggagagaacactctggtgtctcctcttataaggacactaatcctgtcagatcagggcctcacccttataacctcttttaatcttaattatttccttagaggccccatctccaaatacagccaccctgggagttagggcttcaagatatggattttggtgggacacaaacatgcagctcatgacacacatttcctcttaaaatattaaatcttggaaagaaagtatatatacatctacttctgttcttcaaattttaaag

SEQ ID NO: 316276 - DNA, 597 bp, Homo sapiens
cagccaacgctgcttttaactatttttatctctattctgcatttcaaactcaagaagtttttaagaaccccatattcttattttacatctgatctaatttaatatctgttctgtggcagcagcactatccaggagttttcttcactagatgtgattatctgaagaaaaataactatggctcccattaaaagaaatgtaggcatgactcccaatcatacattccccaaacaaaatatgagaagaagaattttccaaacagttatgaaaatkttccccacagagcttctaaattgttcctttgcatctcaggctgggtagtcaggttgacccccaaagggagacagctgcagtgttgttctgtccactggtgataagggatgatattttccctctatgggttaataaaacagtgttaaccacatactctcaactgaagtaataatctatctcaagaaaaatgagttcatggctctttatcctttctactttcttcctagagagtcctatagcagcacatcatgtcaaataagtcatctcaaaagggaccaataacaacttttgggcaggtccttctggaagtgaaagaagaaaatatga

SEQ ID NO: 316277 - DNA, 597 bp, Homo sapiens
cagccaacgctgcttttaactatttttatctctattctgcatttcaaactcaagaagtttttaagaaccccatattcttattttacatctgatctaatttaatatctgttctgtggcagcagcactatccaggagttttcttcactagatgtgattatctgaagaaaaataactatggctcccattaaaagaaatgtaggcatgactcccaatcatacattccccaaacaaaatatgagaagaagaattttccaaacagttatgaaaattttccccacakagcttctaaattgttcctttgcatctcaggctgggtagtcaggttgacccccaaagggagacagctgcagtgttgttctgtccactggtgataagggatgatattttccctctatgggttaataaaacagtgttaaccacatactctcaactgaagtaataatctatctcaagaaaaatgagttcatggctctttatcctttctactttcttcctagagagtcctatagcagcacatcatgtcaaataagtcatctcaaaagggaccaataacaacttttgggcaggtccttctggaagtgaaagaagaaaatatga

SEQ ID NO: 316278 - DNA, 602 bp, Homo sapiens
ccaagtctgttagcccttaattttaaaagtggggaaattatgtgtgtctgttgtttagaaccttgctaataaactaatcccatcagttagcctaattttcccaggatattgcactcataaaggtttctaaaataaaatttctgcctattcttctctgtctctatttagcacagcatgtaatccaggtgctcagtttagcaacattttgcaacattgatactatccccatctgatttgctgagaagatgaatataaacaaaatgacactggtggcttttcatatttttccagcttaacaaaggaagaaggattctgtaaaattaacatacagytggattggaataagcagctaaagcaactggctgtgcaaggtttataatgtctgaactcccaccaagctgctatcatctctccatatgtctcctggtcattgggagccaagtttaggatttataaaaaatcagggcaatgccttttctggtcatggtacctgtaagtgagcaaatgattaagatgacctactacttactaaatcagcatgtttagtagctgtcatccaaaagcatgccagagagccaagacagtatttgcgttcatacaag

SEQ ID NO: 316279 - DNA, 538 bp, Homo sapiens
cagattttctggtctgaaagaggaattttagaataataaaagcagtgaatggtgaaaggtctgataattatgcagaagacaggatggatggtggcagagagccagcacaggatgagcccttgtgagcacttctatctttccctgagtagtggaaagagttcaatcgcattcatcaaagattaaagtgctttgagctgcccctccagagcacttggaaagagtcgttgccttcttctctctcatctagaaacagattaagtttttccatcttttccatccatctattaatcgtctacatctggtacagtttttacaacttttcaccagtgcttcctctttaaaaagcattggtcattytgagacaaccatttttctttctctgaggaagctttgggacgctttagggtgagaaagaggagaggatagagtccatctgtgaaaaatgtgaagataagttttgttttcagaatccctggtttcctgttcatatatctgtataaatggttctgaaaattaaatagaatgagttgtgggagca

SEQ ID NO: 316280 - DNA, 590 bp, Homo sapiens
tcaatagataaaagagttaactcagtcctgataaaaactgcataatggtacacagctagacgttagtttattctaccattattctattaatgatcattcaacttttctgcagaaacttttgccactacagaaagcaccagagttaaacatacatataagctacattctacttttctttctgcaggatgaatctccctaatagagtcattgggtcatggatatatgtttttaaattgtaacagaaattaatagattattttttatagcaaggttataatacttcacattgtcagataccacagcaatccatgaggatgtcagcttccytacatccttgctaggactagatcttcaattctgtagtttttgctactctgatgaatagaaaattatatcttcttgttttaattttattttcctattaatatggtaaagcatttttgtacatgtttacagaccacttagatttttatcttctcataattacttaataatatcattgctccattttactttcttataggcctttttcttatcaatatatagaatgaaattgaattagcattttgtctgtcatttgggctgcaaat

SEQ ID NO: 316281 - DNA, 590 bp, Homo sapiens
tcaatagataaaagagttaactcagtcctgataaaaactgcataatggtacacagctagacgttagtttattctaccattattctattaatgatcattcaacttttctgcagaaacttttgccactacagaaagcaccagagttaaacatacatataagctacattctacttttctttctgcaggatgaatctccctaatagagtcattgggtcatggatatatgtttttaaattgtaacagaaattaatagattattttttatagcaaggttataatacttcacattgtcagataccacagcaatccatgaggatgtcagcttccttacatccttgctaggactagatcttcaattctgtagtttttgctactctgatgaatagaaaattatatcttcttgttttaattttattttcctattaatatggtaaagcatttttgtacatgtttacagaccamttagatttttatcttctcataattacttaataatatcattgctccattttactttcttataggcctttttcttatcaatatatagaatgaaattgaattagcattttgtctgtcatttgggctgcaaat

SEQ ID NO: 316282 - DNA, 597 bp, Homo sapiens
cctttcttttgactactgcaaaagtatagaccaaagaggcaacctaataaaacagctaagacaagactactagctattttgctaaatgttttcaaaatctgatttattctgcacaatatccctctgaaagagatactattattatccacattttataggtgaggaaactctgaataagttgccaaggtcacccagctaatacttttgaaaccaggactcaaatttgaacctttctgaatccaaacctcactaagctctatatcatctctgacatcaatctactaccaaatagatggtgaccttgacttacttgcattttgaaaacacttatattcattagtggtagaaatatttatagacaaatcactaaccagaaggaaatctgagaaaaagagaagcatcagaaaatagtgtcaagggcaccagtaagtagataagaggctaaggttttagtttcagttcttgggccaaaagctctcagggcttctgttattttatttgtaaaattaaaccrttgactagataggttcttaggatttgtctaaaaaatacaagtatttgcttcctgaggggactaaaaaattcagacagtgtgat

SEQ ID NO: 316283 - DNA, 555 bp, Homo sapiens
tggatgaacacttctttttttcagcctgtgttttgctctcaactctgggtcccacttccttgttcagttttacctagaggtctcaatctcagtgggagcgtgagctcccaggatactatgaagttattatagaattactctctattagttactcccttaaccaataagggagtaattttataataattatctgtgtatagagataagccaaagacattagaattttcttgtgactgtggtgggtttaaaatttattcaaaggaactcaggaatctttcatcttcctcataataaagcaatctgcagtttaaaatttttctgtaatattcttctagaatctccattcctgctcataagcaggaaatacaacagtgacaaccaccacaacaaaaacamcaatacatttcaagcttgtccattaaaatgtaaattagtagcttcctgtttaaattagtctcttttggataaagttgtttccttcaatttaggagtctccatttcataaactcaatcttttgttagtaacctctcagtctttttttttttttttttgag

SEQ ID NO: 316284 - DNA, 565 bp, Homo sapiens
catggcttgaggttcaccaagaccatgaccactggtgcttggctccttacgtcagcttcctcaggtgctcctggctctcttatgactcaggtgcttcccctccctcctgattttgggatgtttcagccctcagcctggacatctgcatccctcatatagttgcacggggatttctggatccttaccatgctatgagcaagcagtagggaaagacaggagcagtattttgggmccatccatatagacacctcactctacaaataatgctctatcattcttgcaacatgtcagtcttgactcagggagcagagccccacttagatgctcttggattctccttcaaggtatatgggtttgttgttcttaagtttctgtcagcttgaagtttctattatgatgtatctattgctcctctgaaaccatgctcaggacattagggcactgagtttcaagaaatccacaaccttaccctggtcttatcttttttgaaatttttctaaatttattgcgtcttccttccagaggccagagagatttgtatttttatttcctctgtaatagaagg

SEQ ID NO: 316285 - DNA, 587 bp, Homo sapiens
tgagcaattaaaaaagggactgacacttgcttttgatttcccagggcttagcacagtgcttagtatagaacaagctctaaaaaaattagttctactgtatctataaataaaaccaagtgaaagtttttcttatctctgtaaaagaacagatattgctaacatgttaaaaattatcacaaaattacattgtaccatattgtttttcttccttgtgatgtcattgtctgacttcagtatccaagtagtggtcacctcatcaattgaattgggaaatgttcctctggcttctattttctgaaagagagagagagagagagagagwgtgtgtgtgtgtgtgtgtgtgtgtgtgtgtgcgtgtgtatgtgggttttgattggtattactttttgcttaaatgtttgtttgatagaatttatcagagaagtcatctgggctttgatttttctttgtgggaagattttaaattacaatttctttactttatataggtctattcagattttctatgtattcctaactcagttttggtaatttgtgtctttctagaaatttgtctatttcatgtaatctatttggtataaagtttt

SEQ ID NO: 316286 - DNA, 587 bp, Homo sapiens
tgagcaattaaaaaagggactgacacttgcttttgatttcccagggcttagcacagtgcttagtatagaacaagctctaaaaaaattagttctactgtatctataaataaaaccaagtgaaagtttttcttatctctgtaaaagaacagatattgctaacatgttaaaaattatcacaaaattacattgtaccatattgtttttcttccttgtgatgtcattgtctgacttcagtatccaagtagtggtcacctcatcaattgaattgggaaatgttcctctggcttctattttctgaaagagagagagagagagagagagagtgtgtgtgtgtgtgtgtgtgtgtgtgtgtgcgtgtgtatgtgggttttgattggtattactttttgcttaaatgtttgtttgatagaatttatcagagaagtcatctgggctttgatttttctttgtgggaagattttaaattacaatttmtttactttatataggtctattcagattttctatgtattcctaactcagttttggtaatttgtgtctttctagaaatttgtctatttcatgtaatctatttggtataaagtttt

SEQ ID NO: 316287 - DNA, 600 bp, Homo sapiens
tttcccagagtttctaattgagcaggtctggggtaaagcccatgaatttgcattcctaacaaggtcccaggagatgctgctactgctggcttcgtgagcacactttgtgaaccagtactctaaagatagatttatatcacaagcttgacttcccatgtccccagatataaaatatgcccctcattcttcattttcacaccaaaaatgagaaaaagctgagaaactggcaagcctactrtattgctcatggagccaccctcagtgttggactggagtaagctgggcaagctggttccagccctcagttccctgggaacacagctatagctgaagatcctactagctgtgtccttgacaattccacttgggttctcatagttacccatttcaacaaatgacatctcttcagatgtacaagccagccatgatgtcatctttgatacctcctccttccttataactcatacagcttcatctggtccttgaaaaggttaaaggagcctgagtaattgagtagagaagagcatgccatcaaggttaatggaatgtaatttgagtgggaacaagccttactttgtcaggaccctgaggttttgtgtt

SEQ ID NO: 316288 - DNA, 469 bp, Homo sapiens
aatgtatttatttcccccacaaatatggactgtaaacacataaatgtaataatcaacatgtggacattgtattttattggactggtattttttctttgtataagactgtcagtcactggcatgaagccaattatcagaatatttagcatcatttagaaatgaaacagtcatcaaattaagtgtttttgttaaaccaattgatacttttttttccaaaacaagggcaaaacactctttttttagtaggaaattaatgaacttggtcacttgatatgcagaaaatgccaaactacagtagcataaatcagagtattattcttcatagaaaatcagtttacaaagtgcattaattttggactggcaaagcaagatggtcaaatagaagcctccarcaattatcttgcagaggggatcaccaaattgaacaagtggtcacacaaaaaagcacctttataataaccaaaaatca

SEQ ID NO: 316289 - DNA, 588 bp, Homo sapiens
aggcttatgctgtgggtttgtgctacatggtatgttcagaccaaacattttaggagatatgttatttgagctgaagctttaataaggaagtagaatgcagagatctttgaggactttccagagagaggcaacagcaagtgcagagaccctgagatgggagcaggcttggtgcttttgaggattgacaggcaggataatgttgctggcttggagtgagaaagaaaacaagtcatgagagatgagaagagtgagggaagaatatccctgatcgctcagggcctgtgggcatgataagaactctgaattttattctaaatgatgtgaaacccctggaggggagttacatcatctgagctacagctataaaaagatttttgtggccgtaataataataaaaaaggatcagtgaggatgtggagaaattggtatctttgtacagtgctagtgaaaamaacatttagctgctgtggaaaactggcatttcctcaaaagctaaaccctatgacccagcaattccactctcaggtataactcaaaagaattcaaaacagatatataaaaacatatttatagctctattcataattg

SEQ ID NO: 316290 - DNA, 612 bp, Homo sapiens
acccctggaggggagttacatcatctgagctacagctataaaaagatttttgtggccgtaataataataaaaaaggatcagtgaggatgtggagaaattggtatctttgtacagtgctagtgaaaacaacatttagctgctgtggaaaactggcatttcctcaaaagctaaaccctatgacccagcaattccactctcaggtataactcaaaagaattcaaaacagatatataaaaacatatttatagctctattcataattgtcaacaggcagaaagaacccaaatttccatcaactgatgaagggataaacaaaatgtggtatatacatacaatggaatatcattcaaccataaaaaatcatgaagtacagattcatgctgcaacatagatgaactttgaaaatatgctgagtgaaaacaaccagatacaaaaggtaacattttatcatttcatttatatggaatatctagagtaggtaaatccatatggacagaaagcagactagcggttgccaggggtcagggaagaagaaatggggaattactgctatggggtacyaggtttccttctggggtgaagaaaatgttttagaattgatggtgtgcaaga

SEQ ID NO: 316291 - DNA, 596 bp, Homo sapiens
tgtctataaaccctccctgtcagtgttgctggatggagacctctgaacctctcctggtttttactgctgctggatttataaattgttcattgttggccaggctcagtggctcatgcctgtaatcaggcgcagtgtctcatgcctgtaatcccagcactgtgagaggccaaggcgggcagattacctgagctcaggagttcacaaccagcctgggcaatatgatgaaacctcatctctactaaaatacaaaaaattagctgggyatggcggcatgcacatgtagtcctggctactcaggaggctgaggcaggagaattgcttgagtctgggaggtggagattgcagtgactgagatcgcaccactacactccagcatgaaaaacagagtgagactccatctcaaaataaataaataaataaacaaataaataaataaataaataaataattgttgctaaataaactcttataaatttaatttgtctaaagtttttcttttaacagttcattgtcagactggaatcctaagtagatctctaacaatccctgaaagcactcagtgaccaagagaaggtacccaccagggcccattgtgc

SEQ ID NO: 316292 - DNA, 580 bp, Homo sapiens
acatttacatgttatacaaatagccaacagggaaataacttgatgatggctagctttgttttgtgttaaaatgtgtctacttcaaaatagtttcccaaatccctttggtaacttgcactttgaagttttgcaaatttaaataataaatattcattaaatatgtagattattttaatataatataaaatactcgaaacattaattgataaacataagtttaaatttatttaccttggacatcttgttttttatatggtatgaagaagctaagtatattttggtctgttaaacaaaaataaawcatattttgatgatgcacatattttcagaaattacaaaatggtgttaatccacagaatgctgctttgcaaatgctaataattaaaattctaattaatatatgctaattaaaactagaaataataagagtaacaacttcatatgcaaggaaagtaagacaagtttttgttaattaaagcaatgaggtatggaagacttgttctgttaaggaaaaaagtcattattgtcctaaagtagaatgactagttgtttcaaaatgggaagagaaaaagtattggga

SEQ ID NO: 316293 - DNA, 503 bp, Homo sapiens
ttttaatataatataaaatactcgaaacattaattgataaacataagtttaaatttatttaccttggacatcttgttttttatatggtatgaagaagctaagtatattttggtctgttaaacaaaaataaatcatattttgatgatgcacatattttcagaaattacaaaatggtgttaatccacagaatgctgctttgcaaatgctaataattaaaattctaattaatatatgctaattaaaactagaaataataagagtaacaacttcatatgcaaggaaagtaagacaagtttttgttaattaaagcaatgaggtatggaagacttgttctgttaaggaaaaaagtcattattgtcytaaagtagaatgactagttgtttcaaaatgggaagagaaaaagtattgggacaaagcctaagtaaataagggaagttgtaggtttgtggaagatgaatcttgtgaaacaaatgttatgtgttatgaagctggctaagattaaa

SEQ ID NO: 316294 - DNA, 503 bp, Homo sapiens
ttttaatataatataaaatactcgaaacattaattgataaacataagtttaaatttatttaccttggacatcttgttttttatatggtatgaagaagctaagtatattttggtctgttaaacaaaaataaatcatattttgatgatgcacatattttcagaaattacaaaatggtgttaatccacagaatgctgctttgcaaatgctaataattaaaattctaattaatatatgctaattaaaactagaaataataagagtaacaacttcatatgcaaggaaagtaagacaagtttttgttaattaaagcaatgaggtatggaagacttgttctgttaaggaaaaaagtcattattgtcctaaagtagaatgactagttgtttcaaaatgggaagagaaaaagtattgggacaaagcytaagtaaataagggaagttgtaggtttgtggaagatgaatcttgtgaaacaaatgttatgtgttatgaagctggctaagattaaa

SEQ ID NO: 316295 - DNA, 501 bp, Homo sapiens
aaagtaagacaagtttttgttaattaaagcaatgaggtatggaagacttgttctgttaaggaaaaaagtcattattgtcctaaagtagaatgactagttgtttcaaaatgggaagagaaaaagtattgggacaaagcctaagtaaataagggaagttgtaggtttgtggaagatgaatcttgtgaaacaaatgttatgtgttatgaagctggctaagattaaaaaggaattattatcttttctaaacatttagcatcaattaaaaaattcactgatgcaaaactagaattttgttctgtctaacaatttgatcctctgttaaaacaaataatgctcttggagtattggttggctsttaataggagattgtgaaaggtgttcaccttttaggaaatcgggctgggaagtaaatttcttgtttcaccctgtttactcctgtgctttatgttgtgtttattacatctttcatttacaaaactgagtcctatttattaaaacagg

SEQ ID NO: 316296 - DNA, 589 bp, Homo sapiens
agttcctacctcttaattcactttgattcaaaaaaagcatttagcagatatgtagtcccaggtcttcaaaatccagagatgagcaagatcacctcagtgtcaaagccatagcccttggtcagcagaagacaarttagaggctgatgactggctttctaattcacagtcactgaagcatctccacactgaccgtaaccctctagaaaaattagttggtatatattttgcttaattatcaaaaacgtatatgtgtaattaattttttttaggtttttgattggatgaatgaaaagagataaagccaaaatgttattctatcctttaggataatctgctagtaatatccttaacttttatatatgatttggttttgaggacttgaacatagtaggtttgcaaagttatttctttcttttgttcataaatggaataaaaatctaagaaatctgtgaatgagtatgaccaaaagatttttctattttaaaagataaaatcatgacaatgtagagaaagaataacacagtttaaaaaaaagaccagtgaaaatggaatgtaattacgtgttatgttgtgaattgttattcctgat

SEQ ID NO: 316297 - DNA, 589 bp, Homo sapiens
agttcctacctcttaattcactttgattcaaaaaaagcatttagcagatatgtagtcccaggtcttcaaaatccagagatgagcaagatcacctcagtgtcaaagccatagcccttggtcagcagaagacaagttagaggctgatgactggctttctaattcacartcactgaagcatctccacactgaccgtaaccctctagaaaaattagttggtatatattttgcttaattatcaaaaacgtatatgtgtaattaattttttttaggtttttgattggatgaatgaaaagagataaagccaaaatgttattctatcctttaggataatctgctagtaatatccttaacttttatatatgatttggttttgaggacttgaacatagtaggtttgcaaagttatttctttcttttgttcataaatggaataaaaatctaagaaatctgtgaatgagtatgaccaaaagatttttctattttaaaagataaaatcatgacaatgtagagaaagaataacacagtttaaaaaaaagaccagtgaaaatggaatgtaattacgtgttatgttgtgaattgttattcctgat

SEQ ID NO: 316298 - DNA, 371 bp, Homo sapiens
attgggactcttgtctccttggcaagatcatgcatagttttatgcataaagktttttgtggcccccacatgaatcactaatggtgacatgtctgggaggtgtcacagggaggccactgagaaggccatggcagtaattctttcactacaacccacctttcctctttgaaaacagccaaaatctccctacccaatgggtctttcattcttgctgtgaagttgttgaacatataaaaaaatcattagaaatcctgatttttactcattgagagtaaaagaagataagaaaaggaatgattcctattgatgcaggatgttttcttgacccctttgtggaactcacagcagtgatgccccatttactcagctgcc

SEQ ID NO: 316299 - DNA, 579 bp, Homo sapiens
agtgagttgcaggcttatgtatcacctggtttctataaaatgagcagaaatgtcaaacatttcacttaaaaaaagatcattccatctgttctccattgctctgggaragtaagtttaacttgtagtgcttgctttagctaactagaaattcaggaaaaccataaataaatttttgaaaactagccttcagatatgaaaaacatggaattagctatgaatctttgttagggggatataattaaaaccaaaatctcttcctaatccagaaaagctctttagaatggtagaagagaaacaattttattattgaataaacattaaaccagagtgtgatgaacatcatgagcaattggcaaagaggttgaagacagaaaaaatagctgtcttttatataactaagcagatgcagaccattatatatacattttctcaagacaaacaatattattagtccacaagaggcctggacagcaccatttatcacacattgtttatcttaagttcacctcacaactggggggaccatatgcgttcacaaattggttgtatccaaaggaaaaataaacttctcctatcttt

SEQ ID NO: 316300 - DNA, 610 bp, Homo sapiens
acaaaatgagttagaggcaaggaagcagttgattgcagacatcaagtaacttattagcaatgttttacatagctttgttctttaatggattgtgcaggttcattcttcattgtgttgacatttaagagagaaattaaggaaaagtgaatggtggttaaacatttggtacaaatacaatagcacgatgagtgtgggtattgaagaaggtatgtcagatgaatgccagatagtgagttgcaggcttatgtatcacctggtttctataaaatgagcagaaatgtcaaacatttcacttaaaaaaagatcattccatctgttctccattgctctgggagagtaagtttaacttgtagtgcttgctttagctaactagaaattcaggaaaaccataaataaatttttgaaaactagccttcagatrtgaaaaacatggaattagctatgaatctttgttagggggatataattaaaaccaaaatctcttcctaatccagaaaagctctttagaatggtagaagagaaacaattttattattgaataaacattaaaccagagtgtgatgaacatcatgagcaattggcaaagaggttgaagacagaaaaaatagct

SEQ ID NO: 316301 - DNA, 437 bp, Homo sapiens
aaactggcaaatatgctttagagaataataaaactattacatagctagtcaacttaaaaaatgcctaatgtatcatagaatgtttgtctcaaaatttattttctgaattctctcctagttagcaaattgagagggcatgaaacaaacataaaataatttccaaacataaatatttgaatctggattgctttgcaatgtgttttcatggcttgataattccagagaaattattattattatttggtctttaatcacaagatctttttcacaagtatactattaagacattgaatccaaagatgccagttaatttgtattaatagtatagtatttatagtactaaatataaaatacatttcatgtttaacattttytaccatatatgttaagtgatcaagtcacaccaagctattctgtacttaggaggaacaaattgt

SEQ ID NO: 316302 - DNA, 529 bp, Homo sapiens
taacatttgcactagatgtctgcaaggatgtgtargacaaaatctctttcagtgccgctgccctggaaggagtttaataaatatccctaaatatagatagaaaagaaaaatttctgacttaaataccacctgtaagattttcctattattcagatgtctttccttttgactgcttcactttttaacaccatatgttacaaaatgagaagttaaaattattttactctcagtttttgctgttcgcatctttaaattaacataatgaaatcttttatggaaattgctcaataaagtagcaatttaaaaagcctgttttctaaaagcatgcatcatattaatactcttttagaagtgattattaaaattctagtgctttttcttgccttgtacatggggccttgaatctgtgagcattttgacaagaaagtgcctgtaagcttcagtattcagtggctcagtcagcctccagctttcttcatcctttctcctcgcacttttgttcttacagctcctgcacatacttatatac

SEQ ID NO: 316303 - DNA, 522 bp, Homo sapiens
catgataatcataattattactgataacatgtagtacgacatatcagaattttagaaatctcatgtaattttgggacataagttaacaacacatttatgtaaatataaaccatagaaagttaaacactatttcttatttgacgatgttccccacatgattttaacataccaaacatgcctgatatgtccctcttggacttccaggagccctaatatctgaaaagttagtgtgaggttaaaagaacatacatgtagaatttgaaattttgattttgaaaagtctgtcaaatatcaaaagtttaaaacacttactcgaaataggatcacaagtcattgtaaaattatagtcatttatttagccaaggcatattgatcrgagaaaaggcattcaaaagttattaatacgtacaccagagccttcagaataaagacccaaagatacagggcaaagtgtccatttttacacttaggttcaacaaagtatgaatagctgtgcaaaaacatgattagacaaaaagagtg

SEQ ID NO: 316304 - DNA, 600 bp, Homo sapiens
ttagcaactaatgacaaaatccaaactcaaaatactggtagagtgcacaggaaagatattacatgaatctgtgtagaattcattaacaatatatttaaactatacaactctcttaataaaaatagaaaagtcaagatgctatgtaaatatcattggtgtattccaaagcaaaaattttggaaacatccatactttttaattgaaatattgatgaakaaggtgaagagtttgagatttagctttataatgtatattgcattttaaaaacagtcataagccattcttagaagaataggaagtgtctgtgattttaagatgctgcattatatgctcaatagtaaaccagataaatatggaccctacccttgaactcgacatatactaggaaatataaatattaaaaaacttagttactcttatttcaaaagaggaaacactgttttagaagcaaaaagtagggaggaatacaagtttgttgtgctgttaattaaatcagctatactacactctactcacatgtaagtttttacatataacctaggaaggaatgtgtatgcatcagtgggaagagaagtactctgcactggtcagacaaaacat

SEQ ID NO: 316305 - DNA, 563 bp, Homo sapiens
gttaattaaatcagctatactacactctactcacatgtaagtttttacatataacctaggaaggaatgtgtatgcatcagtgggaagagaagtactctgcactggtcagacaaaacattcaaatcaaacctgttcataaatatgctggaagtcattgtaggcagyacattaagagatttagggtagtcagaagacagcatctgccaagaaagaccacaaattcagtttttaaatgttgattatgaagtaacacaacatataagtgaaaatgtcgatggaaaatctggggagggagagcacgcccaaagatcagaaaaatttggaaatgtggatgcatatttaaacataatctgtaaatacatagataatgaacatgtcagtgattacaagaaaagggaatagaaagaaaatagaaagctttgtctagttcttataaaaatactataaaataaaaaggagttatatgtactccagtacaatgttttcactcaagaatcccttatcatttgttgtgtttgcactgaatatgccataattttaaaatacttcttccctattcagtt

SEQ ID NO: 316306 - DNA, 585 bp, Homo sapiens
tttaaacataatctgtaaatacatagataatgaacatgtcagtgattacaagaaaagggaatagaaagaaaatagaaagctttgtctagttcttataaaaatactataaaataaaaaggagttatatgtactccagtacaatgttttcactcaagaatcccttatcatttgttgtgtttgcactgaatatgccataattttaaaatacttcttccctattcagttaattatcaaaattaaaactggttaaataacagggtgaaaacatattatttctatttcataataaatgctattgcaaactataaaaaataaattctaacatatccttacctagtaaatacatgtgaactacatttatagcaaacaaatgcactgaaataaatacaccctaaaacmtatgattctgtagtggtctgagttatggaaaaggtggtatcccaaagactgaaaataatctcagacaaggaaatacagaccactgttgatagggacaggaggcagagaaattctaagcagaaaagggcaggtccctggtgaagtcccaccctcaagccacaaagcctgagaccatggcacaaagtg

SEQ ID NO: 316307 - DNA, 591 bp, Homo sapiens
tttaaaactatgtatctaaaataaaacattacattgaaaggtagatgacaaactgagggagattatataatgtatgcagggcacataaagataatacatacattatataaacatataatatttatttaaaaatataatatatttcatattaaagtcttataattaatttttctaaatttgtgggacgtggagcaagatggccagagtcttccagcgatmgctccccctgcaggagaagcaaactgaacaactatccacacaagaaagcacctttataagaacaaaaaattggttgagagatcacagtacctggttttaacatcatatcaaggaaagaggtactgaaagggtaggaaaaacagtcttgaattgacaagatcaccttccctcatcccccttcagcaacctcatgacacagagagaatctggagaatctgtgtccttggaagagggagagtgcagacattaagggaccttgcattgaaattcagtgctaactgaaaacaacagagggcagaattcacactggaaaacaacagagggcagaattcagccagtacccagaaagggagcacttcgatcagccctagc

SEQ ID NO: 316308 - DNA, 591 bp, Homo sapiens
tttaaaactatgtatctaaaataaaacattacattgaaaggtagatgacaaactgagggagattatataatgtatgcagggcacataaagataatacatacattatataaacatataatatttatttaaaaatataatatatttcatattaaagtcttataattaatttttctaaatttgtgggacgtggagcaagatggccagagtcttccagcgatagctccccctgcaggagaagcaaactgaacaactatcyacacaagaaagcacctttataagaacaaaaaattggttgagagatcacagtacctggttttaacatcatatcaaggaaagaggtactgaaagggtaggaaaaacagtcttgaattgacaagatcaccttccctcatcccccttcagcaacctcatgacacagagagaatctggagaatctgtgtccttggaagagggagagtgcagacattaagggaccttgcattgaaattcagtgctaactgaaaacaacagagggcagaattcacactggaaaacaacagagggcagaattcagccagtacccagaaagggagcacttcgatcagccctagc

SEQ ID NO: 316309 - DNA, 560 bp, Homo sapiens
gagtgaacatcagcagtagccagacagtactcactgtgggccttctacacgaagaaagaagagggaagagtaagaagaactttgtcaagtgtctttagtgccagcttagccacagtagaatagagcacakagtagattcttatgtttcctgactctagggcctggctcccatatggcatttctggaacagctccgggctagtggggagcttgccaacttgaagggagggacacaagcctatttaccacctgctgcctgaaaaactcttgggccttgaaagaacaccaatgggagccagtcagtggtcatcacaggccttgggtgagacccagtgttgtgctggcttcagttctcaatcagtgcagtctaagttatggtggccacagagggacttgagtcacctctcccccagcttgaggcagctcagcacacagagagacagactctgtttgtttgagggaaataagggagaaaaaagtttctgcctggtaatccagggcattttcttggatctttcccaagaccaccaagacactgcttctacaagtctgcaagaatca

SEQ ID NO: 316310 - DNA, 681 bp, Homo sapiens
ccaaacattgacaaatattcacaagcatcaagactacccaggaaaatgtgacctcactaaacaaactaaataaggcaccagtgactaatctcagagtgacagagatatgtaatttttcagacagagaattttaaaatagctgttttgaggaagctcaatgaaattaaaaataacatagagaaggaattcagaattctatcagataaatttaacaaaaagattgagataattaaaaaatatcaaggagaatttctggagctgaaacattgaattgacaaactcaagactgcatcagagtctctcaacagcacaatggataaagtggaagaaagcactgaggacaggccatttgaaaatacatagtcagaggagacaaaagaaaaaataatgaaaagaaataaagcatgcccacgaaatctaggaaatagccacaaaatggcaaatctaagagttacttgtcgtaaaaaggaggtagaaagaaagattggggtagcaagtttattaaaatagataatagcaaagaactttcaaaatctagagaaagataacaatatttccaaactcactctatgaggccagtattaccttattactaaagccagagaaagacacgtgaaaaraagaaaattacaggacaatagctctgatgaacattgatgaaaatgtcctcaaagaaatact

SEQ ID NO: 316311 - DNA, 594 bp, Homo sapiens
aggcaggctgatcatgtgtcaggagtttgagaccagcctggccaacatggtgaaaccatgtctagtctgtactaaaaacacaaaaatgagctcgacgtggtggtgcatgcctgtcatcccagctactctggaggctggggcagtagaatcacttgagtctgggaggtggaggttgcagtgagccgagattgcaccgctgcactccagcctaggtgacagagtgagtgagactttctctctctctctctctctctgtctgtctgtgtgtgtgtgtgtgtgtgtgtgtatatatrtatatataaatatatgtgtatatatatatgtgtatatatatatacacacacacacatatacatgtacatttactgtgtcacctggtggaagcgttcttcctctgggatctaaaacttctcaacctgcaggaccaaaattgacagcaagtacaaactcccaaaaatgtgtcattcagagtgacagttaatgggaccactcctagtacttcctcttggtttctattcccatgtattataccaattagtgacacaggattggtgggttaaacacaccctcaattgctgatgatgattaaaagac

SEQ ID NO: 316312 - DNA, 546 bp, Homo sapiens
attattattattatcataaaatttaagaactttataagtccttgagaatgtttattttgttctgtgcacaaaggttatttatctttatcactcaggatatgtagtgtgtgtgtgtgtgtgtgtctgtctgtgtgttatatattcattgttatcctcataacagtgtcaatagtgaaaattcactgtgaataaaatgccttaatcatgaaaccacaataatacctagtcctgagtgacagaggttacctggaaatacgttataaagaaaaccactaaatttattattgtcttataaaaatttaacaaacttgtattttggaataacttaagatctacggaaaagtggcaaggatagtattgagagttcctgtgtacctttcacctaacttcccctaatgtcaacgtgttacataacatcaaaactaagaaattcatagtagtacagtgctattaactacagactttatttgggtttggtcagtatttttttactaattwtcttttcctattctaagatacaatctaggataacacattctgtgttta

SEQ ID NO: 316313 - DNA, 244 bp, Homo sapiens
cttgtgaagtggctttcttgtttccatgtagtaatatgtagaatcctttgtctattgatcaaatactgtacactgttagagagtgatgctggcttaggctctgctggcagctatttgcagaaggcaatcacatattgtatgtgaaayttttgaaacagtaggttttgtccagcgtctattgtaccacagttctagaaatggaaacggcctgggtgtttgaagaaaagctaatgaatagatcgtt

SEQ ID NO: 316314 - DNA, 564 bp, Homo sapiens
ctagttactaaaaagagtgtcatttcccccagtgtgtgttcttggtgtctttgtcaaaaatcagttgttataaatacattgatttatatttagamcctcaattctgttccattgatctatgtctttttgttgttggtggtggttttttttttttttttaaccactgatactgtgcttttttggttactgtagtcttgtagtataatttgaagtcatgtcgtgtgactactccgattttgttcatttttctcaggattgctttggctattcaagctcttttttggttccaaatgaattttagaattgtattttgtatttctgtgaaagttaacgtggtatttggatagggattatattgaatgtgtaaattgttttgggcagtgtggtaattttaacaatattaattcttcttattcatgaacatgaaatctctttccatttgttcgtgtcctcctcaatttccttaatcattgttttatcgttattctttctaaacctcattagttaaattaattcttaggtatttttttgtagctattgtaaatgagattgctttcttgcttt

SEQ ID NO: 316315 - DNA, 530 bp, Homo sapiens
ttcagttttatccttctggatatggatatccaacttttcaagcactagttactaaaaagagtgtcatttcccccagtgtgtgttcttggtgtctttgtcaaaaatcagttgttataaatacattgatttatatttagaccctcaattctgttccattgatctatgtctttttgttgttggtggtggttttttttttttttttaaccactgatactgtgcttttttggttactgtagtcttgtagtataatttgaagtcatgtcgtgtgactactccgattttgttcatttttctcaggattgctttggctattcaagctcttttttggttccaaatgaattttaraattgtattttgtatttctgtgaaagttaacgtggtatttggatagggattatattgaatgtgtaaattgttttgggcagtgtggtaattttaacaatattaattcttcttattcatgaacatgaaatctctttccatttgttcgtgtcctcctcaatttccttaatcattgttttatcgttatt

SEQ ID NO: 316316 - DNA, 564 bp, Homo sapiens
ctagttactaaaaagagtgtcatttcccccagtgtgtgttcttggtgtctttgtcaaaaatcagttgttataaatacattgatttatatttagaccctcaattctgttccattgatctatgtctttttgttgttggtggtggttttttttttttttttaaccactgatactgtgcttttttggttactgtagtcttgtagtataatttgaagtcatgtcgtgtgactactccgattttgttcatttttctcaggattgctttggctattcaagctcttttttggttccaaatgaattttagaattgtattttgtatttctgtgaaagttaacgtggtatttggatagggattatattgaatgtgtaaattgttttgggcagtrtggtaattttaacaatattaattcttcttattcatgaacatgaaatctctttccatttgttcgtgtcctcctcaatttccttaatcattgttttatcgttattctttctaaacctcattagttaaattaattcttaggtatttttttgtagctattgtaaatgagattgctttcttgcttt

SEQ ID NO: 316317 - DNA, 598 bp, Homo sapiens
agcataactttattactaaactgacaaattttgataaactcaataatgtcataaagactaaaatttattgtttaattaaaataattaagaaaatatatgtggtggatatttcatcatgctgagcttgttgatttggtattgtctagcaagtctctgaaaatgctatttcgcctgtaatttttaatgtcatctttaatacatattttatggaaatcacactatttttataaactcaccaaattgatgcatcttattttaacatttaacaaaaaatcatacctttgatcacaaataaaatgtagaatatgaaatttcctatgtccagaagtttcttctttattacttatgaaataagcttcaaggattttgaatacataaagatcaaaagacatcactgtcaaccattttagacctgtagtccttatattgttattttagaaaactgcttctggaaagaaattttaaagaatacttttccacgttatctcaaagcataaagattttgtttacaaacattttcatatatktttatgcaaatagtgcattttttgatgtttcatgtgctaaaggcaaagaagacatgtttggcctcaggcat

SEQ ID NO: 316318 - DNA, 636 bp, Homo sapiens
gacacctaggttgatttcataaatttgctattgtgaatagtgctgtattaaaaatagatgtggaggagtcttttttatataatgccttcttttcctttcggtagataccccacagggggattgctgtgtagaatgatagctctattttcagtttttttgagaaatctttatactgttttccatagaggtttttactaatttacatttccactgacagcatgtaaccattcccttttcattgcatcctcaccaacacatgttatttttgactttttaataatagccattctgactggtgtatgatggtatctcactgtggttttaatttgcatttctctgatgattagttatgtcaaacttttttttaaaatgtttgctggttgcttgtgtgtcttcttttgaaaaatatatgttcactttttaatagaattgcttgttttgwgcttgctgagctgttttagttctttgtggcttctggatattggccttttgttggatgcatagtttgccaatatttccccccattctgtaggttgtctgtttacaacctaataatacatagattattaatttttctgtgcagatgcttttagtttgattcagtcttatttgtctattattgtttttgttgtgttt

SEQ ID NO: 316319 - DNA, 566 bp, Homo sapiens
ttttttgtaaacttcaattaatactattttaaagcaggtttaattcaattattggatgaagtaataggaccaaattcaatgaatagaacaaattcacaagggtttaatgtttcaaagaaaattgaatgatattcttcaagttacagaaattcaccacaattggagcttattgtagcatttgttatcttaggagctgaccacctaattaagctaagttcactatagtcatagggatcatccaaaagattaaactttaggtctagccattcagaataactccagaagtgcttgcagtgataattttgttatttttcaagatggctagtagagttacagacaggactttcacagagtcatagatattgcattttcaattgaaaaaatgcctgaagggcctaacactctcacttcacaaatactgtcatctagggagagacactggaggggttgctcaaatttctagcactagaggtgacggataagagaagaaacmaggtctttgaactctcgatacccactgccctttccttcagtattgatatggtttggctatgtccccacctaaa

SEQ ID NO: 316320 - DNA, 567 bp, Homo sapiens
atcatctttaattttttcctctgtaaataagattttctttttcatagggaattcagagtacctgtgttccaagcttagaaatcatccacaatttacacaaatgaagtccacagtttagccataaacaatcacactttcagtattagttatatgtgccaaatcaaaatgtagcaaggaaggacataacttcaaacagaaaatctgaatttatrccaaaaaaatgtgaaacaggtttaccattaccctagcctttcaccagagaaaacttacttcttgaactatttggtttagcttaagctataggcttacatttcaaaaacacgtatatcaaacgtgaaagactgacagaggtattcaaacaaaaggaataatttgcagtcattgctctattatgccatttcctttttaatgcctgaaataatattacaaagaaagagaagattttataaaataatcatttatttaggcaatatcatccttagtttatattaattatcctttcaatacatcttatttatattctagttaaaattcccgtataagcctatatgtctaaacaggccataa

SEQ ID NO: 316321 - DNA, 582 bp, Homo sapiens
gttccaagcttagaaatcatccacaatttacacaaatgaagtccacagtttagccataaacaatcacactttcagtattagttatatgtgccaaatcaaaatgtagcaaggaaggacataacttcaaacagaaaatctgaatttataccaaaaaaatgtgaaacaggtttaccrttaccctagcctttcaccagagaaaacttacttcttgaactatttggtttagcttaagctataggcttacatttcaaaaacacgtatatcaaacgtgaaagactgacagaggtattcaaacaaaaggaataatttgcagtcattgctctattatgccatttcctttttaatgcctgaaataatattacaaagaaagagaagattttataaaataatcatttatttaggcaatatcatccttagtttatattaattatcctttcaatacatcttatttatattctagttaaaattcccgtataagcctatatgtctaaacaggccataataataaaaaacctcatcctttccaactgtatgcatataaaattagctaaccaagcttaactatgccttttttaacaccaa

SEQ ID NO: 316322 - DNA, 582 bp, Homo sapiens
gttccaagcttagaaatcatccacaatttacacaaatgaagtccacagtttagccataaacaatcacactttcagtattagttatatgtgccaaatcaaaatgtagcaaggaaggacataacttcaaacagaaaatctgaatttataccaaaaaaatgtgaaacaggtttaccattaccctagcctttcaccagagaaaacttacttcttgaactatttggtttagcttaagctataggcttacatttcaaaaacacgtatatcaaacgtgaaagactgacagaggtattcaaacaaaaggaataatttgcagtcattgctctattatgccatttcctttttaatgcctgaaataatattacaaagaaagagaagattttataaaataatcatttatttaggcaatatcatccttagtttatattaattatcctttcaatacatcttatttatattctagttaaaattcccgtataagcstatatgtctaaacaggccataataataaaaaacctcatcctttccaactgtatgcatataaaattagctaaccaagcttaactatgccttttttaacaccaa

SEQ ID NO: 316323 - DNA, 535 bp, Homo sapiens
tttaacaccaaaaataaaaatgtataaaatgaggaggaaagccttgtaaacaactgagatgtttttccttatttcaaatctatgagtccaaaggtacatttgttcaaacactacctgacggacctcaaaaaatccattctttattagtcacagcaaaattgcaatgcaatgatgttgtatttggagaattttaaaggatattgtttataaaactgttctttccctttgttactartatcagtatgtctggattgctagaggggttattttaaaaaaaaaaagttgacaatcttaacaatgcaattactttcattgtcatttcaataacgaatttatccgatcatctggatttgagcaattcctgtggttctagctgtaagagagggaactttttttcctctgagaaatgaattgaggggatcatccatgaagtctctaatcacttcttttcttttagagcacttggaacactgtgtcactgtgttaggagtgatgctgaaaagctggcagccaaagatctctttttacttcatta

SEQ ID NO: 316324 - DNA, 575 bp, Homo sapiens
tctttttacttcattatttccagtagactctcagaaaatcaacagtcttttataaagataaaactttatttgtgttgcccttcttctgcattactttaaaataggctatttattatacaagacataatataattgtcataaacatgctccccaaaaaagtttcctgttcctaaaataagtaattctgattaaatatrtaaaacaatactaattttgtgaggttttcaaattttgatttgctttgaactttatctgcatagataaggtaacactaagacccttgggttggacatttaaataaatatgattgttttttctgaaataccttggcaagatatcagagctaccactgagaacttgacgattacaactgccaatgactttgcccgacactggacaagaataaaacaaatgcttcaatgtaccacgtagcattgccctgcttctttaaaattacagtattataactaattactcattcatttttccttttataaaattatcctagtattttcctcctctaatatattaaaacatttttaatacagaaggaatccaacattaaaatggataat

SEQ ID NO: 316325 - DNA, 312 bp, Homo sapiens
tcctttctgtgcattgaacatctatccacagagcacatcttcattactaggggagagcatccmtcagctgacatggtggtggcagcatggtcacaactgaggtgcggcttcagaaaggagagcttttcaatagttagattattacagggcccaactaaatgcctcaaattcccaggaatgtaggtaacaacaattatgcctctttctctcttttcctcacagacaaaaaggtaacttatgttgcataattataaaaaattccaaaataaaaatttgaaatatacaggacacttcaaataatacatctacatg

SEQ ID NO: 316326 - DNA, 312 bp, Homo sapiens
tcctttctgtgcattgaacatctatccacagagcacatcttcattactaggggagagcatccctcagctgacatggtggtggcagcatggtcacaactgaggtgcggcttcagaaaggagagcttttcaatagttagattattacagggcccaactaaatgcctcaaattcccaggaatgtagrtaacaacaattatgcctctttctctcttttcctcacagacaaaaaggtaacttatgttgcataattataaaaaattccaaaataaaaatttgaaatatacaggacacttcaaataatacatctacatg

SEQ ID NO: 316327 - DNA, 312 bp, Homo sapiens
tcctttctgtgcattgaacatctatccacagagcacatcttcattactaggggagagcatccctcagctgacatggtggtggcagcatggtcacaactgaggtgcggcttcagaaaggagagcttttcaatagttagattattacagggcccaactaaatgcctcaaattcccaggaatgtaggtaayaacaattatgcctctttctctcttttcctcacagacaaaaaggtaacttatgttgcataattataaaaaattccaaaataaaaatttgaaatatacaggacacttcaaataatacatctacatg

SEQ ID NO: 316328 - DNA, 586 bp, Homo sapiens
ccattatgttttattttttgcctgattattatactaacaattttttctttcaaatattgcccacagaattatttctgaatttatttcgatgctgatatgccacaaagaaggaatcacactgattgtgctgcaaagtaaaakaaaaaagggagcataaatgaccctttattgagcttttaatatagcctagtgcccttgctctgctacacgtttctctccaagccatgtgaggagtccactctatgtaagaacacatggaggtgaattatatgaaatcaggagtttagactaagcaagagacaaaatcatgagaaatggttaattgctcttctttctaagtaaacaaaaaacaataaatgtcattaaggctatctctctttccttaaagttatatttgttattagcatacttctgatataaactggttttcctttcagagaagcgtaatcattggaggaaatgtttgtctttgggaaaaaaaagaaaaaaacgggaagttgtacttcaggaaaaaattagtcctcagaaaaagggaacaatatgtctgcatttttggctattgtttcagcttatgtacatgtttctg

SEQ ID NO: 316329 - DNA, 586 bp, Homo sapiens
ccattatgttttattttttgcctgattattatactaacaattttttctttcaaatattgcccacagaattatttctgaatttatttcgatgctgatatgccacaaagaaggaatcacactgattgtgctgcaaagtaaaagaaaaaagkgagcataaatgaccctttattgagcttttaatatagcctagtgcccttgctctgctacacgtttctctccaagccatgtgaggagtccactctatgtaagaacacatggaggtgaattatatgaaatcaggagtttagactaagcaagagacaaaatcatgagaaatggttaattgctcttctttctaagtaaacaaaaaacaataaatgtcattaaggctatctctctttccttaaagttatatttgttattagcatacttctgatataaactggttttcctttcagagaagcgtaatcattggaggaaatgtttgtctttgggaaaaaaaagaaaaaaacgggaagttgtacttcaggaaaaaattagtcctcagaaaaagggaacaatatgtctgcatttttggctattgtttcagcttatgtacatgtttctg

SEQ ID NO: 316330 - DNA, 586 bp, Homo sapiens
ccattatgttttattttttgcctgattattatactaacaattttttctttcaaatattgcccacagaattatttctgaatttatttcgatgctgatatgccacaaagaaggaatcacactgattgtgctgcaaagtaaaagaaaaaagggagcataaatgaccctttattgagcttttaatatagcctagtgcccttgctctgctacacgtttctctccaagccatgtgaggagtccactctatgtaagaacacatggaggtgaattatatgaaatcaggagtttagactaagcaagagacaaaatcatgagaaatggttaattgctcttctttctaagtaaacaaaaaacaataaatgtcatyaaggctatctctctttccttaaagttatatttgttattagcatacttctgatataaactggttttcctttcagagaagcgtaatcattggaggaaatgtttgtctttgggaaaaaaaagaaaaaaacgggaagttgtacttcaggaaaaaattagtcctcagaaaaagggaacaatatgtctgcatttttggctattgtttcagcttatgtacatgtttctg

SEQ ID NO: 316331 - DNA, 583 bp, Homo sapiens
attgagtagttgttattcacactacaaacagatcatctgagaaagaacactggaattcaacagagaagcaacaggagacaccaagaatgaggaaagggggtgcacggctgcctgttcagcaggattgctaggaactggaagcagccacttgacccagggaaggggtaagtaacagaaccttggggctccacatccctatcatggacttttgcattcctagctacaggagagctcctcaaccctcgctggcctccagacagacatagggagctcccttgagatcacacagaggcactgctcaaactcacatggagtcccacaggctcctgagcagtgggaagctgcagcagtaccattctggtaagacattccccagggttctgcatcctgccctaaggctgttgctgccagctgtcaaaccagggagggkgaggagaggcaaggtactcacacacgccaaggacaaattcctctgccactgccacagactgctgcaggaccaaggcacattcagaccatatgctgcatgcctgccggcctctccagaagcttcctatctggccattcccatggaaagggccga

SEQ ID NO: 316332 - DNA, 579 bp, Homo sapiens
aaaatgacccatcaccacttttttctttgctgactagcattatttagtttatttgcttttattccactgttatttatgtaaaagatttataaatctttcaataatgatattcaattaagtaattagatttgccaagggggacatggctaatcatatgcccaagtttctgctatcatcaagttctggacatgttgggaaaggggaggtgtgtgtgtgtccatgtayatgtttgtgtgtgctctgtgtgtcagagagagataaaaatgaaaattaaaatggagcaacggtttccattacattttaaaaacttgttttagagcactacgttccttatgacaaacaaaaggaatccacagaaacttggtaaaagaagcagagaagacactactccatatgtgtaaaatgtgggtatgtacatgaaatcaaaggtaagtataatcttgaacatgtcactggagttcatagcatctgttgcttcttgaatgctatacactttacaccagtggtcctggtacaacagtcagagcatcagcttggaaacttgttaaaatgaaaattctcaggcccaaccctggccct

SEQ ID NO: 316333 - DNA, 568 bp, Homo sapiens
ctgctatgttctcatgaacgctgggtgcaaacttggaaaaaaattaggaagtatatgtttagtctgagtctagggtaattgtagttggaacccatttgtcatactctcaattaagacaaatttgggcccggcgtggtggctcatgcctgcaatccaacactttgggaggccaaggcaggaggatagcttgaatgcaggagttcaagaccagcctgggcaacacagcgagactacatctctaccaaaaamtgaagaaattagccagacgtggtggcacgcgcctgtagtcctagctacctgggaggctgaggagggagggtggcttgagcccaggagttcaaagttgcagtgagcgcagatcgtgccactgcactctcaaacaaacaaacaaacaaacaaaaaaagctgcagtttgcccttggctgggtcagttccttgctaagggctgttaccttcaggtgcttcagagcctgctctgcaacaagttcttccttcttgttccactcaacagcgttcattatacatgtccacagaagaccaatcactgctgtttctggaagatcattcc

SEQ ID NO: 316334 - DNA, 590 bp, Homo sapiens
aatatacttgtatatgtaaaaggatttagttgcagcattgttgtatacataaaaaatggaacatgaaatgtcctcaaataagttataatttaggcaccaagtggaacaccacgaagctttatgaaagcaagaattagatctaactgtaccacatttctgatcctggctacctttctgacggtatatgtatgttcaatacacatctcktctcatcgctcattgagttccagtcacattgatctctttgttgttcttccaataggccagataaggtctggcttctgaggctctgttcctgcctctctttcaggaaagatcgtccccagctgtccacatggctatctccttgcaatcattcaaatgcctccctgaaaatggaggtcttctctgaccatctccaccaaagtggcctgttgtcactagctctccttacttggctttgtttttctttagcagtgcctgccattttattattatctctttgtctggggtctataccctccatgagtgtaacctccactaggacaggaaccttgtaggtttttattccatagagctcctttagctcctccattctgtatcttttatat

SEQ ID NO: 316335 - DNA, 602 bp, Homo sapiens
taggaagcagcagaatcagaggaaaaatggaaaaaggtgtaataaaaaatctgtcattagaaaaaatttaaccgaatcaatccacttaaaatcattgacagatattttttaaatggtcaatttgtttaataataatatttgattagctaagaaaatattacactgaagtttatagcaatgtggactatagttgaagcaatttaaaattaactataccactgatattttatgtggctataacttatctatgataaacaattagataagcaattataagtttatctaatttcatgtttatattttggaggtcaagaaagtattttggtagggtcggtaacagtgctgtataacagtttaggagtaatttwgcttaggatttattgaggacgatcagatcctagtgttcaattattattatttttttcctcctatggtcttgtctgaaaaggattgaataatatttgggattttttttttgtttgtgtgtgtttgttttttagagaaaggatctccctatgttgcccaggctggactcaaacttctgggctcaagtgatcctcccacctcagccctctgattaaccaggactacaggcatgtggc

SEQ ID NO: 316336 - DNA, 641 bp, Homo sapiens
agcactttggtcttagattctatttttgactgctctggtatgactcatctttgaactatgataacctgccttacgtaacatgctatattactaacatgtgctatgcatatgttattcaaacaactttatgagcatatatactctaaagcagggaacacaacattttttgtaaagaaataaaakaaaaatattttactctctctgagggatataaggtttctgttccaaccactcaattctgctgttacagtgtgaaagcagccatggacaatatgcagacaaatggtcatggctgtattccagtaaaacttcatattaacacaacaagtggtggaccagattggacccccaggaggtcctttgtgaactcctattctagcgcattgtatccaatagaagtgtctgtgatgatggaaacgttctctatcagcactatctaatatagtagccactactgatcccttgaaatgcggctagtgactagacaaataaatgtttaattttattttatttccattaactaaatttaaacagtgtggctaatggttacttatgttaggctgtgcaattcttatgtcccaaaacacttaaatttgatacaaagataaaaatacatctaaagaatagaaatttttaattaa

SEQ ID NO: 316337 - DNA, 641 bp, Homo sapiens
agcactttggtcttagattctatttttgactgctctggtatgactcatctttgaactatgataacctgccttacgtaacatgctatattactaacatgtgctatgcatatgttattcaaacaactttatgagcatatatactctaaagcagggaacacaacattttttgtaaagaaataaaagaaaaatattttactctctctgagggatataaggtttctgttccaaccactcaattctgctgttacagtgtgaaagcagccatggacaatatgcaracaaatggtcatggctgtattccagtaaaacttcatattaacacaacaagtggtggaccagattggacccccaggaggtcctttgtgaactcctattctagcgcattgtatccaatagaagtgtctgtgatgatggaaacgttctctatcagcactatctaatatagtagccactactgatcccttgaaatgcggctagtgactagacaaataaatgtttaattttattttatttccattaactaaatttaaacagtgtggctaatggttacttatgttaggctgtgcaattcttatgtcccaaaacacttaaatttgatacaaagataaaaatacatctaaagaatagaaatttttaattaa

SEQ ID NO: 316338 - DNA, 641 bp, Homo sapiens
agcactttggtcttagattctatttttgactgctctggtatgactcatctttgaactatgataacctgccttacgtaacatgctatattactaacatgtgctatgcatatgttattcaaacaactttatgagcatatatactctaaagcagggaacacaacattttttgtaaagaaataaaagaaaaatattttactctctctgagggatataaggtttctgttccaaccactcaattctgctgttacagtgtgaaagcagccatggacaatatgcagacaaatggtcatggctgtattccagtaaaacttcatattaacacaacaagtggtggaycagattggacccccaggaggtcctttgtgaactcctattctagcgcattgtatccaatagaagtgtctgtgatgatggaaacgttctctatcagcactatctaatatagtagccactactgatcccttgaaatgcggctagtgactagacaaataaatgtttaattttattttatttccattaactaaatttaaacagtgtggctaatggttacttatgttaggctgtgcaattcttatgtcccaaaacacttaaatttgatacaaagataaaaatacatctaaagaatagaaatttttaattaa

SEQ ID NO: 316339 - DNA, 595 bp, Homo sapiens
aataggctcaaaagaaaatactatatgattatatttttctcatctttcaaatagtaataagtaactttccaagacctcaccttttgtgtgcatgtaattgaatatatttctaggaaggccaaactactttttctgtgatctatgattccaaacttgcctctagtgaatgggcttgtgcttgtcttttataccagttggttttattgtattgtttctccaaatggaggaattggtttcaaaggtcagagtttgggtaaccttgggttttcaaaaaaaacctgccatattgttacttaaagaagcagaatcacttattgctttcacagattattttgggatgctttrccctgctttttatgttttatccttaatgttaagtaccaatgagagaataacacgtactatgttctcaatattcttctgtttgcaagtgttttccatatgactcattctgtaataacttttttctcatagtcctcagcaataggtcagcctagaaagcaaacagagaagaaacttgtcacatttactttcttcctgatttctttaagtcctcgtcatcatttcaagactaagctttgctatattcactgca

SEQ ID NO: 316340 - DNA, 615 bp, Homo sapiens
agtagtattgatgtttctctcaatatgtgtgtcaaagagacgtgtatgtgtcaaagagaaatatttgagtaattatgtaggtggtttttgttaagcatccccaggaccactgtttcttctcatagcgccatacgaaaagcgaaatgcattttcctctggccttaggcatttattttgcgtgaagctttcactaacatctgaaatctcctggaatatgtttatcattatttcctgcctttagcaaaaatctttcctaaactccagctgtttttcccccctaaagcttcagcattaaagrctgggacagatctgagccagaacatcttacatgaaaatggtttgaaattattcatctcagtgtataacaaagatacttttgttggatgatgctttaataatgatgtggctgttcaagcaagtagtaaggctcctgagagtgaccaatcttttgtaatgctgttagttcagagttacaattgatttataacatagtatcatgcggaagaaacccacaaacctaaaaaaacagttgagtggtaacctcctggaacatgtgatttagcatcttaccagcagatgcatacacataattgggtacttcattgctagtatttc

SEQ ID NO: 316341 - DNA, 634 bp, Homo sapiens
acgggaccattttgaatattaaatgacttttccctgtattgccacatggtttttccctctgtacctgtctrtgtcatttttttccttttcttataaggacaccagtcatattgtatttgggtcctgcctaatgacctactttaacttaattacctctgtaaagatcctattctgaagtcctggggattaagacttcaacatatgaatttttgggggggacacaattcagcccataacatttgataaaagtagctaatgcaggctggcttaagacctagttgttgggttgatcagtgcagcaaaccaccatggcacacgtttactgatggaacaaacctgcacatcctacacacatactccggaacttaaaaaaaaaagtctttgatttgttacagttaattatagtgatataattattctatactcatgtgcctaatctcatgtcgggaaaaacccagagtttgtcatagtggctgacggatggcaaggaggaggtaattattagcagatatcctacacatgctattgaggctgtggaatctttggcatatctgtcttggtgtgaggtaactagggttctgtagatggtacatatagtatgctttgagacaagcaaaggaggggtttttgtttt

SEQ ID NO: 316342 - DNA, 632 bp, Homo sapiens
tggttttccatttctgcattaatttgattaggataatgacctccagctgcatccatattcaagcatattttaaagtggattatatcctatttttgagttaaaacaggagacttataactggcaattattgtgtaatctagcatgcatgagtagctaactcttgtgtttcatttactcattcatttattttcttcaccaagtattcatcaacyctgtttatgtagcaaatattgtgccaggcattaaatatataaaaatgaaaaaatgatggtcagttattgaggtagccagacacacacatagataattgcaattcggagtgatgggccatgctatggggaaaacatgtagcagtttacaacactgtttctactctaaggttacttacgatctgattgaagaattaagatggaacaacactaaaaattagccattcacatgagaatggcacgcaacaagaaacaagtaagtgggatagacgtcaggtgtgattatttttcagagagagtagagattgctacctactagagtgctcaacttgacggcagaaagcaagatttccaaatagagacggtgatatagaatttgcaaaatatatttgtgggatatttaaggacgagcctagctgaagt

SEQ ID NO: 316343 - DNA, 632 bp, Homo sapiens
tggttttccatttctgcattaatttgattaggataatgacctccagctgcatccatattcaagcatattttaaagtggattatatcctatttttgagttaaaacaggagacttataactggcaattattgtgtaatctagcatgcatgagtagctaactcttgtgtttcatttactcattcatttattttcttcaccaagtattcatcaactctgtttatgtagcaaatattgtgccaggcattaaatatataaaaatgaaaaaatgatggtcagttattgaggtagccagacacacacatagataattgcaattcggagtgatgggccatgctatggggaaaacatgtagcagtttacaacactgtttctactctaaggttacttacgatctgattgaagaattaagatggaacaacactaaaaattagccattcacatgagaatggcacgcaacaagaaacaagtaagtgggatagacrtcaggtgtgattatttttcagagagagtagagattgctacctactagagtgctcaacttgacggcagaaagcaagatttccaaatagagacggtgatatagaatttgcaaaatatatttgtgggatatttaaggacgagcctagctgaagt

SEQ ID NO: 316344 - DNA, 632 bp, Homo sapiens
tggttttccatttctgcattaatttgattaggataatgacctccagctgcatccatattcaagcatattttaaagtggattatatcctatttttgagttaaaacaggagacttataactggcaattattgtgtaatctagcatgcatgagtagctaactcttgtgtttcatttactcattcatttattttcttcaccaagtattcatcaactctgtttatgtagcaaatattgtgccaggcattaaatatataaaaatgaaaaaatgatggtcagttattgaggtagccagacacacacatagataattgcaattcggagtgatgggccatgctatggggaaaacatgtagcagtttacaacactgtttctactctaaggttacttacgatctgattgaagaattaagatggaacaacactaaaaattagccattcacatgagaatggcacgcaacaagaaacaagtaagtgggatagacgtcaggtgtgatyatttttcagagagagtagagattgctacctactagagtgctcaacttgacggcagaaagcaagatttccaaatagagacggtgatatagaatttgcaaaatatatttgtgggatatttaaggacgagcctagctgaagt

SEQ ID NO: 316345 - DNA, 632 bp, Homo sapiens
tggttttccatttctgcattaatttgattaggataatgacctccagctgcatccatattcaagcatattttaaagtggattatatcctatttttgagttaaaacaggagacttataactggcaattattgtgtaatctagcatgcatgagtagctaactcttgtgtttcatttactcattcatttattttcttcaccaagtattcatcaactctgtttatgtagcaaatattgtgccaggcattaaatatataaaaatgaaaaaatgatggtcagttattgaggtagccagacacacacatagataattgcaattcggagtgatgggccatgctatggggaaaacatgtagcagtttacaacactgtttctactctaaggttacttacgatctgattgaagaattaagatggaacaacactaaaaattagccattcacatgagaatggcacgcaacaagaaacaagtaagtgggatagacgtcaggtgtgattatttttcagagagagtagagrttgctacctactagagtgctcaacttgacggcagaaagcaagatttccaaatagagacggtgatatagaatttgcaaaatatatttgtgggatatttaaggacgagcctagctgaagt

SEQ ID NO: 316346 - DNA, 594 bp, Homo sapiens
gatgaattttctgtgtatatgcttctagcagcctagataggagagtaccaggctaactagcttgcaacaaaggattttaaaattctgatgctgaggataaaatagcagatgaratatttgatcatgtatcttgctttggaccaaccttaaagttttttcatggattttagaaaaactgttcactttggcctctagcgttttgttcaaatcacaacctgtttcacgtcataacttgtacctgctaaatggctttgaaatattttgagcaatgacaatggccaatgaattatttacgagtgcattgtataattttcatatatttgagttttaaaatatgtggttttaattactttctagtttaatttcattgtggtaagagaacataaatggtaagattccaaagcttttaaatttattgagacttgttttatagcccagcatatggtctatcttggtgaatatgccatttgcacttgaaaacaatgtgtattctacagttgttgggtggagtgttctacaaatatggatgaggtcttggtggttgatagtgttgttcagaagttctgcatctttaatgtttttgttttgtttttg

SEQ ID NO: 316347 - DNA, 594 bp, Homo sapiens
gatgaattttctgtgtatatgcttctagcagcctagataggagagtaccaggctaactagcttgcaacaaaggattttaaaattctgatgctgaggataaaatagcagatgagatatttgatcatgtatcttgctttggaccaaccttaaagttttttcatggattttagaaaaactgttcactttggcctctagygttttgttcaaatcacaacctgtttcacgtcataacttgtacctgctaaatggctttgaaatattttgagcaatgacaatggccaatgaattatttacgagtgcattgtataattttcatatatttgagttttaaaatatgtggttttaattactttctagtttaatttcattgtggtaagagaacataaatggtaagattccaaagcttttaaatttattgagacttgttttatagcccagcatatggtctatcttggtgaatatgccatttgcacttgaaaacaatgtgtattctacagttgttgggtggagtgttctacaaatatggatgaggtcttggtggttgatagtgttgttcagaagttctgcatctttaatgtttttgttttgtttttg

SEQ ID NO: 316348 - DNA, 594 bp, Homo sapiens
gatgaattttctgtgtatatgcttctagcagcctagataggagagtaccaggctaactagcttgcaacaaaggattttaaaattctgatgctgaggataaaatagcagatgagatatttgatcatgtatcttgctttggaccaaccttaaagttttttcatggattttagaaaaactgttcactttggcctctagcgttttgttcaaatcacaacctgtttcacgtcataacttgtacctgctaaatggctttgaaatattttgagcaatgacaatggccaatgaattatttacgagtgcattgtataattttcatatatttgagttttaaaatatrtggttttaattactttctagtttaatttcattgtggtaagagaacataaatggtaagattccaaagcttttaaatttattgagacttgttttatagcccagcatatggtctatcttggtgaatatgccatttgcacttgaaaacaatgtgtattctacagttgttgggtggagtgttctacaaatatggatgaggtcttggtggttgatagtgttgttcagaagttctgcatctttaatgtttttgttttgtttttg

SEQ ID NO: 316349 - DNA, 575 bp, Homo sapiens
atcatggttaactagtttattaatttgagattataacttgcctattctcaaagtgatatttaaaagcctataaaattatttgcaatgtgaaatggtataattcaaagacagaatctaattaaaaccagtagaataatgtatataacaatatacctcagcctagataattactactgcaaggcactgaaatgaattgaatttcaaggaagctatrgtacaaagggagattgttaggtgtgttttattctcattttctgaccaggagagcataatttagactgaggagaaaactctttggcactaaattcaaggacgaatttattgccaaggtttttaaattggggtcatggaataacaaaagacaaaatcactgttcaaatagacatttctctaaaagctaagggcataacatttaatcatatttcactaaaggcatttcttcagggagctgagataaaagggtatattgctctctggtgattcaacaatcctgagaaaaggcttgtgaagtatagagcagagattcttaaactcccttccccaagttataagtttcatttgtctatttagtcatt

SEQ ID NO: 316350 - DNA, 618 bp, Homo sapiens
agaatggagatagtacactgcttgccttaaatcatattaaaatacagaaggagaaggagaagggaaatgacatggcatgctgatattgattacatttccaatgaatcacatctcttctaaaaagacagaatgttaaaaattctgctattatggctgctcttcataatataaaataatggccttcatcttatatgtaaaagacaagtgggcactccctgtaatttaagaaaacaacttttgtaaacttctggtggggattagagaaagaaaataaattctgagaataagcatcaagtacaactaatgtcagaagccaagtaaaaagcaagagatttcagaattaaatgaacttatagatcattaggtaaaataagactgtggaagtggatggtaatttgagtttgtaaattacacataaagtattatccacactcaacaaaatattctgcaaaagaaagaacrcaaatgtttaaatgtatagaatctggcagttctgaacaacatcctctatgttggcttgttgctgatggacctgacagagaagtgaagtaagatctacatctcataatgaccagtgcatttctggatcctcaggcttgtctcctaggaaaagacaaa

SEQ ID NO: 316351 - DNA, 583 bp, Homo sapiens
attaatcccaaaggactgttgtttacagagacaagacttaaaaataataattttatttacttttttttcttttttagagatagggcctcactttgtcacccaagctggaatactagagtacagtggtacaatcatagttcagtgcagcctcaaacacttgggctcaaacacttgggctcaaacagtcttctccagcatctggtactataggcacacaccatcacatctgactaaatttttaatttttttagagatgaagtctcgccatgtggcccaggctggtctcaaacttctggcctcaagcaatcgtcccactttagcttcccaaagtgctgggattacaggcatgcaccaccatgtctgacctattttgctttttaaggagaatttctaacatatcaattttgaatacaatccaaggattagatrtttatgctatatgtctattgatttaagagtttaactgaaagcactgtaacaaaaatggcttgtgaaatcttgagccagttgaaatcagcttgtcttttataccaaaagacacctagaaaatatttatttcaaatgcctgagatttaacctatgg

SEQ ID NO: 316352 - DNA, 507 bp, Homo sapiens
aataacttttcttggaggcatcagagctttataaaggggtaatagtttgttggatcttaatagataagtaggaaataacatgggttttgcaggaatggagatttggcaataattagaatattccaagcagatattctgggagcagcwatttgcttatgtcacatctccctaaaatttttgtttaggaaccttaggaaagttaacaacattcaatttcaccaccatctacggtctaatgtgccatagtaatcagcctgaacactcagatattaaaaaggcatgagggcctatacggcgtagcctgtactttcttattttctgagtaaaacaaaaaatcctaaaaaggaaatagttgatggctaacatatttttaacactaacctagttttacctgtaattatttattaaagtctgaatcaatgaaacctaaaagtttctgtcgggaaaatgcaactattataagcaataccttgagggaatcccaattatactgggtcatattactct

SEQ ID NO: 316353 - DNA, 500 bp, Homo sapiens
gcttgtgaaatcttgagccagttgaaatcagcttgtcttttataccaaaagacacctagaaaatatttatttcaaatgcctgagatttaacctatggccaggttgttaaacagtggactgtttatttttaactgaaacaagtcaatggatataatggtgtaacattttaatgagaggaaagtaatttcccaagccaaaaaattgtactttgtaaaatgcaagaaattactaagatgattgcaaattgtgtaaactttgaagatgctaagactgtcatgtcaaccaagaatatcctaaagcatttaacctaattatgactttgtaaatatacaattataaatatgtactattttatttacttyagttattctttaaaatactaaggaatatgatgaacattgaggaaacggtgaagatatttttaattaccgggttataaatccaaaacaaataatatctaacattagttccttgtacatcaaaaatattaaaaatatttc

SEQ ID NO: 316354 - DNA, 585 bp, Homo sapiens
atattccaagcagatattctgggagcagcaatttgcttatgtcacatctccctaaaatttttgtttaggaaccttaggaaagttaacaacattcaatttcaccaccatctacggtctaatgtgccatagtaatcagcctgaacactcagatattaaaaaggcatgagggcctatacggcgtagcctgtactttcttattttctgagtaaaacaaaaaatcctaaaaaggaaatagttgatggctaacatatttttaacactaacctagttttacctgtaattatttattaaagtctgaatcaatgaaacctaaaagtttctgtcgggaaaatgcaactattataagcaataccttgagggaatcccaattatactgggtcatattactctttcaaggataacctggttcaatgatctaaactgtcccagtttctcagaaacctgaartctgcaaattttcagaaataaatgtgactcccaagagcagcccaaacccattagattcttgaaataagccaggcatatagcttaatgaacaaaaagtattaattttctcacctgtaaaatgagggaaatagtagggct

SEQ ID NO: 316355 - DNA, 561 bp, Homo sapiens
agactaataatgagttctgaaataaaataagtaataaaaagcctcccaaacagaaaaagcccaggatcagatagatacagacatatagccaaattctagtctacatttaaagaagtgatggcagtgttcttagttaaactactccaaaaaattgaggaggagggactcttccctactgcattctatgaagtaaacaacattctggtaccaaaagctgkcagagacaaaacaaaaaaaacttcaggtaaatatccttgatgaacataaacacaaaaatcttcaacgaacactagcaaactgaatccagcagcacattaaaaagctaaatcgacacaataggctaggatttatccctaggatgcaaggtcagttcaggatatgcaaatcaaaaaatgtgatgcattacataaatagaactataaacaaaaacctcacaatcatctcaatagatgcagaaaaagctttcctgaaaatttagcatcccttcatgttaaaaactctcaacaaactactcattgaaggaacatacctcaaaataatagaagccatctatgacaaacc

SEQ ID NO: 316356 - DNA, 561 bp, Homo sapiens
agactaataatgagttctgaaataaaataagtaataaaaagcctcccaaacagaaaaagcccaggatcagatagatacagacatatagccaaattctagtctacatttaaagaagtgatggcagtgttcttagttaaactactccaaaaaattgaggaggagggactcttccctactgcattctatgaagtaaacaacattctggtaccaaaagctggcagagacaaaacaaaaaaaacttcaggtaaatatccttkatgaacataaacacaaaaatcttcaacgaacactagcaaactgaatccagcagcacattaaaaagctaaatcgacacaataggctaggatttatccctaggatgcaaggtcagttcaggatatgcaaatcaaaaaatgtgatgcattacataaatagaactataaacaaaaacctcacaatcatctcaatagatgcagaaaaagctttcctgaaaatttagcatcccttcatgttaaaaactctcaacaaactactcattgaaggaacatacctcaaaataatagaagccatctatgacaaacc

SEQ ID NO: 316357 - DNA, 561 bp, Homo sapiens
agactaataatgagttctgaaataaaataagtaataaaaagcctcccaaacagaaaaagcccaggatcagatagatacagacatatagccaaattctagtctacatttaaagaagtgatggcagtgttcttagttaaactactccaaaaaattgaggaggagggactcttccctactgcattctatgaagtaaacaacattctggtaccaaaagctggcagagacaaaacaaaaaaaacttcaggtaaatatccttgatgaacataaacacaaaaatcttcaacgaacactagcaaactgaatccagcagcacattaaaaagctaaatcgacacaataggctaggayttatccctaggatgcaaggtcagttcaggatatgcaaatcaaaaaatgtgatgcattacataaatagaactataaacaaaaacctcacaatcatctcaatagatgcagaaaaagctttcctgaaaatttagcatcccttcatgttaaaaactctcaacaaactactcattgaaggaacatacctcaaaataatagaagccatctatgacaaacc

SEQ ID NO: 316358 - DNA, 574 bp, Homo sapiens
taggccctggcaaatatttcatcatgaaggtaccaaaagcaattgcaataaaaccaacaattgataagtgggacctaattaaactaaagagcatctgcacagcaaaaaacaaactatcaacagagtaaatagaaaacctacataatgggagaatatgtttgtaaactatgcatctgacaatggtgtaatattcagcatctataagactccacaaattaacaaagtaaaaacaaacaamcttattaaaaagtgggcaaagacatgaacagatatttttcaaaacaagacatacaggcagccaacaagcatatgaaaatatgctcaacatcactaagcattagagaaatgcaaatcaaaaccatatgagacaacatctcacgccaatcagaatggctattaaaaagtcaaaaaataacagatgctggtgaaattgaagagaaaagggaacccttaaacactgttagtggaaatgtaaatttgttcagccattgtgaaaagcagttatatgtttaacccagcaatcccactattgattacatagccaaagaatacaaattgtcctaccctaaagaca

SEQ ID NO: 316359 - DNA, 484 bp, Homo sapiens
gaaaattaactcaagatgaactaaagacaaagctgtaatagcgaaaactacaaaacccttgaaggaaacctaggaaatgccactctggatataggccctggcaaatatttcatcatgaaggtaccaaaagcaattgcaataaaaccaacaattgataagtgggacctaattaaactaaagagcatctgcacagcaaaaaacaaactatcaacagagtaaatagaaaacctacataatgggagaatatgtttgtaaactatgcatctgacaatggtgtaatattcagcatctataagactccacaaattaacaaagtaaaaacaaacaaccttattaaaaagtgggcaaagacatgaacagatatttttcaaaacaagacatacaggcagccaacaarcatatgaaaatatgctcaacatcactaagcattagagaaatgcaaatcaaaaccatatgagacaacatctcacgccaatcagaatgg

SEQ ID NO: 316360 - DNA, 591 bp, Homo sapiens
gcatggctaatttatattcttactagtgagcatgcaaaaacacaaaactactcataactgctttatattggctctctaattgtacattcctttatcccacaaaattatctgttttactgktatgacttctacactttttctctggctactaactccatctcagcatcagctctctggatcttgatcatataggttatcttaacatgttttgccccactctcagtgggaataatcgctaataactcagaaagccctagtgtagaactttgacaacaactccctttctgttctgttgctttaaatattgctatatcatgaaaaacggggataaattcatctcttcagatttagtttagttcactcttcaatgccattttgatatttatattataatcatcctttgggttttaggaaaaaaataatttaataataagttcgtcacttgtactgtgatatgtaaattgaacaattactccctttttaacacagcacattgacatttgtttcaaccacctgttcctccttgaggttgtattaattttagcattacattctctaggtgggaagaggaataggtttttctagcctgga

SEQ ID NO: 316361 - DNA, 591 bp, Homo sapiens
gcatggctaatttatattcttactagtgagcatgcaaaaacacaaaactactcataactgctttatattggctctctaattgtacattcctttatcccacaaaattatctgttttactgttatgacttctacactttttctctggctactaactccatctcagcatcagctctctggatcttgatcatataggttatcttaacatgttttgccccactctcagtgggaataatcgctaataactcagaaagccctagtgtagaactttgacaacawctccctttctgttctgttgctttaaatattgctatatcatgaaaaacggggataaattcatctcttcagatttagtttagttcactcttcaatgccattttgatatttatattataatcatcctttgggttttaggaaaaaaataatttaataataagttcgtcacttgtactgtgatatgtaaattgaacaattactccctttttaacacagcacattgacatttgtttcaaccacctgttcctccttgaggttgtattaattttagcattacattctctaggtgggaagaggaataggtttttctagcctgga

SEQ ID NO: 316362 - DNA, 624 bp, Homo sapiens
ttactttaggaaacatcactctctgcactctgaggtataaatcttcttgaaatattttttcttttttcttttcttttttttttatttcttttttgcaaattttacaacccaggaacatcattctaaaggacctgggggccatccctttgaaatgtaaacattaagcgagatagtgcccctgtatcttattcgtgagagagtaggagcctaacttccatgggcaccttgctccaagttataaaattatcttctgtcaagaagatatgtggaagtttacttttgcattgggtaaaactaattagcaaacacagatggctcaacatttctctcttattccagctcttatacaaatcctactgatatttgtttcatcaaaggtgaattcagactgagttctagcctctcccctttyccgatagtcttgaataaagtctccctagtatatttaactttgcccagtgcaatttatgctttgacaaaatcaatgatattcaaatctgtattccagtttttgtttctcttgtgagttccgtttcaaatttccaaatggctggatgtcttcgtgacaactcaaattcaacatgtccaataatgaattatccttttccggctcctatttctatt

SEQ ID NO: 316363 - DNA, 605 bp, Homo sapiens
actttgcccagtgcaatttatgctttgacaaaatcaatgatattcaaatctgtattccagtttttgtttctcttgtgagttccgtttcaaatttccaaatggctggatgtcttcgtgacaactcaaattcaacatgtccaataatgaattmtccttttccggctcctatttctatttttccctatgataacttcgtatatctcccttctctcatttatagcagactcatcactcttccaacatagtgctaatatcaaacttctattgattcattcaagttgacctagcagcagatccaagtatgtctttttattctcttctctttaactctaaacttcatctctttttggactatttaccatttaagagatatatcaggtacaatcttccttctttcctatttatgtaactcttaggcccaagaatgctatttccacttatcaaacaattaatagcatacatatggccatctgttaattcctagacaacgagctatgtcttctctgaagttttttctgtttcttaatgaataaaatctctttttccatggtactcacagtcacatttgctttataatgtgggtttttaaaaattatcttgtattt

SEQ ID NO: 316364 - DNA, 605 bp, Homo sapiens
actttgcccagtgcaatttatgctttgacaaaatcaatgatattcaaatctgtattccagtttttgtttctcttgtgagttccgtttcaaatttccaaatggctggatgtcttcgtgacaactcaaattcaacatgtccaataatgaattatccttttccggctcctatttctatttttccctatgataacttcgtatatctcccttctctcatttatagcagactcatcactcttccaacatagtgctaatatcaaacttctattgattcattcaagttgacctagcagcagatccaagtatgtctttttattctcttctctttaactctaaacttcatctctttttggactatttaccatttaagrgatatatcaggtacaatcttccttctttcctatttatgtaactcttaggcccaagaatgctatttccacttatcaaacaattaatagcatacatatggccatctgttaattcctagacaacgagctatgtcttctctgaagttttttctgtttcttaatgaataaaatctctttttccatggtactcacagtcacatttgctttataatgtgggtttttaaaaattatcttgtattt

SEQ ID NO: 316365 - DNA, 605 bp, Homo sapiens
actttgcccagtgcaatttatgctttgacaaaatcaatgatattcaaatctgtattccagtttttgtttctcttgtgagttccgtttcaaatttccaaatggctggatgtcttcgtgacaactcaaattcaacatgtccaataatgaattatccttttccggctcctatttctatttttccctatgataacttcgtatatctcccttctctcatttatagcagactcatcactcttccaacatagtgctaatatcaaacttctattgattcattcaagttgacctagcagcagatccaagtatgtctttttattctcttctctttaactctaaacttcatctctttttggactatttaccatttaagagatatatcaggtacaatcttccttctttcctatttatgtaactcttargcccaagaatgctatttccacttatcaaacaattaatagcatacatatggccatctgttaattcctagacaacgagctatgtcttctctgaagttttttctgtttcttaatgaataaaatctctttttccatggtactcacagtcacatttgctttataatgtgggtttttaaaaattatcttgtattt

SEQ ID NO: 316366 - DNA, 608 bp, Homo sapiens
aagaatatatcaacagagtgtaggcttcagtttatttcayttttaatctggcgttatttcctcataaatcatattataggtttttgatttccttcagagggaaaatttatgccttgttttcagacagatgggggagggcagaaacttgccctatgcctcctttttcttaattgccttcagctcaaaataatccttatgccagactggcatattttttggaggcatattttaatctcctacaacaataagatctttcaaagagtagataaatatctactctttattaaaataaaatgaacattattcgtaaagtactttaggctaaaagcaacatactctatactaaaaatcaaactaaatcatacaaattaaccattggaatacttttaaagagcaaggaggttctaaatatgtcacatattcattaaatataatagacaaactgtattatttaatataaaagttaaataattctgacattggataaaatcaatgcaaacaaaccatgcttatcttaccacagaatgttacataatggcttgtgagacagttttaaagacatcagctgatactacattcattaaagacattaataggatgactttagt

SEQ ID NO: 316367 - DNA, 613 bp, Homo sapiens
aaaaatcaaactaaatcatacaaattaaccattggaatacttttaaagagcaaggaggttctaaatatgtcacatattcattaaatataatagacaaactrtattatttaatataaaagttaaataattctgacattggataaaatcaatgcaaacaaaccatgcttatcttaccacagaatgttacataatggcttgtgagacagttttaaagacatcagctgatactacattcattaaagacattaataggatgactttagtgagaatactcctaaattgagagccagaggcagtatggtgtctgtgtacagtattttcataaagttctcttgtaaagggcttggaacctttgagaaagatacatattaataactataactgtgaaatagatatatttttctcattggtagcaaattgtactttacacatgaaaactatgtgtagaaaataattcaataattttggagaagtgtgccagaagttttgtgacaagaaacgtacaacccagatttctgactccatacttcattgattatcttgtagtacttcatacaaggctcagtgaagcttgaaagatggttctgttattttccttctgaggagtacccac

SEQ ID NO: 316368 - DNA, 613 bp, Homo sapiens
aaaaatcaaactaaatcatacaaattaaccattggaatacttttaaagagcaaggaggttctaaatatgtcacatattcattaaatataatagacaaactgtattatttaatataaaagttaaataattctgacattggataaaatcaatgcaaacaaaccatgcttatcttaccacagaatgttacataatggcttgtgagacarttttaaagacatcagctgatactacattcattaaagacattaataggatgactttagtgagaatactcctaaattgagagccagaggcagtatggtgtctgtgtacagtattttcataaagttctcttgtaaagggcttggaacctttgagaaagatacatattaataactataactgtgaaatagatatatttttctcattggtagcaaattgtactttacacatgaaaactatgtgtagaaaataattcaataattttggagaagtgtgccagaagttttgtgacaagaaacgtacaacccagatttctgactccatacttcattgattatcttgtagtacttcatacaaggctcagtgaagcttgaaagatggttctgttattttccttctgaggagtacccac

SEQ ID NO: 316369 - DNA, 579 bp, Homo sapiens
gctggtttacttattgaagacataaatgggcacttgcaacaggagctcagcatatataatgcaaatttttgaaggctgtatttgagttggtgggatattgtaatgccctgggtgtcatagatattgaggtattttacactctgtggaaagcgtttatcaacaatctcactgagtattcacaacaactatcyaaatgagtcctaagaaagtttccattgtagatcaaatgtagaggagggcagtagcagttctgttagagaagaaagactcccacttgagcccttctcctctaaatccactatagaacaaaagccttaatttatgcagagttgggcaacatacaccactgcctttagaatactggagaaaatttattgcatctagaataaaacatgggaaaaatatctactcctgaatcaggtgaagatctatgaactggattctgaactaagccaatggaggtgaaaagaaataagtaggagccattccccaaacctaggatactgtgactgcctaagacttaaagcttgatcaaaccatttaagaatgcttctcaagtactgggagccaagccgccca

SEQ ID NO: 316370 - DNA, 579 bp, Homo sapiens
gctggtttacttattgaagacataaatgggcacttgcaacaggagctcagcatatataatgcaaatttttgaaggctgtatttgagttggtgggatattgtaatgccctgggtgtcatagatattgaggtattttacactctgtggaaagcgtttatcaacaatctcactgagtattcacaacaactatccaaatgagtcctaagaaagtttccattgtagatcaaatgtagaggagggcagtagcagttctgttagagaagaaagactcccacttgagcccttctcctctaaatccactatagaacaaaagccttaatttatgcagagktgggcaacatacaccactgcctttagaatactggagaaaatttattgcatctagaataaaacatgggaaaaatatctactcctgaatcaggtgaagatctatgaactggattctgaactaagccaatggaggtgaaaagaaataagtaggagccattccccaaacctaggatactgtgactgcctaagacttaaagcttgatcaaaccatttaagaatgcttctcaagtactgggagccaagccgccca

SEQ ID NO: 316371 - DNA, 474 bp, Homo sapiens
gagggacttggtgggaggtaattgaatcatgggggtggttctttcccatgttgttctcctgatagtgaatatgtctcatgagatctgatggttttaaaaggcagagtttccctgcacaaactgtctctttgcctggtgacatccatgtatactgtgtctgtcctgcagactctggacaagcgatggatgaaagaagtatgcagatattttgcgtgagcgtgactaagggactgctcagcttagagatgccgaagagagagtgcagtctcgataagcctgagtcgcttgtatttattcagtacagattttatgataaaggcttggagctaacacaacctgtggataattaacattgttatyccccctttcaaggagcagtcttgcgtggggatgatcaaaggtcagtttctggacaccataagtaaataaacttatctagataaactcctttacactcccttgcatctacttctc

SEQ ID NO: 316372 - DNA, 593 bp, Homo sapiens
ttggattaacagcatattagacattgcagaagagactagtgatattgaaaacaaaacaatataaaatatccaaatgaaacatagagaaaaataagagttaaaaacaaacagagccttgttggttagtgtgacagtatcaaattgtgtaatactgtctactggtctcagaagaagaagtaggagagtaccaaaagttgaataaataagggctttaataattttttttatcacagatgatatgctgttctatgtacaaaatttttaaaaaatctacaaaaaagctttgagaactattaaatacttttatcatgttgatgaatgcaarcaataaacaaatgaatatttaaatgaatgaaaaccaacttccacacagcagtatcaaatttaagaaatttttagggatatatttaacaggaagtgtgcaagttttgcacaatgaaaagtatgaaatattgctaagggaaattatggaagacctaagtgaattaagaacagtagtatcattatggatcagaagacccaatattgtaaagatttcaaatctctctaaatttatttacaattttaaagtcatctaaaccaaaatggaaatc

SEQ ID NO: 316373 - DNA, 586 bp, Homo sapiens
gaagctactgccctggagctgtctgcttgggtgatccaggcagtgtagttccccttagactgtgagagcccagccctaccctgtatcacctctgcagttcctgagagatgttccccttcttccccaatgtcattgccaattacaggacctagaatctaaaagcatgctgggmaaacacacagggtgaggaagaggcagtttttttgtgactatgaggggtgtggcaaaaccttcatcaggaactaccatctgtcccttgatcttgattcacacagaagaaaagccatttctgcagctattggctgtggtcaaaaattcaaaacagaatcaaatcagtaaaaataatgtgtacgtaattttgaactttggaacatgagctttaagaaacattgcagctgaaaatttttcagtgccagtatattggtgaaacactcttcaagaaaaccatggaggatgtgggagacactttgcttcacccagcaggtggaaaggaaggagaaaggttcagagggttctgtgtgtcagacaagactttcctctgaggtaaaaccatggacagagcttcttgaaatgtgagagaaaccca

SEQ ID NO: 316374 - DNA, 565 bp, Homo sapiens
aaaataatgtgtacgtaattttgaactttggaacatgagctttaagaaacattgcagctgaaaatttttcagtgccagtatattggtgaaacactcttcaagaaaaccatggaggatgtgggagacactttgcttcacccagcaggtggaaaggaaggagaaaggttcagagggttctgtgtgtcagacaagactttcctctgaggtaaaaccatggayagagcttcttgaaatgtgagagaaacccaaagagacagtatcacatgaagcatgagaggaaacatgtgaaatatgtctctggaaacattcaaatgcaaagattgtcttaagcagcacatgaaaactcgtgcctccaaaagggatgtatgctgatggcgaagagaaggctgtggtaaaaccttcacaactgtttaaactccagaaccatattttctcttttcatgaagcggagcattcatttatgtgtgaacatgctggtggtggcaaaggtttgcaatgaaacaaagtctcagtagttatgcatgtacatgattctgataggaaaataaaatgaccaaaataaaac

SEQ ID NO: 316375 - DNA, 565 bp, Homo sapiens
aaaataatgtgtacgtaattttgaactttggaacatgagctttaagaaacattgcagctgaaaatttttcagtgccagtatattggtgaaacactcttcaagaaaaccatggaggatgtgggagacactttgcttcacccagcaggtggaaaggaaggagaaaggttcagagggttctgtgtgtcagacaagactttcctctgaggtaaaaccatggacagagcttcttgaaatgtgagagaaacccaaagagacagtatcacatgaagcatgagaggaaacatgtgaaatatgtctctgraaacattcaaatgcaaagattgtcttaagcagcacatgaaaactcgtgcctccaaaagggatgtatgctgatggcgaagagaaggctgtggtaaaaccttcacaactgtttaaactccagaaccatattttctcttttcatgaagcggagcattcatttatgtgtgaacatgctggtggtggcaaaggtttgcaatgaaacaaagtctcagtagttatgcatgtacatgattctgataggaaaataaaatgaccaaaataaaac

SEQ ID NO: 316376 - DNA, 650 bp, Homo sapiens
aattttgaatttttaaaactcttaataaataatgctgaatacttttgaaatttgatataaactgtaaactcacagatccaagaagctcaaagaacctcaagcacaagtctgaaatcaaaactagacaaaacacgaagatatatcataagcaaatttcctaaagagtgatgacaaaatcttaaaagcagctgtgggctacagtaaaaaaaacaaacaaacagcaaatgtgatttcttgtcagaaacaatggatcagatatattccttaaagtgttgagggggaaaaaagagatatacctaaaattatgtctcctrtaaaaattcattttaaaattaaaggcaaaataaagacttttcagacatacaaatacttaaagactgtattaccaacagatctaggttacctgaaatgccaaagacgttggcatttttgaccacagccaatagttgtagagatggcttttcttcggtgtgaatcaagatctagggacagatggtagttcctgatgaatgttttgccacacccctcctagtcacaaaaaaactgccaaagacattaagacagatgaaaatgataccaaatgggattccagatccacagaaaggaatgaaaaacaccagaaattgaaactacgtaggtaaatataaaga

SEQ ID NO: 316377 - DNA, 650 bp, Homo sapiens
aattttgaatttttaaaactcttaataaataatgctgaatacttttgaaatttgatataaactgtaaactcacagatccaagaagctcaaagaacctcaagcacaagtctgaaatcaaaactagacaaaacacgaagatatatcataagcaaatttcctaaagagtgatgacaaaatcttaaaagcagctgtgggctacagtaaaaaaaacaaacaaacagcaaatgtgatttcttgtcagaaacaatggatcagatatattccttaaagtgttgagggggaaaaaagagatatacctaaaattatgtctcctgtaaaaattcattttaaaattaaaggcaaaataaagacttttcagacatacaaatacttaaagactgtattaccaacagatctaggttacctgaaatgccaaagacgttggcatttttgaccacagccaatagttgyagagatggcttttcttcggtgtgaatcaagatctagggacagatggtagttcctgatgaatgttttgccacacccctcctagtcacaaaaaaactgccaaagacattaagacagatgaaaatgataccaaatgggattccagatccacagaaaggaatgaaaaacaccagaaattgaaactacgtaggtaaatataaaga

SEQ ID NO: 316378 - DNA, 605 bp, Homo sapiens
tattttacagatgaagagactgaagcacacagaaagtaagtgacatgcttgtaggaagtcagatagtagaatctgatcactgatctgcttcatggtgattcatggttatcttcccattcacactctgccacaaatttaaatagacatacaaatacagcaagaaccttacattagactgataagaagcctagaggaaacaatgctcttgagaaaactgaactgctaatgagccaactgtgaataaacagtttttaaaagaaaytagaatttctttttttagtatctttctcaatctggtatctttcacaaccattaaataaattttcaaaaacaacaaacatcagatataatgaggccaaatgtttgccttctaagctgtagctgcaactgtacacgtttatccttgagagactaaacttattctagccaacaaggatgagaaattctcaaaatgttaagagacccctgcaaatacctacactgtgtagcacctttgaactgtcccctactgcatacccattgagacattgtattgactggccagagagcccctgatgaccagaccgcaccatttacttaaatgtatgtagttctacacaggtgta

SEQ ID NO: 316379 - DNA, 570 bp, Homo sapiens
agagttggtcaaatatggcagagataaaaacggatgggaagtgtaaaaagggagatggaaactctatgaaagaatgtaaaaatgatagacgtttttaaaacactgtaacataaattaaaatgcgttaattggctaattagtagagtatatggctactaagaaaataatcaaagaacttgaggwcatgtcaatgaaaacttttcaaactgaaaaccaaaaagaaaacaaacaaacaacaaaacccagaatacccaagaactgtggatcaactaataaagatgtaacatgcatgtaatgggagtaccagaatgagaagaaagagaaaaaggtgcagaatttatattttaaataataattgatgagggttttgaaaaattaggaatataaaaaattactacagaaccagggagctgagagaacaccaagaaggataaatatcaaaaaatgtacaactaggaatatcgtattcaaactgtagagaaccaaagatgaacacaaaatctagacagaacccaggtaggcagaaaataccgtagatgaattttgaaagcagcaaggaaaaagtaactt

SEQ ID NO: 316380 - DNA, 583 bp, Homo sapiens
gtacactggatacatctttttatgagaagcaagtgtcttttaaaaaatatttgattaaatatctataagatttgcattcaggtctaacagtgatttcagcaatataaatataaatttgtgacaaatcttcacagcaattacttaaacagagctgttttaaactttttggtggtttcaagtgtagttttcccattgtgctttgttttgaaaatggaattttaccaaatgcaatcttttctaaaattttattaaaaaatgtttrtgggtacatagtaggtgtatatatttatggggtacatgagatgttttgatataggcatgcagtgtgaaataagcacatcatggagagtagggtatccatccccttgagcatttattctttgagttacaaataatccaattacatactttattttggaggttcctcaaaaacctaaaaattgagctaccaaatacactcttctcatttgataaggcaggcatccaaagtagtcagaaagtaaatgcacaatagacacatccacctttgattttttaataaattgtgtgatatgaatggtccatacaaacattcagaagcaaa

SEQ ID NO: 316381 - DNA, 583 bp, Homo sapiens
gtacactggatacatctttttatgagaagcaagtgtcttttaaaaaatatttgattaaatatctataagatttgcattcaggtctaacagtgatttcagcaatataaatataaatttgtgacaaatcttcacagcaattacttaaacagagctgttttaaactttttggtggtttcaagtgtagttttcccattgtgctttgttttgaaaatggaattttaccaaatgcaatcttttctaaaattttattaaaaaatgtttgtgggtacatagtagrtgtatatatttatggggtacatgagatgttttgatataggcatgcagtgtgaaataagcacatcatggagagtagggtatccatccccttgagcatttattctttgagttacaaataatccaattacatactttattttggaggttcctcaaaaacctaaaaattgagctaccaaatacactcttctcatttgataaggcaggcatccaaagtagtcagaaagtaaatgcacaatagacacatccacctttgattttttaataaattgtgtgatatgaatggtccatacaaacattcagaagcaaa

SEQ ID NO: 316382 - DNA, 583 bp, Homo sapiens
gtacactggatacatctttttatgagaagcaagtgtcttttaaaaaatatttgattaaatatctataagatttgcattcaggtctaacagtgatttcagcaatataaatataaatttgtgacaaatcttcacagcaattacttaaacagagctgttttaaactttttggtggtttcaagtgtagttttcccattgtgctttgttttgaaaatggaattttaccaaatgcaatcttttctaaaattttattaaaaaatgtttgtgggtacatagtaggtgtatatatttatggggtacatgagatgttttgatataggcatgcagtgtgaaataagcacatcatggagagtagggtatccatccccttgagcatttattctttgagttacaaataayccaattacatactttattttggaggttcctcaaaaacctaaaaattgagctaccaaatacactcttctcatttgataaggcaggcatccaaagtagtcagaaagtaaatgcacaatagacacatccacctttgattttttaataaattgtgtgatatgaatggtccatacaaacattcagaagcaaa

SEQ ID NO: 316383 - DNA, 583 bp, Homo sapiens
gtacactggatacatctttttatgagaagcaagtgtcttttaaaaaatatttgattaaatatctataagatttgcattcaggtctaacagtgatttcagcaatataaatataaatttgtgacaaatcttcacagcaattacttaaacagagctgttttaaactttttggtggtttcaagtgtagttttcccattgtgctttgttttgaaaatggaattttaccaaatgcaatcttttctaaaattttattaaaaaatgtttgtgggtacatagtaggtgtatatatttatggggtacatgagatgttttgatataggcatgcagtgtgaaataagcacatcatggagagtagggtatccatccccttgagcatttattctttgagttacaaataatccaattacatactttattttggaggttcctcaaaaacctaaaaattgagctaccaaatacactcttctcatttgataaggcaggcrtccaaagtagtcagaaagtaaatgcacaatagacacatccacctttgattttttaataaattgtgtgatatgaatggtccatacaaacattcagaagcaaa

SEQ ID NO: 316384 - DNA, 595 bp, Homo sapiens
ttatatcatttaatatatagcaggtttgataataagcacctatctgaacatgtctaaatcctcacaaaacttctatcagtctgatgttattgtcctacaataaacaaatgagtaaactcaggcttcagaaacaagtaatttttgcaggattacatgtgtgagaaggggataagtagaagtctgactctaaagtccatgcttataatctctgtacattatttgcttctatcgcagaaaatagtaactggcaaatttagaaactgaacttgtgtattcatgtctatatttaaaattgttcatgtgaaaattcaagtgtatgttcattctgacacccaattaaaaaccatggwgattctgatatatgagtaaatgtgtaaaaatgaaaacataaatcttattaatagtttatctcttttttacctttgtgtgctttgctcaacagaatactcataagaacgggtgtcaccatatgggaaatggacatcaaatgtctgtttaattttatcagtgatctaatcacaacaaagttttaactattgtctagttttaagtctatgtgaggcttaccaggtattctccaattgtgtacaataga

SEQ ID NO: 316385 - DNA, 448 bp, Homo sapiens
aaaaccattttttcaagtatgcatctactgcttcaacttatgtaaacttgatttctgaagaagccatgacaatggcctgaaaaaagcaccaatgcctgaracatgtacaataaagcctgtgatttcatgttgctaacggaaaagagatgacactctctgttttccagaggacccaaccctgccccatcacagcacttccaaactcttagacgagtatccttgtaaaactgaaacagcacttaatgcattaaagtgcatttgatgggttcacctcttataaagcctatttcagagaacaagaaaattgcaagttttgaaatggtgttatttaaaaatagttttcaaattgctttttgatcacttcctgtacttacatcctcctcctctctgtaatagacttctatttgaaaatgagatataacatttgaaagtgtcattttacagattt

SEQ ID NO: 316386 - DNA, 583 bp, Homo sapiens
agagctgaatgaagtaagtgagaaagcaagtcaaggttaatgtagaaaaaaaactttcttggcagaggagatggcaagtacaaaagactaaaccaggactaggtcaattttagaggattgactcaaattgccacagaaattctgaatgtaaaatgctgtcaaatagtatcgcatgctatggagaaatctttagtgaaaaaaaaaaaacagttggtcaatgcaaaaaagcatcattgttgtcttattttaagaaattgtcacaaccacccaaccttcagcaaccagtaccctgatcagtcagtaacaacagcattgaggcaagactctccrctagtaaaaagattaccacttgctgaagggtaatcaatgctcaaatgattgttagcattattttataaaaatgtattttttactgaaaatatgtacaatgtctttatagacagaatgctatttaccacttaacagactaccatatagagtaaacacaacttatatgcactgggaaaccaaaaatttgtgtggcttgctttatggcaatgtttattgctgtagtgtggaacagaagccacaatatttctgaagt

SEQ ID NO: 316387 - DNA, 583 bp, Homo sapiens
agagctgaatgaagtaagtgagaaagcaagtcaaggttaatgtagaaaaaaaactttcttggcagaggagatggcaagtacaaaagactaaaccaggactaggtcaattttagaggattgactcaaattgccacagaaattctgaatgtaaaatgctgtcaaatagtatcgcatgctatggagaaatctttagtgaaaaaaaaaaaacagttggtcaatgcaaaaaagcatcattgttgtcttattttaagaaattgtcacaaccacccaaccttcagcaaccagtaccctgatcagtcagtaacaacagcattgaggcaagactctccactagtaaaaagattaccacttgctgaagggtaatcaatgctcaaatgattgttagcattattttataaaaatgtattttttactgaaaatatgtacaatgtctttatagacagaatgctatttaccacttaacagactaccatatasagtaaacacaacttatatgcactgggaaaccaaaaatttgtgtggcttgctttatggcaatgtttattgctgtagtgtggaacagaagccacaatatttctgaagt

SEQ ID NO: 316388 - DNA, 574 bp, Homo sapiens
tgtccaataattttgcctggaacatctcacagaagggagttaccagtttttgagatgagcarcaacatcagcatataatgagaatttggaggatggggagtgtggcataaaatatttcattgaaaacttgtgatgtgagttttctatgcaacactcaatggagatgccaggtaagctagcaggttcatgagtggtttttcaatgtagagaataaaatgaaaacataattttataatcagcagcaaatgaattacgtttgaaaccaagaaaccggatatgataacccaagcagtgaatgaagacaaagtctatccaagaacagattcttggaagaaattagcacggcaaacagaaaattttggaagaaactttggaagaaattagcacaggaaaaagaaagaaaaactaaatactgagttgagaaagacagaaaaaagtaatgtttcttagcagtcaaaaacatggggggtgagaggagagtgaaaattgttgttgaattttctatttctaagtaacaggatggctggcgataattttatcaatgacattggacaaacaagaggagcaatctgca

SEQ ID NO: 316389 - DNA, 574 bp, Homo sapiens
ccattctgccattctctatttttaagtggagcatttaggccaatgacattccacagtaatattgagatttaacactattattttaaaaaatattgctgaggaattagatgtggagacaaaggaaaaatgtgtccaataattttgcctggaacatctcacagaagggagttaccagtttttgagatgagcaacaacatcagcatataatgagaatttggaggatggggagtgtggcataaaatatttcattgaaaacttgtgatgtgagttttctatgcaacactcaatggagatgccaggtaagctakcaggttcatgagtggtttttcaatgtagagaataaaatgaaaacataattttataatcagcagcaaatgaattacgtttgaaaccaagaaaccggatatgataacccaagcagtgaatgaagacaaagtctatccaagaacagattcttggaagaaattagcacggcaaacagaaaattttggaagaaactttggaagaaattagcacaggaaaaagaaagaaaaactaaatactgagttgagaaagacagaaaaaagtaatgttt

SEQ ID NO: 316390 - DNA, 541 bp, Homo sapiens
tgatgcttataactgttaatgttattgcaaactgatcttgtgcttacagctaaacaattttattctctttttggaamtagaataggaaaaacaacagaaagaaaaagaaaattcaaagctggttatttgaaaagattaataaaattaaattaactgggaagaaaagatgatagcctaagtggctttggaaatgagtggagtctgtaattctaaatgtaaaatgaactaaacataagcaatatagtggacaaagttgtttcccatggggttatagtttaaaaattctaatattgctacacatgtatagtagaactgaaaaactattaaatgatgtcaaatatttggaaccaggtttctcactgttacagtgtgcattaacaactatgcaatgggagatggctgaaatgattcatgtggtaacacatcagagttggagacctcaatatgaactaatacttaatataggtacagatgcttacatatcgcgataagtataaagatgtatatgtatctacataggttaacgtacacacttttattt

SEQ ID NO: 316391 - DNA, 581 bp, Homo sapiens
agatacatttatccaaccattttcataacaattttctagacactatgaaggataggaaagatgtgtgtttgtgtgtgtgtgtgtgtgtgtgtgtatgtctatgtttgtatacttaatcatttccaagtcattaggaagtaattacctaatcatttcttcctagctcctacctcccaacactgttgcattaagtttccaacacaggaaattttggggacacatccaaagcatagcaagtgtcaacttgaagtatttaggggtagccagcagaggggactgcagatgctggcagcagtgttagtatttgctgtggaagaaagaaagtcagatgcaaggagaaatatggcccacacttattaacatgacacttctagctatctttagtcattcaaagggggatgtatgtcttgatgtttaaaagaagaaagcttgtaaattagataagccatgagccaakaaaagattatagcattttaagtgtttccctgattttgcaaaagactacattgactgtctttcaaaagtaactttagcaattaaaacttgagcatttcctaggactaattcatttaagaaagcat

SEQ ID NO: 316392 - DNA, 652 bp, Homo sapiens
tactatcagtagaattgtgttccgcaaaagatgctgaagtcctaatctctagtacctgttaccctgaccttatttgaaaatagagtctgtgcagatgatcaggatagtgtgagatcattaaggtgggcccaaatttgatatgactgtctatatataaaaagaggtaatttggtcacagagacagatgtacacagaagaaaaattatgtaaatcatcataaaagaatgccatgtgaagattggagttttgttgcmataagccaagtaacatttaagactacctgaaactgaaagagagagaaaataatccttccctactgccttcaaatggagcatggtcatgctgaaacctcaattttgaaactctattctccagaactatgaggaaataaatttctgttgttcttagttattcattttgtggtactttgttacagtagtcccaggacgttaatacaggaatccctctaaagataacataataaaacacttttaataaaaaccactacatttattttgagcaacatagttaaaactctgttgtaagttttttgtttcagtttttctatttatattttgacatattaagagaatgttagctttataaaggataatctataaaatactctaaggatctatggaattcaggcaac

SEQ ID NO: 316393 - DNA, 652 bp, Homo sapiens
tactatcagtagaattgtgttccgcaaaagatgctgaagtcctaatctctagtacctgttaccctgaccttatttgaaaatagagtctgtgcagatgatcaggatagtgtgagatcattaaggtgggcccaaatttgatatgactgtctatatataaaaagaggtaatttggtcacagagacagatgtacacagaagaaaaattatgtaaatcatcataaaagaatgccatgtgaagattggagttttgttgccataagccaagtaacatttaagactacctgaaactgaaagagagagaaaataatccttccctactgccttcaaatggagcatggtcatgctgaaacctcaattttgaamctctattctccagaactatgaggaaataaatttctgttgttcttagttattcattttgtggtactttgttacagtagtcccaggacgttaatacaggaatccctctaaagataacataataaaacacttttaataaaaaccactacatttattttgagcaacatagttaaaactctgttgtaagttttttgtttcagtttttctatttatattttgacatattaagagaatgttagctttataaaggataatctataaaatactctaaggatctatggaattcaggcaac

SEQ ID NO: 316394 - DNA, 652 bp, Homo sapiens
tactatcagtagaattgtgttccgcaaaagatgctgaagtcctaatctctagtacctgttaccctgaccttatttgaaaatagagtctgtgcagatgatcaggatagtgtgagatcattaaggtgggcccaaatttgatatgactgtctatatataaaaagaggtaatttggtcacagagacagatgtacacagaagaaaaattatgtaaatcatcataaaagaatgccatgtgaagattggagttttgttgccataagccaagtaacatttaagactacctgaaactgaaagagagagaaaataatccttccctactgccttcaaatggagcatggtcatgctgaaacctcaattttgaaactctattctccagaactatgaggaaataaatttctgttgttcttagttattcattttgtggtactttgttacagtagtcccaggacgttaatacaggaatccytctaaagataacataataaaacacttttaataaaaaccactacatttattttgagcaacatagttaaaactctgttgtaagttttttgtttcagtttttctatttatattttgacatattaagagaatgttagctttataaaggataatctataaaatactctaaggatctatggaattcaggcaac

SEQ ID NO: 316395 - DNA, 465 bp, Homo sapiens
atggtttgtgaaaggaacatgaggactctaccttatgtaatatacttactccactggcttgccatgaaatcaaccttcttaatactagaaggcttaaattgtccctatgtcctcttctattactcccttcccttcttcatttactcacttatttggtctttcattagaaatttagatatggaatgtctaccacaggcatcaggtgaagccaatgaagctccaattctaactcagttgattctgacacaggaaatatgtcagtcactttggactgctataagagaatatcacagactgggtggcttaaacaagaaayatttatttctcacagttctggaggctggaagtctatgatatcagggtgcaggcatggtcaagttctggtaagggccctcttcctggttaagtcctcctcttttcataaagacattcgttaattctgccaggagggcctcaccctcgtgg

SEQ ID NO: 316396 - DNA, 559 bp, Homo sapiens
taacattttccaggtaaacagcatttctcttacatgtgttgaaaaagtcaaataatcttgtcacaatttttttttcatcaagcattttacttaaaggtttctaatctttcttaataacccttagagtttaattttgatcttctccagttctagcattttgtattagcaggaaatcacattgtgccaaatattttgaattgacatctgtaaagtgtcctgaaattcttccctcatctgtcaagtaattcagcttttgtagtcctgtttttaaattgatgaataaaaagaatgtttttttcctctattgtgaaactgaaaagacaaacttaaacatggataacacaggggcacaagcaaatgctccttgtcaccctcttcttggaaaattctatagatgtccaaagagaggcatgcaattatcaaaaatattaaagtgcaaatgtatgattttgctcaaaaacaaaggctttgcttttgcctttgtcttacygtcacaaattatactaaatgtaaagctttgtgggtgttttttttttttttccagcatgatttagcaaca

SEQ ID NO: 316397 - DNA, 560 bp, Homo sapiens
tgcattgtgtcaaagtgaaatacatttttttctgacaccaaagtgaaatgttttcctaacattggtctgttcttcaaaactgaatacactgcctaaaatgatttctccaatgattgcattattacaataataactatctctaaataacttataaggatgcatgatgagatttggctttaacaaaatagatccaactgtaggagaccatcataaataaatgtggaagacctaccagwgaggcaaagcaacagagaatatgaaggaaagtctgagcaataggtcagaggcagcagcttagatacaggatagttgtgaaggattgatacagttggatataagtccagagaaaggaaggcaaaccagagaattggatttgattagtttcatagcacagtaaagtccaattataggcattttaatggggcctagaacagtcgcgggtagtgcagtaaagctactctttacagaaagaagagtttgggatgaactggaaaaagtcattttagttttcacttctttctcagggtcaaacagcatgtttcactattaagcatatgatt

SEQ ID NO: 316398 - DNA, 400 bp, Homo sapiens
cagttggatataagtccagagaaaggaaggcaaaccagagaattggatttgattagtttcatagcacagtaaagtccaattataggcattttaatggggcctagaacagtcgcgggtagtgcagtaaagctactctttacagaaagaagagtttgggatgaactggaaaaagtcattttagttttcacttctttctcagggtcaaacagcatgtttcactattaagcatatgattaattctaattcatgagtagcaatttataatatagctacctatgatatagctayataatgggacctttacaggcctaacttgtatgcttaattaagataatgtttatgttgaacccagaatgctgccataaatatgtgtcactgctatagctcttgttatggcaat

SEQ ID NO: 316399 - DNA, 513 bp, Homo sapiens
ttttttcatcagtgttttgtagttctcctatagagatcttttacctccttagctacatttattcctagttaattttggggggctatcgtaaatgggattgggttattaatttggttatcagcttgaaaattattggtatataaaaatgctactgattttgggccaggcacagtggctcatgcttgtaatcccagcactttggaaggccgaggtgggtggatcacttggggtcaggtgtttgagasaagcctggccatcatggtgaaaacttgtttctagttaaaatacaaaaattacccagatgtggtggtacatgcctgtaatcccagctacttggaaggctgaggaatgagaattgcttgaaaccgggatgtggaggttgcagtgagccaagatagtgccactgcactccagcctgggtgacagagcaagactctgtctcaaaaaaaaaaaaaattctactgatgtttggaccattgactttctatcctgaaactttactaatgttgttta

SEQ ID NO: 316400 - DNA, 646 bp, Homo sapiens
acaatattacattattaatatgtatgttacatatatctatatctatattctatatataggggtgtgtgtgtgtgtgtgtrtatatatatatatatatatatatatatggaaatgtaagtcccagaaagatcagaaaacttttacaaggtcacatgtatgatacattcattcaggaataaattattattgggaaattactgtgcaccagtatttttacagaactgagaatatagtagtgatcaagatacaaaaggtgcttgtactgatgaagcttacttaatgatttcagtggagataaaaaaaggaaatatactataggctttgaaatacaccaacacagaaataacaaatggtgataagatctgtatgaagaattaaaacatgctaattgaaattttaacatatcattaagcacagcattaaaatatgaaactcttagaaataatttaataaagtatgtgtaagacctgtacattcagaaccatgacagcactgaactttaaattataagacctaaataaatgaagatatataccatcctcctggatcagaatactcagtattgctaagatgtcaattccacccaacttgatttatctatttaataaaattccaatcaaaaaccccaaaatggttttcataaaaa

SEQ ID NO: 316401 - DNA, 570 bp, Homo sapiens
tattatacaacacagttactataatgaacaacaatgttgttattgaaaattaccaagagacaggggctacaaaatggttaactagagacattgcctcctctgaaaagagaatcaaagtagcaagaagataatcacacttagaatagattgtttaagagagaacactggaattcaacagagaagtggaattcaacctcttaaacatggaaagagagagaagtaaagcagcttaagggcctagagaaactccccaaagtgagaaaasgttaagagagtgactgccagtggcccatattcccactacagactcctgcatcttggctacagaaaagcccttagacccttggcaggcccaaaaactaacatggaaatctgtctggagaatgtgcaaaggccttgttccagagaaggagctcatactccatcccacatatcccctgcaagccttaagcagtcacagcaatgatgtcatattgaaagcccaatccccgccagactgcatcttgcctgggggcccaatagcactgcatctccacatctctggaccccattggaaatttgctgccctca

SEQ ID NO: 316402 - DNA, 570 bp, Homo sapiens
tattatacaacacagttactataatgaacaacaatgttgttattgaaaattaccaagagacaggggctacaaaatggttaactagagacattgcctcctctgaaaagagaatcaaagtagcaagaagataatcacacttagaatagattgtttaagagagaacactggaattcaacagagaagtggaattcaacctcttaaacatggaaagagagagaagtaaagcagcttaagggcctagagaaactccccaaagtgagaaaaggttaagagagtgactgccagtggcccatattcccactacagactcctgcatcttggctacagaaaagcccttagacccttggcaggcccaaaaactaacatggaaatctgtctggagaatgtgcaaaggccttgttccagagaaggagctcatactccatcccacatatcccctgcaagccttaagcagtcacagyaatgatgtcatattgaaagcccaatccccgccagactgcatcttgcctgggggcccaatagcactgcatctccacatctctggaccccattggaaatttgctgccctca

SEQ ID NO: 316403 - DNA, 613 bp, Homo sapiens
gatctcactagatgcagaaaaagcattcaataaaattctacaccccttcatgataaaaaaaaaaacctctcaaaaatgaggcataaagagaacatatctcaacataataaagaccacatatgacaaataaacagataatattatactgaatggggaaaagctgaaagtctttcttctaagaactagaacaagacaagaatgcctattttcgctacttgtattcatggtactggcagtcctagtccaagcaatcagttaataggaaaacagtaaaattcatctagattggaaaaaagcaagtctaactgtcccttcctgcaaatgataygatctgaaatctagaaaaacctatagcctccaccaaaaaatgcttaggtcacataaataaattcaataaagtaacaggatgcaaaatcaacataaaatagctgtagcatttatatacagaagtaatagaggatctgagaaaggaatcttaaagacaatcccagttacaatagttatgaaaaatttaaatacttagaaataaatgtaaccaaagaggtaaaaggcttctacaatgaaaactacaaaacactaatgaaagaaattattgaggacacaaatgggaaga

SEQ ID NO: 316404 - DNA, 613 bp, Homo sapiens
gatctcactagatgcagaaaaagcattcaataaaattctacaccccttcatgataaaaaaaaaaacctctcaaaaatgaggcataaagagaacatatctcaacataataaagaccacatatgacaaataaacagataatattatactgaatggggaaaagctgaaagtctttcttctaagaactagaacaagacaagaatgcctattttcgctacttgtattcatggtactggcagtcctagtccaagcaatcagttaataggaaaacagtaaaattcatctagattggaaaaaagcaagtctaactgtcccttcctgcaaatgatatgatctgaaatctagaaaaacctatagcctccaccaaaaaatgcttaggtcacataaataaattcaataaagtaacaggatgcaaaatcaacataaaatagctgtagcatttatatacagaagtaatagaggatctgagaaaggaatcttaaagacaatcccagttacaatagttatgaaaaatttaaatacttagaaataaatktaaccaaagaggtaaaaggcttctacaatgaaaactacaaaacactaatgaaagaaattattgaggacacaaatgggaaga

SEQ ID NO: 316405 - DNA, 622 bp, Homo sapiens
tctttccatatacaagtgggaatttctaagatatttcaataaattatattacttgataattgtaatagtgtactgcagttggtaagaaaaatatcaatcatgttcggaacttttttttaagacgacagaaaaaaatgtgttctttataaaactattaggccaagttgttatttaaaatatttattaatagaaatattgatgcatatggacaacttattttgtctatggttattaaataaatgatgttgttattttacaataaagcctctgggaaacatggagttaagaagtaggatgaatagacatactctaaataaatattattcagccttataaaaattataattttactttaaaatattataactgagtttagctgtttctataattttttaaacawcatctgttattttataaatatttttatagatatttaatatgtagtttatgtttccatagcacagtattattcattgtttagatcagagcgtaactttttaagattttagtcaccatttgggggaaaggcattagtgcacttgatatttaaaagtgcaccaactctgaaagtgagatgctctgggggagtattaaatgttctatactctacaagaagttgaca

SEQ ID NO: 316406 - DNA, 628 bp, Homo sapiens
tcaaaacaatattacgtataatattagtgaagacttttttagtcaggacaataacacaatatataattaattataaaaagtaaacattaatttgtgtcacatggtcaaaagacatggtcaaatgactagattttcagacaatattttaccatttatagatgtaacatcatggtttgatttatttttacatatgtgaataaacatttgaagttacttattaagtcaaagtggttagaatagcacttgggtcttgaaatattcaagaatttgactttcatgaatatttatgtaaatgcatttgtataattctacattgatttaagctttkattctttgtcagattgacgttctcagatttccgtcttaaagttttaaactaaattaccttgttgcatattttacaatttctaaatctatttaaaatgaaacactaaaggattggtggacaaatatttttcaaagtaatattttgtcacatgaaatatgagtacaatatcaaatggagccccaaatctctcatcagcaaatgagtctgtctgcagtgtgtttatttcattacactgttataatttcagaagactcctacaggaatggcccccaaggctgtaatacaaatcacacacataca

SEQ ID NO: 316407 - DNA, 572 bp, Homo sapiens
agatctgcaacataatataatgcctgtagttaacaatatgatattgtgtacttcaaaatttgttaagagggtagatcccatgttaagtgttcttactataaaaacaatacaaaaacaaagggacacagagaaactttggaaagagttcatcatgcctattatcttgactatggttatgtcatcataggtatttctctccaaacccatcaaattgtatacagtaaatatgggcggttctttttacataaattatacctaaatgtagctgttagtaaaagaattatgtctttatccttcacattttcttggttaayatctcactatgccattggaattataattaactaaggctaaaatatgtctaaagccaagtatttacgacgtgtgaactctttgaactcggtaggttttgcagcagtaagaaataatcccccaaatatcagtggcttaaaaagaaaagattttcacttgagggcagtagaagtttgccccccactccttcttcaaaatccagtgctccactatctaggtcattgccatatgttgtatcagagaggggattgtgtgtacac

SEQ ID NO: 316408 - DNA, 590 bp, Homo sapiens
agataagcaaaatttggagctattcataatctcaagtataattttgatgcaacatggtcaagtgttatgctgatgacttatgtaaaaggtaaaataagagcatgatggtgaagtatccaacctggctacatcattagaggatttataaactgagaaaaacttacagcaaaacattaggcagaagatcatggacagatggatgtatctgtggttatttgtgtgtgtgtgtgtgtgtgtgtgtataattctttttcttcagatttgcagatagtgtgacatattagtccattctcaccccgcaataaagaaatacctgggactgggtaatttataaagaaaacagggtttaactggctggtggttcttaaggctttacaggtagcatggctgggaggcctcaggaaactttcaatcatggctgaaggtaaaggggaagcaagtatgtctgacatggctggagcagaagaaagagaaaagttggaggagctacacacttttaaacakatctcatgagagctcactcactatcacaagaacagcaagggggaaatctgccccatgttccaatcacctcccatcaggcccctcct

SEQ ID NO: 316409 - DNA, 584 bp, Homo sapiens
gcatatgtttctgaaggctgtacaggtagcatggctggggaggcctcaggaatctttcagtcatggtgaaaggggaagcagacatagcttacatggccagagcaggaggaacagagagaagggggaggtgttacacacttttaaacaaccagatctcctgagaactcactcactgtcacaagaacagtaagaagagaatctcccccatgatccaatcaccccmctccaggccccttctctaacattggggattataatttgaaatgagatttgggtggagacacaaattcaaaccacatcatgtgatgcataaaggttgtggttatcatctatgatagtagcttaactattaaatctccacaaatataggccatatatggaatctcatcaaaagctagaaaagggaaggtcttgacaattgtctttgcttattttgtagaaaagtattcatttcatttggaaatgaaagactaaatattatagtatttttatttaaactgaaattgatgtcatattcatttattaaaattatatgatttatgctttattttttgtggatttatattatgcaatataatgtgagt

SEQ ID NO: 316410 - DNA, 584 bp, Homo sapiens
gcatatgtttctgaaggctgtacaggtagcatggctggggaggcctcaggaatctttcagtcatggtgaaaggggaagcagacatagcttacatggccagagcaggaggaacagagagaagggggaggtgttacacacttttaaacaaccagatctcctgagaactcactcactgtcacaagaacagtaagaagagaatctcccccatgatccaatcacccccctccaggccccttctctaacattggggattataatttgaaatgagatttgggtggrgacacaaattcaaaccacatcatgtgatgcataaaggttgtggttatcatctatgatagtagcttaactattaaatctccacaaatataggccatatatggaatctcatcaaaagctagaaaagggaaggtcttgacaattgtctttgcttattttgtagaaaagtattcatttcatttggaaatgaaagactaaatattatagtatttttatttaaactgaaattgatgtcatattcatttattaaaattatatgatttatgctttattttttgtggatttatattatgcaatataatgtgagt

SEQ ID NO: 316411 - DNA, 559 bp, Homo sapiens
gaaagagcttgcactcaaacctctgaggaagggttgctgcactgcttgatgctagtaagttaagagctccaaggaagggccctagagggttggggctaaaattgatgagatagatagtgttgtccagcatgtgtggatacacgtgagagaacacaatgaagttcgttttaaaagtatcaaaacctggaaccagctattgttacccaggtgaaagatcattgcttgggctatattgacaatagcactaataaatagaagggagtatatctcttctctctacctgtttcaatatcctttcttctgtagttccccgctagtgacaaagggaattgggtgacaaagaaaaaatgcagtcttcggagtcccagcctcagtgtcacaaagctcagattacaagggtaaacaaaggctttatgactgaaatacacttaaaaatgagattattgtaaatgtagacattctcaatgctctcaatgtatcacattgctctccttctcccygccctagaatagagtgaacaattcctcaccttttccctggaacttgcctggttttagca

SEQ ID NO: 316412 - DNA, 618 bp, Homo sapiens
attatattttaaatgtattctgttaatgtttaaatatttgaagcttgagctaacaattccaagtgttctttttgagatttaataaaacatggcttattttttttgaagggaggtcaacatctttgtcataagtcaggaggccaaatatatatataaaaaaatctgcagcaaaattttaaaagtgaaaatcttattattaatagtttttaaaagcaaaggctctaagaaaatttaagccatggtataatgacactattatgatatcttcatttattaaaatgatgaatattaattttttcttcaacttcaataatatttggcttagtctgttactttaaaatagatggttatatgtgaataatatatatgaagaaaatttgtttagaaaaagyaaaacatgaaatactgttacagcaaactagtatgcaactttattagtaagcaactcttaagtacatttgtaaaataaaagatgttttatttatttgatggtgaggagtcatttataagatatttataagatgaaaatggaaaaacatcaattctggggactaggataactgaaagaaataaaggcattattgagaagtttatatgatttaaaagcaattaaacaaa

SEQ ID NO: 316413 - DNA, 602 bp, Homo sapiens
ttgttaaaaccaattttatcagaaaaacaaaatacaaaattttacaccattttttcacatatattaatctgtttcttagaaaacatttttgtatttattttaaagtattaaagataaattaacatgtatattttacttttttaatgattaagccaacaacaatatttttaataactatccatgcctacatagtagtataaactatgataaaatgtataaacattttaaaaactatttttggaggaagattacaaatgtttatccaccatgcmcatttggcaggagcaaaataactctctaatctttgaaaatttaatttacttggctaattttaacgttcaatgtcttctagtatcattcgatgttggaaatatctcaatttgaatgaaaattcctaacattctctaacacttagggcacaaataattcagcaaaaaggctgtataataattgaagaatgtatagatataaaaaaatgaatgaacaaacccagtaatctttgaatagatttagaggttaacttgtgctcagaaggtagatctacaaaatgaaaaaaatgtaaacaaataataatttatagattcaggctcaagaaataatga

SEQ ID NO: 316414 - DNA, 602 bp, Homo sapiens
ttgttaaaaccaattttatcagaaaaacaaaatacaaaattttacaccattttttcacatatattaatctgtttcttagaaaacatttttgtatttattttaaagtattaaagataaattaacatgtatattttacttttttaatgattaagccaacaacaatatttttaataactatccatgcctacatagtagtataaactatgataaaatgtataaacattttaaaaactatttttggaggaagattacaaatgtttatccaccatgcccatttggcaggagcaaaataactctctaatctttgaaaatttaatttacttggctaattttaacgttcaatgtcttctagtatcattcgatgttggaaatatctcaatttgaatgaaaattcctaacattctctaacacttagggcacaaataattcagcraaaaggctgtataataattgaagaatgtatagatataaaaaaatgaatgaacaaacccagtaatctttgaatagatttagaggttaacttgtgctcagaaggtagatctacaaaatgaaaaaaatgtaaacaaataataatttatagattcaggctcaagaaataatga

SEQ ID NO: 316415 - DNA, 605 bp, Homo sapiens
gttgtataaagataagtttcttcattcaagaagccaaaagtctggccagcagcttaaatagtgaaaatgggtctggatgcaaagtttattgtacaaacttttaaaacatggaaagctcccctctttttaggctttggctaaatatatggaaatatttttagtggaaaagtaaggatgaaaatattgtcaagttctataagggagtgcataaataaataaataaataaataaataaataactgatttctctttggcctaaataatattgttcatagcactgattgttgccagtagtctaaccatgacacacattgggacatctccttcccagtgtttcctccccagatcataagctgatgtgttctggcccagttccctaaccctggrctagctgtaagtctctagaaacattgagactgatgcacatgcatacactggccacattagtttagattcaccatagacagataaaataactttgcaataatattttgtttacgtttgagtgatgaagtcaatattcaagcatggattagtgttaaatgggaatcatataatggtaggatacattttctgaattgcagtctaatattcaaaatttccca

SEQ ID NO: 316416 - DNA, 508 bp, Homo sapiens
agtttttttttttttttttaaatatagatcaacgttggctagtctttattgggatgttagtttctctaggcctcctcctttgcagtgattttgatgtagatgagccaattttcagttgcatccttttcaagtttaaggaagaaaagggtcttaagacatcccaataggaatactttaggaatcttaatgcccgcgccccaccaaaaaaaaaaaaaaaaacaccccaccgattcaggtctagcttcgtaaaaagatattttctccaatccaagatgaacggtaccgtctgtcagaagactgactttttaagaaggagatttayaataagtttattctttgtgtttatggcaaatcataacacccatgtcttcaaacgtgctggttccctttgctctcttctcccccaaaccagagcacaaccatccagcatctaagctatttaaagtaagtcaaacagtttagtacagttacttttcatatatactccttaaggttatgatgaagtcta

SEQ ID NO: 316417 - DNA, 452 bp, Homo sapiens
ggtatttataaacaagggaagtttaattgactcacagttttgcatggctggggaggcctcaggaaacttacaatcatggcagaaggggaagtaagcaccttcttcacaaggtggcaggagacagtatgagcatgtgaaggaggaactgtgaaacacataaaaccttcagatcttgtgagaactcactcactatcataagaacagaatgggggaaaccaactctgtgatccaatcacctcactccatggatacatggtgattacagatccctccctcgacatgtggggattacaatttgagatgagatttgtatggggacacagagccaaactatatcayacacattaaatagctcagatgacaatgttttaatatgtatcataccacacatttttttaagaaagaaaaaacacatctaaaaattttaaccacatattcacaatttttcattt

SEQ ID NO: 316418 - DNA, 610 bp, Homo sapiens
tttcttgactatttttgtttgttttttactatgggtcaaactttcacatttctttcctatacattaattttgtattgtatactagacattcatgggtgatagaactcaggactccttttaagagtagtttgttttattttagcagagttaatttagatattttaaaatggcaaaccctatctctggttatgattagctgatgggaagcctctcatttgttctttagtttatccagtttttattttatttatttatttatttatttatttatttatttatattcaggtgccaacaaaatattgggttgagtttataagcatgtttytgggaaccccttttggggaattttcggcaagcacctcctctcaaattttagcagttccagtagccacagtattctgacttctaatttcagaaatcagaagaaacggatttctctaagtttgtttgcttggttcagtgcatactagagagtagcctcatgtgaaaagttgtacaaatatgaacatcactctgtacatttactttctttctaagattgaaatctcaccagtttctgcttgctatttttaaaaacaaatgcattcaacagatttcttttaaaaattgt

SEQ ID NO: 316419 - DNA, 503 bp, Homo sapiens
gggtgtacttgaccagtaagggtgaattgccactaacaagtatgtacagggcctgagtaaacacactgcacatgtggcccctgacaagtgctggcaggccaccttatatgcaacagttaagcaacagcccgcccaggggaagaaagggaggagatagagagcctgggaaacattatggggtataaaatctctagagtctaaacaaaaaagagaacagggaagtcaatttttcaagtcatccacttggccttcttcccagagtatcctactttctctaataaattctcactttgcttaaaagaaattctctctccttctttaaaccttgcctgtgtctctcatttgaattctctgcgttgagaagtcaaackaccaagtttgctgcagagttgccactctggagtttcttcggacagctcaccagctggtaatgtacttcggtgccatgactcagatccatcatctagtggtaaggccctgcaatgcctcacgttcttccacta

SEQ ID NO: 316420 - DNA, 499 bp, Homo sapiens
ctggagtttcttcggacagctcaccagctggtaatgtacttcggtgccatgactcagatccatcatctagtggtaaggccctgcaatgcctcacgttcttccactagaggcattcaaacccttgtatgtggtttcttctcctttctcttttttcctttttgtctcctaccttttgctttcccttcctctcccctttttcttcttcctgcctgtttctttcttttcctttttcacttccctttgcctttctcctacytacaaactgttccccagaagcactccccttggccacagtgattctgttccctctggtttctcaggtcatcctgatgggtgactcacagaggtgggaggagtttagggtcctaaactactatgcccctcccaacagggagtgtgcaagggtggtggagctaagcctgcactgtgaaatttctggggaacttccctgcttctccttcagctaaagtcagctctttccctaaacctgcacctgcac

SEQ ID NO: 316421 - DNA, 609 bp, Homo sapiens
ttccctacctcaatactggggctagttttttttgggggggaataagcatttttttttctgtgcctgatgagagctcttattccaaactctctggttctccagggctttctcctttatgtcaagaatgctgacaagcactctctctagggaccagaagctggtgtttctgtgaaagcacaagagctttccatgagcatccccaatgcttccttccctatctgcctattacagagggrttgccctgcttattttaaacacttcttttgcacattgcctatcaagggtaacattttcttattttcttctgacgttctccaactcattctcaacatcaacaaagattgccaaggcaaggctattcagagaaaaagggagcccagcctcattacggctcttggctggaaacagggtcctcatctgcctgaaaggacctggggaatgggaacacaaaaggatgggaaattatttcattgctaggattctccggacaagggtcaatgcaaggtcctagagtcaagcatataggcctacctgaggccaaaaacacaggaaaccaaattatccataggacagagatgaaggctggtgcgaggctacaggcacagaaca

SEQ ID NO: 316422 - DNA, 609 bp, Homo sapiens
actataataaattgtccttaataaatcaaggtcctcttgaaaaccccacaatattcattgagaggctacaagatgccctcatgaaacctaaacccagaaacaccagaagggcaacttgtcctaaagggctatttgctaatgcaagcagccccagatattcagaagaaattctgaaaactatcactgrgccccaacatcgttatgcctgacatcctcaaaatagcttcctcagtcttttacaactggggctggaaggaagagggaagggctcaggaaaaaaaagatgcaaaaggaaaggtggcagcttcaactattggctgccttacaagttcacttgccccagtaggttgccctgggaatactcccccaggtaactgccattggtgtgggaagccaggccactggagggcaagctgccccaatggggtaaatgggaacaaaccctgtatggcttgtcccctctgccacaagcttgaccacttgagacaagactgccctgagggctgaagggcccttgggacagaatcccaactcctgatggccttgagttgaagggaccctcttttccagctggctcccagatcaaacatcattattgaagggatggag

SEQ ID NO: 316423 - DNA, 609 bp, Homo sapiens
actataataaattgtccttaataaatcaaggtcctcttgaaaaccccacaatattcattgagaggctacaagatgccctcatgaaacctaaacccagaaacaccagaagggcaacttgtcctaaagggctatttgctaatgcaagcagccccagatattcagaagaaattctgaaaactatcactgggccccaacatcgttatgcctgacatcctcaaaatagcttcctcagtcttttacaactggggctggaaggaagagggaagggctcaggaaaaaaaagatgcaaaaggaaaggtggcagcttcaactattggctgccttacaagttcacttgccccagtaggttgccctgggaatactcccccaggtaactgccattggtgtgggaagccaggccactggagggcaagctgccccaatggggtaaatgggaacaaaccctgtatggcttgtcccctctgccacaagcttgaccacttgagacaagactgccctgagggctgaagggcccttgggacagaatcccaactcctgatggccttgagttgaagggrccctcttttccagctggctcccagatcaaacatcattattgaagggatggag

SEQ ID NO: 316424 - DNA, 581 bp, Homo sapiens
tttttctattcttcttcgtgcctatagaaagttgaagaccaagataacttttctcatcttgaaccatctcagtcaaagcatgatttacatttcgttttttaaaagaaacgtaaatcttgtaaacattttttacatttcttttaaaattttcgtgggctttctacgtatttgatttcagtcaactttatttaccacaatctatactcatatttttagatacatttctttccttctagatataagtacaagtaatgtaggcaccatgaccttcagcaaaaccatgtacttattccttttgtaagtcayttggcccaaatgaaaagattaactagatgtcatcttaattatttcacaaatgttattaaaatgattcctttgacattgattatttctgtgttttaaggctgtatcttagtttgagaatattttatgactgaagagataggaaataagagacttttattttcccatccataatgttctgggttctctccattacctctaattctgcttgcaatctgttcaaatctttttgagcttatcaatttattgtgggtagttatgttatgtagcaggaagtt

SEQ ID NO: 316425 - DNA, 614 bp, Homo sapiens
tggagaaaagattatattttcaacaaatggtaatgggccaactggatatccacatgcaaaaaacaaacaccaaaactaaatgtrgatatgtatttgatagacataaatgtaaatgcaaaattatacaacttctagaagataatcttgggtttggtgatgagtttctaggtataacaatttataacaaaacagaaaacaagttgttacagtggattttattaaaattgaaaacttctactctgttaaaattaaaggaatataaatacacaccacagactggggaaagtattggcaaaacacataacaggaaaacatctatctgatacatcctttatcacatgtatttgtacatcagaaatatacaaagagctcttaaaactcagcataaaaaacaatctaaataaaataagagcaaaacaacatgaacatatgaatactttgctaaggaagatatatagagggcagataggcaaatgaaaagatactcaacatcatatgtcatttaaaaaatgcaaattaaaacaacgatgaaataccactttacacctattagaatggctaaaaaccaaaacacaggcaagaccaaatgctgacaagaatgtggaacaacagga

SEQ ID NO: 316426 - DNA, 614 bp, Homo sapiens
tggagaaaagattatattttcaacaaatggtaatgggccaactggatatccacatgcaaaaaacaaacaccaaaactaaatgtggayatgtatttgatagacataaatgtaaatgcaaaattatacaacttctagaagataatcttgggtttggtgatgagtttctaggtataacaatttataacaaaacagaaaacaagttgttacagtggattttattaaaattgaaaacttctactctgttaaaattaaaggaatataaatacacaccacagactggggaaagtattggcaaaacacataacaggaaaacatctatctgatacatcctttatcacatgtatttgtacatcagaaatatacaaagagctcttaaaactcagcataaaaaacaatctaaataaaataagagcaaaacaacatgaacatatgaatactttgctaaggaagatatatagagggcagataggcaaatgaaaagatactcaacatcatatgtcatttaaaaaatgcaaattaaaacaacgatgaaataccactttacacctattagaatggctaaaaaccaaaacacaggcaagaccaaatgctgacaagaatgtggaacaacagga

SEQ ID NO: 316427 - DNA, 614 bp, Homo sapiens
tggagaaaagattatattttcaacaaatggtaatgggccaactggatatccacatgcaaaaaacaaacaccaaaactaaatgtggatatgtatttgatagacataaatgtaaatgcaaaattatacaacttctagaagataatcttgggtttggtgatgagtttctaggtataacaatttataacaaaacagaaaacaagttgttacagtggattttattaaaattgaaaacttctactctgttaaaattaaaggaatataaatacacaccacagactggggaaagtattggcaaaacacataacaggaaaacatctatctgatacatcctttatcacatgtatttgtacatcagaaatatacaaagagctcttaaaactcarcataaaaaacaatctaaataaaataagagcaaaacaacatgaacatatgaatactttgctaaggaagatatatagagggcagataggcaaatgaaaagatactcaacatcatatgtcatttaaaaaatgcaaattaaaacaacgatgaaataccactttacacctattagaatggctaaaaaccaaaacacaggcaagaccaaatgctgacaagaatgtggaacaacagga

SEQ ID NO: 316428 - DNA, 583 bp, Homo sapiens
gggtggggggaggggggagggatagctttaggagatatacctaatgctaaatgaccagttaatgggcgcagcacaccagcatggcacatgtatacatatgtaactaacctgcacattgtgcacatgtaccctaaaacttaaagtacaataataataaaattaaatcaaatttaaaaaaaaaagaacatcattggttttacaggtttgatacttgaccgttgcaaacttagtttgataacataagtgaattaatatttagaaaaaaaacacagctaatgattttgtgagaaattccaaaaagcatgactgcagtgagtcaagagatattgaatactgargttgttttttgagtttctagtaggaaaataccatcttatgcccacatacaaatttgagcctctttaataacactctgaaaactgattttttttattaatgcctacttttctgactatctatgaacttttcaagggctggaattataattacctttttcagtagtgcatagaattacctgacatataccaggtacttattaaatattgtttaattaataaatacaatttgtaaattttggaaacaa

SEQ ID NO: 316429 - DNA, 541 bp, Homo sapiens
ttttgttgcagcagtctgaatggactaagacaactagtacaccatgcaggatttgctcagtgctggcaatgcaaagaagattaagacatttataaaattttgaactaaatccaggtttatctctttcaaaatattatctgcatcataaactgagatagaggtgaattttaaccttttaacagggcactcacagtcttttaacatctggacctgtggcagcttctctcctgttgcccccttcactcctgatctctgactgtcatctgacctgtgtggcccaggactccctaagcawgcgttcccattgcaactcttgtgccagaatatcctcctttccctgtttgaaaatgatcaacttatatttttacatctctgctcaaatattacatactttgaggggaaaatgcctgattccaacaggaaaagttaatggcactgtttaaggtacccacataaaactctgataatagcattcattgtattgtatgctgtaatgtaatatctatttacaggtctgtctttttcaacacactgtaaatga

SEQ ID NO: 316430 - DNA, 452 bp, Homo sapiens
ataactacccaaagcttaactaacactatgacaatacaatttatatcattgccagcctaaatcttcagacttggagtatgaataaaacacaattttgagacgttgcaaccatgttataatcagagatttcctgaagaagatatgagcttgaagarcaccccttcattccagtcgtctaaattctaaagaagacatttacagtaacgtttattcatacatagatggtcagaaaacaccatattacatccaaatggcctgcacagataagggggagctaaaatcatggttgttaatgttgagttttcaagtcaatgtatacattacctaaataaatatttggattctgacacatgcaagtaacggatacaattttccaacttaatcacacttcaatgtttaatgatgccaaggctcttgaattgtaaatccaataactaacttacacggtttta

SEQ ID NO: 316431 - DNA, 639 bp, Homo sapiens
gttgccattctcttatacccaatggctgaagaagcattggcagcaggaacaggctagaacagacagaggaagtaagtgaggccatgctctctcttactccccacctaagaagtctttaacatctgacattattataaccaaatgtgaatacaaattatgggatcatacagagatgtcattaagggagttcaccagctggtaggaagagggagagacaacaaagaaaaatcaatagcagttgctgaaatattaaaccttttcatgttacagttgttcccaggagattcattttgcatacagattttatttctcttattaaacttgctgatttgcataatcttttccagcattgtattgagcaacygatcaattccagtgccttaaacatttcctctttctgcatcttttcagtccaactattgcagtgaataagcaattctctaaacataagtttggctatactacaagagatgctgacatggaaaaagaatgtagtaaccttaatagaaaccttagtgaaaatgtgaacacattttctctcatataaagagacgttcaatactggtaaaaaaaaatgtaaatattaagtgttgagctacaaggacttttcaaaatgtgtagattaccaaaacaataaat

SEQ ID NO: 316432 - DNA, 559 bp, Homo sapiens
ccaatgttactcaaatatctacatgaaatttgtgataaacactgataggagaaccattgcaaagttccctastgtttaggaaagaagcgaagcatgctttcttcggttatctattttaattttgagagatagctcctggcttcctagcagcagtaaacattgttattaaaagcattgattctgaagccaaatttactgttttcaaaaaatggctcattctctcattagtttataactgtaagcaggttatttaacatttttgcaccccaactgagcatcgctaaactgagagtaataatagtacctatccagtaaagtttttgtgaggactggataaattaatataaaacttcagatttccctacaatcttttctgctgtgcttttcctaatctcagataaggggcaaaagcataggtttgttcttttttgtttttttccttaggtttgttcttcatgttactctctcttttctactgtatggtaaatccatataaaatttatgtttttatctctctttatatctgtaactaacttcttactatttctattgatatcat

SEQ ID NO: 316433 - DNA, 579 bp, Homo sapiens
cagaataataataaagaactttgtgtttaatgaatacaataatttttcccagtcaagagaatcttagaattactttggtaatatcctttatggccactgctgtgtatggtttataccacttattgttacataattagtagtagttaataaataaggctttaagaagttttttagtttaggaaataaattatatgatcatcctgctcctagtctgcctgtcttcatttcccctctactatttaaaagtatattgatccacttacacattgtggaactggaaaaatctgatgattcaagtaagcaaaattatcaagtactactttcttttatctcctatttaggaagaacataaataaagttttatgttatgccatattaaaatatcttgctatgttataagaataattgcattttacatatttgtaaaaatgccattaaaaagtgcatacatcttttagtattgaaattgcatcatttcatattttgcttaatgcaaaattrtgccttttttttgtataaaatgacttcttaccaggagacacaatcaaaagctacaaaatccgctgacataatccaacc

SEQ ID NO: 316434 - DNA, 616 bp, Homo sapiens
actttgtggtactcctagtcggttttgagaggaaaatggaattttacggctaacaatgcagaaagagtctgaaataatggtcaaaattctgagcaatttgccaacttgagacggaatcttcctctgtcgcccaggctggagtgctcggctcactgcaagctccgcctcccgggttcacgccattctcctgcctcagcctccccagtagctgggactacaggcgcccgccaccaagcccggctaaattttttgtgtttttaatagagacggggtttcaccgtgttagccaggatggtctcgatttcctgacctcgtgatccccccgcctcagcctcccaaagtgctgggattacaggaactctgactcttaaaatggaatggagatgctgaggagctaaaaagcagagcttttaacagatgatgaaactttgwtgactagaaagggagccaagggtccaacaaaaaaatcagtcgagactactaaaacagattccctaggagtaaaagctcgttaaggtagactccataattaactatcttctagttctatacttaacattctttaaaggaagatagagaagtgagtctttttaatgtgttatccaccgtaactagt

SEQ ID NO: 316435 - DNA, 660 bp, Homo sapiens
aaacctgccatataaatacttttatcacatataaatgtaaacatcccaattaaaatgtagagattttcagactggatgagacagcaatgcttaaccatataccgtataagagacacacttcaagtataaactctgagagctaatagaagtaaaagggtgtttcactttttcacacaataataatgacacacataaaagacaaaaaatcagagagaaaagacagcactagatattttattactttattataaaaataaagtaattactttattataaaaatatataaccagattcaaacttcctatactatacatgggctagattccaagttaaaagtatgtactatattcctaaaacaaccactaaaataacaaaacatatgattatgctaaataacacttcaaaggagataaaatgaaataataaaattatcaaataataaaacatgcaaaaaagattaaaaaggaataaagaaaacagggaacaaatagaaaacatgcagcaaawtgatatatttaatcataaccatataaataaacaccttaaatgtaaacgactgaaatggcctaaataacctacttactaatgattcatttaagatgaagaaaaacttactaatgatttacttaagatgaagaaattaatatatgctgcttacaa

SEQ ID NO: 316436 - DNA, 540 bp, Homo sapiens
agaaaaaaaaaaaaaaaaaaggccagggcgcagtggctcactggctcacacctataatcccagcacttcaggaggccgaggcgggcagatcagttgaggtcaggagttcaagaccagcctggccaacatggtgaaaccctgtctctactaaaaatacaaaaattagctgagggtggtggcacatgcctgtaatctcagctactcaggaggctgaggtgggagaattgcttgaacctgggagactgaggttgcagagagccaagatcgtgccgtcgcactccaggctaggcgacagagtgagactccatctcaaaatatatatatatatataaaatatacttattatatttaatttatattatagatataatttctaaaagaaaaaagtaaaaagacccaaaatgttaaaataggcaaaaaaaaaaaaaaaaacaggcattaaaaaaaaccacttggcagctgaattgtgcatctgagaggatgtgaatccgcctcacctccaagtcctccrcaggatcagcaacatttcagggtcactga

SEQ ID NO: 316437 - DNA, 582 bp, Homo sapiens
cactgtcccgagcactgctcccaccactgtggtttacttacaggcaggaaggagatgggaaagtcaaacttatagtcttcagcttgaagcttataaaccaacttcattattgggccactgaacatgaaattgaccaaacaaacaaaaacagggcaaataaactgcaaattatcttgctttgattgtttcttaagaaatcaagagagtgatttaaaggtgkaatcaccatgagaaagcactcagcctctctcaggtgacaaacctatctacccaggattgagaaactccatcacgatgctgtactccacaggatccacgtgcccctgtaaacagcagaggttccagccaatgaggacaccatctaggctgctgaaaatgctctctaccagccatgggaagatggtgtgcagctcctcaaacagtagtatgtggtgaggccgtgggcaggaccagcacccactcctgccctggctccagtcctgcaccgcctgctgcccagctctctcttgaggaggccactccctggctgagacccatgggatcagccctgagcccaaaggaaccctgatgtgatggtgccaa

SEQ ID NO: 316438 - DNA, 582 bp, Homo sapiens
cactgtcccgagcactgctcccaccactgtggtttacttacaggcaggaaggagatgggaaagtcaaacttatagtcttcagcttgaagcttataaaccaacttcattattgggccactgaacatgaaattgaccaaacaaacaaaaacagggcaaataaactgcaaattatcttgctttgattgtttcttaagaaatcaagagagtgatttaaaggtgtaatcaccatgagaaagcactcagcctctctcaggtgacaaacctatctacccaggattgagaaactccatcacgatgctgtactccacaggatccacgtgcccctgtaarcagcagaggttccagccaatgaggacaccatctaggctgctgaaaatgctctctaccagccatgggaagatggtgtgcagctcctcaaacagtagtatgtggtgaggccgtgggcaggaccagcacccactcctgccctggctccagtcctgcaccgcctgctgcccagctctctcttgaggaggccactccctggctgagacccatgggatcagccctgagcccaaaggaaccctgatgtgatggtgccaa

SEQ ID NO: 316439 - DNA, 584 bp, Homo sapiens
gggcctctctaacctttgtggggatacatcttctctggtcttgtgcatgtaattttccagttccagaggtttgccactttttcagaatctcataatctcttgctccttctggtgtctgcctgcacacaggctctctggtactgcaacaagatactgaactctctgttctccatggccaccagttattcaaagtaggtggattttctgtcagcactccacgtcatacaacacacaatccagtccctcaggtagcccctgaaaagtcagaatgttacccttagattcccttcttaacttctattcctgagggagwagccaagagttgaacatgttctcctgatcaaaccaaactatgcccacttgaggaaagggctatatcatgggtaaaatgcaacatcttttctcacccattcgaatgcagctgttcttggttttgcactggcctgggttactgctggtttctggagcctcctaaagtcttgcaggttgcagtcaagatgtcagccagggctacagtcatctcgcaggtggagcgttcacttccaagatgactcagtcatgtgcctttggctgaaggcctgtca

SEQ ID NO: 316440 - DNA, 523 bp, Homo sapiens
ggatttgctgaaatgaccactgggtggcacaaaattttgctcttttgccttataaatagaatgaataagaaaataattagatgtgttttggcattttccaaatttaataagtttaaaattatcataracactcttctttttacttttaaaaatttaagatgtatcctaaaaaggaacatcaagcttaatccattttattcctgagttctaccagagttcaagaaagaaatcatacattactttaattttaagaatacagaaaaagatgaagcatttttaaactcatgcgaaaagactaacatgaccatgactgcagataaagcaagtattcaaaatatcaatagctttccttactttgccataacaaatcacaaaagaagattacaatcacaataggaaaaagtagttattaaatttatagaaatggactaaaaataaataagatgcactcacttaagcaaactgcaaatcttttaagaaaaatctaaatctaaatcctgggtgagaaacatttttaaaaaat

SEQ ID NO: 316441 - DNA, 523 bp, Homo sapiens
ggatttgctgaaatgaccactgggtggcacaaaattttgctcttttgccttataaatagaatgaataagaaaataattagatgtgttttggcattttccaaatttaataagtttaaaattatcataaacactcttctttttacttttaaaaatttaagatgtatcctaaaaaggaacatcaagcttaatccattttattcctgagttctaccagagttcaagaaagaaatcatacrttactttaattttaagaatacagaaaaagatgaagcatttttaaactcatgcgaaaagactaacatgaccatgactgcagataaagcaagtattcaaaatatcaatagctttccttactttgccataacaaatcacaaaagaagattacaatcacaataggaaaaagtagttattaaatttatagaaatggactaaaaataaataagatgcactcacttaagcaaactgcaaatcttttaagaaaaatctaaatctaaatcctgggtgagaaacatttttaaaaaat

SEQ ID NO: 316442 - DNA, 523 bp, Homo sapiens
ggatttgctgaaatgaccactgggtggcacaaaattttgctcttttgccttataaatagaatgaataagaaaataattagatgtgttttggcattttccaaatttaataagtttaaaattatcataaacactcttctttttacttttaaaaatttaagatgtatcctaaaaaggaacatcaagcttaatccattttattcctgagttctaccagagttcaagaaagaaatcatacattactttaattttaagaatacagaaaaagatgaagcatttttaaactcatgcgaaaagactaacatgaccatgactgcagataaagcaagtattcaaaatatcaatagctttccttactttgccataacaaatcacaaaagaagattacaatcacaataggaaaaagtagttattaaatttatagaaatggactaaaaataaataagatgcactcacttaagcaaactgcaaatcttttawgaaaaatctaaatctaaatcctgggtgagaaacatttttaaaaaat

SEQ ID NO: 316443 - DNA, 567 bp, Homo sapiens
gaaggacactcctaattgaactgacaataatttccactgagcaaaaattttcttgrgcagaattggggtgggggagcaaacaggaagtgcagataccagcatagaagttgcagccaaaggtgcaggcaggtggggagaggtgaggcctgggagccatgcttgctttctcagtggggaggcttgtagcctggggcaagatttcagccctgcttgcggctgcctggatgtaaactcagtgctgtgagtggggcacagcgagagtgagatggccttgctggctgcgtgggagctgggtgaagcctgtcactgccagctttcctccacttccaggcaacctttatgatgtagcagaggcagccataatccccctaagaacataactccactggcctgggaaccacacccccatctgccacagtggcagcagcaagcaccatccaaggagagtctgagctcagacccacctaactgtgccctcacctgatggtttttctctacccaccccgatagccaaagacaaatgacataaactcttgggagctctatggccccacccatcacctaaga

SEQ ID NO: 316444 - DNA, 633 bp, Homo sapiens
ggggtgggggagcaaacaggaagtgcagataccagcatagaagttgcagccaaaggtgcaggcaggtggggagaggtgaggcctgggagccatgcttgctttctcagtggggaggcttgtagcctggggcaagatttcagccctgcttgcggctgcctggatgtaaactcagtgctgtgagtggggcacagcgagagtgagatggccttgctggctgygtgggagctgggtgaagcctgtcactgccagctttcctccacttccaggcaacctttatgatgtagcagaggcagccataatccccctaagaacataactccactggcctgggaaccacacccccatctgccacagtggcagcagcaagcaccatccaaggagagtctgagctcagacccacctaactgtgccctcacctgatggtttttctctacccaccccgatagccaaagacaaatgacataaactcttgggagctctatggccccacccatcacctaagaaacccgagtacttatcctggccaatctagggcaagcttatatcccctttcttctaccacagctggtgctctcttccaagtgccacctgccagttgaaggccaaccaactcaagctattacagcaactcat

SEQ ID NO: 316445 - DNA, 582 bp, Homo sapiens
ctcacctgatggtttttctctacccaccccgatagccaaagacaaatgacataaactcttgggagctctatggccccacccatcacctaagaaacccgagtacttatcctggccaatctagggcaagcttatatcccctttcttctaccacagctggtgctctcttccaagtgccacctgccagttgaaggccaaccaactcaagctattacagcaactcatacgagaacaatcctgctccaaagaagctaaccagagctgtgtccccaatcagcttcactcctagcataaccagcattcaataaagccagggcactaaacaaaactacaaccaaggactcccacagagtctgcttcactcccctgccacctccactgaagcaggtgctgttatccacgggtgggagactcgaagacaaatcacaycacaggactctgcagacatccccagtaccaccatggaggctggtagcactgctgggtagctagacccagaaggacaataacaatcactgaagtctggctctcaggaagctccatccctagaaaaaggaggagaataccacatcaaaggatcaccct

SEQ ID NO: 316446 - DNA, 548 bp, Homo sapiens
gggagcatctgcccctgaacacataccctcactgggaaacctgaaggtctagatcataggagaaggatctgatcttacctggggctgagtcaatttagagatctgagcaaarcacagaggtagatgaagcagcagaaaaagctctgtgggctctctgggtcccccaggaagctatttcatacctgtctcacaggggtccttggggagagctgccagagttgcggaaagaccacagtaagaaggaaacctccagctgaacgttgttaacaattccaaccgaaggcgaagtctcctggccaaaacttggaggagggcatgaatcctgtgtgcacactcaacagtggggaagcacgaaaaccctgcttgcttttgcacctgggatgctggtagcctggggcaagttctcagccttgctcacctactgtctggaaacagactcagagctgttggtgggggtgcacagtgggagtgagaccggtcttttgggttgtgtgggagctggatgaggcctgtgactgacagctttccccaacttccctgacaacctg

SEQ ID NO: 316447 - DNA, 548 bp, Homo sapiens
gggagcatctgcccctgaacacataccctcactgggaaacctgaaggtctagatcataggagaaggatctgatcttacctggggctgagtcaatttagagatctgagcaaaacacagaggtagatgaagcagcagaaaaagcyctgtgggctctctgggtcccccaggaagctatttcatacctgtctcacaggggtccttggggagagctgccagagttgcggaaagaccacagtaagaaggaaacctccagctgaacgttgttaacaattccaaccgaaggcgaagtctcctggccaaaacttggaggagggcatgaatcctgtgtgcacactcaacagtggggaagcacgaaaaccctgcttgcttttgcacctgggatgctggtagcctggggcaagttctcagccttgctcacctactgtctggaaacagactcagagctgttggtgggggtgcacagtgggagtgagaccggtcttttgggttgtgtgggagctggatgaggcctgtgactgacagctttccccaacttccctgacaacctg

SEQ ID NO: 316448 - DNA, 548 bp, Homo sapiens
gggagcatctgcccctgaacacataccctcactgggaaacctgaaggtctagatcataggagaaggatctgatcttacctggggctgagtcaatttagagatctgagcaaaacacagaggtagatgaagcagcagaaaaagctctgtgggctctctgggtcccccaggaagctatttcatacctgtctcacaggggtccttggggagagctgccagagttgcggaaagaccacagtaagaaggaaacctccagctgaacgttgttaacaattccaaccgaaggcgaagtctcctggccaaaacttggrggagggcatgaatcctgtgtgcacactcaacagtggggaagcacgaaaaccctgcttgcttttgcacctgggatgctggtagcctggggcaagttctcagccttgctcacctactgtctggaaacagactcagagctgttggtgggggtgcacagtgggagtgagaccggtcttttgggttgtgtgggagctggatgaggcctgtgactgacagctttccccaacttccctgacaacctg

SEQ ID NO: 316449 - DNA, 606 bp, Homo sapiens
gcatcacctcctggcaagaggccaaccagcacaaaaatagtgcattaaacaaccaaaactaaggaccctcacagagtccatttcactcccatgccaccttcaccagagcaggtactggtatccatggctgagagacctgcagacagtctacatcacaggactctgtgcagacacctcccagtaccagcctggagcctggcagccctgttgggtggctagatccagaagagaggtaacaatcgctgcagctcggctctcaggaagccacatccctaggaaaaaagggagagtactacatcacaggaatagcctgtgggacaaaagaatctgaacagcagccttgagccctagatcttccctctgacgtagcctacccaaatgagaaggaaacagataaacaattctggtaatatgacaaaacaaggttctttaacacctccaaaaaatcacattagctcaccagcaatggatccaaaccaagaagaaatccctgwtttacctgaaaatgaattcagaagttcagttattaagctaataaaggaggcaccagagaaacgtgaagtccaatttaaggatatccaaaaaatgatacaagaaatgagggga

SEQ ID NO: 316450 - DNA, 577 bp, Homo sapiens
ccctatcttcagcttccttaaacaaaacaattatcagccaagaattttgtataaggtggaccagatggctctcaccttcccatgtctaaggtggaccagatggctattaccttgccgtgtctaagttggatcagatggctctcgccttgcagcttcataaatgaagggaagatgtagtctttttcagacaaacaaatgctgagaaaattcaccactaccaacccagcactacaagaactgtaaaaggarctctaaattttgaaacaaatcctggaaacacataaaaacagaaactctttaaagcataaatctcccagaacaaggtcgactagatggctctcgccttgccatgtctaaggtcgaccagatggctctcgccttgccatgcctaaggttgaccagctggctcttgccttgtcatggctgaggttgaccagatggctcttgccttgccatgcctaaaattgaccagatggctctcaccttgccatgcctaaggtcgaccagatggctctcaccttgccatgtctaaggttgaccagatggcttttgtgtgcctatgtctaaggtcaaccag

SEQ ID NO: 316451 - DNA, 599 bp, Homo sapiens
tattaccttgccgtgtctaagttggatcagatggctctcgccttgcagcttcataaatgaagggaagatgtagtctttttcagacaaacaaatgctgagaaaattcaccactaccaacccagcactacaagaactgtaaaaggaactctaaattttgaaacaaatcctggaaacacataaaaacagaaactctttaaagcataaatctcccagaacaaggtcgactagatggctctcrccttgccatgtctaaggtcgaccagatggctctcgccttgccatgcctaaggttgaccagctggctcttgccttgtcatggctgaggttgaccagatggctcttgccttgccatgcctaaaattgaccagatggctctcaccttgccatgcctaaggtcgaccagatggctctcaccttgccatgtctaaggttgaccagatggcttttgtgtgcctatgtctaaggtcaaccagatggctctcactttgttctatgtaaggtcaactagagggctctcacttttccatgtctcataggacctataaaacaataacacaatgaaaaaaaaaacatagtatacaggcaacaaatagcatgat

SEQ ID NO: 316452 - DNA, 599 bp, Homo sapiens
tattaccttgccgtgtctaagttggatcagatggctctcgccttgcagcttcataaatgaagggaagatgtagtctttttcagacaaacaaatgctgagaaaattcaccactaccaacccagcactacaagaactgtaaaaggaactctaaattttgaaacaaatcctggaaacacataaaaacagaaactctttaaagcataaatctcccagaacaaggtcgactagatggctctcgccttgccatgtctaaggtcgaccagatggctctcgccttgccatgcctaaggttgaccagctggctcttgccttgtcatggctgaggttgaccagatggctcttgccttgccatgcctaaaattgaccagatggctctcaccttgcyatgcctaaggtcgaccagatggctctcaccttgccatgtctaaggttgaccagatggcttttgtgtgcctatgtctaaggtcaaccagatggctctcactttgttctatgtaaggtcaactagagggctctcacttttccatgtctcataggacctataaaacaataacacaatgaaaaaaaaaacatagtatacaggcaacaaatagcatgat

SEQ ID NO: 316453 - DNA, 599 bp, Homo sapiens
tttactatgtatatataataaaaatatactattcagaatatacaaagagttcattccaataagaaagaacttgcaaaacccaatgagaaaatgggcaaagaatattaagaggaattgcacagaagaaaaagacaaattgtgtataaacaaatgaaaagctgyttcacctgtctaatggccaaaatgtctattaaaatataagatagtattcccccatctcatggataaaattaaaaagtacatatccattacagaaattacctgtaatatctatcacctcacaaaacaatggaaaggtatttatttgtagtggaattctaaacagattccccagataaaaaatcaataatgaccaaactaattggaagagtgataaatctaacaaaccttattttttgatcagtgaagactaattttttattttaattaaagattttttgatttagccctggataataaagccagttaatatagagaatgttcactagtatacataaattcaaatgaattgttaatttagaatgattatttaatatcaataaaaattgtctaaccttttcaggaaaaacaatagatatatataacttcaggtaagttta

SEQ ID NO: 316454 - DNA, 589 bp, Homo sapiens
ctcggctcaccgcaacctccgcctccccgggttcaagcaattctcctgcctcagccacccgagtagctgggattacaggcatgtgccaccacacccagctaattttgtatttttagtayagacagggtttctccatgttggtcaggctagtcttgaactcctgacctcaggtgatctgcgcacctcggcctcccaaagtgctgggattacaggcatgagcctagggtacagagcatgaccctgtctcaataaaaaaaagaaaagaaaaagaaaaaatcaccaatgcaatgctaaatctagtgggtgaaattttgaggcgtaactagacctttatagagccacaaagtattgccacacaagttatcagtgaaatacaaaaggtaaactgtaactttaccatggacaaacctgacaggtactccttaaccaaagaagcaaagtcaacactggccagcaatgaaaccaagtgacagcctccagatatgctgcataagcctccagatatgttgtactgggaagaagtcagcatcacctgtgtgacattcctgcctgaatgacataacctgaatctaataatgaggaaacatca

SEQ ID NO: 316455 - DNA, 589 bp, Homo sapiens
ctcggctcaccgcaacctccgcctccccgggttcaagcaattctcctgcctcagccacccgagtagctgggattacaggcatgtgccaccacacccagctaattttgtatttttagtatagacagggtttctccatgttggtcaggctagtcttgaactcctgacctcaggtgatctgcgcacctcggcctcccaaagtgctgggattacaggcatgagcctagggtacagagcatgaccctgtctcaataaaaaaaagaaaagaaaaagaaaaaatcaccaatgcaatgctaaatctagtgggtgaaattttgaggcgtaactagacctttatagagccacaaagtattgccacacaagktatcagtgaaatacaaaaggtaaactgtaactttaccatggacaaacctgacaggtactccttaaccaaagaagcaaagtcaacactggccagcaatgaaaccaagtgacagcctccagatatgctgcataagcctccagatatgttgtactgggaagaagtcagcatcacctgtgtgacattcctgcctgaatgacataacctgaatctaataatgaggaaacatca

SEQ ID NO: 316456 - DNA, 589 bp, Homo sapiens
ctcggctcaccgcaacctccgcctccccgggttcaagcaattctcctgcctcagccacccgagtagctgggattacaggcatgtgccaccacacccagctaattttgtatttttagtatagacagggtttctccatgttggtcaggctagtcttgaactcctgacctcaggtgatctgcgcacctcggcctcccaaagtgctgggattacaggcatgagcctagggtacagagcatgaccctgtctcaataaaaaaaagaaaagaaaaagaaaaaatcaccaatgcaatgctaaatctagtgggtgaaattttgaggcgtaactagacctttatagagccacaaagtattgccacacaagttatcagtgaaatacaaaaggtaaactgtaactttaccatggacaaacctgacagrtactccttaaccaaagaagcaaagtcaacactggccagcaatgaaaccaagtgacagcctccagatatgctgcataagcctccagatatgttgtactgggaagaagtcagcatcacctgtgtgacattcctgcctgaatgacataacctgaatctaataatgaggaaacatca

SEQ ID NO: 316457 - DNA, 507 bp, Homo sapiens
ttagtaaactgcttatcttcattttatgcaatataccaatcaaatcaaaagctacattagctcctaatgaattaaaatacataaacttttcattaaacacattcttcctttctccgtggtctttctgtttatttccaggtggagattatgtttcagatgatggaggtggcttcaagtccaacattaataaggggagcacatttgaaacttcatttgtactttttcattaaaaaaatcrgtaggtgacaaattatacacagaataatgtaccaacaaattttagctaattagaaaaattctctcataactggtagttttcaaactacgtcccaaagaaatctaaggttccacacaggacactgcaggattaaaagacaaggaagtcacagtttagagctcccatccctcccttagccagacagctggacttctgtcttacagaatacagtttcgtagacgttttattaaaaaggaaagggctattcttcaattttttaaggtatgcca

SEQ ID NO: 316458 - DNA, 507 bp, Homo sapiens
ttagtaaactgcttatcttcattttatgcaatataccaatcaaatcaaaagctacattagctcctaatgaattaaaatacataaacttttcattaaacacattcttcctttctccgtggtctttctgtttatttccaggtggagattatgtttcagatgatggaggtggcttcaagtccaacattaataaggggagcacatttgaaacttcatttgtactttttcattaaaaaaatcggtaggtgacaaattatacacagaataatgtaccaacaaattttagctaattagaaaaattctctcataactggtagttttcaaactacgtcccaaagaaatctaaggttccacacaggacactgcaggattaaaagayaaggaagtcacagtttagagctcccatccctcccttagccagacagctggacttctgtcttacagaatacagtttcgtagacgttttattaaaaaggaaagggctattcttcaattttttaaggtatgcca

SEQ ID NO: 316459 - DNA, 507 bp, Homo sapiens
ttagtaaactgcttatcttcattttatgcaatataccaatcaaatcaaaagctacattagctcctaatgaattaaaatacataaacttttcattaaacacattcttcctttctccgtggtctttctgtttatttccaggtggagattatgtttcagatgatggaggtggcttcaagtccaacattaataaggggagcacatttgaaacttcatttgtactttttcattaaaaaaatcggtaggtgacaaattatacacagaataatgtaccaacaaattttagctaattagaaaaattctctcataactggtagttttcaaactacgtcccaaagaaatctaaggttccacacaggacactgcaggattaaaagacaargaagtcacagtttagagctcccatccctcccttagccagacagctggacttctgtcttacagaatacagtttcgtagacgttttattaaaaaggaaagggctattcttcaattttttaaggtatgcca

SEQ ID NO: 316460 - DNA, 610 bp, Homo sapiens
ttctgtcttacagaatacagtttcgtagacgttttattaaaaaggaaagkgctattcttcaattttttaaggtatgccaccaatgtagttaaagtccctaacttttcataggaggcaacacaggctcagagagattgtagcttgcctgaggtcacgtagtgaattagctacatacaggccggaaatgggcttccggtctccttactgagcctggagttctatgccagctgcttccttcttattcagaaaacagacacagattttaaaatacagctcagaggaaatgcatatgtaaaactgtcacatagctcaataatgtttaggcatgagacagaaaagagtacttctctaaattttaagtttgaaagttatgaaaaaaattagaacagcaattaatgtcagaacttttgttagtagcagtgaatgtactcaatgtataaagaacttttttttttaagtcacaggacagggaacatgaaataaagagcctttagttgaactaagcaagctgaagttgagaaaaattattcctcaaaaggactattaattttctccaaataaaacatggtttaccacaatcaatcaataagtcaattatccatgttgttgg

SEQ ID NO: 316461 - DNA, 610 bp, Homo sapiens
ttctgtcttacagaatacagtttcgtagacgttttattaaaaaggaaagggctattcttcaattttttaaggtatgccaccaatgtagttaaagtccctaacttttcataggaggcaacacaggctcagagagattgtagcttgcctgaggtcacgtagtgaattagctacatacaggccggaaatgggcttccggtctccttactgagcctggagttctatgccagctgcttccttcttattcagaaaacagacacagattttaaaatacarctcagaggaaatgcatatgtaaaactgtcacatagctcaataatgtttaggcatgagacagaaaagagtacttctctaaattttaagtttgaaagttatgaaaaaaattagaacagcaattaatgtcagaacttttgttagtagcagtgaatgtactcaatgtataaagaacttttttttttaagtcacaggacagggaacatgaaataaagagcctttagttgaactaagcaagctgaagttgagaaaaattattcctcaaaaggactattaattttctccaaataaaacatggtttaccacaatcaatcaataagtcaattatccatgttgttgg

SEQ ID NO: 316462 - DNA, 610 bp, Homo sapiens
ttctgtcttacagaatacagtttcgtagacgttttattaaaaaggaaagggctattcttcaattttttaaggtatgccaccaatgtagttaaagtccctaacttttcataggaggcaacacaggctcagagagattgtagcttgcctgaggtcacgtagtgaattagctacatacaggccggaaatgggcttccggtctccttactgagcctggagttctatgccagctgcttccttcttattcagaaaacagacacagattttaaaatacagctcagaggaaatgcatatgtaaaactgtcacatagctcaataatgtttaggcatgagacagaaaagagtacttctctaaattttaagtttgaaagttatgaaaaaaattagaacagcaattaaygtcagaacttttgttagtagcagtgaatgtactcaatgtataaagaacttttttttttaagtcacaggacagggaacatgaaataaagagcctttagttgaactaagcaagctgaagttgagaaaaattattcctcaaaaggactattaattttctccaaataaaacatggtttaccacaatcaatcaataagtcaattatccatgttgttgg

SEQ ID NO: 316463 - DNA, 521 bp, Homo sapiens
agacttcctcaaaaaaaagacgattagtatttgcatgcattaccagctttatcaatatagttctcaaataccaaaaaacttcatcaattggaaagaaggttaaaagttacagaatttttaaaataaaatttattatcttggggtacatgcagtaatttgaacagtcaaaatgtgtacaatgttatgtaatagggctagaatttcattagggcgttaggccaaatcccaactctgagcagctccatctttagaggctcaaatgtctaggttgcttatatttccaccagagtgaagatctggggcttctcttttttcctttatcacccaagccttataaagygacatgcaccaggactctgtcctaagacctgctttcatgatatgaatcctctggacaatctcatccacatcatagctaaaaccacccacatcatagctaaaaccaccgcttttaacatgagggatcctaaatctttatctccagcccaaatctcattcttgagctttagactcattatttt

SEQ ID NO: 316464 - DNA, 473 bp, Homo sapiens
ggtaaaccccaagttttacaaaaaaaaaaaagaaaaaaaaaacagacaaaaaagactagccaggagtggtggtgcacacctgtagtcctagctactagattgatgggggagatcaattgagcccaggtggtcaaggctgcagtaagccatgattgtgccagtgcactccagcctgggcaacagagcgagaccttgtctcaaaaaaaaaaaaaaaaaaaaaaaagaattactccacaaacatttatcaatcaaattgaacatctatacatgaagaggagttagatgtggtttctgccagctgggagctcatcatgtgtgcagaaatggatgctacaaagtgtcacgatrgaggtaagcacagggagccatgggagcacatagaacaaggagctaacccacactgggcagtaagtgaaggcttcttgatggtactgatacctaagctgcagcttaaaatacaactcggggttacc

SEQ ID NO: 316465 - DNA, 473 bp, Homo sapiens
ggtaaaccccaagttttacaaaaaaaaaaaagaaaaaaaaaacagacaaaaaagactagccaggagtggtggtgcacacctgtagtcctagctactagattgatgggggagatcaattgagcccaggtggtcaaggctgcagtaagccatgattgtgccagtgcactccagcctgggcaacagagcgagaccttgtctcaaaaaaaaaaaaaaaaaaaaaaaagaattactccacaaacatttatcaatcaaattgaacatctatacatgaagaggagttagatgtggtttctgccagctgggagctcatcatgtgtgcagaaatggatgctacaaagtgtcacgatagaggtaagcacagggagccwtgggagcacatagaacaaggagctaacccacactgggcagtaagtgaaggcttcttgatggtactgatacctaagctgcagcttaaaatacaactcggggttacc

SEQ ID NO: 316466 - DNA, 480 bp, Homo sapiens
agtcaatcgcctgctcaaatctttccaatagattcctatttcagaataaaaggaaagttccagggcctccgaggccctaggtaaactggcctccaccttcctccctgatctcggctcctacaactctgttccccactactcactcctttcccactatacgtgtatccctgtcacccctcactagtctgaaaatagggttccartgctaaactaataaatcacatagagctacaatgatctttgtacaggacaaagtgatattcaaatgatagtcatggagccttgagatgaaaattatgaacaaattatttgtaaagatattcaaagtaaattacacataacagtgagaagattaaatcaaacaaggctttgataacattcaccacatttgtccctaatgttgatttaataaaaagtatatgcctttaaagaattgagtggtcattgcaacacataatttgagatggacatattttcaga

SEQ ID NO: 316467 - DNA, 612 bp, Homo sapiens
gtcaacattttacagcattcttcaaaggaaatcatgattcccagaatagaagaatataggaaagtgtccaatgccccaattttaagctctgccagccacttctttagtgagactccaaataagtcctagacctgcacatcaacccataacactgggttgatgatatctaacagttgcacagttttacaagatgytaagcattttcctaagaaagcaccctcacatgaacataaaaacaccttaaaatataaaatactatacacatataaaacattgctattattgcatctatacagaattttctccaatttgaattgttttagggagatgaccaattaactggcctgagttccacaaatgatttgcctgtctgtaaatcatgttgttttaggtcagtagttcttaatctcggcttatctgtccctcttcaaacaggggagttaaatatttaatcggggagctttaaaaacctctgatgactggctctcctactctctcctgcccccatattccaagaatattggactggggatttcaaaagctcttctgtggggatctaacatgcagccagtgtggagaactactgtgttaggtgagggtaagacttgcctt

SEQ ID NO: 316468 - DNA, 459 bp, Homo sapiens
atatctaacagttgcacagttttacaagatgttaagcattttcctaagaaagcaccctcacatgaacataaaaacaccttaaaatataaaatactatacacatataaaacattgctattattgcatctatacagaattttctccaatttgaattgttttagggagatgaccaattaactggcctgagttccacaaatgatttgcctgtctgtaaatcatgttgttttaggtcagtagttcttaatctcggcttatctgtccctcttcaaacaggggagttaaatatttaaycggggagctttaaaaacctctgatgactggctctcctactctctcctgcccccatattccaagaatattggactggggatttcaaaagctcttctgtggggatctaacatgcagccagtgtggagaactactgtgttaggtgagggtaagacttgcctttgtaagcca

SEQ ID NO: 316469 - DNA, 602 bp, Homo sapiens
acaaaaaaggatttagaaaattccataaatttagttgtaaagcagcagcagggtatgagaggattgactcaaactttgaaagaagttctactgtgggcaaaatgctatcaagcagcactccatgctacagggaaatcttttggaaagaaagagtcaatcaagtggcaaagtccattgcattatgccaagaaactgccacagccacccaaccttccagaaactaccaccctgatcactcagcagccatcaactttgaggcaagaycctctaccactaaaaagattacaacatgctaagggctcagaagatctttggcattttctgacaatattttaaaattaaggtatgtatattttaaagatacaatgctattgaaacacattatagactataggataacttatatatgcatcaggaaactaaaaattttgtgatttgctttattgtgatatttgctttattgccgtggtctgaaaccaaacccacaatatctctaaggtatgtctgtataagttcctaagcatagtatgggggcatatctaactaatgtgtaccattttaagtagtggctgttcttgaatttacactttcacatgatttta

SEQ ID NO: 316470 - DNA, 602 bp, Homo sapiens
acaaaaaaggatttagaaaattccataaatttagttgtaaagcagcagcagggtatgagaggattgactcaaactttgaaagaagttctactgtgggcaaaatgctatcaagcagcactccatgctacagggaaatcttttggaaagaaagagtcaatcaagtggcaaagtccattgcattatgccaagaaactgccacagccacccaaccttccagaaactaccaccctgatcactcagcagccatcaactttgaggcaagaccctctaccactaaaaagattacaacatgctaagggctcagaagatctttggcattttctgacaatattttaaaattaaggtakgtatattttaaagatacaatgctattgaaacacattatagactataggataacttatatatgcatcaggaaactaaaaattttgtgatttgctttattgtgatatttgctttattgccgtggtctgaaaccaaacccacaatatctctaaggtatgtctgtataagttcctaagcatagtatgggggcatatctaactaatgtgtaccattttaagtagtggctgttcttgaatttacactttcacatgatttta

SEQ ID NO: 316471 - DNA, 579 bp, Homo sapiens
catgtgccactatgcccagctatttattttttatttttattttctagagacaaggtcccactatgctgcycaaactagcctcaaactcctgggctcaagcaatcctcttgacttggcctctgaaagcgctgggattaaggcatgagccaccatacctggcctgtggctgttacttaaaatcatatttttttcatgatagcaatgaaatatctcatttaaattcctgtttttattcacaagctaacctaaataatatttccattcatgtaaatagaactgatatattggctaaataggggttgagcaatgtaataaggaaaacaattttaattttgtctcccaatgtcactttcaagtgtatttagtggagtaaaggttttttctgctgctggataaaagcccaacggaacttgacaaaaaaaatcccatggttggtttaagttgtaaaacagaatttgattcagaaattataaattctagtccaaattttaatctttatttaaaggtaaacttccttcctctctcctgcccccttctatcccttgctgctttataaactgccttggcagggagagcagt

SEQ ID NO: 316472 - DNA, 594 bp, Homo sapiens
aaaatataaaattttatgtataaaatatcttacggtaacccaacttcccccagaagtaaacaattaagtagtagtattatatgaaggcactaaaggaagaagtcattaaattttatgctatagctcaggtgaaaaggaaaatatcttgcatctgtggctaagttataaaccrttgacatcaattagcctctttttgccatagcagtgaaaatgggcaactcttgctgatggctttatcttaaagtgtcttcagatgtgtggttaaatatgcggtcaaagggttttcatcatctaccttgtcattatatatacttcctttttgttgacttctagttaactttgaaaagtcaatccattccaacctaaataagtattttatagagaacatttataaatttataaaataaaaagctgccattaaatattattacagacataatatagttgtacttcttagagatgtatgtaattgttacagaaccttgccaactttcattttcattctccctttattttatttttcatatagatgtagagcagaatattagtcttagtattagtctagtagtactagtattagtctaatagcattag

SEQ ID NO: 316473 - DNA, 594 bp, Homo sapiens
aaaatataaaattttatgtataaaatatcttacggtaacccaacttcccccagaagtaaacaattaagtagtagtattatatgaaggcactaaaggaagaagtcattaaattttatgctatagctcaggtgaaaaggaaaatatcttgcatctgtggctaagttataaaccattgacatcaattagcctctttttgccatagcagtgaaaatgggcaactcttgctgatggctttatcttaaagtgtcttcagatgtgyggttaaatatgcggtcaaagggttttcatcatctaccttgtcattatatatacttcctttttgttgacttctagttaactttgaaaagtcaatccattccaacctaaataagtattttatagagaacatttataaatttataaaataaaaagctgccattaaatattattacagacataatatagttgtacttcttagagatgtatgtaattgttacagaaccttgccaactttcattttcattctccctttattttatttttcatatagatgtagagcagaatattagtcttagtattagtctagtagtactagtattagtctaatagcattag

SEQ ID NO: 316474 - DNA, 594 bp, Homo sapiens
aaaatataaaattttatgtataaaatatcttacggtaacccaacttcccccagaagtaaacaattaagtagtagtattatatgaaggcactaaaggaagaagtcattaaattttatgctatagctcaggtgaaaaggaaaatatcttgcatctgtggctaagttataaaccattgacatcaattagcctctttttgccatagcagtgaaaatgggcaactcttgctgatggctttatcttaaagtgtcttcagatgtgtggttaaatatgyggtcaaagggttttcatcatctaccttgtcattatatatacttcctttttgttgacttctagttaactttgaaaagtcaatccattccaacctaaataagtattttatagagaacatttataaatttataaaataaaaagctgccattaaatattattacagacataatatagttgtacttcttagagatgtatgtaattgttacagaaccttgccaactttcattttcattctccctttattttatttttcatatagatgtagagcagaatattagtcttagtattagtctagtagtactagtattagtctaatagcattag

SEQ ID NO: 316475 - DNA, 594 bp, Homo sapiens
aaaatataaaattttatgtataaaatatcttacggtaacccaacttcccccagaagtaaacaattaagtagtagtattatatgaaggcactaaaggaagaagtcattaaattttatgctatagctcaggtgaaaaggaaaatatcttgcatctgtggctaagttataaaccattgacatcaattagcctctttttgccatagcagtgaaaatgggcaactcttgctgatggctttatcttaaagtgtcttcagatgtgtggttaaatatgcggtcaaagggttttcatcatctaccttgtcattatatatacttcctttttgttgacttctagttaactttgaaaagtcaatccattccaacctaaataagtattttatagagaacatttataaatttataaaataaaaagctgccattaaatattattacagacataatatagttgtacttsttagagatgtatgtaattgttacagaaccttgccaactttcattttcattctccctttattttatttttcatatagatgtagagcagaatattagtcttagtattagtctagtagtactagtattagtctaatagcattag

SEQ ID NO: 316476 - DNA, 457 bp, Homo sapiens
ctggtagttggtgctaactgctggctggtaactccttcatgtgagactccatgtggctcttcgagtgtcctcacatagcatggtgggtgggttctaagacaacattccaagcataaaagtgaaagctacagctcttttaaggcataggcttgaagctacacagtgacacatccaccaaaatctactggccaaaggagtcacaaggccagtccagattcaaggggaagggaagtggactctayctttcaataggaggagtggcaaagagtctgcagccatgcttagtccaccacagtctactctctggccagaaatgatttacattcctcttacatggaaagcacactaaaccctttcccaagccccccaaaaacttcatccccttatggcatcaaattcaggcttgaagtccaggatcttgtcatctaaatcagttccagaatgctgtgggacaaga

SEQ ID NO: 316477 - DNA, 575 bp, Homo sapiens
accacagagcctgatcctttatatttatattcattgaattctcttgacagggagaattcattgagcatttgctgtggtatgggctgaataagataagaaagtatatttcattttctatctatccttaaaacacttataaagttaggaaaatgagaaatttgtacaaaaagtgaacaggaaaaaaatgaaggattaaatagtggagtggaacaactctgaacatctatataatgytcaaaagtttatggagcatttttttcatagtcatttaaatcatacacttgactttaggataaggatacaagctcagagagaaaaaaaattagctgctgatgacacatggctggtgagcaagagcttgatcctataactgacaccaaacatggtgctcttccaaccatccaaagcttcctcttgtaagatgaacaggtatagctcagggaatggagaaggcaacatagataaggtatctctgagccgttagggatatgcaggggctggagcaggaaaaaaatctccagcggggtagtggggagggaaagagcagaggggtgttgcctgaggaagagcagtga

SEQ ID NO: 316478 - DNA, 593 bp, Homo sapiens
agaatgaaattaaaacttcaaacttaaaaaaaagatgtattctgagtaattcatgctatagcttttccatttgatgtctaaatatatgctagaaaaaaatatagttattttgtgctctttgtgaaatgtaatcaatatataatctaagcgagaacttttaaaatcatttggattaggactaatttaattcataggccaataattccaaacaaatcacttatatcagccaggcaatatttagaaaggctktcatcatctgcataaaagacaattcacttgacagcactccttttttgggcaatgactcaaatcagctagactgaaaataaatctaaagggtacacagctgtcatgtagctgcaagtagccttctgagcaattacttgattcatttttccctatttgtacaactggttttgcaaacaggattgcaatccaacaaatgaatgccccgcaccccctcccctccccgcccactatgaagaaagctttttgctgtccttgggaaggctctagtggattcctttgccctgatgggcatgataaactgcacatggtggtttcttgattttatttaatgagaaacagatctt

SEQ ID NO: 316479 - DNA, 521 bp, Homo sapiens
taaactggctattttggctgtcagctcacacattattttatcatgattcttaacctctttacattgaattacaacatgctcctttagctcagtgaagttagttattaccaacattctgaagcctacttctgtcatttcagccatctcagcctcagcccaattctgagcccttgctggagaagtgttgcagtcatttggaacaaaaagggccctctggctttttgagttttcagcatttttgcaatgattctttctcatctttgtgggyttatctgcctttgatttttgaggttgctgactttcagattttttttttttttttggtggtggtggttattgttttctgtttgtttgtttttcttctaacagtctggccactcttccataggtctgctgtggtttgctggggtgctactcctgaccctagttgccttagtttttcccgtacctgggggtatcaccagtgaaggctgtaaaaaggcaaagatggcagcctgccccttcctctggaagctctgttc

SEQ ID NO: 316480 - DNA, 305 bp, Homo sapiens
gaagtgtggcctgcagaacaatgctgctcagctccctggattctgaccacttcctaggggtatgtgcagacctcttgccttgcctgagttgcaaacatgtttgttggaaatcccagtgccggagtacgtaaagcacctgggtctctgtgcatgcctgaacagctgctctgccaagactccacatagctcagtgtgttggacctaaggccctggtggtatgggctcacaaagggaatctactgatccatggrttacaaagatccatgggagaagcctggtttcctggggttgcacaatcactcatg

SEQ ID NO: 316481 - DNA, 541 bp, Homo sapiens
tcactgtaaccatctatgtggtttatatctgttttatttctgctatacaattaagcttaggaagaagaaattgtgtattaccaaaatatacacattccaaaatacctaacttttttttttgcatagaatgagaacttagtatatatttggaaaataaatagatggatgaatgaataataaataaagatgctggagtgcagtgaaaggaatgttaattggaataagaagaggtaggtttacttgttgtctctgcctttgggcaagtgttttaacgttttctcagtgccyttatttgtgaaactgaagtaaatggctacctcaaggagtgttgatctctgcccgtggacaagtattttaaatgttttctgtgtctttatttgtaaaatgcgaacaaatgactacctcaaggagatctgaaacttaaaaacataagtgcacatttatcttaatgtgcattgtagaataatatacaaatataaggcagccacttatattttaaaaacctgtggtggtaggggtggggaatatatgcctgtaaagg

SEQ ID NO: 316482 - DNA, 712 bp, Homo sapiens
ctcatgggttgacctcgtagcactggcagcaatacatgagacttagaggagacaggactctcaaaccatcctagtcaaccatcagctctaaagataaatagagtgacatatgaggcagacagaaggcttttatttccagaatttctgcagaggtttttggagtaaacattttgtgcatttaaaatgtctcttaatattcaggaatctttcttagtctttggttttgtctatattctggccatttctaatttcaccagatgaccatggaaggttggttggaatttggaatgcagcccagggaaatactgctcacctaagtagytcttgtttaactttagtggaggagaaggtaaaaatgaatgcccactctgtggatgaaggtaggttttggagctcatttattcatctctttcccaggttggcacgaattaaaataaaaaaattaatctcactctgtctccagctattgtaaaacaatttctgatttttgtttgtcttttcttattctttttctcaaactctccagcttcactaaatttaatttatgatgttttaaactaaataaactgaaaaagacttcgagatgaatcattttctatttataatttgtttaggtatcccagtttttcagtcatatctcttgaaagactcaggatttttatcataaccttttaaaatttggtatattacccttgaggggtaagtgcgatgt

SEQ ID NO: 316483 - DNA, 354 bp, Homo sapiens
gaagatgctcaattatgtgaaattagtaaatatagaagaagcatcagttgattactgtagcagttcaacactaaggaatatgatggttggtttggttaaattttacttaaagtgattcaactwaaacttggggggaaaaaatcttaggtcaacaattagtcggtacttagtctctgccaggtgtggactgaactatccaaagcatgctggagttggaaagagccaatgggagaaatgaggcaagggtcacgctgagttcagcccagaatttggggcatgctctacaaaaccgtgctgcctagggctggccacagagtcactgggggcaaaaggactaacaaaactgtaaaagtg

SEQ ID NO: 316484 - DNA, 594 bp, Homo sapiens
gtggacatggaaggtgggagaaatggaggcaagatccatccctatcacagtgccaaagagtaattggattatggyggcattgattgtaatggagagaagcacaaggcatgggaaaggattgagctaggtttgctgaaatcttagaccagtccaatttacacctaggtcttcttacttccacatttgtgctttttttttttttcttatattagtttgaagacttctagccagaaggtgaataatgtagaaattccttctgaagatcatctatgtgacactgggttttgttatttttggcatcactacttagaaacagaaatattcagctgtgtttcttgaaatgattggactttagggtttggtaagcatttcctgagatggcatgtgtcagtggccagaaaaaaaaaaaaaaaaggaaatctggtattgagaaggattctaaagtaagatctcagcctctgggaaaaagccaggggtatttaattaacaatgtcagccatagatgtaaaagaaaaccatcctgttctcggggacttcaattcattttgctgaagacatttggttgtcagagaattctaggatgtagagagataa

SEQ ID NO: 316485 - DNA, 554 bp, Homo sapiens
tttgagtctatgaaacaaagtgataatagcttcacaggaaaaaaagcctgataaattttattatgtgcacatgtatgcacaggagtcatataaaatattttaaaaactcaaagaaatggccagatggttaatgcttatataccatcttgaggtaacagaaagaacaggggctgagagcatggccaaaaacaggtaatggtggtaaatcaggttayggtggcaagacaggttatgggaaggagagaagaggaggcctggctagcaaaggtggtcttgttatctagatgatcctctctggtagcagccctcagatagaatagatggtaaatgtttctttcagacctttaaagctgtcagattctcagttaatctttcctagatccagacagacaaggtggggcctcagagaaagcctggctgcatcagtgcagatactctacagacacaaatctcccgaacaaatgacagctttactggcctacttctgttttgccctccgaacagccatctcaaaatatgtcaaagaagtatattttggggtgcaatattttggt

SEQ ID NO: 316486 - DNA, 653 bp, Homo sapiens
gttctggtggattcagatttccttacctctttcttctactgcctttggcttatctgccctgaatctcttcctataaactttcacctttgtaaactttttttctccaggcaaaatctttcacctctggaagcacagtgtgttgcctcttggaaatccagtcttattccacaaaagagaagtatgtaaacatagctgtttattaattctctctctttttctctttttgtcttcctcctccctccctctctctgtctccctctgtacctctgtgtttctctctgtcagttctgtaaggatcagttcaactctcttaaaatacccctgctgtcctcatgtggacatctgctgagaagcatgatgtcttcgaaattgatggccaagtggttaaagaggaattggtggaattatcacctggctcccaccagtgggctcctkgtgagttgcctccatctctggctgctgccaggactttgacctacagtcacagctttaccaggtctttggtttaatttgatagactcagctcatttcctggtgctggtagcatatgagtagttcttccttattttcttgtctcagtaccaaggtctgtagtcaaaggagaaagtaaaagcaatttcttcattaaagtgcatgaagcttctccatgtaga

SEQ ID NO: 316487 - DNA, 653 bp, Homo sapiens
gttctggtggattcagatttccttacctctttcttctactgcctttggcttatctgccctgaatctcttcctataaactttcacctttgtaaactttttttctccaggcaaaatctttcacctctggaagcacagtgtgttgcctcttggaaatccagtcttattccacaaaagagaagtatgtaaacatagctgtttattaattctctctctttttctctttttgtcttcctcctccctccctctctctgtctccctctgtacctctgtgtttctctctgtcagttctgtaaggatcagttcaactctcttaaaatacccctgctgtcctcatgtggacatctgctgagaagcatgatgtcttcgaaattgatggccaagtggttaaagaggaattggtggaattatcacctggctcccaccagtgggctcctggtgagttgcctccatctctggctgctgccaggactttgacctacagtcacagctttaccaggtctttrgtttaatttgatagactcagctcatttcctggtgctggtagcatatgagtagttcttccttattttcttgtctcagtaccaaggtctgtagtcaaaggagaaagtaaaagcaatttcttcattaaagtgcatgaagcttctccatgtaga

SEQ ID NO: 316488 - DNA, 557 bp, Homo sapiens
gtcctctcaaaccctgccactactttatcaactaagttgatgtaatattctaarccctgggttgttgttgccacatgttcataccatcttcaccgggagtagatttcatctcaagaaaccactttctctgctcatccataagaagcaactcctcatccattcaagttttctaatgagatgcagcaattcagtcacttcttcgggctgtagttacaattctagttctcttgctatttccgccacatctccagttacttcctccacttgtgtcttgaatccctcaaagtcatctatggaggttggaatcaacttcttccaagctgcagttaacattgatattttgacctcctcccatgaatcagaaatgttcttaaaggcacctggatggataagtttttttaaagggttttcaatttactttgcccagatttatcaggggaattactactatctatgtcagctataacttcacaaaatgtatttgttaagtaatgaaaattgagagttgaaattatttcttgatccatgggctacagaatgcatgttgtgttaataga

SEQ ID NO: 316489 - DNA, 557 bp, Homo sapiens
gtcctctcaaaccctgccactactttatcaactaagttgatgtaatattctaaaccctgggttgttgttgccacatgttcataccatcttcaccgggartagatttcatctcaagaaaccactttctctgctcatccataagaagcaactcctcatccattcaagttttctaatgagatgcagcaattcagtcacttcttcgggctgtagttacaattctagttctcttgctatttccgccacatctccagttacttcctccacttgtgtcttgaatccctcaaagtcatctatggaggttggaatcaacttcttccaagctgcagttaacattgatattttgacctcctcccatgaatcagaaatgttcttaaaggcacctggatggataagtttttttaaagggttttcaatttactttgcccagatttatcaggggaattactactatctatgtcagctataacttcacaaaatgtatttgttaagtaatgaaaattgagagttgaaattatttcttgatccatgggctacagaatgcatgttgtgttaataga

SEQ ID NO: 316490 - DNA, 557 bp, Homo sapiens
gtcctctcaaaccctgccactactttatcaactaagttgatgtaatattctaaaccctgggttgttgttgccacatgttcataccatcttcaccgggagtagatttcatctcaagaaaccactttctctgctcatccataagaagcaactcctcatccattcaagttttctaatgagatgcagcaattcagtcacttcttcgggctgtagttacaattctagttctcttgctatttccgycacatctccagttacttcctccacttgtgtcttgaatccctcaaagtcatctatggaggttggaatcaacttcttccaagctgcagttaacattgatattttgacctcctcccatgaatcagaaatgttcttaaaggcacctggatggataagtttttttaaagggttttcaatttactttgcccagatttatcaggggaattactactatctatgtcagctataacttcacaaaatgtatttgttaagtaatgaaaattgagagttgaaattatttcttgatccatgggctacagaatgcatgttgtgttaataga

SEQ ID NO: 316491 - DNA, 553 bp, Homo sapiens
tttagagtttatttgaggaagaaaacatgaattggaaagcaccaaacccaaggaagttcagcattaggatgacaaagcatcagaggcaagtatttataaggcaactgtggaagcaaaataaagaaattactttagcagttacaagattgccttttttagtttaccttgttggaaagtctctagtcatgtaatcatactttatttcactgcttatgactgagtcggggcagaaaaacttctacctccatccttttagagtccttggtgggagaaaaattgacataagtaagattaagaggaaagacacataggatgttttacatggcatgagagccatgtaaagaaatgaagacccaaagaagtgtttagaattagttactygtatagtggattaaacaaagaacaattggcagtgaagaagtagctaaattatttggagaggcttaaaagataaaactattttaacaaggtctgtacagaattctcttggtttcaacttcgcatcctgaatacaaggatattgcctttccttctagtatagagagtgtgtctt

SEQ ID NO: 316492 - DNA, 553 bp, Homo sapiens
tttagagtttatttgaggaagaaaacatgaattggaaagcaccaaacccaaggaagttcagcattaggatgacaaagcatcagaggcaagtatttataaggcaactgtggaagcaaaataaagaaattactttagcagttacaagattgccttttttagtttaccttgttggaaagtctctagtcatgtaatcatactttatttcactgcttatgactgagtcggggcagaaaaacttctacctccatccttttagagtccttggtgggagaaaaattgacataagtaagattaagaggaaagacacataggatgttttacatggcatgagagccatgtaaagaaatgaagacccaaagaagtgtttagaattagttacttgtatagtggattaaacaaagaacaattggcagtgaagaagtagctaaattatttggagaggcttaaaagataaaactattttaacaaggtctgtacagaattctsttggtttcaacttcgcatcctgaatacaaggatattgcctttccttctagtatagagagtgtgtctt

SEQ ID NO: 316493 - DNA, 618 bp, Homo sapiens
gtaatagtcacctcttgaaaaactgggtatccatcttctcaagcatttatcatttttttgtttcaaacartccaattacattattttagttattttaaaatgtacaattaattattgactatagtgcctgtgcctgtggtgtattactcaagaaatctttgctcagcccaatgtccttcatagtttccccagtgttttctcttagtagttttatagtttgaggttttgaatttaaatcttaatccattttgatctgatttttatatagaacaagagtaggggtctaatttcattcttctgcatatggatatccagtttttccaagaccatttattaaagggactgtcctttccccaatgtatattcttgacacctttgctgaaaatgggttcactggagatgtatacacttattgctaggttctctattctcttccattggtctctgtgtatgtttttatgccagtaccatgctgttttggttatatagctctgtagtataatttgcagtcaggtaatgtggttcctccagttttgttcttttcactcaggatagcttggtttcttttggatcttttgttgtttcatataaattttaggattgttttttctatttctg

SEQ ID NO: 316494 - DNA, 618 bp, Homo sapiens
gtaatagtcacctcttgaaaaactgggtatccatcttctcaagcatttatcatttttttgtttcaaacaatccrattacattattttagttattttaaaatgtacaattaattattgactatagtgcctgtgcctgtggtgtattactcaagaaatctttgctcagcccaatgtccttcatagtttccccagtgttttctcttagtagttttatagtttgaggttttgaatttaaatcttaatccattttgatctgatttttatatagaacaagagtaggggtctaatttcattcttctgcatatggatatccagtttttccaagaccatttattaaagggactgtcctttccccaatgtatattcttgacacctttgctgaaaatgggttcactggagatgtatacacttattgctaggttctctattctcttccattggtctctgtgtatgtttttatgccagtaccatgctgttttggttatatagctctgtagtataatttgcagtcaggtaatgtggttcctccagttttgttcttttcactcaggatagcttggtttcttttggatcttttgttgtttcatataaattttaggattgttttttctatttctg

SEQ ID NO: 316495 - DNA, 618 bp, Homo sapiens
gtaatagtcacctcttgaaaaactgggtatccatcttctcaagcatttatcatttttttgtttcaaacaatccaattacattmttttagttattttaaaatgtacaattaattattgactatagtgcctgtgcctgtggtgtattactcaagaaatctttgctcagcccaatgtccttcatagtttccccagtgttttctcttagtagttttatagtttgaggttttgaatttaaatcttaatccattttgatctgatttttatatagaacaagagtaggggtctaatttcattcttctgcatatggatatccagtttttccaagaccatttattaaagggactgtcctttccccaatgtatattcttgacacctttgctgaaaatgggttcactggagatgtatacacttattgctaggttctctattctcttccattggtctctgtgtatgtttttatgccagtaccatgctgttttggttatatagctctgtagtataatttgcagtcaggtaatgtggttcctccagttttgttcttttcactcaggatagcttggtttcttttggatcttttgttgtttcatataaattttaggattgttttttctatttctg

SEQ ID NO: 316496 - DNA, 618 bp, Homo sapiens
gtaatagtcacctcttgaaaaactgggtatccatcttctcaagcatttatcatttttttgtttcaaacaatccaattacattattttagttattttaaaatgtacaattaattattgactatagtgcctgtgcctgtggtgtattactcaagaaatctttgctcagcccaatgtccttcatagtttccccagtgttttctcttagtagttttatagtttgaggttttgaatttaaatcttaatccattttgatctgatttttatatagaacaagartaggggtctaatttcattcttctgcatatggatatccagtttttccaagaccatttattaaagggactgtcctttccccaatgtatattcttgacacctttgctgaaaatgggttcactggagatgtatacacttattgctaggttctctattctcttccattggtctctgtgtatgtttttatgccagtaccatgctgttttggttatatagctctgtagtataatttgcagtcaggtaatgtggttcctccagttttgttcttttcactcaggatagcttggtttcttttggatcttttgttgtttcatataaattttaggattgttttttctatttctg

SEQ ID NO: 316497 - DNA, 617 bp, Homo sapiens
taatgtggttcctccagttttgttcttttcactcaggatagcttggtttcttttggatcttttgttgtttcatataaattttaggattgttttttctatttctgtgaagaatgtccttgatattttgatagagagtctattgaatctgtaagtttctttagggagtatggacagttgattcttcaaatcygtgaacatgcaatatctttctattttttgagtcctcttcagtttcttgcatcaacgctttatggtttgtgttgtagagatcttttacttctttgattaagtttatccctaggtatattattttatttgtagctattgtaaatgaaattactttcttaatttcaggttttttgctattggcacatacaaatgctacagatttttgtatgttaattttgtgttctgcaaacttattaaatttgtttattagttctaagaaagtttttgtggagtctttaggtttttccaaatataagagcatatcaattgcaaacaaaaataacttgacttcttccttttcaattcaaatgctctttttttctttgcttatctgaatgctctagctaggacttccagtactatgttgaataacagtggtaaaagtggat

SEQ ID NO: 316498 - DNA, 617 bp, Homo sapiens
taatgtggttcctccagttttgttcttttcactcaggatagcttggtttcttttggatcttttgttgtttcatataaattttaggattgttttttctatttctgtgaagaatgtccttgatattttgatagagagtctattgaatctgtaagtttctttagggagtatggacagttgattcttcaaatctgtgaacatgcaatatctttctattttttgagtcctcttcagtttcttgcatcaacgctttatggtttgtgttgtagagatcttttacttctttgattaagtttatccctaggtatattattttatttgtagctattgtaaatgaaattactttcttaatttcaggttttttgctattggcacatacaaatgctacagatttttgtatgttaattttgtgttctgcaaacttattaaatttgtttattagttctaagaawgtttttgtggagtctttaggtttttccaaatataagagcatatcaattgcaaacaaaaataacttgacttcttccttttcaattcaaatgctctttttttctttgcttatctgaatgctctagctaggacttccagtactatgttgaataacagtggtaaaagtggat

SEQ ID NO: 316499 - DNA, 605 bp, Homo sapiens
agacagagaataaaaaataactgttttgagaaaactcaaataaattcaagttaacacagagaaggagttcagaattctatcagataaatttaacaaagaggttgaaataattaaaggggatctagcagaaattctagagttgaagaaaaatgcaattgayatactgaagaatgtatcagaatctcttaatagcagaactgatcaaacagaagaatgagtgagcttgaagacatattatttgaaaatacacagccagaggagacacaggaaaaaataatgccaaagaatgaagcatgcttactaaatctagaaaatagcttcaaagaggcacatctgagttattggccttaaagaggaggtagagaaagagataggagtagaaagtttatttaaagggataatatttaagaactttccaaacctagagaaaaatatcaaattcaagtacaagaagattatagaacaccaagaagatttagtccaaacaatactacctcaaggtacttaataatcaaactcccaaaggacaaagataaagaaagaatcctaaaagaagcaagagaaaagaaacaatgtacagtagagctccaatacctcagtcagca

SEQ ID NO: 316500 - DNA, 605 bp, Homo sapiens
agacagagaataaaaaataactgttttgagaaaactcaaataaattcaagttaacacagagaaggagttcagaattctatcagataaatttaacaaagaggttgaaataattaaaggggatctagcagaaattctagagttgaagaaaaatgcaattgatatactgaagaatgtatcagaatctcttaatagcagaactgatcaaacagaagaatgagtgagcttgaagacatattatttgaaaatacacagccagaggagacacaggaaaaartaatgccaaagaatgaagcatgcttactaaatctagaaaatagcttcaaagaggcacatctgagttattggccttaaagaggaggtagagaaagagataggagtagaaagtttatttaaagggataatatttaagaactttccaaacctagagaaaaatatcaaattcaagtacaagaagattatagaacaccaagaagatttagtccaaacaatactacctcaaggtacttaataatcaaactcccaaaggacaaagataaagaaagaatcctaaaagaagcaagagaaaagaaacaatgtacagtagagctccaatacctcagtcagca

SEQ ID NO: 316501 - DNA, 605 bp, Homo sapiens
agacagagaataaaaaataactgttttgagaaaactcaaataaattcaagttaacacagagaaggagttcagaattctatcagataaatttaacaaagaggttgaaataattaaaggggatctagcagaaattctagagttgaagaaaaatgcaattgatatactgaagaatgtatcagaatctcttaatagcagaactgatcaaacagaagaatgagtgagcttgaagacatattatttgaaaatacacagccagaggagacacaggaaaaaataatgccaaagaatgaagcatgcttactaaatytagaaaatagcttcaaagaggcacatctgagttattggccttaaagaggaggtagagaaagagataggagtagaaagtttatttaaagggataatatttaagaactttccaaacctagagaaaaatatcaaattcaagtacaagaagattatagaacaccaagaagatttagtccaaacaatactacctcaaggtacttaataatcaaactcccaaaggacaaagataaagaaagaatcctaaaagaagcaagagaaaagaaacaatgtacagtagagctccaatacctcagtcagca

SEQ ID NO: 316502 - DNA, 574 bp, Homo sapiens
acactaatagagcaatctatagatgcaatgaaatccttgttaagataccaatgacactcttcacacaaaaaaattataaactttatatagaaccacaagagatccagaatagccacagccatcctaagcaaaaagaacaaaactagaggaatcacattacctgacttcaaattatgctacagaggtatggtaaccaaaacagtatggttctggcatagaaacagacacatagaccaatgaaagagaatagagaacccagaaacaaatccacacaactacagagacctcattttcgacaaaggtgccaagaacatacactagggaacagtctcttcaataaacagcactgagaaaactggatatccacatgcagaagaatgaaactatacccctatctctcaccatataaaaaaactcaaaatggattaaagactttaatctaagacctcaaactatgaaactacttcaaaaaaccactggggaaaatctccaggacattggtctgggaaaaaaaaatctcttgagcaataccccacaagcacyggcaaccaaagcaaaaattgacaaattggat

SEQ ID NO: 316503 - DNA, 583 bp, Homo sapiens
aagtttttaaaaaatagtctggtgtggtgacatgtagctctagtcctagctgcttaggaggatggggcaggaagaataccatgagcacaggagctttagattacagtgagttacgatcacaccactgaactccaacctatgtgacagagtgagaaactgtctcttaagaaagaaaagagaagaatattctggaatagttgtgtaaaaggacagtaaccttccatgtttctttaaaggattaaaaattatgatcaccttaatgtgtatttttattttaaaaaatgacgaagaatgtaattttgctccgaagtcataatagatcggcgataattagttttgtgataatagttttgaaataattggcttcaaagagtttttttaattataatagtgtataagaaaagattcttcagtgatatttttacacaaaaattgattctcctgtcatccaaaaggcaaaggtgtttaagccrgtagacttcagtcaataagctaaaggaagaaacagtcaagcatgaggttgaggtaggaagtgaaacttgaatagcttgggaataaagacttgaccacctgacctaatgca

SEQ ID NO: 316504 - DNA, 599 bp, Homo sapiens
tgcatgtctctcacttaaaatcaaaggctagaaatgattaagcttagtgaggaagacatgttgaaaaccgagaaaggttgaaatctaggccctgtgtcaaaaagttagtcaagttataaattcaaggggaaatttcttaaaggaaattaaaagtgctacacacttttgtacttttgctacactccagtgaatacacaaatgataaaacaaaacagccttattgctgatttggagaaagtttgartagtttgggtagacgatcaaaccagtgaccacattcccttaagccaaagcctaatttagagcaaggtcctatctctttaattctatgaaggctgatagaagtgaagaagctgcagaagaaaagtatgaagctagcagaggttggtccatgaagtgtaaggaaataagccgtttccataacataaaagtgcaaagtgaaacagcagcaagtgctaatgtaggaggagctgcaacaagttatccagaagatttagctaaaatcattgatgaaggtagctacactaaacaacagattttcaaggtgaacaaaacagccttctattggaaaaagatgccattgagtacttttaacacta

SEQ ID NO: 316505 - DNA, 599 bp, Homo sapiens
tgcatgtctctcacttaaaatcaaaggctagaaatgattaagcttagtgaggaagacatgttgaaaaccgagaaaggttgaaatctaggccctgtgtcaaaaagttagtcaagttataaattcaaggggaaatttcttaaaggaaattaaaagtgctacacacttttgtacttttgctacactccagtgaatacacaaatgataaaacaaaacagccttattgctgatttggagaaagtttgagtagtttgggtagacgatcaaaccagtgaccacattcccttaagccaaagcctaatttagagcaaggtcctatctctttaattctatgaaggctgatagaagtgaagaagctgcagaagaaaagtatgaagctagcagaggttggtccatgaagtgtaaggaaataagccgtttccataacataaaagtgcaaagtgaaacagcagcaagtgctaatgtaggaggagctgcaacaagttatccagaagatytagctaaaatcattgatgaaggtagctacactaaacaacagattttcaaggtgaacaaaacagccttctattggaaaaagatgccattgagtacttttaacacta

SEQ ID NO: 316506 - DNA, 532 bp, Homo sapiens
caattttttttttcacaaatttcttactggactctcataggatctattccccattgagttccttataatttttcttcatttctgaagtgattttggtgtctatttttctgaaattgttccatttcctattttatcatgtttttttaatagagatcatccctggtctttgagcatcttttctccaaattcttttatttctgtcctataaccttccttcatgctttgatctttcattaagagggctacagtgttcatctgctttgtgattttttttttttttttttttggtgagtcttcctcatttatagaaaattttgtattgtaacttttattgatgcttgtttattccttttgttgtcactcatattggaatgagttggattttctgggactaaggttaagtatcccttatgcaaaatgcttgggatcagaagtgttttgaattttarctttctttttggattttgcaatatttgcagttacaacagttgaacttcactaatccaaaaaataaaaataaaactgaaatgct

SEQ ID NO: 316507 - DNA, 559 bp, Homo sapiens
taatcaagagtacaaggtgtctaaattgaaggcacaactctgcctacgacaagtcaaatatctaggcctaatcttagccagaggaacaagggccaccaacaaggaatgaatacagcctatrctggcttattctcactctaagacattaaaacagttgttgaggttccttggaatcacaggcttttgctgactatggatccccgaatacagcgagatggccagggcagtccatactctaatcaaggagacccatagggcaaatgctcatctagtagaatgggaaccagaggcagaaacagccttcaagaccttaaagaagaccctagtacaagctccagctttaagccttcctacaggacaatacttctctttatacatcacagagagagcaggaatagcttgtggagtccttactcagactcatgggacaaccccacaaccagtggcatacttaagtaaggaaattgatgtagtagcaaaaagctggcctcactgtttacaggtagttgtggtggtggacatcttagtatcagaggctatcaaaataatacaaggaaag

SEQ ID NO: 316508 - DNA, 509 bp, Homo sapiens
actcttgcaagaatggccataataaaaataaaaataaaaaacagcaaatgttggcatggatgcggtgatcagggagcacttctacactatttgtgggaatgtaaactagtagagacattatggaaaacagtatggagatttcttaaagaacgaaaagtagaactaccatttgatccagcaatcccactactgggtatctatccagaaaaaaagaagtcattattcgaaaaagatacttgcacatggatgtttatagcagcacaattcacaattgcaaaatcgtggaaccaatccaaaagccaacccatcaatcaacaagtggataaagaaactgtggtgtgtgtgtgtgtgtgtgtgtgtgtgtgtgtgtgtgtgtgtgtrtataaaatggaatactacacagccgtaaaaagaatgaattaacgacatttgcagtgacctggatgagattggagactattattctaagtgatgtaactcaggaatagaaaaccaaacatcataaacat

SEQ ID NO: 316509 - DNA, 385 bp, Homo sapiens
gtcccagctactcaggaggctgaggcaggagaatgctgtgaacctgggaggtggagcttgcagtgagcggagaccgtgccactgcactccagcctggsagacagagcaagaccctgtctcaaaaaaaaaaaaaaaggcgaggggcaagagtactaatgactatttaatgtatgtacctatgtaacaaacactaaagaagcatatgtcaggcatttttctaaatgctttacaaacattaactcatttaaaatataggcttgcaaatagcaactgcaatcccaaaaggcagtaatcggacctcctcatgtctgcctccttctatcatgcagtgtttaaattaggatcctcaccagagtgttgctgggaaagtcacttacatttcagg

SEQ ID NO: 316510 - DNA, 453 bp, Homo sapiens
ttggaactgggtaatgggcagaggctgaaagagttttaaggtgtgtgctagaaaagctgagattgttatgaaaggattattaaggattgtgaagagattctgatgagggctcggaaacaaaagagaacatctgtagatagagcgtctattcttagagaatacatatataattataaacaggatrttggtagaaatgctggcaaagattactctggtgaggtcttagatgtaaatgggtgcacattattgttataaagtgagaaataatttggctgaactgtgttctaatgttttgtggaaggtagaatttgtgaatggtgaaactgtatatttagctaaaatttctaagccaaatattgaagaaatggcttggttcttcctgacttcctatagtaaaagatgagaagagagaaagaaagtgaagaaggaactattaagcacaaagaaacccga

SEQ ID NO: 316511 - DNA, 521 bp, Homo sapiens
tctagtttatgcctgtcctaccactgtattttggaaggacgtaatttgtcttgcatcacaggttcacagccatagaggattttagcctcaggataaattgtacctcatgtcttatatctgatttggatgatatttataaayaactttgaactttagagttgatgctgaagcaagttaagacttttggggcttttgagatggaatgatatattttgtacgcaagaagattgtacatttaagaaatcagggttataatgttatacagtgaacatttgtgtccttacaaaatcatatgttgaagccctaactcccaaatatttagtatttatagtgtttggaagaagggcctttgggggatgattaaatttagatgagatcatgtgagagggcccccacgatggacttaatatccttataaggggagaaaagagaccagaattcactccctgtcccccttcactatgtgaggacacaatgagaaggggaccatctgcaagactggaagagagtcatcaacataa

SEQ ID NO: 316512 - DNA, 570 bp, Homo sapiens
agattataatactaaaaatattttagaaaaatatcctactgattccattaatcatatctcaacattatgtcrtcagtttagataatgttgataattatattcaaagatggcattaggtggaactatattttacattttttccaggagtgtggatagattcattttcagtcatgtatatagtttcatttaattgactttttaaaaccaagacttaaatacaatgaaaattgtgattgagaattagcattgcatttcatggctgttgtaaaaaattatattaactgttctatatggaaattaaaaaaaactttgagatggaaaataattcaatgaagagcaccatgaagtatagtagtatataacttgaaaaaaatagagaataaaagaatcacagtctccatgctcttctatagaaatttatgtaaatatgtttataatctagaaatatgaaacagaaatgaaacaaagtctttattgtggccaggcacggtggctcatacctgtaatcctcacactttgggaggctgaggtgggcagatcatttgaggtgaagtttgcaaggagccaaga

SEQ ID NO: 316513 - DNA, 570 bp, Homo sapiens
agattataatactaaaaatattttagaaaaatatcctactgattccattaatcatatctcaacattatgtcatcagtttagataatgttgataattatattcaaagatggcattaggtggaactatattttacattttttccagkagtgtggatagattcattttcagtcatgtatatagtttcatttaattgactttttaaaaccaagacttaaatacaatgaaaattgtgattgagaattagcattgcatttcatggctgttgtaaaaaattatattaactgttctatatggaaattaaaaaaaactttgagatggaaaataattcaatgaagagcaccatgaagtatagtagtatataacttgaaaaaaatagagaataaaagaatcacagtctccatgctcttctatagaaatttatgtaaatatgtttataatctagaaatatgaaacagaaatgaaacaaagtctttattgtggccaggcacggtggctcatacctgtaatcctcacactttgggaggctgaggtgggcagatcatttgaggtgaagtttgcaaggagccaaga

SEQ ID NO: 316514 - DNA, 570 bp, Homo sapiens
agattataatactaaaaatattttagaaaaatatcctactgattccattaatcatatctcaacattatgtcatcagtttagataatgttgataattatattcaaagatggcattaggtggaactatattttacattttttccaggagtgtggatagattcattttcagtcatgtatatagtttsatttaattgactttttaaaaccaagacttaaatacaatgaaaattgtgattgagaattagcattgcatttcatggctgttgtaaaaaattatattaactgttctatatggaaattaaaaaaaactttgagatggaaaataattcaatgaagagcaccatgaagtatagtagtatataacttgaaaaaaatagagaataaaagaatcacagtctccatgctcttctatagaaatttatgtaaatatgtttataatctagaaatatgaaacagaaatgaaacaaagtctttattgtggccaggcacggtggctcatacctgtaatcctcacactttgggaggctgaggtgggcagatcatttgaggtgaagtttgcaaggagccaaga

SEQ ID NO: 316515 - DNA, 570 bp, Homo sapiens
agattataatactaaaaatattttagaaaaatatcctactgattccattaatcatatctcaacattatgtcatcagtttagataatgttgataattatattcaaagatggcattaggtggaactatattttacattttttccaggagtgtggatagattcattttcagtcatgtatatagtttcatttaattgactttttaaaaccaagacttaaatacaatgaaaattgtgattgagaattagcattgcatttcatggctgttgtaaaaaattatattaactgttctatatggaaattaaaaaaaactttgagatggaaaataattcaatgaagagcaccatgaagtatagtagtatataacttgaaaaaaatagagaataaaagaatcacagtctccatgctcttytatagaaatttatgtaaatatgtttataatctagaaatatgaaacagaaatgaaacaaagtctttattgtggccaggcacggtggctcatacctgtaatcctcacactttgggaggctgaggtgggcagatcatttgaggtgaagtttgcaaggagccaaga

SEQ ID NO: 316516 - DNA, 554 bp, Homo sapiens
caggcggtggaggactgggggagggttagcattaggagaaatacctaatgtaaatgatgagttgatgggtgcagcaaacaaatatggcacatgtatacatatgtatcaaacctgcacgttgtgaacatgtaccctagaacttaaagtataataataaaataaaataaaataaaataaaataaaataaaaaagatttgggagctacatcatccaagcactgtagagaatgagggaaaaaaaaggccagtgccccctgttcaatctcctkcataattgtacttctggataaggagactaacaatatttgctaggaagaagaagctttatctttgaaatgcttttggcagaatgttcttggcaaagcattatctatagcaagtggaaccgcagatctatgaatatggctttctggagatatcaggtagacaacataactctctggagtataaaacggaggtgttttgtaattaaatgctgctagcatgtgagatgatcatgtgcccctcacataaagacctcacctattccaggacagagggaaggacatgaatagt

SEQ ID NO: 316517 - DNA, 554 bp, Homo sapiens
caggcggtggaggactgggggagggttagcattaggagaaatacctaatgtaaatgatgagttgatgggtgcagcaaacaaatatggcacatgtatacatatgtatcaaacctgcacgttgtgaacatgtaccctagaacttaaagtataataataaaataaaataaaataaaataaaataaaataaaaaagatttgggagctacatcatccaagcactgtagagaatgagggaaaaaaaaggccagtgccccctgttcaatctccttcataattgtacttctggatraggagactaacaatatttgctaggaagaagaagctttatctttgaaatgcttttggcagaatgttcttggcaaagcattatctatagcaagtggaaccgcagatctatgaatatggctttctggagatatcaggtagacaacataactctctggagtataaaacggaggtgttttgtaattaaatgctgctagcatgtgagatgatcatgtgcccctcacataaagacctcacctattccaggacagagggaaggacatgaatagt

SEQ ID NO: 316518 - DNA, 566 bp, Homo sapiens
tggcttcagtatttagacaataaaaaccataatatgcatttcctttcctaatcctgcctttcctgttgctataaatttatttgccatggcttagcttctgtttatattctaattatagtgcgtccatgagcctttgttttcttatgcctggaatacacttcttcgtactttacctactaatagctactcacccttgaggcttattgtctctggaaacttagggctaccaatcctttccactgctatatacctcatatttctattagaaaacttcccgtattttacatgacatgtttacatctctgtcttctcctctacgctgcaatgtcttcaaatacacagactgtaattcatctttgcatatctccrtacatagcttaggttgattcatagtatgtgcttcacaacattaatttaaaagtactatgtagatgttaaacaattagacttagttacgtgagaaacagcctcactttgtttccatagccgctttgaggctgtaacttagaattcatgttttgaattatctttgtatcctggtctactgagagggagctgttcttgta

SEQ ID NO: 316519 - DNA, 564 bp, Homo sapiens
ttagggtcacatagagagcaggaaggagctcagtactacagcttgggtggcagcacctccctcatggaactgtagcatgctttgtcctatgggataaaagtcacattatggctaggacatttccctgtgttgyttgtattgtcccacatgttgtttttgttgacattcttttttttgatcccagatccctaagaggtatcatctcttctttgataggtaccatgcctgaggtgctttcactcagtgctaaccacccagtctgggccatctactcagggagttatcttccttctcgtccacatgcttctcgggcctgctcttccctgtccatggtcctggactcagggtctgccactttgcctctctggggaatggccacggtttcctctccttagaaggcactcctcatcctgaggtctctgcttgcaaggagccccatttctaaactccaaggctactaagcttgcttggcctccaacttccaagcagcagtggtgcaggattctacttgaattttacaccagggacttaggtaggagccccctccctacaggtggtcagctg

SEQ ID NO: 316520 - DNA, 581 bp, Homo sapiens
cattgataaaatacattaaagaagaaacaaataaatggaaaggtttcctgtatttaatggattggaataattactattattaaaatgtccatactacccaaagatatggacagatccaatgccacctctatcaaaatttcaaggacatttttcacagaaacagaaaaaaaattccaaaatttataggaaaccagaaaagaccctgaatggtcaaagctatctgaagcaaaaagaacaaagcagaaggtgttacactacctgattgcaaaatctactacaaagctatatkaatttaaacagcatagtactcgtgtaaaaacagacacatgggccaatagaacagaatagagagcctggaaataaatccatgaatttataatctatttatttttgactcagttgccaagaacacacaacgaggaaagttctcttcaacaaatggtactaagaaaactggatattcacatgcagaaggatgaaattatcatctcacaccatatacaaaaatcaactccagatggattaaagacttagatgtaagacctgaaaccttaaagcaactggaagaaaacatagagaaa

SEQ ID NO: 316521 - DNA, 634 bp, Homo sapiens
tatatcatttcataccataaatatagactatttttatttctcaatttaaaaaatccaatcaaatcaattaaaaactgtttttaaataaccagtccagatgctcctggagggggaattgacacacaggtgaaagttacaggtaagcgagtttctgtgcaatcaaaagaactttcaaacagacagcactatctaaaaataatgtgctatcttgggagstagtgagatcactgtccctagaggtgttcaagcaggggctcaaaaaccacctataagaaagcgcacagccagcaatcaagcactagaagaaggctggttgagttgacacttctaatggtcatttaaagacatagtgtatgtgaaaggcttctgattggatggaagggtattgattgagtatcgttacctcacttagatcaccacattgggttgggagggatggaaaagtaaattaacatttattgaaaatccattatgtgctggacacattatctttaatcttcacaaatgtatgagaaagggtttattatttctgtttaatagtgagaaaaaccgatttcagagatgctaagaaccttgccctaagtcaccttatgtgagcagggagcacagccaggacctgggggtccagggctat

SEQ ID NO: 316522 - DNA, 634 bp, Homo sapiens
tatatcatttcataccataaatatagactatttttatttctcaatttaaaaaatccaatcaaatcaattaaaaactgtttttaaataaccagtccagatgctcctggagggggaattgacacacaggtgaaagttacaggtaagcgagtttctgtgcaatcaaaagaactttcaaacagacagcactatctaaaaataatgtgctatcttgggaggtagtgagatcactgtccctagaggtgttcaagcaggggctcaaaaaccacctataagaaagcrcacagccagcaatcaagcactagaagaaggctggttgagttgacacttctaatggtcatttaaagacatagtgtatgtgaaaggcttctgattggatggaagggtattgattgagtatcgttacctcacttagatcaccacattgggttgggagggatggaaaagtaaattaacatttattgaaaatccattatgtgctggacacattatctttaatcttcacaaatgtatgagaaagggtttattatttctgtttaatagtgagaaaaaccgatttcagagatgctaagaaccttgccctaagtcaccttatgtgagcagggagcacagccaggacctgggggtccagggctat

SEQ ID NO: 316523 - DNA, 634 bp, Homo sapiens
tatatcatttcataccataaatatagactatttttatttctcaatttaaaaaatccaatcaaatcaattaaaaactgtttttaaataaccagtccagatgctcctggagggggaattgacacacaggtgaaagttacaggtaagcgagtttctgtgcaatcaaaagaactttcaaacagacagcactatctaaaaataatgtgctatcttgggaggtagtgagatcactgtccctagaggtgttcaagcaggggctcaaaaaccacctataagaaagcgcacagccagcaatcaagcactagaagaaggctggttgagttgacacttctaatggtcatttaaagacatagtgtatgtgaaaggcttctgattggatggaagggtattgattgagtatcgttacctcacttagatcaccacattgggttgggagggatggaaargtaaattaacatttattgaaaatccattatgtgctggacacattatctttaatcttcacaaatgtatgagaaagggtttattatttctgtttaatagtgagaaaaaccgatttcagagatgctaagaaccttgccctaagtcaccttatgtgagcagggagcacagccaggacctgggggtccagggctat

SEQ ID NO: 316524 - DNA, 187 bp, Homo sapiens
tgagacccccccatgagaacccctgttacagggaggctgtgatccagacaggagggaagagtctaacagttctgcttttatcactaatgtggtgagatcttacatcgccaacasgaaggcctcccagagggctctgctcttctgatcccactgaagagtcctccctgctcctctcagccccatggtt

SEQ ID NO: 316525 - DNA, 547 bp, Homo sapiens
gcactgtgttgtgtgcctgtagtcccagctactcaggaggctggagcaggaggattgcttgagcccaagagtttgactctagcctgggcaaygtagcaagaccctatctctaaataaataaataaataaataaatatcctgaggaaagggacacatgggttccacttggttttggagctctcagctagcccaatcagcttgatttgtggtgagaactccttgtgacatggcagctcccctgcaaccctggatggtgtgggagctgggaaattccagaagatagcaggtgtatgttgaccctggcgcttttccagttgttcagtcatttggacttgtgttagtgtgtctgatgtttcattctaactttagtagcattagagggtggaggcaggttctggtttgtgcaaaagcccacacaactggggccagccatctagagaagacctctcttcttgcctcttctagtaataaggatttcctttctaccagtcataaagcatttagttcctactgccttgaattatgagatgcctgcccaagagtctta

SEQ ID NO: 316526 - DNA, 574 bp, Homo sapiens
ggagctctcagctagcccaatcagcttgatttgtggtgagaactccttgtgacatggcagctcccctgcaaccctggatggtgtgggagctgrgaaattccagaagatagcaggtgtatgttgaccctggcgcttttccagttgttcagtcatttggacttgtgttagtgtgtctgatgtttcattctaactttagtagcattagagggtggaggcaggttctggtttgtgcaaaagcccacacaactggggccagccatctagagaagacctctcttcttgcctcttctagtaataaggatttcctttctaccagtcataaagcatttagttcctactgccttgaattatgagatgcctgcccaagagtcttaccttccaaacaatgttgcaatgttgcaaatatctaacttctgaggctatacttgtgtcacttttatataccctaaatcatcccaagcactgccttgatataacatcaattcattgtatttatagaatgcatgaacaaataaatgaatgattccagaggacattttccctctctgtgaacctattgaaaactcacctgaga

SEQ ID NO: 316527 - DNA, 574 bp, Homo sapiens
ggagctctcagctagcccaatcagcttgatttgtggtgagaactccttgtgacatggcagctcccctgcaaccctggatggtgtgggagctgggaaattccagaagatagcaggtrtatgttgaccctggcgcttttccagttgttcagtcatttggacttgtgttagtgtgtctgatgtttcattctaactttagtagcattagagggtggaggcaggttctggtttgtgcaaaagcccacacaactggggccagccatctagagaagacctctcttcttgcctcttctagtaataaggatttcctttctaccagtcataaagcatttagttcctactgccttgaattatgagatgcctgcccaagagtcttaccttccaaacaatgttgcaatgttgcaaatatctaacttctgaggctatacttgtgtcacttttatataccctaaatcatcccaagcactgccttgatataacatcaattcattgtatttatagaatgcatgaacaaataaatgaatgattccagaggacattttccctctctgtgaacctattgaaaactcacctgaga

SEQ ID NO: 316528 - DNA, 574 bp, Homo sapiens
ggagctctcagctagcccaatcagcttgatttgtggtgagaactccttgtgacatggcagctcccctgcaaccctggatggtgtgggagctgggaaattccagaagatagcaggtgtatgttgaccctggcgcttttccagttgttcagtcatttggacttgtgttagtgtgtctgatgtttcattctaactttagtagcattagagggtggaggcaggttctggtttgtgcaaaagcccacacaactggggccasccatctagagaagacctctcttcttgcctcttctagtaataaggatttcctttctaccagtcataaagcatttagttcctactgccttgaattatgagatgcctgcccaagagtcttaccttccaaacaatgttgcaatgttgcaaatatctaacttctgaggctatacttgtgtcacttttatataccctaaatcatcccaagcactgccttgatataacatcaattcattgtatttatagaatgcatgaacaaataaatgaatgattccagaggacattttccctctctgtgaacctattgaaaactcacctgaga

SEQ ID NO: 316529 - DNA, 547 bp, Homo sapiens
gcactgtgttgtgtgcctgtagtcccagctactcaggaggctggagcaggaggattgcttgagcccaagagtttgactctagcctgggcaacgtagcaagaccctatctctaaataaataaataaataaataaatatcctgaggaaagggacacatgggttccacttggttttggagctctcagctagcccaatcagcttgatttgtggtgagaactccttgtgacatggcagctcccctgcaaccctggatggtgtgggagctgggaaattccagaagatagcaggtgtatgttgaccctggcgcttttccagttgttcagtcatttggacttgtgttagtgtgtctgatgtttcattctaactttagtagcattagagggtggaggcaggttctggtttgtgcaaaagcccacacaactggggccagccatctagagaagacctctcttcttgcctcttctastaataaggatttcctttctaccagtcataaagcatttagttcctactgccttgaattatgagatgcctgcccaagagtctta

SEQ ID NO: 316530 - DNA, 557 bp, Homo sapiens
tcaccagttacctacacatagtcttggacaagtcccctgacttttccctgaacttcagctttcttgtgtcttttttgctaaattactaataaggatcaaataaaatcatgaatgtgaaagtgtaaaaaactctatagaaacataaaaatcactccaataatactcatggatttcctattgtttagcatgtcagattcacattcttctttatggaggaaaagccaggcagatgttgtaacaaccaaatgccccaaaagccaaaactgaayggtcaggttcctagatcaatagaacctgcttcattgccttactcattccttcacttaccaaacattcattgatttcctgttgttttcaactacttaataaggcacaggccttgccctgatgcagttcaaccttttgataggaaaagaaaaggaaacaataaattgcaatcagagagataagagcaaaatagaagtatgtgcaggattctggggatggaggaaccccagttctctctaggaagagagggaaatagaacacagaacccagaacaatttcacgcagcaggg

SEQ ID NO: 316531 - DNA, 557 bp, Homo sapiens
tcaccagttacctacacatagtcttggacaagtcccctgacttttccctgaacttcagctttcttgtgtcttttttgctaaattactaataaggatcaaataaaatcatgaatgtgaaagtgtaaaaaactctatagaaacataaaaatcactccaataatactcatggatttcctattgtttagcatgtcagattcacattcttctttatggaggaaaagccaggcagatgttgtaacaaccaaatgccccaaaagccaaaactgaacggtcaggttcctagatcaatagaacctgcttcattgccttactcattccttcacttaccaaacattcattgatttcctgttgttttcaactacttaataaggcacaggccttgccctgatgcagttcaaccttttgataggaaaagaaaaggaaacaataaattgcaatcagagakataagagcaaaatagaagtatgtgcaggattctggggatggaggaaccccagttctctctaggaagagagggaaatagaacacagaacccagaacaatttcacgcagcaggg

SEQ ID NO: 316532 - DNA, 534 bp, Homo sapiens
tgtaagctaacccctcatggagtgctacagaggacatctgtttttttggtttggggtttctttttattctccttatcctttatccccttcctctattagcaaactgacttgctccctctctctctcttccctcccccatatcccccttttttccaggtagttttgatgagtctcagtaccttggtctcctctgatcactaggctgggaatagtatccattactctgaycacagggcttgagtcaagggtaggggcatgaaagccaagcagcaccaattggtatccttccctggaattgtaaacacataaggcctctctctttcttccagggttcccacactggcatgatgaaagcctggagctgtctacgagcatacagaccttggggaaagaggaggaagtcatagtgtagcgcaaagctgaacctcaagagggcaggaatgctgatgacatcatttgagtctctgggtccactccgccctgttcttcccagttatgtgaatcaaccaagtccctttattccttcacctaatg

SEQ ID NO: 316533 - DNA, 536 bp, Homo sapiens
tggtctgggactaaggggcaggtacattgaggatatgggtgattgttcttggggctaaattccttttccccccaagacaattctaatgagggtaagccctgtagccactctcagcctcctgatgattggcctttggataaagatggacctagcataaaaagtaagtcaaagttcagacatctggcaagactcagagccaggcaaggaaagcaatagggtcacaggaatcactgggcgtaggggcaggaagatctagatggcagtttcacccaactttcgtttcctctagaacatattgtttgttgaatttttctctgcacccaccccacrcttgctgcctcccacagttttgatcacagtaggcacttaatgcctatttgtttaattaattaaataagtagtgagtcactggcaaacctagcgctggctgaagagattatgtctaaagttccaatggctgaattttacaacttcggacaagtctcttaacctctccgtatgagattttatgttattcctgtcacattctttggaag

SEQ ID NO: 316534 - DNA, 572 bp, Homo sapiens
gtgggctacatgttatgttctgccaggctaggcaagaggacacagggactagcatttaccttaggaaataactatctgaagtccatactcctgaaaaatctgttgtactaaaccccacagayatctcagctacctatgtttctttgcatcacaaatttctaccatctacttattgattagacatgagaggtgggccaagaaaaggtgaatttcagaatgatgatatgtgtgtcaccagctatggagagatgaagaataaagaattacaaccatctggagccagatctgtctccagttggaaagctggagcatctgttggcactggaatgtccaacacaacttcttcactggcatgacgagtgcctgatctatggtggctggaacagctgggctagccaggatctctttctccacatggcttgtgcaagtggctaaattgggcttctgcatagcatggtggtctcaaggtacttgaacttctgcagatagatggcttcctccagagcaaatgtgccaagaggcatggatcgaagttgcaaaagttcttatgacttaacctgagaagtcccaga

SEQ ID NO: 316535 - DNA, 572 bp, Homo sapiens
gtgggctacatgttatgttctgccaggctaggcaagaggacacagggactagcatttaccttaggaaataactatctgaagtccatactcctgaaaaatctgttgtactaaaccccacagatatctcagctacctatgtttctttgcatcacaaatttctaccatctacttattgattagacatgagaggtgggccaagaaaaggtgaatttcagaatgatgatatgtgtgtcaccagctatggagagakgaagaataaagaattacaaccatctggagccagatctgtctccagttggaaagctggagcatctgttggcactggaatgtccaacacaacttcttcactggcatgacgagtgcctgatctatggtggctggaacagctgggctagccaggatctctttctccacatggcttgtgcaagtggctaaattgggcttctgcatagcatggtggtctcaaggtacttgaacttctgcagatagatggcttcctccagagcaaatgtgccaagaggcatggatcgaagttgcaaaagttcttatgacttaacctgagaagtcccaga

SEQ ID NO: 316536 - DNA, 522 bp, Homo sapiens
ctggaacagctgggctagccaggatctctttctccacatggcttgtgcaagtggctaaattgggcttctgcatagcatggtggtctcaaggtacttgaacttctgcagatagatggcttcctccagagcaaatgtgccaagaggcatggatcgaagttgcaaaagttcttatgacttaacctgagaagtcccagaatgtcccttctggcatattcttttktgccagtcaagaaaggccttaaggtcagcacaaattcaaggggaggtaaatagtttctacctctcagtggaagaagtagcaaagaatttgtgaccatctttaatctactgcagtcatatagtggatgaactcaagaaaatatataagttctttgagttctaggccaagagtgacaatactctaaccagctttgttagcctcctgttgcactggtccctgaagctaccaacaaggtatgcatgaggttcactcaaagtcagaaggttaacttgacaagctcaatgaatctcagtattcacctc

SEQ ID NO: 316537 - DNA, 543 bp, Homo sapiens
gcagatagatggcttcctccagagcaaatgtgccaagaggcatggatcgaagttgcaaaagttcttatgacttaacctgagaagtcccagaatgtcccttctggcatattcttttttgccagtcaagaaaggccttaaggtcagcacaaattcaaggggaggtaaatagtttctacctctcagtggaagaagtagcaaagaatttgtgaccatctttaatctactgcagtcatatagtggatgaactcaagaaaatatataagttctttgagttctaggccaagagtgacaatactctaaccagctttgttagcctcctgttgcactggtccctgaagctaccaacaaggtatgcatgaggttcactcaaagtcagaaggttaacttgacwagctcaatgaatctcagtattcacctcacaacagaattatctgggaagttgtcttagtccatttgcgttgctacaaaggaatatgtgaggctgggtaatttataaagaatatatgtttatttggttcacagttctacaggctgtacaagaag

SEQ ID NO: 316538 - DNA, 614 bp, Homo sapiens
tctaggccaagagtgacaatactctaaccagctttgttagcctcctgttgcactggtccctgaagctaccaacaaggtatgcatgaggttcactcaaagtcagaaggttaacttgacaagctcaatgaatctcagtattcacctcacaacagaattatctgggaagttgtcttagtccatttgcgttgctacaaaggaatatgtgaggctgggtaatttataaagaatrtatgtttatttggttcacagttctacaggctgtacaagaagcatgatttcaacatctgcttctgctgagggcctcagacttcttccacttatgatgaaagtttaaggggaactggtatgtgcagacatcacatggcaagaaaggaagcataagagagaggagaaggctgtcatgccctttttaacaaccagtgcccacaggaactaacaaagtaagaactcactcaataactcaagtgtgacatcaagccgttcatgacccacatacctctcactaagccccatctccaacattggggatcaaatttcaacatgaagtttggagggtcaactatccaaactatagcagaaggtttgttttgatttgatttgttttgttgtgtttt

SEQ ID NO: 316539 - DNA, 607 bp, Homo sapiens
ctggggttgtggtggggtcagaagtaactgaacaggatctaacaggtttgggaaagcctcttataacacaattcacaattttctaacctgtttaaacacacatakgcaatatatttgtgtgtgcatgcatgtgtgtatatatatatctttataaatttcattatacatgtaatatttgtataataatataaaaatatatatttatatttataaatgtaactttaatcactgtatagtatattagcttgtaaattacctaactattcccatcttctcagatatttgtgattgttattgttgttgaaataaaactaatattttttaacacttagccctttgcttctcttgaattattctctgaggactcatttgccagggtagaaatctgagttttcagaactcttggttctgatgctaaattaaccatgtgatcttggtcaaattagttcacctcctttggtttatatattgaagggattgagacatatggtcctttctagatctaaaatgctttgacctcaggggtacatcagcaggggtgccacattgcgcaattccaggacaccaatattgaacagccaagcagacacatgcagttttaggaatt

SEQ ID NO: 316540 - DNA, 607 bp, Homo sapiens
ctggggttgtggtggggtcagaagtaactgaacaggatctaacaggtttgggaaagcctcttataacacaattcacaattttctaacctgtttaaacacacataggcaatatatttgtgtgtgcatgcatgtgtgtatatatatatctttataaatttcattatacwtgtaatatttgtataataatataaaaatatatatttatatttataaatgtaactttaatcactgtatagtatattagcttgtaaattacctaactattcccatcttctcagatatttgtgattgttattgttgttgaaataaaactaatattttttaacacttagccctttgcttctcttgaattattctctgaggactcatttgccagggtagaaatctgagttttcagaactcttggttctgatgctaaattaaccatgtgatcttggtcaaattagttcacctcctttggtttatatattgaagggattgagacatatggtcctttctagatctaaaatgctttgacctcaggggtacatcagcaggggtgccacattgcgcaattccaggacaccaatattgaacagccaagcagacacatgcagttttaggaatt

SEQ ID NO: 316541 - DNA, 607 bp, Homo sapiens
ctggggttgtggtggggtcagaagtaactgaacaggatctaacaggtttgggaaagcctcttataacacaattcacaattttctaacctgtttaaacacacataggcaatatatttgtgtgtgcatgcatgtgtgtatatatatatctttataaatttcattatacatgtaatatttgtataataatataaaaatatatatttatatttataaatgtaactttaatcactgtatagtatattagcttgtaaattacctaactattcccatcttctcagatatttgtgattgttattgttgttgaaataaaactaatattttttaacacttagcsctttgcttctcttgaattattctctgaggactcatttgccagggtagaaatctgagttttcagaactcttggttctgatgctaaattaaccatgtgatcttggtcaaattagttcacctcctttggtttatatattgaagggattgagacatatggtcctttctagatctaaaatgctttgacctcaggggtacatcagcaggggtgccacattgcgcaattccaggacaccaatattgaacagccaagcagacacatgcagttttaggaatt

SEQ ID NO: 316542 - DNA, 437 bp, Homo sapiens
agtgttttaggaaaagccacagggatgacaaggatccggagcaatgccttttaaacttgagaaaatgcccagagagttctttaaaatacagattcataagcctccatatcagaggttctgactcaataggtctgagatatggcctcagaacttgtactgtttttgttttgttttgtttgtttgttttcagacagggtcttactttgtcacctaggctggagtaccaagctgtccattgaggctgatgctacatttttagtataagtaggctaaagcaatcttaatcagtaaaaagtgaccttttgaattcattgtttgcttctatttcctactcatctgctctcccacttggcctccaggtttgctatgtatgcaaaatgtctctactgagtaggraaagtgggatggcagccatttccctgctcctgaggtcaaca

SEQ ID NO: 316543 - DNA, 538 bp, Homo sapiens
ctatgttaatttgaaaaactgattctgaaatttttatggaaaagtagagctccaagaatagaacaaaaagatataaaactgtgtggyattggtacaaaagaaggcaaataaataaatggaattcaacagaaaaccaaaaacaaactcatgcatatatggtaacaatgtgtgatagatatgtaatagatttgtcagtaagaaataaatgaactatttaataaatggggttgagaaaatttattatacctgataaaagatatacacatagcttaaagtgtgcaatttaaatccattgattcaagaaaatatcataaattatttttaggacatttgcatgaagagggattttcttaacacacacacatccaatgttttttaaaagaacagaaaaatatgactataaaatggaaagtttatgccaaaagacattacaaagttaaaagatataagcagactagaagaaaatatttataatacatataatagaggaatggcatccaacatacataaataaatttttattaatcaataaaacaat

SEQ ID NO: 316544 - DNA, 538 bp, Homo sapiens
ctatgttaatttgaaaaactgattctgaaatttttatggaaaagtagagctccaagaatagaacaaaaagatataaaactgtgtggcattggtacaaaagaagrcaaataaataaatggaattcaacagaaaaccaaaaacaaactcatgcatatatggtaacaatgtgtgatagatatgtaatagatttgtcagtaagaaataaatgaactatttaataaatggggttgagaaaatttattatacctgataaaagatatacacatagcttaaagtgtgcaatttaaatccattgattcaagaaaatatcataaattatttttaggacatttgcatgaagagggattttcttaacacacacacatccaatgttttttaaaagaacagaaaaatatgactataaaatggaaagtttatgccaaaagacattacaaagttaaaagatataagcagactagaagaaaatatttataatacatataatagaggaatggcatccaacatacataaataaatttttattaatcaataaaacaat

SEQ ID NO: 316545 - DNA, 565 bp, Homo sapiens
cttttttttctctttgtgttccattttggatagttttyattgctagtcttcaagtacactaaacttcattttgcaatgtctaatttgttgttagtcctccaagtgtaattttttaaatccaatggcttgtagtgttcatctatacaggttttattttggtctttaaaaaattggggtctttcatgttcccgctcgacatattcaagatttttatagctttttttcttattctatcattttgaacatgtggaatacagttcaaaatactgttttaacatccttgtctcataattctaacaactatgttagtcttggctcagtttcaattgattgatttacctcctcattatggcctagactttctgcttctttgcatgcctgataatttttgattgaaagccagacattatgaattttaccttgttgagtgctggatatttttgtatctctataaatattcttgatgtttctttctgggattcagttaagctatttgagcatagattaatgctttctggtcttttaagattcattagatgggaccaaagcagcatttaatttaaag

SEQ ID NO: 316546 - DNA, 504 bp, Homo sapiens
tatgataaaatatcaattgtctttgtccaacagtagtttatttttaaaatttgaggtgggtctggggaggctgatggagatggggctgaagacccccaagccatccagtagcattgccactgactacagggaaatcaagtgttctggagccacagaagacaggagagacagccaccagagacatatatgaagatgaggtttcaataggaaataggcaggagggttaagagatacttgaggactagcagctgtcaacatcagaacagttaactctttcatgcttggctcacaaggagacaaacttgaggtaacacattcgagtcagagtgggcaagaaatgcccccccccaagggaagaggaaccacccagagaaagcaaggctatgttaacaccatcacagataatttgagctgtgrgaatctcaaagggcaggcagagagagagatctctctttctctctaaagctaaatattctttttgttttctagtcacagtgcaaagtt

SEQ ID NO: 316547 - DNA, 570 bp, Homo sapiens
tgcccacatccaaggcattatgttcaatcgttaaataattaaaatccttaaacaagaaggatactcamtggggaggtgggcaggaggttttttgagactggggaaaagaatgatgggtcagagttggcaggaaatcactgatgctgaaggaaaggacagagctaggatggaaaaaaagacaaccactgggtgagtagggctggttctagagggctggttcaaattgtaaagtacagaaaataagatttaagtagccttgttcctcaaactcctccccttccttttcctcattgtgcccatccaactgggctttcttcgtcactctgctacttcctcctccagaccttccccgaatccaagctcctcttgctccaggccttctaagagcttgctaccatgagagaaaagtagttgattaattctctctatagtgttaatgactaaggaagccctaaaatattccctttggaaggtgaggggggcaactttcagtccagcagcaggcctgaagggaacccattttggccagtggtgcttctggaaatgtttctgagcagatgcttggaaact

SEQ ID NO: 316548 - DNA, 565 bp, Homo sapiens
tctctgtcccaatgaacatttccatttcccttcttccctccctccctcccttccttccttctttcctttctgtcttctctctctgtctttttttttttttttgagacagagtctcattctgtcacccaggctggggcgcagtggcacaattatagctcactgcagcctcaaattcctgggcttaagccatcctctggcctcaggctcccaagtagctgagactrcaggtgtgaaccactatgcccggctaatttttaaaaattttttgtagagatgggggtcttgctttgtcacccaggctagtcttgaactctagggctcaagtgatcctctggcctcggcctcccaaagtgctggtattatggtcatgaaccatccccccaacgaaccagcgaacatctccctttctaagtacctataaaataagcattatatctcaagccagtcaaagctgtagggctgaattaagcctccagttctacatttaagcagatggctgtggactttaccaagaggctaaagaaacgaatgaacagggagcaacatggggggagggattagacct

SEQ ID NO: 316549 - DNA, 654 bp, Homo sapiens
acttactttccctgctgctggtagtgccagaagtcagtcctcagctgagggaaaggagactgccttgcccaggtcacatctcttccagggaagctggcattcagtggctggttatggaggtaatgagggcctggtctccttgcccagctcgggacatcaaggtcatcctagctccagagttcccatggagttggctgaggccttccttgggactacatgttagctcaagttctccctctgtacattctacttttgtcctttctcttccacaggcattggccccaaaggcaccccctaaaaaggtgctaaactcagtctcaaggtcgcttctcaaaggatcaagagtgcaatgcagatacacacccataaacaaagacacacacagacatactcacacacatacacagatacacacacacattcctcaaggaaaccaaagagtgagaggtaagaagagagtttgccctgtgattacagctgcrtgacacaatcacttttatgatatgaatttatcaggctttttctttcaaatgttcacttttttaaatccaaagtgaacatttcattattataatgagagagagaaaaaataaaggtatttggaaaactattaataaaaccagctcttcacaaataactctctatgcacaggcc

SEQ ID NO: 316550 - DNA, 617 bp, Homo sapiens
gattctgtgctagacactgtgctaggagctaagcatacacataagggaagaagggttacaaaatttaatccattacaactcagatatgagagaaaatgagctctattatcgaaaatgaatttgggattctttcccagaaaaataggtgaagggtgggggaaaagtaactaaacgtccaaactggtttagagcttgatctcatccaataatgccacagccctttttggaaatgccagtctccaaaacaaagctgctcagtctcccacattatccctctgtcctcctagtcctcttactcaggtggaagaaagaaggagggggctttatgtaacatcatggtagagggagaagtttcagrgttctccagcccctttggtctacagagccacacccttgtcctcatgtctggtctttgttctgttggcattttaagccaaatctgtgccttgtatactttgtgatctagtctctttctttggatttggttagagcccatgtctcccacctttccaggtggactcagcctcactttggccctgctgatgttatgggcctcataaagttgagccatgactctcatcaggcccagcctgcatggtggtatccacggccttgcc

SEQ ID NO: 316551 - DNA, 581 bp, Homo sapiens
atccatagctaaagcattgtgtgccctcctttcagcctggaaacatcataggagtttccagtagatgrgtctcctaggactcaaagaactattagaactgtaagaaatcccaaacggaatgaaattctgacctaatggagcctaagaatcagcaggagcccaagtcccagtttaaaaagtaaagaaaagacaagtataaatacaaggaagaaattctgtaaaatcaatgctttaaacaaggtcaaataattaatgtcttccagcagcttccatcctctgagaagggcctgacctgcatgccaccatgtcccttcaagtgcaggcagacagggaactcaggataatggctccttgagcatggctaatgtatgatggaaatgcatctttctcctctggggctggcaatgtaatttcatactaaatttactgtggtttatgtaattcttttcattcacagcagaaggagtttctttgctgcttcccttttcagaaacttggagaccatatatctttgcaaagtggatttttaaaaataaagaagaaaagattaaatcagagaagctcccaagttttctgccttc

SEQ ID NO: 316552 - DNA, 589 bp, Homo sapiens
gactctttctcctcttgggaggctagagaggtaagacgtagaaggagagagagaaaaagagacacggagaaatttgccttgttagtggctttcaggagaacaaggccagaagacacagagtcccggaccttatccacgtgagtccctcttctttttccactgtctgtcacctgagccttttcttattgcttcaaaggcctttgcttgtcagtctccaaagtgcccaagcccctttgtgtcctagaagaatgtacctccttctatccctcaaagaaggcaggcctgagccaggagattgggcagaggaggggcaggtcagactcatgggtgggtgtcagagtcctgatgactggaattctgaggagtttggacatctcagtgatcctttaaaaaaatccctaaaacttaaagtataaaaaaaaaaaaaaaaaaaaatccttactgcctcagtccccgaacaggaaattctgatcttgaattgatcttagaataaaatcctcccycaaaccccaagaagccctatagaatcttctttctgtcttttttctgacctcatctcatgctattccatctcatgccattgccttac

SEQ ID NO: 316553 - DNA, 604 bp, Homo sapiens
attgaaacccaccaaaattattttgaattgtaattttgctgtacaacatatgaactatttctgccttctccactttactgaaattttcaatgcagcgtctcaagagttgctgctcaaactaaaaatgtcctacttagcattcatccagctgcctccytcactgcttccaaaacagagctcaaagctaaactctcccaggaaggcttccaagattaaatgggggcagaaatgaggctccttccttctaggacaagagggaactccacagagctgcatctcagagtggcccggggctacttgtggatttcaaagaggaaactctgttcttagaaatgaagagcacagaatgtgaaactgcataatgtcaaatgtgctgcttctggggagagtcttgtgtcctcagacaccaggtgcctcattggccccaaaagagatactcatccctgccttcatgccataccttctgggctattaaaatacttacctcttcctgagagagaaaggagttgtccaagagcctgctctgtaagttctcaaccctcccaaccccagcctgcaatcagaggaaacagtttgaccattctggctcatgaaaggcagtaaa

SEQ ID NO: 316554 - DNA, 604 bp, Homo sapiens
attgaaacccaccaaaattattttgaattgtaattttgctgtacaacatatgaactatttctgccttctccactttactgaaattttcaatgcagcgtctcaagagttgctgctcaaactaaaaatgtcctacttagcattcatccagctgcctccttcactgcttccaaaacagagctcaaagctaaactctcccaggaaggcttccaagattaaatgggggcagaaatgaggctccttccttctaggacaagagggaactccacagagctgcatctcagagtggcccggggctacttgtggatttcaaagaggaaactctgttcttagaaatgaagagcacagaatgtgaaactgcataatgtcaaatgtgctgcttctggggagagtcttgtgtcctcagacaccaggtgcctcattggccccaaaagagatactcatccctgccttcatgccataccttctgggctattaaaatacttacctcttccygagagagaaaggagttgtccaagagcctgctctgtaagttctcaaccctcccaaccccagcctgcaatcagaggaaacagtttgaccattctggctcatgaaaggcagtaaa

SEQ ID NO: 316555 - DNA, 604 bp, Homo sapiens
attgaaacccaccaaaattattttgaattgtaattttgctgtacaacatatgaactatttctgccttctccactttactgaaattttcaatgcagcgtctcaagagttgctgctcaaactaaaaatgtcctacttagcattcatccagctgcctccttcactgcttccaaaacagagctcaaagctaaactctcccaggaaggcttccaagattaaatgggggcagaaatgaggctccttccttctaggacaagagggaactccacagagctgcatctcagagtggcccggggctacttgtggatttcaaagaggaaactctgttcttagaaatgaagagcacagaatgtgaaactgcataatgtcaaatgtgctgcttctggggagagtcttgtgtcctcagacaccaggtgcctcattggccccaaaagagatactcatccctgccttcatgccataccttctgggctattaaaatacttacctcttcctgagagagaaaggagttstccaagagcctgctctgtaagttctcaaccctcccaaccccagcctgcaatcagaggaaacagtttgaccattctggctcatgaaaggcagtaaa

SEQ ID NO: 316556 - DNA, 594 bp, Homo sapiens
tcatgaagccaaatgtgtttctgaacttggcattattttaaagggtgaagttcagaatggtatcagataaaagtttatttaattctcaattaggaattgtttttatgcagtgtcggtggcattaggacttctatgagctgtgctattgattgaaatgatgccctcattgggtgttgattgagtgatcttttgattccctccctattaacatgctaatcattaggggtacagctcctctcaaaggcacctgttattccaaggatggatgtctctgaccttgtacatttctcccaagatgctgggggtgaaggggttcttcaaagtcctcattagcatartgtagctcaactcccaagggtgataaattaaaagaacaggaacacaattaggaagattttttaaaggttacaaatggtggatgcattctgagaatgtctggatctacatgtcaagggcatctaagttagtcctgagaacagctggagcccaaaggccagctcctctctgtgcaccaaatttacataagctttgaagatatttttagctttctgcactcctcttaatatgctcctgcttctctgtctcacaaagagg

SEQ ID NO: 316557 - DNA, 613 bp, Homo sapiens
tgttattctgtaatgatacccttttctattgggcctaggtggggcctcagaaaccctctcagcacagtgtttgaggcagcaaccaccaatcagagttggttcaggagataaagcctatttctccttgttctccatagccaggcctccactacctctggtaaggacctagaaactggatgaaaatccaggagtggcyggcacacacctgtgttgctgagctctggcttcccatgctagtcagaatctctgacccacagggacttcggacgacaaagtcttgctgggaatgccctttccttggctctatatcaagcaattaatcctctcacaattttcccctttttcctacagaaatgcaagaagcctcaagccacagataatccttggggccatgaaccttgcttcctgagctggggagaggctgttgcctcataaatagttttttctcagctttcacttcaacacaatctaagaatgctttttctcccttctcttggtctttaaggaacactgtctctggagctaaagttcctcatctctgattggcctttccgtgggggaagcagaggagagaactgactaagggtaaataatatcgcattggctatccata

SEQ ID NO: 316558 - DNA, 632 bp, Homo sapiens
tcttggccatttcctttcagtattcctcctctgccctcaccataacaactctatcttataacaagcagcaagaatattcttagaagatacaaaagggacaagcccaatcatgcatctttgctcccaacctggagtagctttctctagtcttatcccacaatagtgtcttcttgtgggctttttgcaycttgtgataaatctcacttgcccataagcactgaattttttatatgtaaggtgccagattgtatttgccaaccctggctgcagcaatatctcctgtcctacttgcccttctatggtgtaaccttaccacacccccagcaagatttgccactctcttccctgtgaatctgggcagagttttgattactttgaccagtagagatgagacagccttgaggagatagtgattgatgaaggctcaaagacaagactggggaaaaagatatcccttattatatagtggcagaaagtttggcaacattgttttttgtaatgttccttgcaatgtaattgttttttgtgatgacatggaaaataaaaataaacctaatgagctggtggatttggctaagaggattttctagcaaaatatgaaagtgcccactgagttattttaagcatgtaag

SEQ ID NO: 316559 - DNA, 589 bp, Homo sapiens
aactgacatgtgcttggctgaatttttgaattgcaatggatcagtgactgctgtatgcctttcatttccctcttttagaataggaatattatactgattatcatatgcctttctcacctggatgtgtgcatgaatgagaggcacataaattgttactttaactcatgtaactttacagcaagaactatactagacaagatgcaccagagaarccctaaggtcagctgaacaaaaattagttgacaagatcttggactttgaactgatgccacagtggaatcagactttgaagggcatgggggagtaactgagttttacatgtgaaagtggatgtgaatctttttgtggtcagaggcagactgtagcagattatatttctcaaagacaactgcaacaatatctcgcatctcacaagcacttccacaatgtaatcttgctagtattctatcaagaggtggtgccttcatcccttcccttggatccacgtgggcttgcaactgctttagcaaatagggtaaaggagaaataatgacatacatcttccaaggctgggtgataaaaagtgatacagtttcaattttgtacactg

SEQ ID NO: 316560 - DNA, 589 bp, Homo sapiens
aactgacatgtgcttggctgaatttttgaattgcaatggatcagtgactgctgtatgcctttcatttccctcttttagaataggaatattatactgattatcatatgcctttctcacctggatgtgtgcatgaatgagaggcacataaattgttactttaactcatgtaactttacagcaagaactatactagacaagatgcaccagagaagccctaaggtcagctgaacaaaaattagttgacaagatcttggactttgaactgatgccacagtggaatcagactttgaagggcatgggggagtaactgagttttacatgtgaaagtggatgtgaatctttttgtggtcagaggcagactgtagcagattatatttctcaaagacaactgcaacaatatctcgcatctcacaagcacttccacaatgtaatcttgctagtattctatcaagaggtggtgccttcatcccttcccttggatccacgtgggcttgcaactgctttagcaaatagggtaaaggagaaataatgacatacrtcttccaaggctgggtgataaaaagtgatacagtttcaattttgtacactg

SEQ ID NO: 316561 - DNA, 571 bp, Homo sapiens
  misc_feature (1)...(571): n = A,T,C or G
gaaaccactgtgagaaagtccaggtcttagggagagaccgtatgtacatgctgaggttgactgccccacataaggttgcagattacagctagcataaactactggatatgtaagtgaagatatctccagatgattctagcccccagccagtgagacgtcccagcagaagtgccagacatcatgaaacagagctaaaccaacactactgtactccatatgaattcccagcttgtgtgatccatgaacataataaagtattttttaaaaagtcatttagatttaatttgttataggcaatagaaactggaacatatagacataggtccacttaaaatcttatcacttaaaatactgcttaagtccaccccttatcaaacattgcagatcagagaaattgcaaaattatagatatatgaatatatatgtatcttatgttatatatatatgttatatatatatatcttatgttatatatatcttatatgttgnatatatatataacatatgtgaactaaaagaaagaagtaaaattttgtaraagagtaagaatgtagatcactatttatgaata

SEQ ID NO: 316562 - DNA, 499 bp, Homo sapiens
tttatgacccaatcttagtggctccaaatagctcctcctctaggcttgccataccatctgaaattccgtcatgtgagaatttgctttctggatgaaggtttgcatcttcaggaatcctctgttaaatttcagataaccccaatcatgattttgtatgaatccttggtagtcactagcattccaggccttctcagcagttgggcctttcacacacccacagctccataaaaacggcaccactcaagtatttccctgattgacagcagtatccacgctgctgtctctgcctctccagctttgcccactgcttcccacacygtattgagtatttctgtcttctgatcccatgctgccatttccctgttgaaggttttttctcacagctctgattgatcctttgcattctttctcaatcacagtccagaatgtttacccagtgaccctgctctagattatcctggttaaatacctggctggttacctgggatcgtatactcct

SEQ ID NO: 316563 - DNA, 545 bp, Homo sapiens
aagggaaaggtggggttttaaattaaagctcattattcccctcaacccatgaacttagaatatgccaacatgccatttcttatcattaacagaaatgtggtgagacaaggaaagttgggaacatgtgcagatttacagtgacttgaaattaaggtggcttcatggacactgactagggcaggtacttggagtggttctgcaatctgcatttcatgctcctatttggagagcatggaaagctaactatatgttcggtgctcccttgcatgtagcattggggttacaattaatctctgctacttgacacacctgtgagagatttaggaagggtaagtgagacagaaacgtccttcccgrgccctctactggcttcccctggtcaggaaggttggaattttcctgcaacacgttccagtgtttatcctccagctttctgtgtgacaaggaacagtcacaacattggcaactttttgatgtcactctctaattcctggaccatggttttaggtctaatctccagtttcctggtgtgcaggggctggtca

SEQ ID NO: 316564 - DNA, 586 bp, Homo sapiens
agtagaaatacttgacagccccagaggatgaggctttcaattctggttctggagttctctggggaaaggcttgcagaatctatgcaacagtgtggcagcagaggggggattagaaagccaggcttgcccccatgaaggcagaacctgagggcggggcttgtgtttgctgtagtgtctcccttcccctccacccctccctaaagagattgttcataatgctgtgctaacagaaaccactgctcaccgctgttgggcttcagcagatgataaaatgataggaagattgtaccacgttctccaaaaaggccccctggggaggctgttgagcgagggtgattgattcggttagattgtgatgtgttatttaggcagaagacaggggagctaggagaatggaggaaaacagaaagcgaargcagaaaaaatagtagaagagaagagccctttttcaccacgtagacgtgggctctggttgttctagattggggttcacttgcccatgaccgggagagagggcagggaccttggtcaatcagcagcccccaagagacctggaagacaaggagcgcgcgagtggtggtatcat

SEQ ID NO: 316565 - DNA, 603 bp, Homo sapiens
cttggacatgaagattcataacagttttatttgtagtggttaagaattggaaacaatccaaatatccatcaacatgtaactggataaacaagctgcagtgtatctacacattggaatattagcaacaataaggaatgaactcttaacacatacaatgacatggatggatttcaaataattacactgagtgaaagaagccagataaagaaaaagagttaaaggtgcacagaggtaattttggagggatgatgaatgtatttattatcttgatttgtggctctggttttatgagtatatacatatgtcaaaacttatcaaattgtacactcactttaaatgtgcaatctattatatatccattatacccaagtaaaactacttaaagactaaaatgtaaaaaaagtgtaaaaatacatataatttgtaccactctgaggtcccttattttaaaaaaaaaaaaaaaaaaacttgaaaargcaggctatgtaacacaagtttctttctataaggtgaaagaaggcaacagaaaaccttgttctgtgaggatcctgctaggagcagagatgattctcaatatgtcaggcatatggagttaattaatgc

SEQ ID NO: 316566 - DNA, 552 bp, Homo sapiens
cggaattacatttcaacatgagattcgggtgggaacaaacatccaaactatatcagagtggaagtcaaggaatgagaaatcagagaaaccaatagagaaatttaatgaaacttctaaccagactgatcaggaaaaaaagagagaagaactaaattagcaatatcagaaataagagaattgacatttttatatatcctacagatattaaaatgatattatgcccataaattcaacaacttaaaagaaatcaacaatttccttgaaagacacaaactacaaaagatcactgaaagagaagtagcctgaatagctctatatctattgaagaaaataaatttgcagttaaataaatttcctttcaataaataaaatttcaggcccagatggcttcatctatgaattgtatcaaatrctttcagaaaatggaataggaggaaattctatcttctgactcatctgtgaagccagcaataccctgattccaaaactaggcaaagacattacaaaaaaggaaaactacagaccaagcttctttgtgaacatcaacacaaa

SEQ ID NO: 316567 - DNA, 560 bp, Homo sapiens
agtctccattttgcacaaatggaaatggagaaaacaagattgatattttcctaaatgttttcaatttaacgctgcatcayatcagagtcttggaattcattttataaagtgaaaggatatttctctctctgttgcttcaaggaagagggaacattttcatttcctttgtagacacgtttttgttaatttttgacacttgcttttttatagccagtctctgaaatgtcattaggtagcattaaatagtaaattcaagcctttagatctcaatttaactggctgaaatgaagaaagaaatggaaggcttttattaaatagagaacatggccaggcatgatggctcatgcctgtaattctagcacttttggaggctgaggtaggaggattgcttgagcccaaaagttcaggaccagcctgggcaacatggcaagattctatctttacagaaaaatttaaaaattagcctggcatggtggcacatgcctatggtcccagatacttgagaggctgaggcagtggggatcacttgagcccaggaggtagaggctgcagtgagccag

SEQ ID NO: 316568 - DNA, 607 bp, Homo sapiens
aaactgttgaattacttcttcaaccaaatcagaggggtttggggtttgactgacttcagcatgcttatgaagtctggctggaaggaaaaaggaggccatttgaaaactggatccccaaaaccttttgtttttgctaactgtaaggtcagtttaactccttctcatcctcagtttctcttctaggagctgcagaagcagtgttcccatcatggcctggygccattattccagaatgctgttgaagtgagggaaccaatggcaaccttgacatgcctcaatgatacagtgctttgtatacaaagacccaggacagaagcaagaggacagctggcttctagagtgctaaacacccagaaaatacaataggcaatttacagtttttactgacttataatttgctaagtattcacaatttgttaataaaaacagctactattaccacattgattctttcaatgaatttttattgagtacctgctatatgccagacaactgtgcactgtgaatacaatgattaaaaaaatagtaagcaaagacagacttcttgctttggggagtttatcatgtacttaaggggagcatatattaatcaaagaaacataaatgt

SEQ ID NO: 316569 - DNA, 599 bp, Homo sapiens
attctggagctgaattctctagcccctcctcactaacaactgaaactccttgctcttgtggactacctgttaaacacatagctgatctggctggggaatgaagcagcaactctggggcagaaattttcacaggtgtatcttgtgggttgagtaaagacctagcttctgataaaaatgagtctaattttgcctttgtgaaagagcaagcctgtggactcaatttgatcactactttacttggagtttcacttcctgtcatcaatttattggactgttcagcctctttgtcaatcattagcaagttgggctgttttacttctccctcccacatgtatctgtttccatggttcaaattagaatcatctatgctgtggggtccaatgctggtacttrctccctcatcaactatcccctcagacagctcctttaccctttcttttagttcagtgtttgtctctatctcactttctctacaatcctcagatttacggagctcttggctttccttatcctggttaacagattctctgaggtggatttctaccaacttctgagattctttgcactgtatatctaacagttgaggaggtggttctaca

SEQ ID NO: 316570 - DNA, 526 bp, Homo sapiens
atttccaggttcttctcaaggaaataatttttatataataaatctttaatgaaacatttaacactaactcttggttttttaaatgtgcatattgtgagactcatgctgtgtattctttatgaagtaaaacttggtctatgcattgttatattcactatgtccaaaataattcaaccttrttaataatcaagagaaatgttttttttgctttgtgaaaaaagaaaagtttttgctaagcataaatgacataaaccctccagaagttggaaagcccttttcaatagtagaaatactaaaatatgtttaagagacaaatgttagttaaacaatatagataaaagatggtcattttagggaaaggcaatctgaaaattgtaatgtgaatggttgctttctcagtgaaatggcagagcagagttgagtagtcttgataagaactaaatgaatctcaaagcctaaaatatttaccatctactttgttaacaaaatatttgcagatccctggtctacatttttttctgcttta

SEQ ID NO: 316571 - DNA, 472 bp, Homo sapiens
cagataaatgaaaaactgctcaacatcactaaccatcagggaaatgcaaawgaaaatcacaatgaaatattatctgttagaataactattaccaaaaagatgaaaaatatttgttggtaaggatgcagagaaaagggaacctttgtacattggtagtgggaatgtgaattattacagccattatggaaaacagtatgaaggttcctttaaaaattaaaaatagaactagcatataatcctataatccaacatctggatgtatatccaaaggaaatgaaatcaggacctcatagagatatctgtgttctaatgttcattgcagcattattcataatagtcaagacatggaatcaaccctattatatgattgagtgaatttccaatttttggaactacagtaaggaaaacaaaaactcaaggttaaattactttaaatcaatacctttgtaaagtttcagcatggtcaataaca

SEQ ID NO: 316572 - DNA, 472 bp, Homo sapiens
cagataaatgaaaaactgctcaacatcactaaccatcagggaaatgcaaatgaaaatcacaatgaaatattatctgttagaataactattaccaaaaagatgaaaaatatttgttggtaaggatgcagagaaaagggaacctttgtacattggtagtgggaatgtgaattattacagccattatggaaaacagtatgaaggttcctttaaaaattaaaaatagaactarcatataatcctataatccaacatctggatgtatatccaaaggaaatgaaatcaggacctcatagagatatctgtgttctaatgttcattgcagcattattcataatagtcaagacatggaatcaaccctattatatgattgagtgaatttccaatttttggaactacagtaaggaaaacaaaaactcaaggttaaattactttaaatcaatacctttgtaaagtttcagcatggtcaataaca

SEQ ID NO: 316573 - DNA, 609 bp, Homo sapiens
tttacaacacatatggtatcactgaacaagaattgatgttctgtatttagggacacaaaataaaccaccaccarcaataaccaaatattagcttacaggtagaatggcagaaatctgacatgagaaaagtttatattaaaatgaagatacagtctcagtataagccaagaatattatattaatgttaccaaggccgactaacaattaggcagccttaataaaagaagaatgtctggattcatggaagtaattattcttttctgttttatacttgtcagacggtaataaattatttgaactgttttttaaagagccccacatactttgagtgttcttaataggaatggtcaagatgagagatttagataatgtgtcattggagagtgatttaaataacttgccctggacaagaaaagatgcaataaggaacaggataactctctttcaatatttgaaaggctgttgtgggaaaatattcaaatattctttcctgtctacagtcaaaaatagaagaagcacatgtcaaatcacaggattttacaaaagttagaacagtccagcaaatggaacagctgattattgaagttataagagcctggctcatggatg

SEQ ID NO: 316574 - DNA, 453 bp, Homo sapiens
gactgccaaatccacatataggcttcagggagaaggagggttgtcttcacctcctgttgagaatcatgttagttcaagattattattattattattattatttgctttgggagtcttttttagtcttggaattcrttggtaaaagaaatacacagctgcctttgaaaggattcctatggcttaggagcacagcacatgagaggttttttttttaacacaatcaaggaaaaaaactgagccattctctgagtatggctgttccccctttcccccttttttctttaaaagaattgtggctttattgagacaaatgattttaactgatagattcattgggggacacgaggtgggaagtctttcttttctgagtaggttgaggcgtaaagattgtaaaacaaggtaggatgtacaggctttatgccgtaaggggtgattcatgatccaagtgtcgct

SEQ ID NO: 316575 - DNA, 453 bp, Homo sapiens
gactgccaaatccacatataggcttcagggagaaggagggttgtcttcacctcctgttgagaatcatgttagttcaagattattattattattattattatttgctttgggagtcttttttagtcttggaattcattggtaaaagaaatacacagctgcctttgaaakgattcctatggcttaggagcacagcacatgagaggttttttttttaacacaatcaaggaaaaaaactgagccattctctgagtatggctgttccccctttcccccttttttctttaaaagaattgtggctttattgagacaaatgattttaactgatagattcattgggggacacgaggtgggaagtctttcttttctgagtaggttgaggcgtaaagattgtaaaacaaggtaggatgtacaggctttatgccgtaaggggtgattcatgatccaagtgtcgct

SEQ ID NO: 316576 - DNA, 453 bp, Homo sapiens
gactgccaaatccacatataggcttcagggagaaggagggttgtcttcacctcctgttgagaatcatgttagttcaagattattattattattattattatttgctttgggagtcttttttagtcttggaattcattggtaaaagaaatacacagctgcctttgaaaggattcctatggcttaggagcacagcacatgagaggttttttttttaacayaatcaaggaaaaaaactgagccattctctgagtatggctgttccccctttcccccttttttctttaaaagaattgtggctttattgagacaaatgattttaactgatagattcattgggggacacgaggtgggaagtctttcttttctgagtaggttgaggcgtaaagattgtaaaacaaggtaggatgtacaggctttatgccgtaaggggtgattcatgatccaagtgtcgct

SEQ ID NO: 316577 - DNA, 575 bp, Homo sapiens
tttttttttaacacaatcaaggaaaaaaactgagccattctctgagtatggctgttccccctttcccccttttttctttaaawgaattgtggctttattgagacaaatgattttaactgatagattcattgggggacacgaggtgggaagtctttcttttctgagtaggttgaggcgtaaagattgtaaaacaaggtaggatgtacaggctttatgccgtaaggggtgattcatgatccaagtgtcgctacctatttgataaagggaatcctgctgctagagaataaatcttcaaatggagattttgatgtacaggaattgatgatctaagtctgcgtgtcttagttgaacttcagctaaagataggtatacagaagagaccattatacttgactagactgaaagattctgaatatgagcagaattttctttggatagagatatatttaggtacacataagtttgagcaagttcacaaaacatcaaaaggttggctatgccaatgaaagagtggtcagttttcaaaggccaactacaaattgtgacctagcaaatatcacagtttattgggctgt

SEQ ID NO: 316578 - DNA, 575 bp, Homo sapiens
tttttttttaacacaatcaaggaaaaaaactgagccattctctgagtatggctgttccccctttcccccttttttctttaaaagaattgtggctttattgagacaaatgattttaactgatagattcattgggggacacgaggtgggaagtctttcttttctgagtaggttgaggcgtaaagattgtaaaacaaggtaggatgtacaggctttatgccrtaaggggtgattcatgatccaagtgtcgctacctatttgataaagggaatcctgctgctagagaataaatcttcaaatggagattttgatgtacaggaattgatgatctaagtctgcgtgtcttagttgaacttcagctaaagataggtatacagaagagaccattatacttgactagactgaaagattctgaatatgagcagaattttctttggatagagatatatttaggtacacataagtttgagcaagttcacaaaacatcaaaaggttggctatgccaatgaaagagtggtcagttttcaaaggccaactacaaattgtgacctagcaaatatcacagtttattgggctgt

SEQ ID NO: 316579 - DNA, 575 bp, Homo sapiens
tttttttttaacacaatcaaggaaaaaaactgagccattctctgagtatggctgttccccctttcccccttttttctttaaaagaattgtggctttattgagacaaatgattttaactgatagattcattgggggacacgaggtgggaagtctttcttttctgagtaggttgaggcgtaaagattgtaaaacaaggtaggatgtacaggctttatgccgtaaggggtgattcatgatccaagtgtcgctacctatttgataaagggaatcctgctgctagagaataaatcttcaaatggagattttgatgtacaggaattgatgatctaagtctgcgtgtcttagttgaacttcagctaaagataggtatacagaagagaccattatacttgactagactgaaagattctgaatatgagcagaattttctttggwtagagatatatttaggtacacataagtttgagcaagttcacaaaacatcaaaaggttggctatgccaatgaaagagtggtcagttttcaaaggccaactacaaattgtgacctagcaaatatcacagtttattgggctgt

SEQ ID NO: 316580 - DNA, 575 bp, Homo sapiens
tttttttttaacacaatcaaggaaaaaaactgagccattctctgagtatggctgttccccctttcccccttttttctttaaaagaattgtggctttattgagacaaatgattttaactgatagattcattgggggacacgaggtgggaagtctttcttttctgagtaggttgaggcgtaaagattgtaaaacaaggtaggatgtacaggctttatgccgtaaggggtgattcatgatccaagtgtcgctacctatttgataaagggaatcctgctgctagagaataaatcttcaaatggagattttgatgtacaggaattgatgatctaagtctgcgtgtcttagttgaacttcagctaaagataggtatacagaagagaccattatacttgactagactgaaagattctgaatatgagcagaattttctttggatagagatatatttaggtacacataagtttgagcaagttcacaaaacatcaaaaggttggctatgccaatgaaagagtggtcagttttcaaaggccaactacaaattgtgacctagcamatatcacagtttattgggctgt

SEQ ID NO: 316581 - DNA, 529 bp, Homo sapiens
gcaaagaataatggactagcttgagacttaagacctttaaagatactaatctaatcacttatagagtaggctgcatttgtcttcctacttgagcctaaacaaatgatctttgctctaaaaatgactgatttgtgctagaaagaaagggaaagaatgagcaaattattagacaatatgagagccttaaggaaaataaaaaaaaaggagtttataccaacagcaacaaaaataactgctctgaaacagaagaaaattagaaccagtgaaacaaaatatgtgacaaagagaaaaaaaactgtttgctcccagatatttaaataacacaagaggcctctctcctggccttagtaggtcagtcttacccttacaagaaagcatcccccaagccaaaaaagaaaaaaaaaaaaaaaaaaaaaagacrccaaggcaaacaggaagaattctgggcctagtctttggaataaaatatgtgtagtgatggtcagtgacactcagtgacaggcatttataggctaaacaggagatgcag

SEQ ID NO: 316582 - DNA, 431 bp, Homo sapiens
ccacacaccctacaacaaaggtgcctcatggggcctcagtatgtgcagacggccacacagaggaccacatacaccccagtcccccagagccctcacagtacttatattcctcagaaaataaagcaaccagtgcaagtgctgaataggttgggataaagattttgccacttggctgcagggtagtttgtgataaaaattaagtttagttaaagaaaaataaagaaagttacatttcttgtccaccagttatacacactgtgcttaaggaaacagcaaaatagagcctggaaaaagaaaatattcaaaggaacatggtggtggtcttcaaatattagaaggacttcaaaatgtaatttgttctgggtattgtttcaggagayagaactaatttccagcaagtggaaactgtaaagtgacagattcttggtttt

SEQ ID NO: 316583 - DNA, 517 bp, Homo sapiens
gagaaccagtgatggagcccagaaggagagactttagaaaattgaaaggtattggaacccaccaatctgaaargatattgctttttaattggatcaaggtccctaaggattaagccagtaattctttaaatgcaggattataggaaaggccaaggaggaccctgagggggctataacattcaaggacctagggactccaaagagaggggctcagggtaacagctgtttactaaccggtacaggaatatttcaacatttcaataaattgcacagctgtcctgatgaatataggatggatgtcagctttgtcttaacatattcatatattggcctttgagtagttttttttgtggctatattggctccaacctcattggaggtaaatctttgggcagaatttaaatctgtatttcaaaaataatgtattttattcatgttttttattaggtccaacactgattcctaaagggttaataaggatggcttctctgaaaatgagattaaacatctcagatga

SEQ ID NO: 316584 - DNA, 517 bp, Homo sapiens
gagaaccagtgatggagcccagaaggagagactttagaaaattgaaaggtattggaacccaccaatctgaaaagatattgctttttaattggatcaaggtccctaaggattaagccagtaattctttaaatgcaggattataggaaaggccaaggaggwccctgagggggctataacattcaaggacctagggactccaaagagaggggctcagggtaacagctgtttactaaccggtacaggaatatttcaacatttcaataaattgcacagctgtcctgatgaatataggatggatgtcagctttgtcttaacatattcatatattggcctttgagtagttttttttgtggctatattggctccaacctcattggaggtaaatctttgggcagaatttaaatctgtatttcaaaaataatgtattttattcatgttttttattaggtccaacactgattcctaaagggttaataaggatggcttctctgaaaatgagattaaacatctcagatga

SEQ ID NO: 316585 - DNA, 517 bp, Homo sapiens
gagaaccagtgatggagcccagaaggagagactttagaaaattgaaaggtattggaacccaccaatctgaaaagatattgctttttaattggatcaaggtccctaaggattaagccagtaattctttaaatgcaggattataggaaaggccaaggaggaccctgagggggctataacattcaaggacctagggactccaaagagaggggytcagggtaacagctgtttactaaccggtacaggaatatttcaacatttcaataaattgcacagctgtcctgatgaatataggatggatgtcagctttgtcttaacatattcatatattggcctttgagtagttttttttgtggctatattggctccaacctcattggaggtaaatctttgggcagaatttaaatctgtatttcaaaaataatgtattttattcatgttttttattaggtccaacactgattcctaaagggttaataaggatggcttctctgaaaatgagattaaacatctcagatga

SEQ ID NO: 316586 - DNA, 513 bp, Homo sapiens
aaagttttaattgttcaatttcctttctaccgaataaaaatcttattccattgaacccccctttttttatatatttttctttcttgcccaaacacgaataaaattatcactattgccgttatatttgttccagggctcagaccttggggctttgggattttaaatattgttattatagttgtgggtaacattattcmaaggagcctcttttgcttaagtccttttaaaattcagggtacatcttagagctccctgtgcaccaacaccaagttttgtttatgtaattcaaattcttcttcacctagatgattgccaaatggaaattgaaagtcttcaaggactaaaaatacttggtgaacagtcagcaggtttgcagtgtctttggctatggaagcttggataaaatatgaacaggaatcaaattttaggtcaggacagacattaagaggacaaaacaagcaatattgagcagcaaagtgcatagcattgccaaccaatgcatgtcaaaaaaag

SEQ ID NO: 316587 - DNA, 531 bp, Homo sapiens
gacaattctaaataaaactgctcaaatggcttttcaaagccaacagcagaataaaggtttggtgaaaggaaaaaatccataggtgaaaatgtcaatctgaaatatggacatgtcttctgcaggccaataaattgttcttattacaaacccaaacagttttcagcagatttgtgagtcattaaaaatatatgagtgatatctgatcagtcaccagattctgctctttagtcatgtttgattttgcaaccaaagattagtccataaagggaacagtccctattcttcttaaaagagagaaactctgccacaccttaccaactatgtgcctttattaaaatctgtatatgtgcaagttataaagtcactttgtatacatttttaagtaattgctttwtatctgttacctgctgtttctggtattttcccctaaatgttactctttttagaaaaatatctatctccttatctctttcataaacttggtctggtgaatcactaattaaatatatctgcaatacattacagaagggt

SEQ ID NO: 316588 - DNA, 560 bp, Homo sapiens
ttttgcaaattttaagttcttctaaaacacaaacatatttaagatcaagttagcaacaagtgagaaaatgaatcaaataaagaaaaaaactacatgagtaaaaatcagcagataaaataagcagtagtgttggaatctcaagtaaaaatagttataacagacatatatatatgcacacgtacacacatatatacatataaatacatatatacacatatatattgcacaaatatttataaaacaaaaatgaaagactaaaacagagaataaggaatcattaaaaagakgaaagcagattttttataaggactagtaagtacttttaggaatccaaaatatgattactaaagttaagaatgttatgtttgcatttcataacatgttagacaaagctgaaggaagaaatcctgaacagaaaaatcataactgaagagctatccaaaattcattctagagaggcaaggagattgaaaataagaaaaaaagctaagagatatggataagagaatgagaaagtacaatataaagctaccctgatttccagaagcacagaagagatt

SEQ ID NO: 316589 - DNA, 535 bp, Homo sapiens
agttcatatttaagggtcaagaaagggactctatcctttgataacaggaattgcaaattatgttaaaagtggtactgatataggaataaagagaatcgtgaccatttttatactctaccctataaagtgaatcagactcttagagaaccacgtgaagagtttgtcattgtcttttgaaatgagaattcagtgcctggcgcatgactcacaaacgaaaacaataaagtcaaggctaaagggaamcaaaaaaaaaaaaaaaaaaagaggaagagagatgagcctgagtctggggggagaaagcagtactttctttcatgtgtgacaacaagtattttgtttcccatgggacatgcataaatcctgcagtgttaataatgagttacacagaaatgattctatccaaaacagtctccttcaggcaagtctgctttggggtggactgctgaaagataggagcagaggaaaaaatataaataaccagatggccgtgactttttggctccaacagaaaactgtagttgagaaagactgatag

SEQ ID NO: 316590 - DNA, 571 bp, Homo sapiens
ccttaagtgttataccaggccaamttattatataagtttactataaagagctattagagagaattctacatatcgtaaagattcatccttttccaaacagaaatagaacaccttgaacagaaagaggtagagaaataatgccaatagataactttgagtgagaagctccgtgtgccaggtacttttcaagtacttaggacacattgtttaattaaatctttacaatttcctccatgtcccacagataaagaaatatgaaaactaaggtagaaagtttaagtaacttgcacaactataagtggcagtaggcagattcaaactgaagaattcaggatccagagctaacatttttatcctaccctttactacctctgctattctatagagaattcagacacgtttcttctcttccaacaacctaacctccacaaggtcaaacttcaggtcaagacataggaaaggaggaaaaggggtgataaaatagaactctcagagatattaaggagaagctcttcgaaattaagggtgatgtatctggatttgtatttggaaatccaggaaaagatcacct

SEQ ID NO: 316591 - DNA, 571 bp, Homo sapiens
ccttaagtgttataccaggccaacttattatataagtttactataaagagctattagagagaattctacatatcgtaaagattcatccttttccaaacagaaatagaacaccttgaacagaaagaggtagagaaataatgccaatagataactttgagtgagaagctccgtgtgccaggtacttttcaagtacttaggacacattgtttaattaaatctttacaatttcctccatgtcccacagataaagaaatatgaaaactaaggtagaaagtttaagtaacttgcacaactataagtggcagtaggcagattcaaactgaagaattcaggatccagagctaacatttttatcctaccctytactacctctgctattctatagagaattcagacacgtttcttctcttccaacaacctaacctccacaaggtcaaacttcaggtcaagacataggaaaggaggaaaaggggtgataaaatagaactctcagagatattaaggagaagctcttcgaaattaagggtgatgtatctggatttgtatttggaaatccaggaaaagatcacct

SEQ ID NO: 316592 - DNA, 616 bp, Homo sapiens
tttttggaattttgatccttcaggattgggacttttgagattttagacttcaaagattttgatactttgggatttcaccatacaggattatgatccaaacccctggcaaccaccattttattctctatttcaatgaattgtatttattatacaatgaattttttcctttttcattcaggccttccttagcttgataagctttgatgggagcactatatggattcatrttcccttttcgggtagagcaatggcataggacccaaacaggacagagtaacagatggtatcagtggtattgaaagctgtttgccaaagtcatatattttatattagcaagatctggaaagtagacttgtgagtcattatcctgttgttttatcattcctggagtttggtttgaaatgatttttttcctaagtaaccccagtgaaaattaaactttaccaagatgttctcttcatttttaaattaaaatgaatccaacacattttattaagcacctgctgggactaactcctctgtgatgaatgccaaagagagaacacgacttgcccttgaaaatcctggatttagagagaatctccaagccacatttcctcatccataaaacgaagtt

SEQ ID NO: 316593 - DNA, 575 bp, Homo sapiens
tgtcatatcctgggaaatctatagaaatgtctattagacctttttgacattgaattaattttgttggcracagttgggaaggaaatgttcatgtaaatgaagtaaaatttgtcatggacagatatgaccttgacaatgtatatcttcctgggaacccatagaaatcttgagacggactttggataaacctaggtagcagaatcaagggttcaaagatgtcagggagttgttttacgttttttccaaggtggtggactgaagacattgttagtatgtgtctcccacttggaaagacaaaatattgtgtagagattcatgctgtgaacttttttccaagaagcaccacaggaacttaaaaggaaaactgaaagaagccacagaccctttgaaagaagtggccagcagcagcctagaccataagccaggaagaaaactgtgagtcccagagtgggagagggagagagactgcctgtgtgatatactctcccattggtgaacctggcaatccaggttaaccctatgcagtcctagagctgatttagtgagtggtggggagtatatgaggaggggtggca

SEQ ID NO: 316594 - DNA, 575 bp, Homo sapiens
tgtcatatcctgggaaatctatagaaatgtctattagacctttttgacattgaattaattttgttggcgacagttgggaaggaaatgttcatgtaaatgaagtaaaatttgtcatggacagatatgaccttgacaatgtatatctycctgggaacccatagaaatcttgagacggactttggataaacctaggtagcagaatcaagggttcaaagatgtcagggagttgttttacgttttttccaaggtggtggactgaagacattgttagtatgtgtctcccacttggaaagacaaaatattgtgtagagattcatgctgtgaacttttttccaagaagcaccacaggaacttaaaaggaaaactgaaagaagccacagaccctttgaaagaagtggccagcagcagcctagaccataagccaggaagaaaactgtgagtcccagagtgggagagggagagagactgcctgtgtgatatactctcccattggtgaacctggcaatccaggttaaccctatgcagtcctagagctgatttagtgagtggtggggagtatatgaggaggggtggca

SEQ ID NO: 316595 - DNA, 563 bp, Homo sapiens
cctctgtggaaaacagtatggagatttctcaaagaactaaaaagagatctaccattcaatctatcggtaccactaccgggtagctacccaaaacagaaggaggcattagatcaaaaagacaactgcacacatatgtttatcaaagcacaattcacaattgcaaagatatgaaactaayctaagtgctaatcaaccaatgagtggataaagaacatgtggtatatacacaccatggcatactactcatccattaaaaagaacaaaataatgcctttcacagcaacttgggtggaactggaggtcataattctaagtgaagaaattcaggaatggagaaccaaatgttttatgtgctcacttataaatgggaagctaaactatgcgtacgcaaaggcatatagagtggtataatggacattggagactcagaagggggaagctgtggaaggggggaagggataaaaaactacatattggatacaatggactttacttgggtgacgggtgcactaaaatttcagacttcaccacgttataattcatccatgtaaccaacacccttt

SEQ ID NO: 316596 - DNA, 500 bp, Homo sapiens
tcttcatggcagcccctcctgtcacaggcccagagtcctaggagaaataaatggytttatgggccaggcccaggaccttgctgctttgtgcagtctcaggacatcgttccctgtatcccagttatggctaaaaggggccaagctatagcttgggccatgacttcagagggtgcaagccccatgccttggcagcttccatgtgatgttgagcctgagggtgcacagaagtcaagaattaagatttgggaatctctgcctagatttcagaggatatatggaaatgcctgggtgcccaggcagaagttttctgcagggttggagcccttatggagaccctctgctaggtcagtgtgaaagggaaatgtgcggttgcagccgtgacacagagtccccactggggcactgcctagtggagctgtgaggagaggaccattgttctctaggtcccagaatggtagatccactgtcagctcgcaccttacacctggaaaagccacaga

SEQ ID NO: 316597 - DNA, 500 bp, Homo sapiens
tcttcatggcagcccctcctgtcacaggcccagagtcctaggagaaataaatggctttatgggccaggcccaggaccttgctgctttgtgcagtctcaggacatcgttccctgtatcccagttatggctaaaaggggccaagctatagcttgggccatgacttcagagggtgcaagccycatgccttggcagcttccatgtgatgttgagcctgagggtgcacagaagtcaagaattaagatttgggaatctctgcctagatttcagaggatatatggaaatgcctgggtgcccaggcagaagttttctgcagggttggagcccttatggagaccctctgctaggtcagtgtgaaagggaaatgtgcggttgcagccgtgacacagagtccccactggggcactgcctagtggagctgtgaggagaggaccattgttctctaggtcccagaatggtagatccactgtcagctcgcaccttacacctggaaaagccacaga

SEQ ID NO: 316598 - DNA, 500 bp, Homo sapiens
tcttcatggcagcccctcctgtcacaggcccagagtcctaggagaaataaatggctttatgggccaggcccaggaccttgctgctttgtgcagtctcaggacatcgttccctgtatcccagttatggctaaaaggggccaagctatagcttgggccatgacttcagagggtgcaagccccatgccttggcagcttccatgtgatgttgagcctgagggtgcacagaagtcaagaattaagatttgggaatctctgcctagatttcagaggatatatggaaatgcctgggtgcccaggcagaagttttctgcagggttggagmccttatggagaccctctgctaggtcagtgtgaaagggaaatgtgcggttgcagccgtgacacagagtccccactggggcactgcctagtggagctgtgaggagaggaccattgttctctaggtcccagaatggtagatccactgtcagctcgcaccttacacctggaaaagccacaga

SEQ ID NO: 316599 - DNA, 498 bp, Homo sapiens
aggggtaagagagggagaggaaaaaggagatggagggagagagaagaatggaaaaagaacatgtgaattttctgacatctcytcttataaggtcactaatcccgttgatagagccccacatttatgatctcaattaaccttaattacctccatagaagtcccttctccaaatatagtcacattgggggtttgggcttcagtacatgaattttgggggaacatttcttattccaccttggcctcatatcagttctgagactcagacatcattattcacacattcggatgaggttcagaaagttgaggggcatactgaagtttagagagctagtacaggtccaagctgggaatttaatttagatatttcaactccatatttgtctcttgttatgacatttcttgtgatctccaggaatgatacctattctttcagtttttcaagccactaacctcagcctcagtttggttatctttctaatgtacagcacctttcttctc

SEQ ID NO: 316600 - DNA, 498 bp, Homo sapiens
aggggtaagagagggagaggaaaaaggagatggagggagagagaagaatggaaaaagaacatgtgaattttctgacatctcttcttataaggtcactaatcccgttgatagagccccacayttatgatctcaattaaccttaattacctccatagaagtcccttctccaaatatagtcacattgggggtttgggcttcagtacatgaattttgggggaacatttcttattccaccttggcctcatatcagttctgagactcagacatcattattcacacattcggatgaggttcagaaagttgaggggcatactgaagtttagagagctagtacaggtccaagctgggaatttaatttagatatttcaactccatatttgtctcttgttatgacatttcttgtgatctccaggaatgatacctattctttcagtttttcaagccactaacctcagcctcagtttggttatctttctaatgtacagcacctttcttctc

SEQ ID NO: 316601 - DNA, 498 bp, Homo sapiens
aggggtaagagagggagaggaaaaaggagatggagggagagagaagaatggaaaaagaacatgtgaattttctgacatctcttcttataaggtcactaatcccgttgatagagccccacatttatgatctcaattaaccttaattacctccatagaagtcccttctccaaatatagtcacattgggggtttgggcttcagtacatgaattttgggggaacatttcttattccaccttggcctcatatcagttctsagactcagacatcattattcacacattcggatgaggttcagaaagttgaggggcatactgaagtttagagagctagtacaggtccaagctgggaatttaatttagatatttcaactccatatttgtctcttgttatgacatttcttgtgatctccaggaatgatacctattctttcagtttttcaagccactaacctcagcctcagtttggttatctttctaatgtacagcacctttcttctc

SEQ ID NO: 316602 - DNA, 529 bp, Homo sapiens
tatgcttgtaatcctagctgcttgggaggctgaggctggagtatcacttaaacctgggagacagatgtttcagtgagccaagatcacgccactgaactctagcctgggtgtcagagcaagacttggtctcaaaaacaagttaaaaaaattaaaaaaataaataaaaagaggtagacgcgaaactgcagttacggtgaccaatagtcatccgtgttcacgtctctttaaaaatttgtattacaaaaatatgtgtatrtatatggcctctactgaattgaaaagacctgacattgataatgcatttcataacgaatataatttgatgatgtgatgaacataatgcatccctaataatctcatgattctttctttccctcagcaaataattttaagcttaggtcatgtgttttaaactgtgttggaagcaggggcactgtggagaatgtgcagaaagagctctctaaccgcacttaattttcattctagtgaggggggctggtggcttcaagaaacaagtcaacaaaggagg

SEQ ID NO: 316603 - DNA, 484 bp, Homo sapiens
cagtgctgttgcttttcaggtgacagttctggcaggtagatacctggaggtgtcagatctctgtgctccaagaggtacctggaaacccatgctccttccagcttgctgccaggcactcttgatgtgcggtgtggacctggtgggcctgctggaagctggccaagtctgcagtctagctggccrgaaggggaaggaggaagccaagggccagcagtttccttgggaggaaggaggggaacctgctcacataccttctcctcatgtcccgccagctacgacccagctgccctctgctgtagaggaggcagggactgtggccacatgcccggctaggacgaggggagtcctaagggaaagggggggcaggagaagccagtggctgcacagtcactgaaggtgtgaggcagggggaaatagaggggagtggggtgggggcagagaagtaacccctggatcattggaaatggtcacactgatggccctt

SEQ ID NO: 316604 - DNA, 484 bp, Homo sapiens
cagtgctgttgcttttcaggtgacagttctggcaggtagatacctggaggtgtcagatctctgtgctccaagaggtacctggaaacccatgctccttccagcttgctgccaggcactcttgatgtgcggtgtggacctggtgggcctgctggaagctggccaagtctgcagtctagctggccagaaggggaaggaggaagccaagggccagcagtttccttgggaggaaggaggggaacctgctcacataccttctcctcatgtcccgccagctacgacccagctgccctctgctgtagaggaggcagggactgtggccacatgcccggctaggacgaggggagtcctaagggaaagggggggcaggagaagccagtggctgcacagtcactgaaggtgtgaggcaggggraaatagaggggagtggggtgggggcagagaagtaacccctggatcattggaaatggtcacactgatggccctt

SEQ ID NO: 316605 - DNA, 511 bp, Homo sapiens
atgaagagtctgttccaggctcctttcccagctgctggttgtttgtgggcactctttgttattctttggcttgtagaggcatcaccctgatctctattttatcttcaaatggtgttctccctgtgtgtctttgtgtgtgtgtatacgtccaaatgtcttctttttataatgacaggagtcacatccaaatgtcttctttttataatgacagcagtcacattgagttaggggtatacctactctagtgtgactccatcctaacttaactacaataatttcatctgcaaagaccctktttccaaagaaaatcacattctgaggttcctggagttaaaaattgtacatataaattttgggggacacagttcaacctgtaacatgctccaatagaaaaaatcccaggagaactctaactgacgttgtgtgctcacccacatcgccagggaaccacggtctttaacctggagttggaagggaacagtgttagagaaaataaaccactgagcaatca

SEQ ID NO: 316606 - DNA, 511 bp, Homo sapiens
atgaagagtctgttccaggctcctttcccagctgctggttgtttgtgggcactctttgttattctttggcttgtagaggcatcaccctgatctctattttatcttcaaatggtgttctccctgtgtgtctttgtgtgtgtgtatacgtccaaatgtcttctttttataatgacaggagtcacatccaaatgtcttctttttataatgacagcagtcacattgagttaggggtatacctactctagtgtgactccatcctaacttaactacaataatttcatctgcaaagaccctttttccaaagaaaatcacattctgaggttcctggagttaaaaattgtacatataaattttgggggacacagttcaacctgtaacatgctycaatagaaaaaatcccaggagaactctaactgacgttgtgtgctcacccacatcgccagggaaccacggtctttaacctggagttggaagggaacagtgttagagaaaataaaccactgagcaatca

SEQ ID NO: 316607 - DNA, 510 bp, Homo sapiens
atgttcacacaaaaacttgtgcacagatgtatatgatagctttattcataatttccaaaacttggaagcaaccaagatgtccttcagtaggtgagtgaatgaaaatatctgtagcatatccagacaatggaatattattgagtgctaaaaagaaataagctattaagccatacaaagacatggaagaatagccttaagtacatattrctaagtgaaataaaccaatctggaaaggttgtgtgatttgaactatacaacattctgaaagagacaaaacgatggagatcagtggtggctaggggttttgggaaggaagagacaaatagatagaacaccagtctggaggatttttagggcagtgagacttccctggatgataccaaaatggtggacatgtgtcattctgcacttgtccaaatccacagaatgaccagcaccaagagcaaaccctggactctggatgatagtggcatgtcaatgcatgccaattaatttcagtaagtataccac

SEQ ID NO: 316608 - DNA, 557 bp, Homo sapiens
aattttatgtgccagatgttccccaatgctgcaaatctcggttctgtgagtgacattgattgaaagacatgatatcaatcacaacatttattaagtatgtaaaggagtaagcagcactaaattaataacttctgagaccttggggccccaaaatagccagcagataggcctcggggaagagcaaatgaatcaatgtgatcaattatttgtcatttactatttaaataagccccggggataacattaacatygcagtcaaagttgcataagcctctcagtaatatctggagttattattttgggagaaggtcagtcttttattcacgccaaacttctaaattcgaattatagatggcacttgatccataggaaaggaagcggagtgaggatgctggaggagggaagggtgcccaagaggcagcggacaggagggaaggaggctaggctgcctggagtgtgtgctccacagcctgagggtgaagaaactgctgggtagaaatgaagccttccaatgtgtgacttggcgaaggtggatatttgaacacagtctacggttg

SEQ ID NO: 316609 - DNA, 588 bp, Homo sapiens
gctacctcgtgacagacagcccactggccagcttttgttttggtgaggccaggccagaccaggtggtgtttactgagggaaaggaacttccagattagtccaggctaaattgctaaacgagagagtccctgaagttcagcaagagttrtgtagatagtcaagaaccccctcatttgtttgacatgctaagcactgccatgtgtctgtaggctgaaggctagctcactctggtgggcagccagacggccagacagcgggcccatcccagctacagtgattgaaatggatgtgcttttcccgctgatcaaagacactgcaataacttcacaaaataaggctgcctctttgagtatgcttcagtcacattgactggctgccaaaatgccgggagatgaatgctttctcctttctccaacctccatcacttagctgggcttttttttttttttttttctcctaagaccaaaacccagagataaactacattgctttaatattctttagaatattgatatgcacgcatcccggtattaacatattttagccctgggaattattacacagtaaccctctcttgaagtttatggg

SEQ ID NO: 316610 - DNA, 574 bp, Homo sapiens
agggctctgcacatccttcctgagccttcaccacacccgtctctggtggccataggagagccatggaatctctggtgtaaaagattcataaagggtacttggtccaagaacccttctattgcttgagtccccattatgtcacccctctcacagaattctagtctgacacttcagagatggggctgcccactgttgaataaaccgtagggatgagaccacagaggctgcaaaaagaatatctatccctttgacacatcctgggaaatgctacactcaaccctcagaccatcaagcactggattttcttgggggaaaaatcaattaaaatgttacccagactgaaaaatgagaggcacttacttgggtttcattgcaaaaggagytgtcccactgagccaagaatattaaagaaaaaattagcattgtatcacctacagtgaccctgaaaccccatcaaatacttcacacccacctagtctcttatcaaaaatgaatgaaatgctgaaagataacccaaaatatcaaactgtgtgttgaaaacaacctttctaaattacaacatgaaattccagag

SEQ ID NO: 316611 - DNA, 574 bp, Homo sapiens
agggctctgcacatccttcctgagccttcaccacacccgtctctggtggccataggagagccatggaatctctggtgtaaaagattcataaagggtacttggtccaagaacccttctattgcttgagtccccattatgtcacccctctcacagaattctagtctgacacttcagagatggggctgcccactgttgaataaaccgtagggatgagaccacagaggctgcaaaaagaatatctatccctttgacacatcctgggaaatgctacactcaaccctcagaccatcaagcactggattttcttgggggaaaaatcaattaaaatgttacccagactgaaaaatgagaggcacttacttgggtttcattgcaaaaggagttgtcccactgagccaagaawattaaagaaaaaattagcattgtatcacctacagtgaccctgaaaccccatcaaatacttcacacccacctagtctcttatcaaaaatgaatgaaatgctgaaagataacccaaaatatcaaactgtgtgttgaaaacaacctttctaaattacaacatgaaattccagag

SEQ ID NO: 316612 - DNA, 574 bp, Homo sapiens
agggctctgcacatccttcctgagccttcaccacacccgtctctggtggccataggagagccatggaatctctggtgtaaaagattcataaagggtacttggtccaagaacccttctattgcttgagtccccattatgtcacccctctcacagaattctagtctgacacttcagagatggggctgcccactgttgaataaaccgtagggatgagaccacagaggctgcaaaaagaatatctatccctttgacacatcctgggaaatgctacactcaaccctcagaccatcaagcactggattttcttgggggaaaaatcaattaaaatgttacccagactgaaaaatgagaggcacttacttgggtttcattgcaaaaggagttgtcccactgagccaagaatattaaagaaaaaattagcattgtatcacctacagtgaccctgaaaccccatcaaatacttcacacccacctagtctcwtatcaaaaatgaatgaaatgctgaaagataacccaaaatatcaaactgtgtgttgaaaacaacctttctaaattacaacatgaaattccagag

SEQ ID NO: 316613 - DNA, 553 bp, Homo sapiens
aagaaagcaaaaatctaacatcatccctcaattgtaacctacaaagggacccgggaggascccctggagggagcacctttctaattaactcactggccaagagaagaactgtctccagctccagcccagatggagatgtgaggatggtctaaaagctcaactgccagagagaactcagggcggtcagagggaactagaggtaggggatgagggaatactagggcttccttggcaaggctaaaagcagtagtaagtgcctatcactcctcctgcatactcctatcgaagggtctggcatgttaggaggttctgaagtcagcaacagttggaatagaggcaatataggcagtcaagagcatgggctttgtggtcaatgattcaggctctaccccttgttttctctgtgaccttggccagttcaggttccttacgtgtaaaagtaaggtaactcttgcacatgcctcacagggtcattgtgaagattaaatgcaatcgtgtgtgaaaaacattaaacctggtggcacagtaagttgctaaatggtagctactattc

SEQ ID NO: 316614 - DNA, 613 bp, Homo sapiens
gaagaattagatgaaacctaattcttgtcacttatttcatatctttatcttctgtaacatatagatggttaaaaaatattttaaacactaggtatattaagaaatgccttggtagccaacccctgatttaaaaaaaaaaaaaacttagcaagagttcatatttccttataaaagcagaacagaggctccatccaacactcatctatgggaagatgctgttctcaagttctagcgtattagctggccaggtacattgtcttcctgaatgcaaaaggaattcctggtgcactggagatgcaatggaggagaggttcaatggaggcgagaactgaagagaagagcaaagaagcaaatctgtcaatgctgaacctgccaattactcaaaaggcgacactgactatagtgaacacatgacaaagccttaaaaacaagggccaaaacttccaggagcagagagggagactaggagagtctgtaggcatatgtgtcatgttattgcaaaacttcagctgcccagtggaacctttccaacatcaacaatccccaggccagaaaacaaacctggcgtcacagggtctgagtgtgraaaaaggatgtgtggggtgtaaaagaa

SEQ ID NO: 316615 - DNA, 592 bp, Homo sapiens
ctgaaaacattctgtttatttctcccatcatccagatgaaaatcttggactgcccatcgggcccagccatcagcaaagaaggtctgcactcaaggagggcaaaaaggttttttggggaagctttgcccttttgcaggtcaaggacctccacagatttcccagatgtagtcagagaagcccatgaggcataaagccacktgcagggaaggaatcttcctgcagggtagggtcactgagggtgaagagatacagctgctctgccacggggaggtcctaaatggaaatctttatgaagtgagaaacgacaagatgccctgctgccaggaatcacctgtgaaatccagcatgctcaaaggctgggaagccaagccaaagcgaacagcaccctctaaccatcatctccgggcacctgggctcctggcttctgacccagcaaataagagcacctcttctaccaaacacaagtccaaggcctaggtccaaggtctacatcagttctgcttccaggcaagccctggagcaacaccaggccccacactgggcactggggagagaacaaggtttctatatgtgctcctgcctcccagtctta

SEQ ID NO: 316616 - DNA, 556 bp, Homo sapiens
ccatgaggcataaagccacgtgcagggaaggaatcttcctgcagggtagggtcactgagggtgaagagatacagctgctctgccacggggaggtcctaaatggaaatctttatgaagtgagaaamgacaagatgccctgctgccaggaatcacctgtgaaatccagcatgctcaaaggctgggaagccaagccaaagcgaacagcaccctctaaccatcatctccgggcacctgggctcctggcttctgacccagcaaataagagcacctcttctaccaaacacaagtccaaggcctaggtccaaggtctacatcagttctgcttccaggcaagccctggagcaacaccaggccccacactgggcactggggagagaacaaggtttctatatgtgctcctgcctcccagtcttaaggggagtcacactccaaatcccccttcacatgtaataagtttactctggataagttgagcccctccttttacttctctggatagcaatatcctcttctaaaattgaaggatacctgcctacaaaatctcgggacacttttt

SEQ ID NO: 316617 - DNA, 556 bp, Homo sapiens
ccatgaggcataaagccacgtgcagggaaggaatcttcctgcagggtagggtcactgagggtgaagagatacagctgctctgccacggggaggtcctaaatggaaatctttatgaagtgagaaacgacaagatgccctgctgccaggaatcacctgtgamatccagcatgctcaaaggctgggaagccaagccaaagcgaacagcaccctctaaccatcatctccgggcacctgggctcctggcttctgacccagcaaataagagcacctcttctaccaaacacaagtccaaggcctaggtccaaggtctacatcagttctgcttccaggcaagccctggagcaacaccaggccccacactgggcactggggagagaacaaggtttctatatgtgctcctgcctcccagtcttaaggggagtcacactccaaatcccccttcacatgtaataagtttactctggataagttgagcccctccttttacttctctggatagcaatatcctcttctaaaattgaaggatacctgcctacaaaatctcgggacacttttt

SEQ ID NO: 316618 - DNA, 393 bp, Homo sapiens
ttcacagccactgagatatatgtggatccagagtctgcatgatacataaacaaggcagttcacttttttaggtatctcccatgtagaattccaaaggttaatggatcaatggctttcctcactacattgagatagatagatatagataggcagataggtagatagatagatagatagatagatagatagatagatagatagatagataggcaagagcttgtttattctgctccttcygggagtttgcgtggaagagcttcccccaagttccaggggagatcagagatcccagcacataaatgaacacaggtgggtcagacaaaggcagctcttccagaaaggtccctgatgccctggttttcactcatacatgccaccgaacatctggcccat

SEQ ID NO: 316619 - DNA, 546 bp, Homo sapiens
tgggtttttggagaaagagatcttcgggccctacagaccttttctcaacgaatgtgggaaggacctggctttaaaacacgcacacaaacacacaaataaacagacataagatgtcatcacgaaactgcccacggatctttaggctttctgcatygacataaatacattttctaagggggggggggaagaaattaaaaaacacctgttaattttaaacacattttttaagaaaaaaataattaaaaaagaaacagtgctcatgtcataagctatgttgacagttgccagtggaaatgttgggttggttcaaaaaaaaaataaaagctatactatatctctctacatacagcttgcttctacctgtgtttcttcagtgaaaggtccagggggccactgtgggcttcttgtgaggagacgtgactcaggtgaaggtgtcacctcctctcacactcaggtgccaatgtgtcagacccagtatattctaagcaaaaatacttcaggaaaatgccacttgtcaaaacctggactttgcgaagttggaagatg

SEQ ID NO: 316620 - DNA, 546 bp, Homo sapiens
tgggtttttggagaaagagatcttcgggccctacagaccttttctcaacgaatgtgggaaggacctggctttaaaacacgcacacaaacacacaaataaacagacataagatgtcatcacgaaactgcccacggatctttaggctttctgcatcgacataaatacattttctaagggggggggggaagaaattaaaaaacacctgttaattttaaacacattttttaagaaaaaaataattaaaaaagaaacagtgctcatgtcataagctatgttgacagttgccagtggaaatgttgggttggttcaaaaaaaaaataaaagctatactatatctctctacatacagcttgcttctacctgtgtttcttcagtgaaaggtccagggggccastgtgggcttcttgtgaggagacgtgactcaggtgaaggtgtcacctcctctcacactcaggtgccaatgtgtcagacccagtatattctaagcaaaaatacttcaggaaaatgccacttgtcaaaacctggactttgcgaagttggaagatg

SEQ ID NO: 316621 - DNA, 321 bp, Homo sapiens
gcacggaggagagtggctgccagtggacccctccagcctcactgggctcctcctgggctttgtgctgcttcatggcatgatcatatttgaagactgaaaagaaagagctcaagcttcacagccgagggctctgagttctaatcctggataggctgtgtaatcttggatamataatttaactgataaacaaacaggatgaatcatgcttacagcatcccagggcagttatgagagcaatgaaataacatacacataaaggctcggccactaaggtcctcccatgtttgcttccttatcagtcttgcttttgagacaagggaa

SEQ ID NO: 316622 - DNA, 487 bp, Homo sapiens
ttacttacagctccatttgggccccaagtttgtcctgactcacttcaagggggctggggtgagggagacaggaatattcacaactccaattctctcttttttctaagtcaagagaagtaaatatatatatatatgcatgccagtagtctgggaataaatgattgctgtgccctgaagttgataaatccccttcttggaaaggcagtgagaagaatmtataaaatcattttatttaacagtgtatctgttcccagcactgaagagaacaagtggctggttatctgattcatggctttagagatgttggatctctctgtcttgtcttctctcactgctgggaatcttattttgagagaacaaatttgatccaagtagaaaagagagaagtttgtattgtatacacgtgaaacactgggtccaaacaaaaccttctaataattaggaagagagaggagctggctcttcaggacttgggtcaaatgcagtc

SEQ ID NO: 316623 - DNA, 454 bp, Homo sapiens
tcgctctgtagcccaggttggagttcagtggtgcgatctcggctcaccgtaacttccgcctcccgggttcaagcgattctcctgcctcagcttcctgagtagctgggattacaggtgcacaccaccatgcctggctaatttttttgtatttttattagagatggggttttgccatgttggccaggctggtctcaaactcctgacctcgggtgatccacccacctcggcctcccaaagtgctgggattacaggcgtgagccaccatgccggccacaacttttatcattcattccataactagcttgcttgagcttttccaaaaacaacttagccattcttagttcacagccagttctayatattcctagtcccttgagaagcataagcccaacatgaattccctcttctcttcccaagtgagagcgaggtcctcttacagtatgagggggcaggg

SEQ ID NO: 316624 - DNA, 545 bp, Homo sapiens
tatctacaagcctgccaccagggctgaagtctacaygtgcccagttcttgccccactgagcaactgacactgaagttaccaccagggcaatgtggaactcaagaatgggaaagagctgtccctctcaaccctccccatccccaagcctgcgagccaaaggctcacaggtacccggtgaaaggccaaagaatggatcaggagcctgaggctgcaggctgagatccagaatgaccctgaccacctgtgggccctctggccttcctgagcctcagtgtgctcacctgtaaaatggagacgattgtacctgttctttatttttagggctgtgacaatgaaaggagatgccaaagatctttgtaaactggagaatggttctacaaagtcttatgctcacaactgcttttagatttgatatttttgatctctctcttcccactttagctaaattaagcaaagactttcaggggaaggccctgctggaaagactctactgtttgaaagcaaattgtttccctcacccaggtctccatggattatgtacagaa

SEQ ID NO: 316625 - DNA, 545 bp, Homo sapiens
tatctacaagcctgccaccagggctgaagtctacacgtgcccagttcttgccccactgagcaactgacactgaagttaccaccagggcaatgtggaactcaagaatgggaaagagctgtccctctcaaccctccccatccccaagcctgcgagccaaaggctcacaggtacccrgtgaaaggccaaagaatggatcaggagcctgaggctgcaggctgagatccagaatgaccctgaccacctgtgggccctctggccttcctgagcctcagtgtgctcacctgtaaaatggagacgattgtacctgttctttatttttagggctgtgacaatgaaaggagatgccaaagatctttgtaaactggagaatggttctacaaagtcttatgctcacaactgcttttagatttgatatttttgatctctctcttcccactttagctaaattaagcaaagactttcaggggaaggccctgctggaaagactctactgtttgaaagcaaattgtttccctcacccaggtctccatggattatgtacagaa

SEQ ID NO: 316626 - DNA, 625 bp, Homo sapiens
aataatcttttcttacattattatgatccttatattttacttgattttcttcaaaaaagtgtgaaatatctaataacgtcataactctgagccaaggaatctggacctagtcctaccaaatgtgtaccagaaccaagactgtgtcccattgaaagcagaaatatttcagcyccttccaagaagcactcagcaccttcttctcccccagtaccttgggtcttcccagtgtcaatccagagcatatcagaattgaaataccagataaaagtgaaatgcaaagtgatatttcggtgccgttacattcggttttgtaatatcagcaacttttagataacattaatatgagcaaattaacctctcataggttttattatttttcataagtaataaaagaatgctcagcagaaagcccccagctcttgagtgttacataaaagtgatctcaaatttttaatatggcgcaaagcttgttaatcctgcttggatttcatgcttaaaccttcattagtacattagtcttccaaatataatttatttagacttaagtactccaattcttatgatgaagtggcaaaagctgtgccgtattttgcaaattgcagatggcattttctagactagaatt

SEQ ID NO: 316627 - DNA, 625 bp, Homo sapiens
aataatcttttcttacattattatgatccttatattttacttgattttcttcaaaaaagtgtgaaatatctaataacgtcataactctgagccaaggaatctggacctagtcctaccaaatgtgtaccagaaccaagactgtgtcccattgaaagcagaaatatttcagctccttccaagaagcactcagcaccttcttctcccccagtaccttgggtcttcccagtgtcaatccagagcatatcagaattgaaataccagataaaagtgaaatgcaaagtgatatttcggtgccrttacattcggttttgtaatatcagcaacttttagataacattaatatgagcaaattaacctctcataggttttattatttttcataagtaataaaagaatgctcagcagaaagcccccagctcttgagtgttacataaaagtgatctcaaatttttaatatggcgcaaagcttgttaatcctgcttggatttcatgcttaaaccttcattagtacattagtcttccaaatataatttatttagacttaagtactccaattcttatgatgaagtggcaaaagctgtgccgtattttgcaaattgcagatggcattttctagactagaatt

SEQ ID NO: 316628 - DNA, 625 bp, Homo sapiens
aataatcttttcttacattattatgatccttatattttacttgattttcttcaaaaaagtgtgaaatatctaataacgtcataactctgagccaaggaatctggacctagtcctaccaaatgtgtaccagaaccaagactgtgtcccattgaaagcagaaatatttcagctccttccaagaagcactcagcaccttcttctcccccagtaccttgggtcttcccagtgtcaatccagagcatatcagaattgaaataccagataaaagtgaaatgcaaagtgatatttcggtgccgttacattcggttttgtaatatcagcaacttttagataacattaatatgagcaaattaacctctcataggttttattatttttcataagtaataaaagaatgctcagcagaaagcccccagctcttgagtgttacataaaagtgayctcaaatttttaatatggcgcaaagcttgttaatcctgcttggatttcatgcttaaaccttcattagtacattagtcttccaaatataatttatttagacttaagtactccaattcttatgatgaagtggcaaaagctgtgccgtattttgcaaattgcagatggcattttctagactagaatt

SEQ ID NO: 316629 - DNA, 523 bp, Homo sapiens
ccctagtgtaatcatacaaaaaaaatacaaagatatatactcaaaaacataaatgcagataaatcaatatggaatactaatctacaggaacacagaaaaagcacaatgaaacaaaaaccagagagaacaaacagaataatattaacatggtagacttaaatccaaacatatcaacaattgcattaaatatgaatgttctaaacacacctattaaaatatagtgactggctaaatggatgaaaaaatctatatgctgtctacaagaaacgcttttcaaatgtaattccataggtatgttaaaaggatggaaaaattcatactttgcttttyatcctgtttttagaagtaaccatttctgtttgctgcaatcatgaatgatgtttcctattgtgaaatatcattcatgattgcaaaaagacaacactaatactaatcaaaataaaactggagtggatataataatatcagataaagtagattttagaacaaagattaccagagctaaacagagacatgacataat

SEQ ID NO: 316630 - DNA, 525 bp, Homo sapiens
tatcccagggcctggatagacatagatrgagactccaagaatccagggttgaagagtcttttaagggagaggttgaaatatgggaactttttccagatactgactgacaagtagtatcatcaatgacataaaccatcagcaacgaggctcagcagaggaaaacagacggctccttgaatttatcaagctgttgtagtggtaggcatttcctaagtgatactgggctggctgaaagaactcagcctcatttcaaatgtgcataatatactccagactcaagggatgcagccctttatctcctataagattttacaaatccgtggagtcaaaggaaaaagagtctaacgttcaaatggcagaagaatttttaatcaagtagaaccttcctattgaggaggtcaccatccgaccccaacagctcatataagggcaagaggcatagcctttgggagaagcgctggcccaagcagcactgagggattcccactcggtgggtgcgaatcctggccaaggggatggtcacat

SEQ ID NO: 316631 - DNA, 525 bp, Homo sapiens
tatcccagggcctggatagacatagatggagactccaagaatccagggttgaagagtcttttaagggagargttgaaatatgggaactttttccagatactgactgacaagtagtatcatcaatgacataaaccatcagcaacgaggctcagcagaggaaaacagacggctccttgaatttatcaagctgttgtagtggtaggcatttcctaagtgatactgggctggctgaaagaactcagcctcatttcaaatgtgcataatatactccagactcaagggatgcagccctttatctcctataagattttacaaatccgtggagtcaaaggaaaaagagtctaacgttcaaatggcagaagaatttttaatcaagtagaaccttcctattgaggaggtcaccatccgaccccaacagctcatataagggcaagaggcatagcctttgggagaagcgctggcccaagcagcactgagggattcccactcggtgggtgcgaatcctggccaaggggatggtcacat

SEQ ID NO: 316632 - DNA, 525 bp, Homo sapiens
tatcccagggcctggatagacatagatggagactccaagaatccagggttgaagagtcttttaagggagaggttgaaatatgggaactttttccagatastgactgacaagtagtatcatcaatgacataaaccatcagcaacgaggctcagcagaggaaaacagacggctccttgaatttatcaagctgttgtagtggtaggcatttcctaagtgatactgggctggctgaaagaactcagcctcatttcaaatgtgcataatatactccagactcaagggatgcagccctttatctcctataagattttacaaatccgtggagtcaaaggaaaaagagtctaacgttcaaatggcagaagaatttttaatcaagtagaaccttcctattgaggaggtcaccatccgaccccaacagctcatataagggcaagaggcatagcctttgggagaagcgctggcccaagcagcactgagggattcccactcggtgggtgcgaatcctggccaaggggatggtcacat

SEQ ID NO: 316633 - DNA, 525 bp, Homo sapiens
tatcccagggcctggatagacatagatggagactccaagaatccagggttgaagagtcttttaagggagaggttgaaatatgggaactttttccagatactgactgacaagtagtatcatcaatgacataaaccatcagcaacgaggctcagcagaggaaaacagayggctccttgaatttatcaagctgttgtagtggtaggcatttcctaagtgatactgggctggctgaaagaactcagcctcatttcaaatgtgcataatatactccagactcaagggatgcagccctttatctcctataagattttacaaatccgtggagtcaaaggaaaaagagtctaacgttcaaatggcagaagaatttttaatcaagtagaaccttcctattgaggaggtcaccatccgaccccaacagctcatataagggcaagaggcatagcctttgggagaagcgctggcccaagcagcactgagggattcccactcggtgggtgcgaatcctggccaaggggatggtcacat

SEQ ID NO: 316634 - DNA, 587 bp, Homo sapiens
taattggatcataatgctctggggcatcagggggatcctagtaccttcccaggccgggcttccctggtagggattttagccctgggcacacggcaggcatcaaagcggaagacaatgcagagagtgaaaggttggcagctgctgttaggattttggctgcttaaggtaaccagaatcactgggttttgactgtcacagatctttggggtcacatatggttacagaatttcccccattttagaggaatgtgaaatgctgctctaagtagctaaatactgtttaaaaaactgaaaaccaaatggtgacaataattttaattactgacctctgaaatttcaagctcatttatactcaatctcaatttgtttttaatagattatttattaaatgtactttcaaattaaatacacagaaatataagctcgttagagcatgagcttagaacaaactagtatcaaattaatttccagttcaacaactcasttgaagtattgcttatgagggaggaggggggtggatttcagctctcataaactgttgcttaaagtaaacaatctcacttctctcagtcattagtagagttaaca

SEQ ID NO: 316635 - DNA, 465 bp, Homo sapiens
cttcgggctttctgctccttcctgggtgatacacgtcccacatctttctccagcaccatgacttgccagggagcatggatgaaactgagaaggcgctggatggaggttttmtaagatgtgtgcctaatttaaaaggggccgggagtcaaagtcccctggagagaactaaggggggtggatggacaatggcagtattggaaatgtgacagcaatggccttggagcctgcagatttccccaaagagaaaatccaattagatggactatcttacgtcagcaaatgaaaacagaaggtgaatgcataatttcatgagaacattctttttctctgcttattagattaggtgatctaacaaggcactctgcttctctcaataccaggaagtaaaatgcattttaactgtgccaggagttgattttgctatttgccgtttgttgtgggatgacacgtgacacctaaatattc

SEQ ID NO: 316636 - DNA, 618 bp, Homo sapiens
tggcaaatccttcctgatcttttcaccaccagaaagacaggatagaaaggcagagagggatggagggagagcaagagggttaacatagcttgttcatttatttactcaccaaactaatatttattgtttgtcatgtgacaggcaccaaggttggttctgggaatttgaagatgaatgagttaccacccttgccttcaaggtgtttcagtctagcagggagaacgatgtttaaaccagtaattaagcttgatacrgcaattattttaatgctgagccacagctctgaacagaaggggcgcagatgtggagacacaagctcatccttttattgagttccctaataaagagcaagatgcttaactctgttgatctctagcttcttcattaaaatgggtgggagagcatcttctcacttgcagacagtgcatgtaaagtgcccagaagagtgcttgacacatagtgggcattcagcaaatggtagagtgtggatgtactacaggggctatgaaggactcaagggcagtaggaccataggaggggtcctgaagtcacacgtcagatatgcaagaaagaacttcttgcacaccgcaagaacactaggtaccaggattagcaagg

SEQ ID NO: 316637 - DNA, 618 bp, Homo sapiens
tggcaaatccttcctgatcttttcaccaccagaaagacaggatagaaaggcagagagggatggagggagagcaagagggttaacatagcttgttcatttatttactcaccaaactaatatttattgtttgtcatgtgacaggcaccaaggttggttctgggaatttgaagatgaatgagttaccacccttgccttcaaggtgtttcagtctagcagggagaacgatgtttaaaccagtaattaagcttgatacagcaattattttaatgctgagccacagctctgaacagaaggggcgcagatgtggagacacaagctcatccttttattgagttccctaataaagagcaagatgcttaactctgttgatctctagcttcttcattaaaatgggtgggagagcatcttctcacttgcagacagtgcatgtaaagtgcccagaagagtgcttgacacatrgtgggcattcagcaaatggtagagtgtggatgtactacaggggctatgaaggactcaagggcagtaggaccataggaggggtcctgaagtcacacgtcagatatgcaagaaagaacttcttgcacaccgcaagaacactaggtaccaggattagcaagg

SEQ ID NO: 316638 - DNA, 635 bp, Homo sapiens
tgttggccaatctggtctcaaacttcagacctcaggtcatcaggccgccttggcctcccgaaagtactgggattacagctgtaagccactgtgcccggcctagatatagtttattttcttatgacacaattcttattttatacctattgaaagagctctttagatggacagattttctcatatggtactcttgtgtatatgtatttgtatgtgaaaagatatatctatataygaagaatgagaacatatgggcacagggaggggaacatcacacaccggggcctgtcgggggttggagggcaaggggagggataacattatgagaaatacctaacgtagatgacgggttgatgggtgcaggaaaccaccatggcacatgtatacctatgtaacaaacctgcacttgcttcacatgtatcccagaacttaaagtataatgataaaaaaaaataagtaaaatttaaagtgttttaaaatcttctttttgttcagattgtgactattctgaataccacttgaacttagagtcattgattgccatgtgttttcatacagtgttgccctttgaacatctagtgttggtgatgcagcattcctaaaataattcatcactattgtctgtgagatttccttct

SEQ ID NO: 316639 - DNA, 635 bp, Homo sapiens
tgttggccaatctggtctcaaacttcagacctcaggtcatcaggccgccttggcctcccgaaagtactgggattacagctgtaagccactgtgcccggcctagatatagtttattttcttatgacacaattcttattttatacctattgaaagagctctttagatggacagattttctcatatggtactcttgtgtatatgtatttgtatgtgaaaagatatatctatatatgaagaatgagaacatatgggcacagggaggggaacatcacacaccggggcctgtcgggggttggagggcaaggggagggataacattakgagaaatacctaacgtagatgacgggttgatgggtgcaggaaaccaccatggcacatgtatacctatgtaacaaacctgcacttgcttcacatgtatcccagaacttaaagtataatgataaaaaaaaataagtaaaatttaaagtgttttaaaatcttctttttgttcagattgtgactattctgaataccacttgaacttagagtcattgattgccatgtgttttcatacagtgttgccctttgaacatctagtgttggtgatgcagcattcctaaaataattcatcactattgtctgtgagatttccttct

SEQ ID NO: 316640 - DNA, 590 bp, Homo sapiens
cagcactgactgtcattaaaaaccaaaaatacttaagtgccattactaataatagcaggtaacattacttcaccacttaccgagtgactctcagaaagtgamtaaacctgtctatctgtctgttctttagcttcctcatctctaaaatagaccaaataaaagaacctacctcctagggttcttgtgagggctagctgaattaattaatgtgactggcttataacaagtgcccaatagatgttaactattttttactataatgattatcactgcttctgtggaaacatacaaggcagttactaaagctttccatgcattatctcatctaattgtccaacaccgtgaggcaggcactgttatttatccccatgtggtggatactctctgaagctaagaggggtttagtaacttacaccaacaagtggtttgtggtagagccaaacttagaataagaacattaagagcgaactgaattcttgtcagcgaggctatcggcctatctgaatgtgaactgcgatgaggactgcaatgaatttccccccctcccatggtattttcctgttgtgtggggctcccttggaggagtgttc

SEQ ID NO: 316641 - DNA, 387 bp, Homo sapiens
aattataaaatcaaagatctgatgcttaaaggagtaaatccacagctatccaaaacttagccattcagcattactcagttcctaggagagcagttttgctattttaagccaggtaacaaaaatgtgtcccaaattcccaacggtatgagtattcatgtatgtttaggcrtcaccataagttattactcctaggttgtgagttccatgaaattagggaccatttgtttgtcagtttcctgttcttggctcagtacctggcacagggtgactgctcccatgaatggtcattgagtgattatttaatgaatccttcacattggccttaatgttggttagatgagaatgctagatattttttaatcctaggatgaaaaaattataatattc

SEQ ID NO: 316642 - DNA, 387 bp, Homo sapiens
aattataaaatcaaagatctgatgcttaaaggagtaaatccacagctatccaaaacttagccattcagcattactcagttcctaggagagcagttttgctattttaagccaggtaacaaaaatgtgtcccaaattcccaacggtatgagtattcatgtatgtttaggcgtcaccataagttattactcctaggttgtgagttccatgaaattagggaccatttgtttgtcagtttcctgttcttggctcagtacctggcacagggtgactgctcccatgaatggycattgagtgattatttaatgaatccttcacattggccttaatgttggttagatgagaatgctagatattttttaatcctaggatgaaaaaattataatattc

SEQ ID NO: 316643 - DNA, 571 bp, Homo sapiens
agtgaaatgttacaccttataaagtctagactttgagaaggccataccatatcagacccatattcaatccactaaatctgctgtcaagatcattgtaaaccatgagagcatgttgataagtgcagtccatttacagagggatcactgcctgtaaaccacaactgaagcatgctaaaataagcagtgtgattgatactgtatttttgtaaatggtcctataaatgatcttctgaaatagctatcctcaccaggacatggagaagatatgctcagttaaccgaggttattgcatcacaatagggactttgtggtctctgaacttaacagacatatcttatacaaaactatttgtggtagtggtggtagtggtgcataattttcaattatacaagaaaatagtgtccacaagttatttttttactcactcagtcttcagttgttaatgaatgcatttccttaccttgtatrttttacgtaaataagatttttataaagagactcagtaataactgtgtcacccacttccacataaaatcaaacaattggcaataagatatgccagactgtactt

SEQ ID NO: 316644 - DNA, 574 bp, Homo sapiens
actcatttaagagtcagcagaggccttcaggttagatatgactctcactcttcagggttgttaaatactgaaaaaagctcctgaaagagggagatttcttttctaagactgctgaggtctggtsgggggagagggggggaatgggggacgttgagggtttatgttttgaaaaaccatttactttcttacttttgaaaaaagatgaatctctttctggctttctgataataaaaataagtaaaatcttgttagttaacttctttgcttaagaaatgtaattaaaatgtttcccctggcataatattagaaattactatattattttttgacatcatgacagtatctgtaactttgttcgtttccgtactgtatgtaaagaattttccataactgtttcaatcgtcagtttatgattaactcactctttggaaatgtttcctactgagctgtctgttggcacattgacagtgcagaagcacatgggattttttctttaatgagacaatttctagagcgtaatagaagtcaggctgccactgtccagatgagtgactaaagtcatctccttaccctg

SEQ ID NO: 316645 - DNA, 574 bp, Homo sapiens
actcatttaagagtcagcagaggccttcaggttagatatgactctcactcttcagggttgttaaatactgaaaaaagctcctgaaagagggagatttcttttctaagactgctgaggtctggtggggggagagggggggaatgggggacgttgagggtttatgttttgaaaaaccatttactttcttacttttgaaaaaagatgaatctctttctggctttctgataataaaaataagtaaaatcttgttagttaacttctttgcttaagaaatgtaattaaaatgtttcccctggcataatattagaaattactatattattttttgacatcatgacagtatctgtaactttgttcgtttccgtactgtatrtaaagaattttccataactgtttcaatcgtcagtttatgattaactcactctttggaaatgtttcctactgagctgtctgttggcacattgacagtgcagaagcacatgggattttttctttaatgagacaatttctagagcgtaatagaagtcaggctgccactgtccagatgagtgactaaagtcatctccttaccctg

SEQ ID NO: 316646 - DNA, 588 bp, Homo sapiens
atgaatttgacctttaatattgttggactttgtattggatatctttcctccatcacttcaaaatcgtcttgcttggcctcttattgcaaccacagctgcagtagacagttccatacaagcttccaagaacttcatgggtacatctggagagcacctcacctggggccacattctctacctktcctgtcttactcttcctcctctgggcttctttctggtgcatgggggtggggggagatattaagtattccccaagagcaatggtcagtttagtaattcgtctttgtatttttcttccttccttccccatttttaatctgctcctcaggatcacttcaccaactaaatcctgcattcaggattttgtctaaacttctactttctgggaaactcaggctaagacagactatataaagatgctccatgacttagatggggttatgtcctgagaaacccataagttaaaagcattgtaagtcaagactgggtgttttgtagacatgatgggatggaaaaccaaaaaacactatatccaaaaaatgctggcatcacagttacattgtagagtattggttgtttaccctcatg

SEQ ID NO: 316647 - DNA, 528 bp, Homo sapiens
tttttttttttttttttttgagaagggtctcattttgttgccctggctggcatggagtggtgcaatcatggctcactgaagccttgaattcctgggctcaagccatcctcccacctcagcctcctgaggagctggaactactgggtgtgtgtcatcatactcagctaatttttaaatttttttgtagagatggggtctcagtgcattccccaggctggtctcttaactcctgggctcaagtaatcctactgccttggcctcccaaagtgctgggragattcaattttcatatgtcaattaaatttacagaatttgcaaatccaattgcaggaaatgggtagatgagctttaactttttttctccttctaattgctaaccttgaagtgagctaattaatgtagatggactctgaggacatttatattcagaatttgaaatggtcagattttcaagagcaatgagtctaagatatcctttgcttataaagggtagaggaggaccaaatagtttctggagaaaggttatct

SEQ ID NO: 316648 - DNA, 593 bp, Homo sapiens
ttgtgacaccctactgtgctgttataacctttgaaaaaggggtgggggtacagcttttgccaggaacttatgcaaaatccaaaacatgttttatccatggctgtaggaatgtgaacatatgggacactgcatttaagaaaagagaataaaaaccactggtttaatggaaagattcttgaattaaaaaaaatgaaggtatatgtaaaaacactgacctttaaatctctgggaagcaggtgattttaaatattatgtgtcrcataaagatcactgctaaagaaagaatgaaagagttaaacatcttttatttaagtgtaggggaaaattgtaaatcttttagtaaatggggtttttaagagaaacataaaggcagaaacttaatgaactacccattctgaaccaaggatactataaataatccattaaaggtgattgctattattttggatctataaacttgaaatggggtctatctttcataagggaggcagaaatatccttttatacatgccactctgactccacaatttttcttagagttttacgtcatgatgaggcttttagaaaacttgctcatttgaggcacagtgatt

SEQ ID NO: 316649 - DNA, 593 bp, Homo sapiens
ttgtgacaccctactgtgctgttataacctttgaaaaaggggtgggggtacagcttttgccaggaacttatgcaaaatccaaaacatgttttatccatggctgtaggaatgtgaacatatgggacactgcatttaagaaaagagaataaaaaccactggtttaatggaaagattcttgaattaaaaaaaatgaaggtatatgtaaaaacactgacctttaaatctctgggaagcaggtgattttaaatattatgtgtcacataaagatcactgctaamgaaagaatgaaagagttaaacatcttttatttaagtgtaggggaaaattgtaaatcttttagtaaatggggtttttaagagaaacataaaggcagaaacttaatgaactacccattctgaaccaaggatactataaataatccattaaaggtgattgctattattttggatctataaacttgaaatggggtctatctttcataagggaggcagaaatatccttttatacatgccactctgactccacaatttttcttagagttttacgtcatgatgaggcttttagaaaacttgctcatttgaggcacagtgatt

SEQ ID NO: 316650 - DNA, 593 bp, Homo sapiens
ttgtgacaccctactgtgctgttataacctttgaaaaaggggtgggggtacagcttttgccaggaacttatgcaaaatccaaaacatgttttatccatggctgtaggaatgtgaacatatgggacactgcatttaagaaaagagaataaaaaccactggtttaatggaaagattcttgaattaaaaaaaatgaaggtatatgtaaaaacactgacctttaaatctctgggaagcaggtgattttaaatattatgtgtcacataaagatcactgctaaagaaagaatgaaagagttaaacatcytttatttaagtgtaggggaaaattgtaaatcttttagtaaatggggtttttaagagaaacataaaggcagaaacttaatgaactacccattctgaaccaaggatactataaataatccattaaaggtgattgctattattttggatctataaacttgaaatggggtctatctttcataagggaggcagaaatatccttttatacatgccactctgactccacaatttttcttagagttttacgtcatgatgaggcttttagaaaacttgctcatttgaggcacagtgatt

SEQ ID NO: 316651 - DNA, 593 bp, Homo sapiens
ttgtgacaccctactgtgctgttataacctttgaaaaaggggtgggggtacagcttttgccaggaacttatgcaaaatccaaaacatgttttatccatggctgtaggaatgtgaacatatgggacactgcatttaagaaaagagaataaaaaccactggtttaatggaaagattcttgaattaaaaaaaatgaaggtatatgtaaaaacactgacctttaaatctctgggaagcaggtgattttaaatattatgtgtcacataaagatcactgctaaagaaagaatgaaagagttaaacatcttttatttaagtgtaggggaaaattgtaaatcttttagtaaatggggtttttaagagaaacataaaggcagaaacttaatgaactacccattctgaaccaaggatactataaataatccattaaaggtgattgctattattttggatctataaacttgaaatggggtctatctttcataagggaggcagaaatatccttttatacatgccactctgactmcacaatttttcttagagttttacgtcatgatgaggcttttagaaaacttgctcatttgaggcacagtgatt

SEQ ID NO: 316652 - DNA, 617 bp, Homo sapiens
tttaggtatttttttatcatgaaggaatgtcaaattttttaaaatgattttttagtataaattgatataataatattgtttttaaacttcattctgtggatatgatgtatcatactgattgatttgaatatgttgaactatctttgcatccctgggataaatctcacttggacgatgaatgatctttctaatatattgttgttgaatttagtttggtagtattttgttgaggagttttgcattaatattcatcagaratattggcctgtagtcttcttttttttttgatgtgtctttgtctggttttggtatcacagtaatattggcctcatagaatgagtttggaagcattcccctctcctccactttttggaatagtttgagtaagattggtattaattcttctttaaaggtttggtagaattcagaagtgaagctgtcaggttctgggcttttctttagtgggagatttcttttttcatggctttgatcttgtaacttgttattggtcttttcaggttttggatttcctcttggttcaatcttggtaggttgtatgcatctaggaattcatccatttcttctagattttttaaatatattggtatatagttgct

SEQ ID NO: 316653 - DNA, 617 bp, Homo sapiens
tttaggtatttttttatcatgaaggaatgtcaaattttttaaaatgattttttagtataaattgatataataatattgtttttaaacttcattctgtggatatgatgtatcatactgattgatttgaatatgttgaactatctttgcatccctgggataaatctcacttggacgatgaatgatctttctaatatattgttgttgaatttagtttggtagtattttgttgaggagttttgcattaatattcatcagaaatattggcctgtagtcttcytttttttttgatgtgtctttgtctggttttggtatcacagtaatattggcctcatagaatgagtttggaagcattcccctctcctccactttttggaatagtttgagtaagattggtattaattcttctttaaaggtttggtagaattcagaagtgaagctgtcaggttctgggcttttctttagtgggagatttcttttttcatggctttgatcttgtaacttgttattggtcttttcaggttttggatttcctcttggttcaatcttggtaggttgtatgcatctaggaattcatccatttcttctagattttttaaatatattggtatatagttgct

SEQ ID NO: 316654 - DNA, 615 bp, Homo sapiens
cattgtatgttttttggtttgagtttaccatgaggtttgcaaatattatgactcattattttaacctgctgacaacttaacactatttgcacaaacaaacaagcaaaaagaaaactaattaaaactctatacattaactttgtctccctgctttttaacttttcattgcttctatttatgtcttattgtactgacagtgtcttgaaaagctgttgtagttattatctttcattggttcattctttaatcttcctacttaagattattttacacaccacagttacagtgttataatattctgtatatgtctgtgtacttactattaccagtgagttttgtaccttcaggtgattatttattgctcattactgtccttttctttctgattgaagtactccctttagcatttcttataggactgacctggcgttcttgaaatccctcagcttttgtatgyctgggaaagtctttatttctttatgtttgaaagatattttcaccagatacattattctggggtaaaaattattttccttaagcactttaaatatgtcatgctactctctcctggcctgtaaggtttccactgaaaagtctgttgccggacatataggc

SEQ ID NO: 316655 - DNA, 549 bp, Homo sapiens
aaatgcaaagactggtcacagttttattgtttcactttatctaaattaagacagaaacacagtatccatccttcatctaaaatttccatttttaaattatgcatggattatccccctcacccccaaatttctctagacaagagttgactttataaaagaaaattmaaagttacttaagttttatttatttggaaaattgaaaagaattagtggaagccattgatgaaaatcacttacaaacataaagaattagttttcctttactattgtcctacttttcagtttcctctcagtaggaaagttattaatctgttgtgttttattgtaggatcataattgtacatttaattatacatacaacctgcactaagcataccctcactaaatggcataccttaataaagacgatagaacatgcctctataacctagcaaggtcaatctgtgagaagaataaataaaaacgtaatttagtaactgctagaataatctgagaaggtagaaatgaagatcatgtctggaggacaaaatgatttttaaaaaatagaaa

SEQ ID NO: 316656 - DNA, 549 bp, Homo sapiens
aaatgcaaagactggtcacagttttattgtttcactttatctaaattaagacagaaacacagtatccatccttcatctaaaatttccatttttaaattatgcatggattatccccctcacccccaaatttctctagacaagagttgactttataaaagaaaattaaaagttacttaagttttatttatttggaaaattgaaaagaattagtggaagccattgatgaaaatcacttacaaacataaagaattagttttcctttactattgtcctacttttcagtttcctctcagtaggaaagttattaatctgttgtgttttattgtaggatcataattgtacatttaattatrcatacaacctgcactaagcataccctcactaaatggcataccttaataaagacgatagaacatgcctctataacctagcaaggtcaatctgtgagaagaataaataaaaacgtaatttagtaactgctagaataatctgagaaggtagaaatgaagatcatgtctggaggacaaaatgatttttaaaaaatagaaa

SEQ ID NO: 316657 - DNA, 549 bp, Homo sapiens
aaatgcaaagactggtcacagttttattgtttcactttatctaaattaagacagaaacacagtatccatccttcatctaaaatttccatttttaaattatgcatggattatccccctcacccccaaatttctctagacaagagttgactttataaaagaaaattaaaagttacttaagttttatttatttggaaaattgaaaagaattagtggaagccattgatgaaaatcacttacaaacataaagaattagttttcctttactattgtcctacttttcagtttcctctcagtaggaaagttattaatctgttgtgttttattgtaggatcataattgtacatttaattatacatacaacctgcactaagcataccctcactaaatggcataccttaataaagaygatagaacatgcctctataacctagcaaggtcaatctgtgagaagaataaataaaaacgtaatttagtaactgctagaataatctgagaaggtagaaatgaagatcatgtctggaggacaaaatgatttttaaaaaatagaaa

SEQ ID NO: 316658 - DNA, 603 bp, Homo sapiens
atgtaattatttctactgtttctcagcgctttatagtctagccatgcttaataaatgtttttcttttatcatgtttcctctttyacctttgccaaataacatgttactggtggaataagtaatattgttcatagaatttttaaaaattgtagcatacagaaagtaagaataacccacaatttcaccacccaaatgaaaactactaaaaagttttcatgagatttcttctcagtccttttcctaataagcctattcttaattcaaaatctctaagtacctaaaagcagagggtttgtaaggacaacctaaaagatgacttctggcttatcaaaatatgtgttcaaggacatttaaaaatgcagaagaaaaacatgtgatatgaacgagatggtgcagattcttctttctctgtttctccccaactaagtacaattacaaaccctgacaattacatacagcaaccatagaatgacacagaagaatgataaaagaaaggtgaactggctagaggccccaggaatgaaggaaaaacacaacagccgggatcttctgaacaccacatccttcattccacttgcagaaggagaacccaggcccgacatc

SEQ ID NO: 316659 - DNA, 603 bp, Homo sapiens
atgtaattatttctactgtttctcagcgctttatagtctagccatgcttaataaatgtttttcttttatcatgtttcctctttcacctttgccaaataacatgttactggtggaataagtaatattgttcatagaatttttaaaaattgtagcatacagaaagtaagaataacccacaatttcaccacccaaatgaaaactactaaaaagttttcatgagatttcttctcagtccttttcctaataagcctattcttaattcaaaatctctaagtacctaaaagcagagggtttgtaaggacaacctaaaagatgacttctggcttatcaaaatatgtgttcaaggacatttaaaaatgcagaagaaaaacatstgatatgaacgagatggtgcagattcttctttctctgtttctccccaactaagtacaattacaaaccctgacaattacatacagcaaccatagaatgacacagaagaatgataaaagaaaggtgaactggctagaggccccaggaatgaaggaaaaacacaacagccgggatcttctgaacaccacatccttcattccacttgcagaaggagaacccaggcccgacatc

SEQ ID NO: 316660 - DNA, 645 bp, Homo sapiens
tgaccagacttgacagcatgcagtccacagaagtgcctgaagccccgggggtagggtggtgggaacaaaaaacaaaaccgtttttatcttttgcactctccctttctcctctaggccattgttgaaaagggtagcttttctttttttttaacataaaaagaaatatactatactttccatattttgggcaattttaggatgttttgtggaatctagaatcaaccagakttaccctgaatgtactggaaaatcttttgattgctcccaacttacttgtaaacctctatgtaaaagtgccataaatacaaacctacagatggtcctgaactagaccctctataatatgataacaggagccacaagagagctcagtgtgacgtagtgtggaaataagatatggccctccctcatatatcccttccacgatcttgcatgatccatcatcattatcatgagaaatactaatttagatgtttaatctgactgcatccttttttctcttagccacattctctccgtagccagatgccagtaaaaggacattcactatgaacagagtgataagtaaattgacttcatatttctaacactagattatacaatgaccttgcagtggtttggggtgggggtagcaaaggatgggct

SEQ ID NO: 316661 - DNA, 645 bp, Homo sapiens
tgaccagacttgacagcatgcagtccacagaagtgcctgaagccccgggggtagggtggtgggaacaaaaaacaaaaccgtttttatcttttgcactctccctttctcctctaggccattgttgaaaagggtagcttttctttttttttaacataaaaagaaatatactatactttccatattttgggcaattttaggatgttttgtggaatctagaatcaaccagatttaccctgaatgtactggaaaatcttttgattgctcccaacttacttgtaaacctctatgtaaaagtgccataaatacaaacctacagatggtcctgaactagaccctctataatatgataacaggagccacaagagagctcagtgtgacrtagtgtggaaataagatatggccctccctcatatatcccttccacgatcttgcatgatccatcatcattatcatgagaaatactaatttagatgtttaatctgactgcatccttttttctcttagccacattctctccgtagccagatgccagtaaaaggacattcactatgaacagagtgataagtaaattgacttcatatttctaacactagattatacaatgaccttgcagtggtttggggtgggggtagcaaaggatgggct

SEQ ID NO: 316662 - DNA, 645 bp, Homo sapiens
tgaccagacttgacagcatgcagtccacagaagtgcctgaagccccgggggtagggtggtgggaacaaaaaacaaaaccgtttttatcttttgcactctccctttctcctctaggccattgttgaaaagggtagcttttctttttttttaacataaaaagaaatatactatactttccatattttgggcaattttaggatgttttgtggaatctagaatcaaccagatttaccctgaatgtactggaaaatcttttgattgctcccaacttacttgtaaacctctatgtaaaagtgccataaatacaaacctacagatggtcctgaactagaccctctataatatgataacaggagccacaagagagctcagtgtgacgtagtgtggaaataagatatgrccctccctcatatatcccttccacgatcttgcatgatccatcatcattatcatgagaaatactaatttagatgtttaatctgactgcatccttttttctcttagccacattctctccgtagccagatgccagtaaaaggacattcactatgaacagagtgataagtaaattgacttcatatttctaacactagattatacaatgaccttgcagtggtttggggtgggggtagcaaaggatgggct

SEQ ID NO: 316663 - DNA, 645 bp, Homo sapiens
tgaccagacttgacagcatgcagtccacagaagtgcctgaagccccgggggtagggtggtgggaacaaaaaacaaaaccgtttttatcttttgcactctccctttctcctctaggccattgttgaaaagggtagcttttctttttttttaacataaaaagaaatatactatactttccatattttgggcaattttaggatgttttgtggaatctagaatcaaccagatttaccctgaatgtactggaaaatcttttgattgctcccaacttacttgtaaacctctatgtaaaagtgccataaatacaaacctacagatggtcctgaactagaccctctataatatgataacaggagccacaagagagctcagtgtgacgtagtgtggaaataagatatggccctccctcatatatcccttccacgatcttgcatgatccmtcatcattatcatgagaaatactaatttagatgtttaatctgactgcatccttttttctcttagccacattctctccgtagccagatgccagtaaaaggacattcactatgaacagagtgataagtaaattgacttcatatttctaacactagattatacaatgaccttgcagtggtttggggtgggggtagcaaaggatgggct

SEQ ID NO: 316664 - DNA, 595 bp, Homo sapiens
gattcatttttatgttaccagacaaaaccaatgccttcactgaatgataggtatgagagccattatctcccaggagcaccttgagaaagagatgtctaatctcaatcatgtgacttttcttgttaaataaatcccccatgtttagtacttcttcgttcttaagtagaaaatgtcttatccctccccgcattcacctcttctaatctcaaaaagaaaagaatctcaaaagaaatgtgcacttttacttaccagaattgattttgtttctttctatttggtattcttcatcacatkgcctgtgtgtgtgtgtgtgtgtgtgtgtgtgtgtgtgtgtgtgttatataatggatgaagaaagtcaggagaatcagtttgctggccaaatgtttactatataaagtatttttcttcatattgacttcactctccatttcgtgtactaacacatgtgcttataaacaaagcaattagtctaataagcctagtttaatcaacacacctctgagcaatatgtggaaaatgcctgagaaagcatttagctgggattatgaaaggctcaggagacttttcgcttctgctttgcagatgagctgca

SEQ ID NO: 316665 - DNA, 440 bp, Homo sapiens
tagaaagttggtgcagttagaggaccttaaaaggagtatgatatggctgggcattaagtgtttggggcagatggtgaccctggaatggcagaggtcttttggggttagatcatagaaagtcttgcagttgactgtacgcagtggctcatgcctgtaatcccagcacgtttggaggccaaggtgggcagatcacaaggtcaggagtttgagaccattctggccaacatggtgaaaccccgtctctactaaaaatacaaaaattagccgggcgtggtggygcacacctgcagtcccagctactctgggggctgaggtaggagaattgcttgaacccgggcagcccgagatcgtgccactgcactccagcctgggcaacaagattgaaactttatctcaaaaataattcttgcagtctatgctaaagtctttggctttgttct

SEQ ID NO: 316666 - DNA, 632 bp, Homo sapiens
ggcagtggcctctcctctgaggttctgagcaagttgactcttagtgaattgacccacactggaaccaaagaccattctgaggggtagaattttcttcttctcaattacatttccatgaaagaattagcattcctctcttaaagactggcatcctggctgctttccagttgcctactccttaatctgcctcctctgcttattctgaaggggctcataatttagggtggaagaaggacaggtataccaaaatctgtgatgttgtgtagtaaatacgaagagagttcaatgaaattaatgctgggagcactgagaaactaaactccacctggggggtctgggcaggcttcacagatgaggcggcatgaacaaagcctttgaaggcggtgtttaccatattgctgaaagaagacacttttctcttttaagccataccctgcatgattgcatttataactggtgacaagatgtttttggctgctctttcaggaaaacctgcttttgtattgtactgtattaagcaagayttctttacaaattttgcaggcccagctttgcagtgtctttcctctcaccatctttctatcagagatttcaatagtaggtggtttcaactatgaaattatagatgttag

SEQ ID NO: 316667 - DNA, 625 bp, Homo sapiens
ctgtctctactaaaaataaaaaaaattagcctggcatcatggtgtctgtaatcccagatacttgggaggctgaggcacgagagtcacttgttcccaggaggtggaggttgcagtgagccgagattgcaccactgtactccagcctgggtgacagagcaagcctctgtctcaaaaagataaattattgcagattatttaaattcatatgtattttcatttgcaatatatatgtgtgtgagagagagatttttaaagcggcctatctataaaagatactagtcatagacacaaatgtttaaagggtatctgtaatgcagggtcttacactattttatgatgctagcttaggttcaatctttttaaaaacaggcagaaggaactttraaagtcctcaagtttaataaaaattttcagattctttgtaatgaacataggtcctcctataaatcttacatggtctttcattgaatttctaagaggaacaccaataggttatcatttatcatttgatagactttgaatctaaaagaattaactttgctttattatgtttaaaaatataggtcctcattattcaagtattcattatttgagtctccacagacaggtcatgtaggaaagcaaa

SEQ ID NO: 316668 - DNA, 560 bp, Homo sapiens
gtacacttttaaaaggtgagctttatgatatgcaaattatatattaataaacaaatattttaaaaatcaaaaaacaaggaagtatgtaactgttcagaaaatgaccaactttcaggtaataatcttaggatggcaagcactcaaaaagaaagtagaaagctattgtggaaaaggaaaacaatgaattatagggctgcatcttgctgtggctgttgtctacaaatatttctaagtagtcctaattctgtgcatctcagtttctgtcatcataaaacagggcatgtagagtgatttcagagttgtgccttttaagaataactcttgagaaactcccggtctgtaagaaagcattaccttaaaacccagtgcctgagtctgggctttcttcatggatcctgaaatggttggttctggaaggaaactgtgagaacagtggacactcactagagccagagatgtgtggatagactagtgtttcttargcaatcttgggccacagcagacctccaccccaacattgagaacgaactgacattacttgtcttgacataaatatcttg

SEQ ID NO: 316669 - DNA, 541 bp, Homo sapiens
tctgttgattgttttttattttttttttctgtgcagaggctttttagtttgatataatcaartttgtttctttttgcttcttttgcctgtgcttttgagaacttagtcataaaatattttctcaaaccaatgtcctacagtatttcctgtgttttcttctagtagttttatcatttggggtcttatatttgggtctctgattccttttcagctgatttttatgtagggtaagaagggaaagtctagtttcattcttcattcttttgcatatggatgtacaattttcccagcaccaattattgaaggaattctcctttccccaatgagcgttctttgcaccttcgtcaaaaatcagttggctgtagatatgtggattaaagtttgcattgtctattctgcttcattggtctatgtgtctgtttttatgccagtatcatgctgttttggctactataggtttgtagtatattttaagtctgatagtgtcaattttttgctttttgaaatgagtctattcccacatttgccagcaccttttatt

SEQ ID NO: 316670 - DNA, 541 bp, Homo sapiens
tctgttgattgttttttattttttttttctgtgcagaggctttttagtttgatataatcaagtttgtttctttttgcttcttttgcctgtgcttttgagaacttaktcataaaatattttctcaaaccaatgtcctacagtatttcctgtgttttcttctagtagttttatcatttggggtcttatatttgggtctctgattccttttcagctgatttttatgtagggtaagaagggaaagtctagtttcattcttcattcttttgcatatggatgtacaattttcccagcaccaattattgaaggaattctcctttccccaatgagcgttctttgcaccttcgtcaaaaatcagttggctgtagatatgtggattaaagtttgcattgtctattctgcttcattggtctatgtgtctgtttttatgccagtatcatgctgttttggctactataggtttgtagtatattttaagtctgatagtgtcaattttttgctttttgaaatgagtctattcccacatttgccagcaccttttatt

SEQ ID NO: 316671 - DNA, 541 bp, Homo sapiens
tctgttgattgttttttattttttttttctgtgcagaggctttttagtttgatataatcaagtttgtttctttttgcttcttttgcctgtgcttttgagaacttagtcataaaatattttctcaaaccaatgtcctacagtatttcctgtgttttcttctagtagttttatcatttggkgtcttatatttgggtctctgattccttttcagctgatttttatgtagggtaagaagggaaagtctagtttcattcttcattcttttgcatatggatgtacaattttcccagcaccaattattgaaggaattctcctttccccaatgagcgttctttgcaccttcgtcaaaaatcagttggctgtagatatgtggattaaagtttgcattgtctattctgcttcattggtctatgtgtctgtttttatgccagtatcatgctgttttggctactataggtttgtagtatattttaagtctgatagtgtcaattttttgctttttgaaatgagtctattcccacatttgccagcaccttttatt

SEQ ID NO: 316672 - DNA, 611 bp, Homo sapiens
gtaaatggatgatttcatttattttaagtgaaaagaaaagctactgtagacatctgaatttaaatctataggatttatataaatacatcggtttcgaagggcagagttgtatggaaaattcccaaagaggctctagagtcaaggaatcttagagatggaagggactgttgaggtcagtaagccggggcctctgcagagccagcctctccttgacaacagctctatgctttgtcagtctctgcttatgaattgcctgtgactggaaatgtcctatctctgaacatagcccccattgctgaacagttctgattgttagaacatgctctcttattttgagactaaacctagcaccctgtcatggccacccatatgccagctatttatatagataaagatagtgatatgttggtgctgctgcttctcttcaagttaaacgctccctgtttctttagctggtcttcataagacagagaatcgtgataccccttaaatcctctcttarccatcatgagataactagaattgacactatttcatgtgtggattgtctagatcataatatattgatgtagtacatccacagttgttgccacaattggtaaaaggggcca

SEQ ID NO: 316673 - DNA, 526 bp, Homo sapiens
tttcaactttgttattatttttcaagattgttttggatattcaaagttctttatattcacatacaaattttataataagtttgtctatttttttaaaaaaaaacttgtggtgttatgattggatcatgttgaatctacagttctgaggagaattttcattttaataatattggatctttcaatccttgagtgtagtagatttttaccttaatatagatctttaatttctctcagcaatgattatagttcacaatgtggaggatttacatgtctttcattaaatttatccaaagtactttatggtttttgatactttaaaaagtagaattgttctttttttaaattygattttccaatcatttgcagccatcatacaaaatacagctgatttctgtatgttgatcttgtatcctgaaaccaagcaagatacactttttagttctaggagttgtttcataaattctttaggattttctgtgttaaccatcatgtcatttgtaaaaagagacagttttactcttcctct

SEQ ID NO: 316674 - DNA, 472 bp, Homo sapiens
cacaaccaacctgggtttatatcccgctggccagaactgcatgttgtattgcgccccccgcccccctcccccgcccgcccgccgcaaccccagctgcaagggagactggaaaagtaagtagttggcatttctgctggaaagggtagcaaaagaaaacggyttgggaatatccaatggatgaacagagaacaagtcatctatgtccaggatagcccaccctatctactctccaggaccagctctaatgtccccgggtaaagcctttcccaaattcctcagacagagtttttctctgtgaatccacctggttctgcggtcatcatcaactagactgagtgtgctctctgggcgagggctccatcaccgcccatggtacctgagagatggtgctcagtgaaggtttgctaagaaatgaatcaatgtgtggggatcctctcagtgttacctgaagccagctgctggaggtatgcag

SEQ ID NO: 316675 - DNA, 605 bp, Homo sapiens
tctcattaattccctgaactttcaacctggaaggagcctaagtgaaggctgttctcagtctccctatctcacagaatccatgcaatccctctagaacatttgtggtaaatggccagtcagctgcagtttgaaatctttcaggaatgagaagcccagagacccrtaagtctcctaattttttttctttttttggagcgctctccctttgcctgcctagaccataaaatcttttcctactctcacaattctagaatattctccatgccactcagcgattcaccaaccaagattatctattaaaaatataaggtcattgagcagtaaagttgtgtttattgtggccactgctatatccctagtgcctagaatagcatatagtagttgtttaataaatatttggtgaatactgaaatgaggtactcccagcagcctctagattgaggtggatattcttgctgttaaacaaacagctcatattcatatcctaggctgctccctaaaattatttgatttccttagggtttaactcttagcccgtcactacccataatgtactctgcttaccctggttagatggtgaacacttgaaccaagctaggctaatc

SEQ ID NO: 316676 - DNA, 619 bp, Homo sapiens
aaacatatctataatatatatttgatatatctaatatttctataatataactttttagaagtgcagctgctaagtaaaaaggcttgtaaatactagtttttgatagttactgccaaatgttctgtaaaagtgttgtaaccaacaatcaatttcaccagtattgtaggaaagttctggtttcctctccccatgaaatttttgtttttagtctcatgggcaaaagattagatcttattttgtatctgactaataaattagtatttgactataaatgaggatgagaaattttcatatatttatgtttgtttgtgtatgttttctgtgagctatctcttaatttatttagtggtttccctagaaggtataatctcaaaaactaagtgagattagatgcagtttatctactgccatcttttctgtgcyattcaggaagcacatcagcatgcaagcaagagtagtggtttataatagggataaccctgcatctgccctaattcactgtgttgttagaaataaaaaatactcaaatattgatcctttattattagcaatagatatctggtgacatgcttaagtgattccagtcttccatccagattagtttaaaaaataaacaaca

SEQ ID NO: 316677 - DNA, 444 bp, Homo sapiens
ctcatgatatagttgtaaactttttgttatttttttatagagacagagtcccagtctgtcacccaggccagagcgcaatggcatgatcatagctcaccacagcctcatcctccagggctcaagcaactctcccacctcagcctcctaagtagctgggaatacaggtgtgtgccactatgcctggctattttttttttttttaatttttagtagagatgaggtcttgctaagttgcccaggctggtctcaaactcttgagctcaagcaatcctcctgccttggcctcccaaagtgctgggattatagacacaagcttctatgcttggcctatgatgtacttttaaatgaaaggctgtggactcccatgaacctagaatgytgtgtgatcctgagattgaaaaaatggtagaaaccacacatgccccagaagagtccacttaccca

SEQ ID NO: 316678 - DNA, 562 bp, Homo sapiens
ctttgattacaagtaaggataggcttaggacatcaccttgatgccgatgaccttgatggtgagacaatgattttatgaagccaggcatgtggagatctgagcagaaagttatccaggctcagggaataataagtgtcagatgaagttgcaaataagctcagaatgttcaaggaagagaaagattttctgagtattatgcaggccttgtgccagaaagaagatatgtcagcctttctcagtgactttaaagcgagcaattgttgcttctttatctctgtgccaaccaggcatacataaggatcaggacagtcttatgcagtatctacattttagaaataatctaatcggactctaaattgagccaatgttggtaaaatagcatattatatctgtttgattataccatatcctcatcagagtgttgtaatataaacacayagtccacatgattttttaacatattttctgttgcctttttttctttgagttagggaaaaaaataattagtagattctaaccagtgtattacctctaaagttgtcttagaatcacatttttttaa

SEQ ID NO: 316679 - DNA, 512 bp, Homo sapiens
ttctaggtcacatttattcacaactggaggaaggaggacactgctcctttcaggagcacttgagggttgcatttgtgaatagactgagcaagcaggaattatgtgaagaagactttgtagtaacaagaggtgaggtggctcctrcttcctgcaggaggatgtaattgatggatgtaatttgaataattgtgtgtgctggctgaaagtgaagctcattaggttgtccaattgatagaggaattatctgagtagagagcatatgttaacaattttgatatgcaaggcattattagtgatcaatgtttgtggaagaatgagggagaaaccaagattaagcagtgagagaagacagactgtggtatgaggccaaagaagtcttgaccaattccacccaggccccgtcacacagagtcttcagaattcccctgtcctgagccaacatggcagtgacttacttacctgctataatgagactttcgatatgagtcaccctgggaaggatgtgctcttgt

SEQ ID NO: 316680 - DNA, 575 bp, Homo sapiens
aatgctgaaataagttgagaatttgaatgactattgggaaggaatgattggttttgaaatgtgaagacatgagatttgggagggggcagggacagaataatatactttggttgcatccccacccaaatctcatctagaattgtaagtcccacaagtcccatgttttgttgaaggaacctggtgggaggtaattgaatcatgggggcaggtctttcccatgctgttctcgtgatagtgaatgaatctcatgagatctgatggtttcaaaaataggagttttcctgcacaagctctctctttgcctgctgccatccatgtaagatatgacttgttcctccttgtcttctgtcatgattatgaggcttcccagccacatggaactgtaagtccattaaacctctttcttcccagtcttggcatgtctttatcagcagcatgaaaatggtctaatatagcttctttgcaagacagattgtcaaaaatctaaccatagccttatccaactatcaccaccctcaatatttacycaaatataaaactaatgttcacacaaaaccctgctacatacgaatatt

SEQ ID NO: 316681 - DNA, 618 bp, Homo sapiens
cagtagggtttgtgctcctgagagaattaattactgcagctcatctgtcaggaggggaagatcaggcaataatgtgagtgatggggagtggctgtaaatacggagggagcttggcttgctggcccaccactcacctcctgctgtgtgcctggtgcctaatgggccactgacccagtaacaatacaacaggggcttggaaatccctgatgtacactttaaataygagtatattaaaaggctaaaggtaacatgatttttagatggcccatgcaaatattgtttataataaagctagaatgtctctattaatgccaggagaatcacacttcaaaatgaggaaactttcagagaaaaaaaagaacacttgtaataataaaaataggttaatccttcaaaagccttagtcataataatatgtatagacataatggaagtttcacaatgcatgaagcaaaagtcatgagaaccaaaagtgtaaatagacaaatctaaaattacagttggaacaaaattgccttcacagcagttgacagaatgcgtaaacaaataatcaataccaacaaacttgacctcacagaaatttggagaacatggggtctaacagttattctcaactac

SEQ ID NO: 316682 - DNA, 618 bp, Homo sapiens
cagtagggtttgtgctcctgagagaattaattactgcagctcatctgtcaggaggggaagatcaggcaataatgtgagtgatggggagtggctgtaaatacggagggagcttggcttgctggcccaccactcacctcctgctgtgtgcctggtgcctaatgggccactgacccagtaacaatacaacaggggcttggaaatccctgatgtacactttaaatacgagtatattaaaaggctaaaggtaacatgatttttagatggcccatgcaaatattgtttataataaagctagaatgtctctattaatgccaggaraatcacacttcaaaatgaggaaactttcagagaaaaaaaagaacacttgtaataataaaaataggttaatccttcaaaagccttagtcataataatatgtatagacataatggaagtttcacaatgcatgaagcaaaagtcatgagaaccaaaagtgtaaatagacaaatctaaaattacagttggaacaaaattgccttcacagcagttgacagaatgcgtaaacaaataatcaataccaacaaacttgacctcacagaaatttggagaacatggggtctaacagttattctcaactac

SEQ ID NO: 316683 - DNA, 574 bp, Homo sapiens
ctttatcattcacctccaccatttttttccttgcttctatgatgaaggtgactgcatgcctcatgtgatgtgatgtagttaaaagatggtaaaccctctacgatctgatattctagaatgaccgctttgctaatcccctgccaactacatgtgaatgcaaaatagacttttgttatagaaatctattgaggttgctgttgccatttttgttgtttctgcagtataatttagtttttgcttactgatgcagaatgctggcatcaggaattaggcgtcaataaaaaatatctaaatgcatggcactggcttagaaagtgggtatgaaaaatgaggatcctcatgtcaaagacagaaaagatggcattgtgtgttatgcagtgacaaaatagttagaaagaagaacaattccctakaacaaaaacaaatcctagattctggataaatagattagaagatcaaacacagtagagaattctcgaagtcattgtaaggctttgttaaggtaatataagaaagaagagctaagaaaaatgacggcctcatttcaggcaaaagtaaaagcaataaatagagt

SEQ ID NO: 316684 - DNA, 574 bp, Homo sapiens
ctttatcattcacctccaccatttttttccttgcttctatgatgaaggtgactgcatgcctcatgtgatgtgatgtagttaaaagatggtaaaccctctacgatctgatattctagaatgaccgctttgctaatcccctgccaactacatgtgaatgcaaaatagacttttgttatagaaatctattgaggttgctgttgccatttttgttgtttctgcagtataatttagtttttgcttactgatgcagaatgctggcatcaggaattaggcgtcaataaaaaatatctaaatgcatggcactggcttagaaagtgggtatgaaaaatgaggatcctcatgtcaaagacagaaaagatggcattgtgtgttatgcagtgacaaaatagttagaaagaagaacaattccctataacaaaaacaaatcctagattctrgataaatagattagaagatcaaacacagtagagaattctcgaagtcattgtaaggctttgttaaggtaatataagaaagaagagctaagaaaaatgacggcctcatttcaggcaaaagtaaaagcaataaatagagt

SEQ ID NO: 316685 - DNA, 439 bp, Homo sapiens
atttcacaatgtgttgactaaacaaaattatcttattaagaagaacagtgaagagataggtttaacaaaagtgtcttctatagcatacaaaaacttaatgatgcctatattttaaccttgtcacctgcaaccaatatcttctttcacagatttacatataacttaaaatctcccaaatatatgtcattttgtttcatgtctctgtacgttttgatgctcctgcatttctgatccctgacactttgagatcttgtctaccaaaccaatgctgatttgtcttattagactccacttattcttctgaaacaacctttcttaacctctctgaactttcttttccaagaccagtagagtttacctgttaatttttatgtcatggmgatgtattggaattgtgctttttctaacacttcacctcacttttcctattaggtttctt

SEQ ID NO: 316686 - DNA, 561 bp, Homo sapiens
aaaacaaaaaaaatggaggtgacacaaaatgatcaactacaagtgcaacagagcataaaataattgggaatgaaacagaatgcaggaagtatgcacaaatgggaatactgaattttactaagatactatgaacatttccacagctcaracgtatagatttgcttcaacagtgaacaccaatggataagactatctcaggcagaggaaatagcactagccaagacacagaagtgtgaagccgcataggacattaaaggtagaaatcatttggctctgttgaaattgtttgctgaatttagaaaaatgttatattagaaaaggataaataatgtgactagatcatagggataaaataaataaaaaatgtgtaaactcttctgaatagttagatttattggaacaagatagatccatgcaagtgtacaaaaaatttcaactttatcattgacacatgatgcaaaaataaatatttgttggtgttatgaaagatatattagaggtaagtattgaaagatagagttaagtattgaaacagattaattggcaggttacaaaaggagg

SEQ ID NO: 316687 - DNA, 555 bp, Homo sapiens
caatgtatagagtgaagaggaggagcaaggtgtggacctaagaaaataataaattctgtgtaactgacagcaaaaacacagacttaggcactgtattctagctgataatgatatttctcaatagataccaggttaacagctctagtactgctatacatgtgtaytgaaattgaacagttaaataaatggaggacatccacgtttatcactgatggagtgggagtttacagataagcaggaggaggaggccagaaagatgcatgtggtgatggattagaattggagacatcctgccctcaaggagagagaacataaaagaacataaatccgcttttcatcaatgtgagctgcaccaacttacttcctcccaaagagcacaaaatagaaaggaacgaaaagaaaagagcaactttacagtgaagaaacctacaaacactacctcagccaggtgatcagagtcaatataaatggggataaaaagtgttgataatagatactcttgatatattgtgatgaaatggcattttacttctgcatccttcctcctgaaagccc

SEQ ID NO: 316688 - DNA, 555 bp, Homo sapiens
caatgtatagagtgaagaggaggagcaaggtgtggacctaagaaaataataaattctgtgtaactgacagcaaaaacacagacttaggcactgtattctagctgataatgatatttctcaatagataccaggttaacagctctagtactgctatacatgtgtattgaaattgaacagttaaataaatggaggacatccacgtttatcactgatggagtgggagtttacagataagcaggaggaggaggccagaaagatgcatgtggtgatggattagaattggagacatcctgccctcaaggagagagaacataaaagaacataaatccgcttttcatcaatgtgagctgcaccaacttacytcctcccaaagagcacaaaatagaaaggaacgaaaagaaaagagcaactttacagtgaagaaacctacaaacactacctcagccaggtgatcagagtcaatataaatggggataaaaagtgttgataatagatactcttgatatattgtgatgaaatggcattttacttctgcatccttcctcctgaaagccc

SEQ ID NO: 316689 - DNA, 555 bp, Homo sapiens
caatgtatagagtgaagaggaggagcaaggtgtggacctaagaaaataataaattctgtgtaactgacagcaaaaacacagacttaggcactgtattctagctgataatgatatttctcaatagataccaggttaacagctctagtactgctatacatgtgtattgaaattgaacagttaaataaatggaggacatccacgtttatcactgatggagtgggagtttacagataagcaggaggaggaggccagaaagatgcatgtggtgatggattagaattggagacatcctgccctcaaggagagagaacataaaagaacataaatccgcttttcatcaatgtgagctgcaccaacttacttcctcccaaagagcacaaaatagaaaggaacgaaaagaaaagagcaactttacagtgaagaaacctacaaacactacctcagccaggtgatcagagtcaatataaatggkgataaaaagtgttgataatagatactcttgatatattgtgatgaaatggcattttacttctgcatccttcctcctgaaagccc

SEQ ID NO: 316690 - DNA, 676 bp, Homo sapiens
tttacctagattggttatttattatcatttagttcagtcattaaattttgattacatacattaatttcacacactctctactagtgcaatgttatgactatgtcatagatatagttatggtacatttccttttatcccacaatggagaaatgaataatgttgtgatactaatacccagacaagtgtatggcttctaatagcaggtaaaaaacataattatactatatttctggtaacatatgttaataaaattatccctagaaatatgaatttaagcaacttattcttatgagaagtcctgctaataacaagttcaagattgtgagaaatcataatgccttatcttttagatctttagcatgaaattgaatgtaaatggaactattatctcattatttcaaataatatattagaagtaattatattattttaaaataaatatattaaattctaatacattattcaataatgtgttgtatcttaataattatattacatgatgatgaacatcatggtccctaaattcakttggtttgaattgcaacaaaagcttcatcaatattaattgctctaaagactttggacaaggagtttaacccctccaaactcctgatctttaattttaaaaaaggtgaccccagtagtaactagtttataaagctggtgtaaaaattaa

SEQ ID NO: 316691 - DNA, 649 bp, Homo sapiens
gatgtctttaatgatatcaataaagaacaaactcttaagggttaagtgagatatcttaaccaaaatacatatttaatcatcaatcgtttaattttagtgggcttgaatatgttttacttcagtagtacagaagactggaaataaaaaagcagtctaaagtaaacattcaaagccatgaattacaaatttgcattttaaagcaaatatcaaaaaatgctgaaaattacatagaaygaaaagccattatctacttccttttttaaaaaatagaaacatgttgatcaatatcatttaaaaactgtggttctcagtttctcaaatttgagaaactattcttagaaaatcaagaacctcatactaatatttgtcatattttctcagagcactttaaatcaggttaaaatgacattaaaataaggccagaaaagatcttggatgggcgtggtggctcgcgcctgttatcccagcactttgggaagcgaagtgggtggataacctgaagtcaggagttcaagtccagcctgatcaatatggtgaaaccccatctctaccaaaaatacaaaaattagccaggcgtggtggtgtgcacctggatgtagtcccagccacttgggaggctgaaacaggagaattgcttgaacctgggagg

SEQ ID NO: 316692 - DNA, 649 bp, Homo sapiens
gatgtctttaatgatatcaataaagaacaaactcttaagggttaagtgagatatcttaaccaaaatacatatttaatcatcaatcgtttaattttagtgggcttgaatatgttttacttcagtagtacagaagactggaaataaaaaagcagtctaaagtaaacattcaaagccatgaattacaaatttgcattttaaagcaaatatcaaaaaatgctgaaaattacatagaacgaaaagccattatctacttccttttttaaaaaatagaaacatgttgatcaatrtcatttaaaaactgtggttctcagtttctcaaatttgagaaactattcttagaaaatcaagaacctcatactaatatttgtcatattttctcagagcactttaaatcaggttaaaatgacattaaaataaggccagaaaagatcttggatgggcgtggtggctcgcgcctgttatcccagcactttgggaagcgaagtgggtggataacctgaagtcaggagttcaagtccagcctgatcaatatggtgaaaccccatctctaccaaaaatacaaaaattagccaggcgtggtggtgtgcacctggatgtagtcccagccacttgggaggctgaaacaggagaattgcttgaacctgggagg

SEQ ID NO: 316693 - DNA, 665 bp, Homo sapiens
ttggtgacttgttgtctctgtatagaagagaatgtgatcccagaaatcctgttagagaacttagcccttcacagtggtgaaraggagagacctgatggagggtgctggatcacagaagggagggtgatgtcctttggcccaagctacaatctaggaagatatggtctctcttgtatctttccttattgctcactacactcttcctatcatatccttatcacagaagtggggcagtggcaggcagggcatgagaatttcctcctttcataacagcatggatggaatagattgttgtgcatgggcaataggcacccattttgaaataaatacatttatcttctagataaatagatcggtaagggaatacagattcacgggccagaatcatcgttccccagacactgttggtacaaataaaagttaccactccacggactagcagtttgagacaaacaggaactgcgcattttgattgcttcatatgtgctgacctgtcttgatttatagaccatcttggaaaatcgtgttaacccaaagtgactatactaaacaaaccttaataatatacacccttactcttcaaaaacacaaactttatctgaccgctgttcatcaattgtgaagactgaagagttggcattaggtaataacctatgatgaaatca

SEQ ID NO: 316694 - DNA, 559 bp, Homo sapiens
tgttgtaagagttgctttattctagagaatccttgggcgtatctgttycacgccttgctcttagtttttggtgactggcagcaattcctagtatttcttggcttgcgcatgtgtcattctaaccattgcctttgtcttcccatgggcttcctctttgtatatttctgtgtcttcttttctgactccttttagggtactttcactgaatttagggcctacccaaagttcaagatgatctcctctagagatccttaacttaattacatctacaaagatcttatctacaaataagttcacatatacaagcaccagggtttggggcttgaatatatcacattgaggcatctattcaacacactacaatagtgcacaggaggacaaaaccactctttataacaaaaccatcaaattgtcaggatggactcacaatgctgaatattcatgtgtaaattctatttgcctgcaaaactgcctacattgttttagagcaataccaaagcagactgtacttttttcctgtataatcctgaattcatttccagaattccataatgtttgt

SEQ ID NO: 316695 - DNA, 559 bp, Homo sapiens
tgttgtaagagttgctttattctagagaatccttgggcgtatctgtttcacgccttgctcttagtttttggtgactggcagcaattcctagtatttcttggcttgcgcatgtgtcattctaaccattgcctttgtcttcccatgggcttcctctttgtatatttctgtgtcttcttttctgactccttttagggtactttcactgaatttagggcctacccaaagttcaagatgatctcctctagagatccttaacttaattacatctacaaagatcttatctacaaataagttcacatatacaagcaccagggtttggggcttgaatatatcacattgaggcatctattcaacacactacaatagtgcacaggaggacaaaaccactctttataacaaaaccatcaaattgtcaggatggactcacaatgctgaatattcatgtgtaaattctatttgcctgcaraactgcctacattgttttagagcaataccaaagcagactgtacttttttcctgtataatcctgaattcatttccagaattccataatgtttgt

SEQ ID NO: 316696 - DNA, 665 bp, Homo sapiens
ttggtgacttgttgtctctgtatagaagagaatgtgatcccagaaatcctgttagagaacttagcccttcacagtggtgaaaaggagagacctgatggagggtgctggatcacagaagggagggtgatgtcctttggcccaagctacaatctaggaagatatggtctctcttgtatctttccttattgctcactacactcttcctatcatatccttatcacagaagtggggcagtggcaggcagggcatgagaatttcctcctttcataacagcatggatggaatagattgttgtgcatgggcaataggcacccattttgaaataaatacatttatcttctagataaatagatcggtaagggaatacagattcacgggccagaatcatcgttccccagacactgttggtacaaataaaagttaccactccacggactagcagtttgagacaaacaggaactgcgcattttgattgcttcatatgtgctgacctgtcttgatttatagaccatcttggaaaatcgtgttaacccaaagtgactatactaaacaaaccttaataatatacacccttactcttcaraaacacaaactttatctgaccgctgttcatcaattgtgaagactgaagagttggcattaggtaataacctatgatgaaatca

SEQ ID NO: 316697 - DNA, 575 bp, Homo sapiens
agttgaatttacatgcaagtattattttggcattctactgtgtttctttaaacatcatcaaaatttttttgcagttgatactttcaaatttttaaaaatttcttcatctgtgaaaaatagtgtcaaattcaaagattcacaaaagcaatgccataatgctctttaataatataccattaaaactatgttgttttcctgttcttattaactacgtagaactcattctttagacaatgatcaacatattccagcgatacaataattataatgtttaaatatgttaatttgtaaaagtgcaaatataaatccatatgtgttagatatatttattttctggacatacttatcttttaataaaggcttacatttaatttgcattatttacttctatgtttccatctaaactagaatccatacatttcttaaaaattgaatattttgttacaataaaaatatcaagtaaatttagactctgctattaacacctattattatgtaggcagtacaaagcatacaatgatttygtaatgcctttatgagtttctatggtgataaggagcttgcattgatagaca

SEQ ID NO: 316698 - DNA, 577 bp, Homo sapiens
tctagacacattaagtggattatttttctactcaagtaagaggaggttataaaaaataatgtgccatttttccctacaatgaatgctgttttctttgttaatttccaagttgaaataagaagagtgtttcttcttaataggagtcaaaatgtcttattgaacagactggggagacccaagtcatcagatttaagaactagttcaagatttttctaatatgtaaagaatactggcatcagtatcatgtaattttgggtgcttgaatcttagatcgttctatgatggtgcagacrgaaatcctttatgtgtatttaacatatataacataccattttagatatataggtataaggggttaatgcttctccatctcctgtcaaatttgtctcctttacattgacatttggcacactactccaatttttctatctgcctcagggctcaagaattaatggtcaagaagaaagtacacatattttgcaaagaccaaaactttaagttctctgtcttattactccatataggaaagagaaagatcttgggctgtggtgtctgtgtttgcaggaagtcattaaat

SEQ ID NO: 316699 - DNA, 604 bp, Homo sapiens
acttttgctcctatgatataaactttcgctgaactttcttgggggattgggatgatctcttgggaggacctcarcagatttgggcatgtacataattttgaattgagtgaccacaaagtacccattggcaaaggcttgatgccccctcagcacacacatgaactattttctaagcaagtgcttacttgtaatttaacattgccaagtcccccatccagctaaggtatatttatctagataagcagtcttcaaactagggtatgcatacccctggaggtgtaagacttcctaagagatacacaggttcagaagttaataccagtaattttctaattcctcaactttaatatattctactgcttgaaattgatttgcctgagaactctcctgtgagttttcctttcttacctcttctttctcacgcccttcttctactagataaaataaagacatatttcccttccacacagaatcttactatgtgctttagctgagtgtaatttcttgcccccaataaagggacaattcaaaatactgaggtaatactgaaaagtgaatgtataagtatcaaatcattctgcaagtcaggtggtttccaatttac

SEQ ID NO: 316700 - DNA, 555 bp, Homo sapiens
aattctccagccaaaaggaagagattggcagaatggataaaaaacatgatccaactatatgctgtctacaggagacccacttgagatctaaagacaaacatcttgaaagtgaaaggatggaaaagatattccgtgtaagtactagcaaagagagctgaggtggcttacactaatatcagacaaaatagtctttcagtcaaaaactgttacaagagacaaaggacactacactgagaaaagggtaaattcacagaaatataacaattatatatgcatttatcatcagacccccaagatacaaagagcaaatattaacakaattgaagggagaaatggttctacagtaatagttttagacgtcaataccccactttcaataatgggtggaacaaccaggtggaagataaggaaacaggacacttgaacaatacgataagccaactggacctgacacacgtatatagaacaccttcccaacaacaatagaatatacatttttttgcagtgcgcatggaatagtctccaagataaaccatatgttaggccacaagtgtt

SEQ ID NO: 316701 - DNA, 593 bp, Homo sapiens
caaaatgccccttttcctttgaataaggttttcttttgcttaattttctttaaataatttgatatgcttttacttattgttctagcgatattactaatgtttttcactgtaatagccttttctccatacatgtaagggttctgctttcgatgtggtggtgtgtgatttaagcagaacgtatcataatttggtgagccaggttctrtagaactacattaaaaattttttcaaaacagtaaaaaaaaaataaaaaggtgctatggtaaggatatggtttacgtgattaaaatttaaacagctgtttccatggttggaaaaaaaaggtctttgtatgcaaaaaatttacactaagggctgaggcaaatggataagtcagttctaacatttgaatcttattttttctagtctgtgaatgtcattctatttttataatgcatgatcaaatatttttccacttttacattttgcttatctaaacaactatttccacattaagactatacaaaattataattttaaaacttgattagttacaaataagttgatttttcccattacattttatttttagaaaaaaattatatagagaattt

SEQ ID NO: 316702 - DNA, 526 bp, Homo sapiens
agtgactgtcggcctcttcttgctctgagaactaattcagtttttaaacaccagagcattcagacatctgatttgcatcccgctctccggtaagcagcatcataatttaaaaccctgccagtggagatgtatgggtagctgtgtcagggagcacaggggtggccgttaatgctgtgagttacagcctggtggtaccgtgtcagagttaagtatgagagaccagtgataaattcaggttgtccaggagttctggggataggagagagaagagaagagggtyggtttctcatatttgaagtccttctaaatcattaagttgacattttatttagagaacacacagtgttcattttgtatgtgggatctgcattcctcgcattttttatttttgcattctgagagcaacttttgacagaagcatctcacagcttgtggtggggcgtttgaacactgcagggctagagttctcacagttgtgattgtttaaattcactcaaaatctgtaagtaagtgcaggctgtagtca

SEQ ID NO: 316703 - DNA, 526 bp, Homo sapiens
agtgactgtcggcctcttcttgctctgagaactaattcagtttttaaacaccagagcattcagacatctgatttgcatcccgctctccggtaagcagcatcataatttaaaaccctgccagtggagatgtatgggtagctgtgtcagggagcacaggggtggccgttaatgctgtgagttacagcctggtggtaccgtgtcagagttaagtatgagagaccagtgataaattcaggttgtccaggagttctggggataggagagagaagagaagagggttggtttctcatatttgaagtccttctaaatcattaagttgacattttatttagagaacacacagtgttcattttgtatgtgggatctgcattcctcgcattttttatttttgcattctgagagcarcttttgacagaagcatctcacagcttgtggtggggcgtttgaacactgcagggctagagttctcacagttgtgattgtttaaattcactcaaaatctgtaagtaagtgcaggctgtagtca

SEQ ID NO: 316704 - DNA, 389 bp, Homo sapiens
agtgagataatcttcgaaagaattttgaaatctccaaagtccttgagaatgtcagtttctggggagacctgaactctgccagaaagcctttggagtccctgttcatctagtcacctctttattaaaggyaactgtttttaaagcaatgatgtgtgtgtctctgtatctatctagagagagatatatgtataatttcttcctgctttgaagacagtctctcactaagatttgaaatgtattcatattagacatgtttgcttctgtgtccagcattggggagagatgaatcagataaaatatgacttcaggcttgtctacccctaatgacacttcctttgtgatgtttagccaaggaatatcacttgcacagacataattcagcagttaca

SEQ ID NO: 316705 - DNA, 462 bp, Homo sapiens
agtgagataatcttcgaaagaattttgaaatctccaaagtccttgagaatgtcagtttctggggagacctgaactctgccagaaagcctttggagtccctgttcatctagtcacctctttattaaaggcaactgtttttaaagcaatgatgtgtgtgtctctgtatctatctagagagagatatatgtataatttcttcctgctttgaagacagtctcycactaagatttgaaatgtattcatattagacatgtttgcttctgtgtccagcattggggagagatgaatcagataaaatatgacttcaggcttgtctacccctaatgacacttcctttgtgatgtttagccaaggaatatcacttgcacagacataattcagcagttacagactgttcagtccctttctatatatgctcctgcatctgactctgaattctttatagaggatgtgaaaaacagg

SEQ ID NO: 316706 - DNA, 462 bp, Homo sapiens
agtgagataatcttcgaaagaattttgaaatctccaaagtccttgagaatgtcagtttctggggagacctgaactctgccagaaagcctttggagtccctgttcatctagtcacctctttattaaaggcaactgtttttaaagcaatgatgtgtgtgtctctgtatctatctagagagagatatatgtataatttcttcctgctttgaagacagtctctcactaagatttgaaatgtattcatattagacatgtttgcttctgtgtccagcattggggagagatgaatcagataaaatatgacttcaggcttgtctacccctaatgacacttcctttgtgatgtttagccaaggaatatcacttgcacagacataattcagcagttayagactgttcagtccctttctatatatgctcctgcatctgactctgaattctttatagaggatgtgaaaaacagg

SEQ ID NO: 316707 - DNA, 642 bp, Homo sapiens
atgtgaaaaacaggacttcagggacttctgagtatctgacagcaacctctgaatacccctaggcatcactaaatggagtctttaaaataaatactatttttcaaaaattgtacctaatgagtatatttttaagttgtaaaaacaaaataacagtgacattaataaaacttttttttttaactctcatgatgcagacagttaggaatttgtgcttataacattcttatcactgtaattacttaggaaatttctttccaaagtctgggttttggtaaaagcattataaattctaactataattatatcagattgttcttgttaatgtttacattaaacataatgggtggaaagttttcctaagactgtgacgtgactaagaatctggaatccgttactttaggctgaatcattcatatctttgaaaaygtttctgctgacttgtgggctgactcagagttgtaaatatctatgagggactcaaaatcctcatcattactcctgtggaactttaaagtcataaagatatgtgttagagatgtgtattcagtatataagactggaaaacgttattcagatactaaaggtgaaacatattcttattaaatggataaggacatcacaggtaagggaggtatttcagtg

SEQ ID NO: 316708 - DNA, 583 bp, Homo sapiens
acatttctcccatttccgtcatttctgggaggctccaggagagtgaagttagtttaattagcccagggctttgttgactccggttgggaagctccctgtgtacctccaatgccccacccacccaccatccaggtgcagtttctctggaccctgcttgctgctctcttgggctaaatgacgtggttcttggaccaagtagctaagataccacatttttttttattataagcaataaagactaacaactaaatgaattcttgattaaagtgaaaaacaatgatctttgatgcttccatgggarggatcatactaaatcgtgtgccttgggtgagggtctcagtagcctaaagtgtgtcctgctttgtgtcccgggagacctgtgccctctcctgggcctactctagtcctgaggggcagagggaatggtgtggggtctttctgagggcatgggcctactgaataacaatagttatttttgaaagatcattgtttccctaattctgtggctaagaggggcccatttaggaagaggtcaggagggtggttgaggcggggagggggactcttaaggaaaagacaactc

SEQ ID NO: 316709 - DNA, 550 bp, Homo sapiens
aaggcacggtagcagaggtacagagaagtcacacccaaggtcacacagtgggaagcagagttkttaggagagggaagaagggcagtatggaaaagaatactaaactgagagcagaggccttcatgaatgtcagcttcaccacccatctgtggggaacctgggggaaaaatcacgtacctttttgcatgtacgtccttgacttcacctgtgaaaaaggaatattgatgcatgtcatgaatccttgactctgttgttctgaggttgagagaatgtgtaaaagtgctttgtgaaggtaaagtgcttagaaacgtagttatattacacagctttctcttccacttcaatacttaaaattcaggcttaaaaattcatttagttttgcttttcatttcacttctaatgtgtctaatttatttcttggacatgatttttgttctcaggttacttgtctgcaagacttttttggtgatgacgatgtttttattgcatgtggaccagaaaaatttcgttatgcccaagatgactttgtcctggatcatagtggtaaggc

SEQ ID NO: 316710 - DNA, 550 bp, Homo sapiens
aaggcacggtagcagaggtacagagaagtcacacccaaggtcacacagtgggaagcagagttgttaggagagggaagaagggcagtatggaaaagaatactaaactgagagcagaggccttcatgaatgtcagcttcaccacccatctgtggggaacctgggggraaaatcacgtacctttttgcatgtacgtccttgacttcacctgtgaaaaaggaatattgatgcatgtcatgaatccttgactctgttgttctgaggttgagagaatgtgtaaaagtgctttgtgaaggtaaagtgcttagaaacgtagttatattacacagctttctcttccacttcaatacttaaaattcaggcttaaaaattcatttagttttgcttttcatttcacttctaatgtgtctaatttatttcttggacatgatttttgttctcaggttacttgtctgcaagacttttttggtgatgacgatgtttttattgcatgtggaccagaaaaatttcgttatgcccaagatgactttgtcctggatcatagtggtaaggc

SEQ ID NO: 316711 - DNA, 586 bp, Homo sapiens
tcatgaaatctgatggttttataaaggggaggtcccctgcacatactctctcctgcctgccatcatgtaggacatgcctttcctcttcctttgtcttctgccatgattgtgaggcctccccaaccatgtggaactgtgagtccattaaacttctttcctttataagttactcagtcwcgggtatgtctttattagcagtgtgagaacagatgaatacacaaggtgtctcctccctatagagccctggacagtgctaactcctccaagccatgacatgtgacaatgcacctggactattttccacagggaagctcacctgtgccttggtgtcaggagtccaccctcattgtggcttcatgaacagctgcccacatggctgacctttagcctccagccctctagaagaggagtatatactgcatgccccaaagccctcatcacaaagcacattgctaagctgcgcagtggccaaggccccaggtaaatagacacatccttatcagaagggaaatgccaagggcctacacagcatgtctcagcagctggggacaaaaaccagaactttcttcgggcaaggttaagtcat

SEQ ID NO: 316712 - DNA, 564 bp, Homo sapiens
tggcggcacccaaacaagagacagcagtgtgcaaagatactgggtgtgggtttctctagtagcagagaaacagagccttctgtgcttgcagggtgcttgccctgccctaaacagcatgaatctgaaccccacccatccgaacagcctggggaggcaggatggagagacgtcagagggcggtcaccagtatctcactgcacaggggctggaggtttgtgtctcgttaacctaatgaggtgacggtaacttcctgccctcactgcaccctttgcactgatgggcacgttcatgttattccccagcacaggaaaaagctcccggggaaatcctgatggggtgtagcgcaagcttataagcraagtcctggctctcctcttgttactaaccactctgtgcttctctcaggctgtcctggtcttcggctgtagcactgtgacatcccccactttttgtcttcaaaaggggcagtggctttgaggagtaacctctgtttgtgggctctttgcattccttcttggctgctgggctctggagatccttcagtgatacttcaatgccattgat

SEQ ID NO: 316713 - DNA, 595 bp, Homo sapiens
ataaaaagaacttcccctgaggttattttagaaagggcctgtgaatataaaatctctaggtttttatatatctgaaatacatgcgtgggtgtttttatttagctttcaaccttgagtcataacrgagtccagtatagaattctaggtcaatgtttacttccccccagccctttgagatgcctcttcaaggtcttaagacatgtactgtgctctcattctcattgttcttccatcagagatgcttttctttctagaaatattttaaatgccttctctcctttggaacgttctgcattttattacacggtttctcgatttagatttatttttatagttcgtgccttcagcgtttggaattttgcattatctctttctcagaattcttttaaaatgtcagtcttcattattagtctttattatctcttcaagtttccatctctttatctctgtgtacaacatttaggctgatttccttggttctttcacttccttaatattctcttcagctctatctagcttcttcttcaatcttcttcaatctattattaaatcaaaattttcccctcataattttctcttctagaatttatctttg

SEQ ID NO: 316714 - DNA, 553 bp, Homo sapiens
aaacatcaattgtatttttatatgtccacaatgaacataggacaccaaaatttaaaatgcaatatgattcataatcacttaaaataaaatatgtaggtgtaactcttacaaaacatgtacaagatttgtatgctgaaaatgrcaaaatcttgaagacagaaatggaagctctaaatatatggaaagacatacagtattcatagatttaaaaactcacatagtaaatatgttaattttcccttaattgagatacagttttagcacaaattgtgtcaaagtatcagcaaatatttttgtagatatagatgagattattctaaatgttataaaggacctagaatcactaaaaaacaattttgaaaaagaagatctatccaatttagagacattatatagctatggtaatctagaatggatgatcttggcagatggacaggcttatagataatggaacagaacagagaacccaaaaatagatttacacaaatattctcaattgatttttgactaaggtgcaaaagtaagtcaatggaagaaagatagacttttcaac

SEQ ID NO: 316715 - DNA, 469 bp, Homo sapiens
agacaggcataaaccaaggaaatatgaaggaaagacaggaagaactccatgtaaaagtcaagaaagaggttggaatgatgcatgtacacgacaaggaatgagaagtattgccaccaaaccaccagaagataagagagaagcatggaacagactcctccagtctcagaaggaaccaaccctgctgaccttgaacttggacttctggtcttcagagctgtgagctactaaattcctgttgtttaaggcacctagtttttgatgctttgtacagcagccctggcaaactgatacagygctggagtgagtgagtgttcatattcaataaaataaacctcaaactaaggctcaccccttatacaaaaattcaccaaaaatggactatggaactaaatataaaatataaaactagaaaacttttagaaaaaacaatggaaaaaatcttctggatctaaggtagacaaagatttcc

SEQ ID NO: 316716 - DNA, 602 bp, Homo sapiens
aatacatctgttaagaaaatcaaaattccagaagcttgatcttagggactaaacctttctctcctcccacctcaccytcagccccagccaacatccatctgctgaagtcctaaccccaaggacctcagactgtggctgtatttggagacagggtctttgtagaggtaatcaagtttaaatgaggttatcagtgtggacccaatcggtgtccttctaagaagaggagactagggcacagacaaacgcagaggcatgaccacgtgaggacacagtgagaagaaggctacattcaagcccaaaagaaaggcaagaagccgattctccctcacatccctcagaaggaaccagctctgccagcattttgatctgggatttctgggcttcagaaccatgaaactatgaatttctctggtactttgttaaaggaaccctagcaaagtaaggcatttacaacatgaaggaaatgactgaagtactgaagatttgttcattgtaataatagcagatatcatttaacattattttctattgccagaaaatgttctaaatgtgttcaaatattatctcatttaatcctcaaaaatttccgtgaggcgttactg

SEQ ID NO: 316717 - DNA, 602 bp, Homo sapiens
aatacatctgttaagaaaatcaaaattccagaagcttgatcttagggactaaacctttctctcctcccacctcaccctcagccccagccaacatccatctgctgaagtcctaaccccaaggacctcagactgtggctgtatttggagacagggtctttgtagaggtaatcaagtttaaatgaggttatyagtgtggacccaatcggtgtccttctaagaagaggagactagggcacagacaaacgcagaggcatgaccacgtgaggacacagtgagaagaaggctacattcaagcccaaaagaaaggcaagaagccgattctccctcacatccctcagaaggaaccagctctgccagcattttgatctgggatttctgggcttcagaaccatgaaactatgaatttctctggtactttgttaaaggaaccctagcaaagtaaggcatttacaacatgaaggaaatgactgaagtactgaagatttgttcattgtaataatagcagatatcatttaacattattttctattgccagaaaatgttctaaatgtgttcaaatattatctcatttaatcctcaaaaatttccgtgaggcgttactg

SEQ ID NO: 316718 - DNA, 602 bp, Homo sapiens
aatacatctgttaagaaaatcaaaattccagaagcttgatcttagggactaaacctttctctcctcccacctcaccctcagccccagccaacatccatctgctgaagtcctaaccccaaggacctcagactgtggctgtatttggagacagggtctttgtagaggtaatcaagtttaaatgaggttatcagtgtggacccaatcggtgtccttctaagaagaggagactagggcacagacaaacgcagaggcatgaccacgtgaggacacagtgagaagaaggctacattcaagcccaaaagaaaggcaagaagccgattctccctcacatccctcagaaggaaccagctctgccagcattttgatctgggatttctgggcttcagaaccatgaaactatgaatttctctggtactttgttaaaggaaccctagcaaagtaaggcatttrcaacatgaaggaaatgactgaagtactgaagatttgttcattgtaataatagcagatatcatttaacattattttctattgccagaaaatgttctaaatgtgttcaaatattatctcatttaatcctcaaaaatttccgtgaggcgttactg

SEQ ID NO: 316719 - DNA, 567 bp, Homo sapiens
gattgtccgtacattagctctggtggtggtttctctgaagtttacatccacatgtccaacttcaactggcagagcttcagggtaaaaagcagtttaattttagtgattcgaagccagaaggttgaaagaaaattggagatactagcttggagaatcatagtcagatattgaaagaaattagaacatagaatccagttcagaatgaagatagataataaaacctcaaagaaaacaaacagagctagaacctaatattgagtgaactatagttttcttctagaacatacttttttttctctgtagagtcacccagtttctatcaaagataatcaaagtaagactaatcggtttgcaaaataartttggtctcattaaacttggcctgaatatttatgtaagtgcagcaagattagtgactgaccatatagactctttttcagtttgcttttctggaacttttaataagaaataaaagtttaatctgagtcttttcttgcaaaaacaagaaaagacttttaagactaagaagcaatatcaagaacttactatcaggctgcaaccgtaaca

SEQ ID NO: 316720 - DNA, 425 bp, Homo sapiens
ttgatgggccatgaattctggaattgccagagagaactggaatcacttcatgaatgggatcstgacgggaaaggcataggcttacatttccatttccctcacatctttaggcaagtgtgactgaaacattttcttggcatttatgtttaatatatacactgactcccagcatttgactcccagcatttgactccaaaaatttggaagccctcctcccttaaaaataatgtatacacttgtgcatttatgcccaccctgacctatcaagatattgatctttgaattcctactgttcatgtataatttttaaaaagttgagacatgagccttataccaaaataaaataaacacatattaaggattttatttgattctttaattatagaggaaattaagatgacgataaagctgacttgaatagcacc

SEQ ID NO: 316721 - DNA, 601 bp, Homo sapiens
gaatcagtagaaaatcccctactgttcaaaaattaaacaattcacctctaaataatccatgtgtcaagaggaagtcacacttgcaactacaatgtattttgaactgaataataaaatatgccacaagtggacctctgtagcatctagcaaccagggcttaacccttgcccagaagctggtcttaaggagcctgctccagcattaaggtcttgtgtgttctgattatttcaagttcgccctttgccacatgttaacaatctagattacatcctctgccccactgccttgttggagccatgactttaaatcttccacacaaccagcatactgcttttagcccagtgtgcatgcagtaagmttctttttgctacaacatcctattaaccatttctggttattcttggcagtaatgtctttgcaaagtggaaaacattctttaattctaagcaaggacaaaagtgttcaaagctttataaggctttagtcacccaaggaactaattcatgtgattattcatctttttctgcccttgtaaatcagcacctcagagatattcagacactcttgacttccaaaggacaagcttcttgcaaatgaacaa

SEQ ID NO: 316722 - DNA, 601 bp, Homo sapiens
gaatcagtagaaaatcccctactgttcaaaaattaaacaattcacctctaaataatccatgtgtcaagaggaagtcacacttgcaactacaatgtattttgaactgaataataaaatatgccacaagtggacctctgtagcatctagcaaccagggcttaacccttgcccagaagctggtcttaaggagcctgctccagcattaaggtcttgtgtgttctgattatttcaagttcgccctttgccacatgttaacaatctagattacatcctctgccccactgccttgttggagccatgactttaaatcttccacacaaccagcatactgcttttagcccagtgtgcatgcagtaagattctttttgcyacaacatcctattaaccatttctggttattcttggcagtaatgtctttgcaaagtggaaaacattctttaattctaagcaaggacaaaagtgttcaaagctttataaggctttagtcacccaaggaactaattcatgtgattattcatctttttctgcccttgtaaatcagcacctcagagatattcagacactcttgacttccaaaggacaagcttcttgcaaatgaacaa

SEQ ID NO: 316723 - DNA, 578 bp, Homo sapiens
tcttgaacaaaattcttgtgctagggagaaatcttggttgcaagggtcagacacctaactcagagtacattaaacaacaacaacaaagaatattttggctgtattatataactgggaaaatggggaaaatgtcttgctccaggcatagttggatccagaaattcaaataacatctttaatattttctttctcttatctctctctcttyttcccttgcttcctctccctttattacttttcaattatctctctcacctctttcagctttcctctgtgttggctttactctcagtaggattatcccatttagtattagtctgttctcaagctgctaataaagatatacctgagactggataatttataaaggaaagaggtttaatggactcacagttccacatggctggggatgcctcacaatcatggtggaagatgaaggaagagcaaagggatgtcttacatggtggcaggcaagagagaatgagaatccagtgaaagaggaaaccccttataaaaccatcagatctcgtgagacttcttcactaccacaggaagagtatgggggaaaccaccccgag

SEQ ID NO: 316724 - DNA, 609 bp, Homo sapiens
acctatttcctgcctctgtctgtattgtgggagcagacgcgtcagtgtctgggatcacaatacagacctcagtttccaaaggtctcactgttctccaagatctaaaactgcactaccaaaatttaatgggcagagccaaagaaggaagcccagtttatgtttaaggatcataccgcccagaggggatgaatggcaggaatattcacacacaatgggctcctgggctgttataacggcaggaagaaaatgaggacaagtgttagagatattgaaaggagggctgacatccagcctcagccagaggccttagttcagtctttgttgtaaaagggtccttggaattgggtcttaaagggtgcataggggttatgtgagagccaggaggatcttccaatgcctggctcggattgtgctgggtctctgtaagcctgagactaaaacttagaggttctatgagatctctcaccttctactttcctaaagctttttgtccatctcatgtaaagcrttttatctttcccagtatgtgggttgcagcctaggaagtgatttatggagctcctctgcactgtccaatatgactgtctctgcagatgcacgaggcccatc

SEQ ID NO: 316725 - DNA, 324 bp, Homo sapiens
ctttacaataaaactgtaagtatagcagtttcctgaattctgagatgtgctgcaaattatcagacccaagggggggggggtggtggtgaccytgaatttgtagtcatccaggcagttttgcagtgaacctggggactcagcagttggaattggcatctgaagtggtggcagcctagtgggactgagccctaccaactctgggtagttagagtcagactggaattgagttgcagttcagctagttagtgtcagagaaaaaaaaaacacaaagaccatacatattaggggcaaagagaaggtggctagcttaaaaaggtaataagc

SEQ ID NO: 316726 - DNA, 554 bp, Homo sapiens
gaatatataagctcttttggtctcctgcttgcctgtcgtattctgccaatagaggtggggggtgtggcggcgctgggagaaggcaagggggagggacaaacagagcaagggaagaaaattgaaattagggcatctataattccaacctggttgctacagaacatgtgtatccctctgccaaagtccacagttctgccaaggcaccccctctatacaactctctccaggttcctgtaactccctcccttttccccaccaggtctaggtggtaatagctcccagcacttaccagcttcaaggctcccattatcctgtgtgcttttcttatcccactgcaactatgtaggtagtccgttattaaaatctctccaatcactaatttgagtacatcatccattccctgatgagatagatcgatctatctatctattcatccatccatccattcatccatctgtccattcatccatccatcattccattgctatccattcrtctatctatcatctatccatccatccatccatctattatctatctagctagctagctag

SEQ ID NO: 316727 - DNA, 553 bp, Homo sapiens
aatcaacatgctcagttcacagctgactagtcaaatggggtcatacctattttggttggggaaaagagtttgtaccatttttatacaataatgaagaaatagttgttaggttatgggtataacagatggaaaaatactttggcatcatttttgcccctgaaatttgaagcttcataattacagcttcaaacaattgattcttcctcatgattcactggtgttgactggrgtcactcatgtggggcatctgatggggactgggcttggggttgggctcagctaagacataaggactcctggatctctccctcttctctcatccttaaagagcacagtctgagtgtctgtgcacagaggcaggcactaaaatggcaagaatgtaaatctcaaggactcctaaatcctcagctctaggatttgcacaatatcacctcccctaatttcttggttaaatgaagtcacaaagtcaatgggatgaagacactgactctacctcttgatgtgaagaacagttataacctactatgaatggacgtggagccatgctcatagc

SEQ ID NO: 316728 - DNA, 562 bp, Homo sapiens
catgctcactcctaaggctttcaatcaaaagcggtgcatatcactctgcccacctcccattagccagaggaggtcaaatgaccatgccttagtaaaacataatggagaggtaaaatcctatggcaagaaaagacagaacatttgtgaactataatcaaaatctatttttcatatttgtgtactaattctcaagtgagaagaatttttactgggcttcatattcacacgcaaacatgttgcattgctttcgatcccattatttctcaacctaagtgtaatttggaattcatcctaagaagtacagatggaaggggagaaaatgaacatagattatagtcaaattctcagtgtcattcttgtaaagtagctcttctatgctgagatgaaattttctcttgtccctgttacctgcagtcaacacctgccaggatataggatccattcccaaagcgacccctgcctacagtcttmcctaatttctgtcctctcagttcttgctagagagggtagaaatacctctatgcctgacaaaagaagctcccccacagtaaggggatggctg

SEQ ID NO: 316729 - DNA, 585 bp, Homo sapiens
gagttatcagccaacactttagctggggaataggtactgctcaccttaatgagtatttgggcagacatcaatagtaccactacaatcctctccctgctctactcagatccacctgctggtcacattatgttctctacatccagacacagcttctctagtattctcatttgtcaaaatttctgagaaaactgttaagagcagcattaaattacagttgccatagcttcagttgatttcaagatmataattaatacttaatatatcactcttccattagattcttcctccctttggctagcttttatactggtttatatgtcttgcctaggaggctaaataagacccttacccataagttgtctggttcctggttactatgtcctttcaagccttagtagctgcatttctgcttttatagctataactgtgcatgcaagttatcaagagccacccaactgattgctaaatatatttctccctgtccctattatgtagcagcagccctaaatcctcatgaagaccagaatcaattacccctgctagtatgggagctcatttatctgctcatgctctaactgcatgagg

SEQ ID NO: 316730 - DNA, 601 bp, Homo sapiens
ctagcaataaaaattgataattaaaatttataacacaagaccatttgtaatatcatcaaatacataaaattcttagaaatatttgaaaagaaatttgaaacacctattcactgaaaaccacaaaaagttgagaaaaattaaagggaacctaaataaatggatamataaactatattcatggatttgaaggctcaatattaccaacatgttaatttccttcaatttaatttacagattcaacgtgttccctacaaaaatataagcagccttttccagggaaataaattgacaagctgatcctaagattcagatagaaatacaaagaatctagacttgccaaaagaaatttgaaaaaaaaaaatgagttacaggatttatgataactgacttcaagacctgtgctatgttttgaatttttttccctttcaaaactcatatattggaaattcaatccccaatgtgttattattgggtggttgggcctttgggggaaatgtttaggtcatgaaggctctcctttgaagaaaggatgaatatcactttataaaataggcttgtgggagtggattcccctttcctgctcttttgccatttgaggata

SEQ ID NO: 316731 - DNA, 601 bp, Homo sapiens
ctagcaataaaaattgataattaaaatttataacacaagaccatttgtaatatcatcaaatacataaaattcttagaaatatttgaaaagaaatttgaaacacctattcactgaaaaccacaaaaagttgagaaaaattaaagggaacctaaataaatggataaataaactatattcatggatttgaaggctcaatattaccaacatgttaatttccttcaatttaatttacagattcaaygtgttccctacaaaaatataagcagccttttccagggaaataaattgacaagctgatcctaagattcagatagaaatacaaagaatctagacttgccaaaagaaatttgaaaaaaaaaaatgagttacaggatttatgataactgacttcaagacctgtgctatgttttgaatttttttccctttcaaaactcatatattggaaattcaatccccaatgtgttattattgggtggttgggcctttgggggaaatgtttaggtcatgaaggctctcctttgaagaaaggatgaatatcactttataaaataggcttgtgggagtggattcccctttcctgctcttttgccatttgaggata

SEQ ID NO: 316732 - DNA, 601 bp, Homo sapiens
ctagcaataaaaattgataattaaaatttataacacaagaccatttgtaatatcatcaaatacataaaattcttagaaatatttgaaaagaaatttgaaacacctattcactgaaaaccacaaaaagttgagaaaaattaaagggaacctaaataaatggataaataaactatattcatggatttgaaggctcaatattaccaacatgttaatttccttcaatttaatttacagattcaacgtgttccctacaaaaatataagcagccttttccagggaaataaattgacaagctgatcctaagattcagatagaaatacaaagaatctagacttgccaaaakaaatttgaaaaaaaaaaatgagttacaggatttatgataactgacttcaagacctgtgctatgttttgaatttttttccctttcaaaactcatatattggaaattcaatccccaatgtgttattattgggtggttgggcctttgggggaaatgtttaggtcatgaaggctctcctttgaagaaaggatgaatatcactttataaaataggcttgtgggagtggattcccctttcctgctcttttgccatttgaggata

SEQ ID NO: 316733 - DNA, 601 bp, Homo sapiens
ctagcaataaaaattgataattaaaatttataacacaagaccatttgtaatatcatcaaatacataaaattcttagaaatatttgaaaagaaatttgaaacacctattcactgaaaaccacaaaaagttgagaaaaattaaagggaacctaaataaatggataaataaactatattcatggatttgaaggctcaatattaccaacatgttaatttccttcaatttaatttacagattcaacgtgttccctacaaaaatataagcagccttttccagggaaataaattgacaagctgatcctaagattcagatagaaatacaaagaatctagacttgccaaaagaaatttgaaaaaaaaaaatgagttacaggatttatgataactgacttcaagacctgtgctatgttttgaatttttttccctttcaaaacycatatattggaaattcaatccccaatgtgttattattgggtggttgggcctttgggggaaatgtttaggtcatgaaggctctcctttgaagaaaggatgaatatcactttataaaataggcttgtgggagtggattcccctttcctgctcttttgccatttgaggata

SEQ ID NO: 316734 - DNA, 626 bp, Homo sapiens
tcaaactctgcctcccaagtagctgggactacagatgtgtgccaccaggctgggctaatttatttttatttttgtaaagatggaggtctcactatattgcccaggctggtcttgaactcctgacttcaagcaatcctctagccttggcctcccaaactgttgagattacaggtgtgaattaccatacctggcctctctgtttctatactgtttctctgatgttattcaagacttgataggtcattttaacctcaggattgtctgatgtccttctacagtgggagcagtcctaacaaaacccagctagctatgctccttcataaggactatatgaagaacctcgatcaggttgcttttgaatccaaaactccagcaatttccaatgaagascagtattcagtttctgccatgtgttccaaatgtcatgtgatgtatttgcagacactttaaaaatcaactgagcattgatgtaaaagatttgaggaataatgcctgggacacaagcatttgtaaattttttaacgtatttttcttctcagggtttcatccaagggggatttcttaatttaatctctgctagctagcctactgtcagaccccatgttggtcccaagactgccttgttt

SEQ ID NO: 316735 - DNA, 611 bp, Homo sapiens
cattcaaaatcccaaactggtaattgagaaaatggcttaaaattccatttttggaatttgctatttatatgctaagtttgaactataatgtggaatcaaaattctttgaacaatgttcccaacattgtatatctcgtgataattacattcttgattctcttattgtttgttcccttgctcattcttttatatttcttcccctgactctctttacttggctcacttttttattataaagatttaagattttgactatttttttcttcaacatatatttcattgtttaaaggaaaattttcattgcccaactagtctatttttttcagtaaactaaacattgctacaaagctgatatttttsagaagcatagagcctggactgtgattgtacagaacaccatggtaggaacagtactcagaacaaaatattcaagacattgtgacagaacaaaagaagataccaaagaaagaatataatgtttttctgcctctaggaaaggaaaatttggtgttcctactgacagtaccgatttttcattgagatgcattattcactattttttaaaacaaattctacatgctaatgaatgtcaggtagtgtaaaccacagag

SEQ ID NO: 316736 - DNA, 611 bp, Homo sapiens
cattcaaaatcccaaactggtaattgagaaaatggcttaaaattccatttttggaatttgctatttatatgctaagtttgaactataatgtggaatcaaaattctttgaacaatgttcccaacattgtatatctcgtgataattacattcttgattctcttattgtttgttcccttgctcattcttttatatttcttcccctgactctctttacttggctcacttttttattataaagatttaagattttgactatttttttcttcaacatatatttcattgtttaaaggaaaattttcattgcccaactagtctatttttttcagtaaactaaacattgctacaaagctgatatttttgagaagcatagagcctggactgtgattgtacagaacaccatggtaggaacagtactcagaacaaaatattcaagacattgtgacagaacaaaagaagayaccaaagaaagaatataatgtttttctgcctctaggaaaggaaaatttggtgttcctactgacagtaccgatttttcattgagatgcattattcactattttttaaaacaaattctacatgctaatgaatgtcaggtagtgtaaaccacagag

SEQ ID NO: 316737 - DNA, 658 bp, Homo sapiens
gggtaccattgacgtacatgttatggctgctgccagggccctttggactccttgttcccacagaccagcaggtaagaagaggagttgccataccagcatgcaaaattgatgctgatccctaggaagaggtagggttgctcttacacagtggcgtcagggaagcatatgtatagaacccaggtgatccactgggcacctcttgctgctcccttggtccatcgtaactgtgaataaacatgtgcagcaaccctaatctaagaagkgtgtgattgtcaagagtttaacgccctttgaaatgaaggtttgggtcatatcaccatgtaagcaccattacctgccaatgtgagagccaatgacaaatgaggggggatttgaaacaaatagtggaagaaggagagataagaaacaatggcaacccccaaatgagctacagcaactgggactatataggtcatcctacaccctctgccttgcctatttgcaatttctctcagaaagagaggcccatgggatcgatagaggagtgtgtcttatatcagaacaggggaggtggatgctgtggccatgaggctgtacctctcaggtctcggaccatgaggagcagaattctctgagacccccagttgctgtgatcggacattgttgccacatgttaatt

SEQ ID NO: 316738 - DNA, 487 bp, Homo sapiens
aaaaccgtcaaacttgtcagaagtataccaggaatatcataagattctacctgcacttttcaagctacttcacagcaacgctttattttctaaaaagtaataaaatagcacatgattatgaacactgcataaaatcatgatcactgaaatattccataattataataaaattgtttttaatttagtctacactcacaacatcttaaggaaaaaaaatatgtacctttgaaaatggttagcaatcctgtgatagaaagtaactgatcattcttaattaagtttcaaatgtactccttcacacagctgcacacacaatgtgtactaacctaattgttagttgcacctgctccaagttaacaatatttcatacagcccatggcaatagtkgcatttttcaagtgttattctgtggagtgtaaatctaaactttctttcaatagtttatgacatgttttgtgccacccagaagtctaaagtacaaaatagg

SEQ ID NO: 316739 - DNA, 578 bp, Homo sapiens
tgttttagtctatccaggctgctataacaaaatgctatagagtaggtagcttataaacaacagaaatttatttctcctagttctggagcaagtgtgagaagtccaagatccctctttcctggttcataggtaatcttgtctcactatgtcttcacatggtggaaggggcaagacagctttctggagcagcttttataaggcactaatcctattctgaaggattctgccatgttatgacscaatcacctcccaaaggtcctcaatatcaccttggaggggtcaggatttcaacacatgaacttgggcaaggcacaaacattcagaccatagcatgtattttgaaccaagtagaaaagttaataaaagttcacaatcaaaacacatgactacagagagccctcccattgcctaatctgtttgcacattgttgctcattcccataaattactcagtagggacacaggtccacaagggcctaggtattgtcagctctttggaaatggctgtgtatactgatacataaaaacagtgtttgagtacatactatatgcctagaactgtgcttttttaccagttat

SEQ ID NO: 316740 - DNA, 505 bp, Homo sapiens
aaacttggtcctaaatatccacgccccaggggcagccacttgggccagcatgttgcgcccttcagctttccgcccgcaggtggcagcagcgggctccgaagcctgtctctgcaggtagcagccgcttcacagctttcaggccggtgctcagcggaggctggtgcatcyccactaggaatccacacccagctgggactgctgtgaagctgaagtaactgagtattaaactagtctccgactctttagtattttaagtgaaaacaaacaacagtttgaagcagcaacagcaactcattgcatccctattccctccggttgctaatttttcccaactccagcagcaactcggtccccttccccaagcagggtcggctccgtagctctccgcgctccgacccttcagatcctcgggagcccaggggagccaggtgctgggcggtgcgtccggtgccgccgcgccccttctcgccacctctggcctctccgccactcgggctttccggcc

SEQ ID NO: 316741 - DNA, 425 bp, Homo sapiens
gggcagcgccgctgctgggacgcggcgcggacccgcatcattgcgcgcagcagccgctgcagcagccgccggggaccgcggagccsggacgcccccgctcggcccgcgccccgctccccgccccacccccgcccgccgggcccagcaacgcagggtgcctaggagccgcgggctgcgcagggaggcgggcagcggccctcgcgcgcttctgccgcccccggagccggcgcgcggcgagcgcagggcgagcgcgcgtcgggcggcggccgcgctggggggcgtgaggcgagcggcgcggagagcggcaggggcgaaacttcgcgggccagatgcccgagggcgcggcggcgctgccaggctgccgctgctgcccctgcgggccccgggcgcgcctccgcaggcggcactgcccgcggcgcggcgtg

SEQ ID NO: 316742 - DNA, 594 bp, Homo sapiens
attaatacttcagaatatcttatatcttgcagacatgtgtgtctgaaaaacccagtgcatttaggtcacagataaatacttgataaaatataattcacatttataagggaaaaactaataaaaagactaaaaacaagtggcaaaatgcacattttcaagtactcaaaataatagttacaaatactgtttacaaaatcttgaaatgttggcactgtgtttcatggtaacctttagaaaggagaattataccttattgaatattttgtcttatcaaaatacattgtaaaataacatttaataacatctgagtgtgtctcaatttaaaacgatgtacacattacagaaattacatataaatgcccaataaatctttactgtctgaggcttgctgacaagaggtttagtcagtaacytaagaaatcaaacttcatcatttttagggcacatagaagaaccatgccaatgaggacggagatgggttctatattttcccaaagctagttagaataatttttttttttggtaattctaaaggtttactgatcatttaactttgtttcagatgacttaaaaaattatcctaaaacaaagagg

SEQ ID NO: 316743 - DNA, 535 bp, Homo sapiens
cagactaaagaacacactttagagcaaatggagtgaagttgtggatacctgactggtcctatcacatactgtacctccagtaaattgtcagcctgacagagtgatggaaaagcctctgacggcacagctgaggtgccagcttggagattataccctgcaaggatggggcatcatccttcaggatgtagtatgcacaccaaatcaacaaccattttatggtctgtgtcccagtatgtagaacacttgtgtctgggtctggaaaccaagggawggaagttggatggctttgtttactgtcaatctcaatgaagtacttggtgaatgtgtgctcttctcacctacaattctagcctttgcaggtttagatgtcctagttcggatgaccagagaacatagaaaatatcccattaaattctaacctgttgccacaacttggtcaccttggattccttgtgcagagactaccaggaagcaaggaactgaggtactgttctcacaggtataattactctgtcgtttaggaggagggagggtt

SEQ ID NO: 316744 - DNA, 591 bp, Homo sapiens
taccaagactgggtaatttataaaggaaagaggtctaattgacacacagttctgcatggctggggaggcctcaggaaaattacaatcatggcagattgggtggcaggagagagagtaagtgcaagcaggggaaatgccagaggcttataaaattatcagatctcatgaaaattcactatcacaaaagcatgggggaaaccttctgtcccatgacacgtggggaatatggggattacaattcaagataagatttgggttggggctcagccaaaccatgtcacccctgttaatggaaaaaccaaactttgtaaaatattttaaagaggtttattctaagccagtgtgatgaccacagctcagaaaaacaagagtctgaaggagccctgagaaagtctgcccgaggcagttggataaaagtttggttttgtacatttcagggaggcaggaattacagacgaagacctagatcaatgcatggatgaggtatgtattggtttgccctgaaaaggcaasataccttgaagcaggggcctacaggttataggtggattcagagattctttaatttgctattggttaaaggaataagat

SEQ ID NO: 316745 - DNA, 541 bp, Homo sapiens
catcggactccatgttcttcagcttttggactcttggacttacaccagtgatttcccagggggctctccagccttcagccacagactgaaggctgcactattggcttccctacttttgaggtttgggtcctcggcctggcttcctggctcctcagcttgcagacagcctagtgtgrgatttcatgttgtaatcctgtgagctgattctcctaataaactgcccctcatatatacgtctatcctattagttctgtccctttagagagccctaatacacctattaattcatttaaagtaaaaataatatacttattacatgctatcataaatatcatttatgaaaaatattctgattatatgttactataaatgatatcattttatgaaaaataactatgttgttcttacaaaaattagcaaaatgagatgccctattgtaatttccacaaatctctttcatgtttgacttaataaaagacagcaggatcttcaaatgtttctccttcactgggatgtactgtattgttttgattgaagtaca

SEQ ID NO: 316746 - DNA, 576 bp, Homo sapiens
catgactcccacccacatggctgacaggcagagccattctccctctctccatggggyggcggcattaccacattggagaacaggcgagccatacaactgcctgcattgggctgagtgaagaatttccaccctgaagccactcctgcggagaggcacaggacaggcattttccacgtctctcagccacactgtggcctgcagatagaccacagtgtgcatctgaactgagacaccagccccagaacaggggtgtgatagggaagcagattgcattcctgcctatctagacgtggagccagtgcagccccctcatcccaccacagagacctctgtgcatgtcatcaggagctcccccagccacccctatcatggctggtgcctacgcttatcatttggggtatttgtgggaaagccagggttccagctctgcccagctgcaacctctcttccaccctcccaacctactcttagcaggaagctcagggaacctggcattctgctgtccagtccatcagctgaaacaatagagagcacctcagtgagcaaaggtcagatatacacccatgcgcttatgcc

SEQ ID NO: 316747 - DNA, 576 bp, Homo sapiens
catgactcccacccacatggctgacaggcagagccattctccctctctccatggggtggcggcattaccacattggagaacaggcgagccatacaactgcctgcattgggctgagtgaagaatttccaccctgaagccactcctgcggagaggcacaggacaggcattttccacgtctctcagccacactgtggcctgcagatagaccacagtgtgcatctgaactgagacaccagccccagaacaggggtgtgatagggaagcagattgcattcctgcctatctagacgtggagccagtgcagccccctcatcccaccacagagacctctgtgcatgtcatcaggagctcccccagccacccctatcatggctggtgcctacgcttatcatttggggtatttgtgggaaagccagggttccagctctgcccagctgcaacctctcttccaccctcccaacctactcttagcaggaagctcagggaacctggcattcygctgtccagtccatcagctgaaacaatagagagcacctcagtgagcaaaggtcagatatacacccatgcgcttatgcc

SEQ ID NO: 316748 - DNA, 635 bp, Homo sapiens
aaggaaattttagatctctgtacatgattaatatattaaatcctcaaaccgactataaggtctgaaaatgcatgtctttatgtcactgtacctctcattgcacttggcacagtgttgtgaatatatttgtcawttgtatgttctttctaccatacaattctgccactccaattagcatattgtgttggaaaacaattgagtgcttgccttatgttttactaaatttatatggaactacgttgacacttccttgcccttaagatgctgggactcactggttgctttctagttctcaggagtctctatgtgactctgtcctttacacttgccctgcaacatcaccctcagccctagacaaagccaacatcatttttaaagacctgcaaatatgtctgcaattcactgtatgaatattctcattctatcaaaaccctgacctcactaactcaatggagcaatacaggatgataaagtagtttatatgaaagtcatagaaagtttgctttgtttattcacccaaaggtatgtttttaaaggatgaggcttttatctgaaataaataaaattataatttgaaatttcaaataatgtgactaatagattatgaattcatttccaaatatagaaataattaa

SEQ ID NO: 316749 - DNA, 635 bp, Homo sapiens
aaggaaattttagatctctgtacatgattaatatattaaatcctcaaaccgactataaggtctgaaaatgcatgtctttatgtcactgtacctctcattgcacttggcacagtgttgtgaatatatttgtcaattgtatgttctttctaccatacaattctgccactccaattagcatattgtgttggaaaacaattgagtgcttgccttatgttttactaaatttatatggaactacgttgacacttccttgcccttaagatgctgggactcactggttgctttctagttctcaggagtctctatgtgactctgtcctttacacttgccctgcaacatcaccctcagccctagacaaagccaacatcatttttaaaracctgcaaatatgtctgcaattcactgtatgaatattctcattctatcaaaaccctgacctcactaactcaatggagcaatacaggatgataaagtagtttatatgaaagtcatagaaagtttgctttgtttattcacccaaaggtatgtttttaaaggatgaggcttttatctgaaataaataaaattataatttgaaatttcaaataatgtgactaatagattatgaattcatttccaaatatagaaataattaa

SEQ ID NO: 316750 - DNA, 635 bp, Homo sapiens
aaggaaattttagatctctgtacatgattaatatattaaatcctcaaaccgactataaggtctgaaaatgcatgtctttatgtcactgtacctctcattgcacttggcacagtgttgtgaatatatttgtcaattgtatgttctttctaccatacaattctgccactccaattagcatattgtgttggaaaacaattgagtgcttgccttatgttttactaaatttatatggaactacgttgacacttccttgcccttaagatgctgggactcactggttgctttctagttctcaggagtctctatgtgactctgtcctttacacttgccctgcaacatcaccctcagccctagacaaagccaacatcatttttaaagacctgcaaatatgtctgcaattcactgtatgaatattctcattctatcaaaaccctgacctcactaactcaatggagcaatayaggatgataaagtagtttatatgaaagtcatagaaagtttgctttgtttattcacccaaaggtatgtttttaaaggatgaggcttttatctgaaataaataaaattataatttgaaatttcaaataatgtgactaatagattatgaattcatttccaaatatagaaataattaa

SEQ ID NO: 316751 - DNA, 643 bp, Homo sapiens
gcacctggctgagaaggctttttattataggttgttcttattgttytatttatttggtttgcttgttggttttcaaggtaagtttgacatataaagtggtataatgtttaaaggtcaagttacagagatagctagattgaagttcaaatccagagccaagttacttagactctctaaggacctgttttttcccttataaaattaaaataaagtggatagccacttcataggtttgtaataagaattaatatgatcatgatgtcacagagttgcaaagagatactgaaacttggctctgccaaaaaatattagctattgccattatgattgttctccttaatacctaaggcatttgctgacaatcaggttactcatcatgtccttccaggaaaaaaactttaagaatgttgaaaacttaggaactacttttaaaatttaattttcagacctgacataacacagctgaggaagagaggtggtagctgattggggatagatgtagagatcattaatggtataagagtgtgagaatgtgaagcaggataggatatgatattactcatacagatcacaaatacatgtcaaaattatatttatcattcatttaagtaaaattcaacattgttttcttcaaagaagaaat

SEQ ID NO: 316752 - DNA, 643 bp, Homo sapiens
gcacctggctgagaaggctttttattataggttgttcttattgttctatttatttggtttgcttgttggttttcaaggtaagtttgacatataargtggtataatgtttaaaggtcaagttacagagatagctagattgaagttcaaatccagagccaagttacttagactctctaaggacctgttttttcccttataaaattaaaataaagtggatagccacttcataggtttgtaataagaattaatatgatcatgatgtcacagagttgcaaagagatactgaaacttggctctgccaaaaaatattagctattgccattatgattgttctccttaatacctaaggcatttgctgacaatcaggttactcatcatgtccttccaggaaaaaaactttaagaatgttgaaaacttaggaactacttttaaaatttaattttcagacctgacataacacagctgaggaagagaggtggtagctgattggggatagatgtagagatcattaatggtataagagtgtgagaatgtgaagcaggataggatatgatattactcatacagatcacaaatacatgtcaaaattatatttatcattcatttaagtaaaattcaacattgttttcttcaaagaagaaat

SEQ ID NO: 316753 - DNA, 643 bp, Homo sapiens
gcacctggctgagaaggctttttattataggttgttcttattgttctatttatttggtttgcttgttggttttcaaggtaagtttgacatataaagtggtataatgtttaaaggtcaagttayagagatagctagattgaagttcaaatccagagccaagttacttagactctctaaggacctgttttttcccttataaaattaaaataaagtggatagccacttcataggtttgtaataagaattaatatgatcatgatgtcacagagttgcaaagagatactgaaacttggctctgccaaaaaatattagctattgccattatgattgttctccttaatacctaaggcatttgctgacaatcaggttactcatcatgtccttccaggaaaaaaactttaagaatgttgaaaacttaggaactacttttaaaatttaattttcagacctgacataacacagctgaggaagagaggtggtagctgattggggatagatgtagagatcattaatggtataagagtgtgagaatgtgaagcaggataggatatgatattactcatacagatcacaaatacatgtcaaaattatatttatcattcatttaagtaaaattcaacattgttttcttcaaagaagaaat

SEQ ID NO: 316754 - DNA, 643 bp, Homo sapiens
gcacctggctgagaaggctttttattataggttgttcttattgttctatttatttggtttgcttgttggttttcaaggtaagtttgacatataaagtggtataatgtttaaaggtcaagttacagagatagctagattgaagttcaaatccagagccaagttacttagactctctaaggacytgttttttcccttataaaattaaaataaagtggatagccacttcataggtttgtaataagaattaatatgatcatgatgtcacagagttgcaaagagatactgaaacttggctctgccaaaaaatattagctattgccattatgattgttctccttaatacctaaggcatttgctgacaatcaggttactcatcatgtccttccaggaaaaaaactttaagaatgttgaaaacttaggaactacttttaaaatttaattttcagacctgacataacacagctgaggaagagaggtggtagctgattggggatagatgtagagatcattaatggtataagagtgtgagaatgtgaagcaggataggatatgatattactcatacagatcacaaatacatgtcaaaattatatttatcattcatttaagtaaaattcaacattgttttcttcaaagaagaaat

SEQ ID NO: 316755 - DNA, 574 bp, Homo sapiens
tttgtcaggtctgtgtatttcaaatgtgttatctcactgtgacatttctattcatttttcattgaggtaaaaacataacttgtgatctatcctcttagtaaggttttaaatgtacactatagcaccgttaagtataggcgtgatgttgcacagaaaatctttagaacttacgcaacttacacaactgaaactttatacctgttgaacagcaacccttcttcctccttcccctaaccattctattctctatttctatgagtttgactattttagaaagctcatatgtgtgaaatcatgcagaatttatccttctgtgactggcttatcacgcttagcatgatatcctccaggttcattcatgttcttgcagatggcagaatgtccttgcttcttaaagctgaaaatattccattgtatttatacgccacattttctttattcatttatrtgctgatggacatttaagttttcagattttgttgttttgtgagtaatgctgcaaagaacatgggtatgcaggtaactctaccacatcctgatttccattcttttggaatggaaattccaaattacc

SEQ ID NO: 316756 - DNA, 597 bp, Homo sapiens
atattaaaataattattttatatgtaaataacaaataattagatatgaggctcacaaatgaaatatttatgttcatataatatggctaatgtatggtaacaatagtattaaatctatagatctatgatgggagaattactagaaaagcaatagtaggtctcccaatccatgagcatggaatgattttccatttgcttagattattagttttcagcatacagtccttacacacattttgctaaatttatttccaagggtttatttgtatagtattgtgaatataattattttcttaatttttttaagagataaagtgtctttctctatctaccaggctggagtgcagtaacttgcaatgatagctcactgcaacctcgaactcctggrctcaaacaatcctcttgcctcaacgtcctgagtacctaagacggagaggtgaatgccaccatgcttggctaatttaaaaaaatgaataaattcatagagaagaggatttgtctttgttgcccaggctggatctgaactcctagcctcaagtaagcctcctgacttggcctccgaaggcactgggattacaggcctgagctattgagccca

SEQ ID NO: 316757 - DNA, 536 bp, Homo sapiens
tcctctccaccacaatcttagtcatttaagtcaatttaacaatatattgaaatatttttcttagaagtttaaagttccattaaagagtaacgattacagaaattataggtagcctttagttccacaagtgacatctcaagaggaagatgattcatcaatttcaaactttccttgcaagtaatactggatgaaaattaacttggcaaacataattaataatcatgggttattaattacttccgcaaggtgggtgtgctgattttaaaaggcttgaataaaacataaatttcyttaatttgatactgtaaatggagtaatttggtgatgtaaatggaaatatttaagtgatttttgcgtcagatcttacaacttaaaatatttttctaaaattagtttttgtaccatctctccagcatgttccagcctatatcagtcagtccaggcttctataacaaaatattatggactgaatggcttacacaacagacatttcttacaattgtagaagctggaaagtgcaagattaaggtactagc

SEQ ID NO: 316758 - DNA, 526 bp, Homo sapiens
gcactcttaggacccactgggcaaacactacatggaaagttctgcaggtaggtaaagatgattaataaaaacagtttccagacctaatcagcgtgatatataataaatgaattgggcattgagactggtaaagaaaaaaaattattatggcccttgattggtcctaccgtcaccacgctgtctaccataagatagagaatttttagtgttacacagaaaataacataatacaactctgaaattttgatcatttgtgtgatcagataagttgtgttttgcattatcrttcaaagagcaaaagccttcactagcactcttttttccacctacaacagaagttgtctcaacaatagcttagacatggattagaataataggtttgaaggtaccttaggcgcttctaatccactctttttcccagtgaaagaatcctttccatagtttttctgataagccactggcacccactaacaacccaagcctgaaaagcatccaaagaccggatatttacctatgaaacatgtta

SEQ ID NO: 316759 - DNA, 526 bp, Homo sapiens
gcactcttaggacccactgggcaaacactacatggaaagttctgcaggtaggtaaagatgattaataaaaacagtttccagacctaatcagcgtgatatataataaatgaattgggcattgagactggtaaagaaaaaaaattattatggcccttgattggtcctaccgtcaccacgctgtctaccataagatagagaatttttagtgttacacagaaaataacataatacaactctgaaattttgatcatttgtgtgatcagataagttgtgttttgcattatcgttcaaagagcaaaagccttcactagcactcttttttccacctacaacagaagttgtctcaacaatagcttagacatsgattagaataataggtttgaaggtaccttaggcgcttctaatccactctttttcccagtgaaagaatcctttccatagtttttctgataagccactggcacccactaacaacccaagcctgaaaagcatccaaagaccggatatttacctatgaaacatgtta

SEQ ID NO: 316760 - DNA, 487 bp, Homo sapiens
tgtgtttaaaaaaaatccccacaatctgtctgaaagcaaggacttccacatgttgcctgaatacaggactagagacagcgcctttcattgccttggaagtttattgccctttcatttccctgagtgcagaatcccatcattctcccgattatgagaggagagaagagaggctgcccaaggtttttgcatcctgcctcttgtcattctgtctcccctggcttttctagtatctttcctctttagagaaaggaattctagactctcagactcttaggagtgtgsaaaaccaaaggggagatttctccaatctgcagccactcttaacttgactcttcccctttggcctcccttccagagcctctgttgaacagcttctgtggggcggtgctcactccatccagaggcagcctggctccatgttttcacacttcagattattcaaaagttctgaaccacactctgtcttgtgggaacttcctcctatggg

SEQ ID NO: 316761 - DNA, 560 bp, Homo sapiens
gtagatcttgaagaggaaagattgttcctaatatccagaaaaatctcttctccccatccagccctctcacccagataaaaagtcggtttggctgagtttctgctatgatctagaatacaaatcaagaaaccacggctaaagagccagaccagagtcacattcttcccaacagatcttcacaagctgggcgcaggagcctcttcatcagctgcttcctccagttgcgtttctcgggcccttgggcagtccyaatgagaacagaggaaattattgaaaaattgcctattaagtatataatgaaaggtcaacaaactaaaaaattgaatataatgaacagaatactgagaataaaatacccacactctgagtaaatgcagatctgctcaagttagcaattgattgcttttattggttctattgtaaggttggcttaagtaataagtggctattacactgagaatgttggttccttaagttctgtcaggaggcccatgacagggttgaaagaaataaaactacattttcaaatgaaaaactagttttgttagaggatagcaaag

SEQ ID NO: 316762 - DNA, 538 bp, Homo sapiens
gagactttttaaaaaacagagcaagtcagttatatacctataattataataggaacaaataacaaatgagtagattagcataaatgtatatggggtagaaataaggatttttccatacagaataaacctctaatcttaagatgagatcagcaggccttcaaggtgatcaactgcaatgcaccaggaataaaaacaataaattatctcagcatatacactgcttcagtgttccacacacacaagaggaagcgtaacaggaagatcacagtgatcttaacctgggcaacagagatagatgaagtactgaaggtaaggggtaaccattataccattttacagrtttactaacatgacactaggaaaggcacgggtcatcttcattttgaaaaaaccaacagtgttctttttgaattacagaccattgttctgatctcttgaaaaagagactctgtgtggtactctaagaattacagtcctcccgctccgtgatcaaggtgtgctcattccaagttgtgagagtcttctgtgctgaaagacg

SEQ ID NO: 316763 - DNA, 653 bp, Homo sapiens
aaaaacatttttactatacttgactgacataaataattattctttcataaaaacatgtgaaacaatcaattctggcaagtaacattttataaagcactctgctttaatattatatcccattggagttttacaaggtttcctcaggtcatgaaaataaataagtttcaaggaagttttgatgacaaattctatcaaaaatgccctctaagtgtcttcaaatacaagttgatatttgctactaagggtggaggtcaatttcaaatgtcctcattgtaagaaaagaggggagagtgtgtggtgtttgagcccagttattaagcctgggcctgggcaacccgagcctcctttatagtgatttgcttgttcagstcattcttctacttttagggtcagaaagaaggaagtacctcataaaactggtcatcaacaatgaatcatccctcggtttaaatctcctgattagcaacagtgccagtgtgagtgcaggtacttcagagataggaagggcagctctgccaattaaaagtgctgatagtttagaaaaattgggtgaaattgtggagtccatgagctgtgtgctaaaaggtcacaacaacttccacctatactttcctgtacccggaagacggcagctgtcatatttaagacatttt

SEQ ID NO: 316764 - DNA, 536 bp, Homo sapiens
gctttcctttcctcatttcttgctctgcaaaatatactgataattgcgcggtactcatcatctcctgcttcgctcactcagtcctgcctttcaactcaattccccatctstgtctgtgctgccagggctgtggtggcaaggaggctgctcctagccagagccccaggattagccctatatgcaacctacactggaccatggcattcgctatgctttttttttttttcctgtccctcatcccatgccaagcttcctgcttcaaaaataaaaaatgcagatttatcttacagggtataagcttttctccacaatatcagcagatcttacactctatctttggacatacaagagacccattcttatcacatttgtccctttgccttcttccaaagaatagagaagctaagaaattctgtttcctgctactgtggactaaggaaacaggctccgggctggagtgagtggaaccccagagaaagggcaatcactgatctcctggaatcaaagggaagggcatgtgaacaggcagccagcct

SEQ ID NO: 316765 - DNA, 536 bp, Homo sapiens
gctttcctttcctcatttcttgctctgcaaaatatactgataattgcgcggtactcatcatctcctgcttcgctcactcagtcctgcctttcaactcaattccccatctgtgtctgtgctgccagggctgtggtggcaaggaggctgctcctagccagagccccaggattagccctatatgcaacctacactggaccatggcattcgctrtgctttttttttttttcctgtccctcatcccatgccaagcttcctgcttcaaaaataaaaaatgcagatttatcttacagggtataagcttttctccacaatatcagcagatcttacactctatctttggacatacaagagacccattcttatcacatttgtccctttgccttcttccaaagaatagagaagctaagaaattctgtttcctgctactgtggactaaggaaacaggctccgggctggagtgagtggaaccccagagaaagggcaatcactgatctcctggaatcaaagggaagggcatgtgaacaggcagccagcct

SEQ ID NO: 316766 - DNA, 587 bp, Homo sapiens
ctggttccctctctgtatcccaggaacatcttgtagatatctctagcaccatttgataaaygttactttgggtcataagacaggtaatgtggaattcactcatctaacatacccttagaatcgaaattataaagaatttgaagataacgactatgccttattcattgttgtatagtcacagatgcttacaaaaacatagcagggaagtaatatttgaagtaattaatgtgacaaagggaaacatgtcctcaagttgacttgccttgggccacatgctagatttttaggattatacacatagacatataaaaagtggataaaaataattcttgctcatcagtgaacataaattggatttgtcgtgttatgttccaagatctgtgtgcaacttagaaggtatttttatatctgtaaaaataattcagtcgtggaggttaacagctaacaaattgtgttcattaatccttttctattaaatttaccagtaatactaaaaatggaaaaaaaatctcatctcaaatgtcagctctggtctcaaatgtcagccatagttagtgagaagtattatggagatgtaaatgcatgtg

SEQ ID NO: 316767 - DNA, 587 bp, Homo sapiens
ctggttccctctctgtatcccaggaacatcttgtagatatctctagcaccatttgataaacgttactttgggtcataagacaggtaatgtggaattcactcatctaacatacccttagaatcgaaattataaagaatttgaagataacgactatgccttattcattgttgtatagtcacagatgcttacaaaaacatagcagggaagtaatatttgaagtaattaatgtgacaaagggaaacatgtcctcaagttgacttgccttgggccacatgctagatttttaggattatacacatagacatataaaaagtggataaaaataattcttgctcatcagtgaacataaattggatttgtcgtgttaygttccaagatctgtgtgcaacttagaaggtatttttatatctgtaaaaataattcagtcgtggaggttaacagctaacaaattgtgttcattaatccttttctattaaatttaccagtaatactaaaaatggaaaaaaaatctcatctcaaatgtcagctctggtctcaaatgtcagccatagttagtgagaagtattatggagatgtaaatgcatgtg

SEQ ID NO: 316768 - DNA, 497 bp, Homo sapiens
cagcatggtaaatcaggattgccttcaactcagagtcaccagcagcattagtacctaacaagacagttcatgtgtcctttgaaactttgaagccaggcattaacttctccactctagctatggaattcctagatgacatatttttccaatagaagcctgtttcatctacattgaaaatctattgtttattgtagccaccttcaacgatcttagctagatcacatgtggacaccttgctgtcgccacatcagcacttcctgcttcaccttgcttttatgttataaagatggtttctttccttaaatctaatgaacyaacctctgctggcttcaagcttttcttctgcagcttcctcacctctctcagccttcaaagaactgaagagagttaggaccttgtatggattaggctttggcttgaggaaatgttgcagcttgttttatcttctatccagactactcaaactttctccataaccgcattaaggctgttttgtt

SEQ ID NO: 316769 - DNA, 625 bp, Homo sapiens
ttatgttataaagatggtttctttccttaaatctaatgaaccaacctctgctggcttcaagcttttcttctgcagcttcctcacctctctcagccttcaaagaactgaagagagttaggaccttgtatggattaggctttggcttgaggaaatgttgcagcttgttttatcttctatccagactactcaaactttctccataaccgcattaaggctgttttgtttcctattattcatgtgttcactggagtagcacttttaatttccttcaacttttcctttgcattcacaacttggataaatgtttggtataagaagcctagctttcagcttatcccagcttttgaaatgccttcctcattaagcttaatcatgtctagyttttgattgaaagtgagagatacgcaatccttcttgtcacgtgaacacttggaagccattgtaggtcattagttggcctcatttaagtatcactgcgtttcagggaataggaaagccagataaaagtgagagagatgggggaacagctagttggtgaagcagtcaacacacacaacatttatcatttaagtttgccttctcttatgggcttgattcatggaaccccaagataaatagaattgta

SEQ ID NO: 316770 - DNA, 452 bp, Homo sapiens
gcatattggagccacctgggaagtgttaaaaggaatcctgtgcaaagccccatccgtaaacaatgaagctgaggtctccgggggtgaagccatggcacagggattttttaaaagctccccagatgattttaatgtgctatctagtctgagaaccatcaattagctttatttcaggagtttctcattcaataacatggtgaacatctacatgtaaagaaacttttggaggcactgagaatatgtagatgagtaaaaatagtaagcattcatgagaagcttaaaaygtggtaaggcagaaaactggttgcaaggagtaaggtaatatgcaagctgtaataaatgtgaacaccagatgtaaagacctatcaaagaaaaatatatgcaacagattgaaaatgatgacatgagtgtctaataatgttccatcactgacacctaaaattacagttcta

SEQ ID NO: 316771 - DNA, 602 bp, Homo sapiens
aacttgggtttgccaagaactttttagatacaactccaaaggcacaatccacggaagaaaacattgattgtgctggccttcattaaacttaaaagcttctctgctgaggacacaaagtacaagccacagactgggagtatccaagagatacaaagaacacttaaaactctacaataagaaaatgaacaacccgatttagaaaatgggcaaaagatctgaacggcaccacattaaagaagatatacagatggcaaatgagcaaatgaaaagatgcgccacatcatctgtcattagggaaacagaaatccaaacaacaatgaaataccactacatacatactagaaaagccaaaattgatcctttctattctttttagattttggccattctaatagatacayagtggtatctcattgtattttgatttgtatttaccagtatttgttgttgcaaaaacaaatgctgacaaggatgtggagaaaaggaactctcattcattgctggtggaattacaaaatggtatgtcactttggaagacagtttttcagttccttacagaactaaacatattctttccatatgatccatcaatcatgctccca

SEQ ID NO: 316772 - DNA, 534 bp, Homo sapiens
ccctgcactgctgttactggtgcacatctctcatctttcctcctagactgtaaacccgaggggcaggtttatggtctgagtcttccgtcgtttgccattcataagccccaatagcatctggcgaggcatacttcaaaaaggaggtattcatagagatgtattgcatgagggcaggaaagagacaactgtatcccaggacagaagcatgggagcagcttgtcatatcactgaggaaactgaggttcagcctggtgaagggacttgccaaagttcaccccacataggtaaattcctgatgatttcagcccctataaccaggtaactttctgcatcaactccatttttaaatgcattgtttttccttaaaatcactacataaatgtccctgtcctccaaacttcaatgaacagaagttactcttttcttatatttacaaatattgactctctctctmtatatatacagtaaatatatgaaaattatatatatatatgtatatatataattcgttctgctgtaatggtgatgcactga

SEQ ID NO: 316773 - DNA, 488 bp, Homo sapiens
taaagtttgttttcatattcatgtaaaaacataaaattaaaagactttaatttaaaatgattatcacttaacatttcacatttactcatgatgtagaatgcttaaatgaaaagaatgtaaaatgtataacttaatatataaaattataatcacccaaataacattataatgatctaaatactatctaaatcatcttttttttttagagtaaaaataaagcaaattctgtgatgcctatatttggctctttgatcaaactaaargattttctcctgctttcaaaaggagttttgtttagagtgagacacaatccacctgatagaatactatgaagtctagaaacattatttttcattactaccagtttctggcccaaaggagtttgagactcatcgttcctatcctcacaacaagaaaataaaaaaaggtgacaaactaaaaaccaacaaattttcttagatctagcagagaattaaggtcacaagaca

SEQ ID NO: 316774 - DNA, 471 bp, Homo sapiens
taaatatttgcttctgctggaaagcaggaagtcatctaagaccagggatgaagatgtgacattggagaaatcataatgtaaattagtgggtaagcatttttttgctttataaatattgatttgcttccaacttttcagtacagcctgatgcccccatcaaatgatgtgaatgctggaagacctgaactttagcttcaggtttttcaataactcacactgtgaccatgaccaaattctttcaattgsctgtgctttaactggactcttctaagggcaaatgagataataactatgacctagcttttagccagctttttaagtgcttaaaataactaaggtgatgctaatacattttagcaatgtagcaatattattactataatgcttcaaatgaaaatgtagagtttttatcatttcagattaaacttttagaatcaaacacgttggcttatatttaattatttcatggtt

SEQ ID NO: 316775 - DNA, 553 bp, Homo sapiens
aaaggtaatgccaaggacactaaggagggagtggccatagtttcctgaggactcttgcaagtgtgtggggagatgggcagaagaaaacggatggcgagggtcttccctggggccccaggtggacagtggtgcccttctctaagacagcaaatgtcagctaccactaggaggtctaagaggaatgacaagcactaggaggtctaagaggaatgacaaggctgggaggtgctgagctgmggccctgaggggcttctaaggggagttgccagtaggcagctcagaatggagaagattatttgcatgaaatataactttaatcactagaaacagcaataagcaaattaataaattatacatgctgccagaacttcagaccaaaagaaaataacaaacactctttactgcttcccaccttaatttgtggctttcttagggcaaaatacagagttagagaacagtcagctataaaatactttcttcacaacataaaacaaatgagtctcacttcatgattgaggcaagccacaccgacagtgtcacagaacattataag

SEQ ID NO: 316776 - DNA, 605 bp, Homo sapiens
  misc_feature (1)...(605): n = A,T,C or G
ctgttgcaactactcaactctgccatcgtagcacaaaagcggcaatatacaatacctgaacaagtrggcgtggctgtgttccaataaaagttttttttatatataaacacatacgccagatttgttcagggggcggacttggcccatgggctgcagtttgccagtccctgttctaactaagcaaatatttgccttctctgcccaatgtccctcttacgagaactttcagctaccttgacacatgggtgcattattgcctttcccccttcccaccttgagatactcctagattctaggctctgcttccttgtgaaggctacagtatttacttaataataatgacagaagagtagtaacaatgacagaataataataatagaagttaagacttattgagcatttatgatgtgccaggtatcacgctagattcttcataaacactgtcttactgaatcccanaaacaatctaatgagataggtacaatgatcatttccattttacagatgaaaaaatgagcctgggaggggtaatactgtcttcttacggtcacacagaataaaactgagttctaactcaaatctgtctggatccagggccaaagttc

SEQ ID NO: 316777 - DNA, 631 bp, Homo sapiens
ttgggcagtatggccattttaacattactgattcttgctatccgtggaatgcttttccgtttgtttatgtaatttctgatttctttggkcagtgttttgtaattttcctcacagagatctttcatcttcttgtttggttgtattcctgggtattttattctttttgtagttattatgaatgggattgtgttcttgatttgtctctcaacttgaatgctattggtgtataggaatgctactggtttttatagagtgattttgttttctgaaactttgctgaggttgtttattaaatcattgaacttttgtgcagagactatggagttttctaagtataaaatcatgtcacctgcaaacagggatagtttgaattcctctcttcctattcggattcattttatttctttctcttacatgatcgctctagctaagacttccagtactgtgttgaataggagtggtaagagaggacatctttgttttgtgccagttttctaagggaatgcttccagctttagccttttcagcatgatgttggctgtgggtttgtcatagattgctcttattattttaaagtatgttccttcaatgtctagtttgttgaggggttttaacatgatggcctgttgag

SEQ ID NO: 316778 - DNA, 631 bp, Homo sapiens
ttgggcagtatggccattttaacattactgattcttgctatccgtggaatgcttttccgtttgtttatgtaatttctgatttctttggtcagtgttttgtaattttcctcacagagatctttcatcttcttgtttggttgtattcctrggtattttattctttttgtagttattatgaatgggattgtgttcttgatttgtctctcaacttgaatgctattggtgtataggaatgctactggtttttatagagtgattttgttttctgaaactttgctgaggttgtttattaaatcattgaacttttgtgcagagactatggagttttctaagtataaaatcatgtcacctgcaaacagggatagtttgaattcctctcttcctattcggattcattttatttctttctcttacatgatcgctctagctaagacttccagtactgtgttgaataggagtggtaagagaggacatctttgttttgtgccagttttctaagggaatgcttccagctttagccttttcagcatgatgttggctgtgggtttgtcatagattgctcttattattttaaagtatgttccttcaatgtctagtttgttgaggggttttaacatgatggcctgttgag

SEQ ID NO: 316779 - DNA, 574 bp, Homo sapiens
cagtgctgtgttacacaaagaaaggagttttgtttctttttcactgtaagagttctcagagcatttagtatatgtatatgcattagaaatcctcaagagggaaaargagtatttatttggccatgctttctgggaaacatacttgacatatgacaatactgaagttttggagatagaaagaaattgaacttttctgcacagtttggattcaaaataatgtttctgtgttcaatgaaatcttttcctttttgacataggtttgtaatgctgtgttagggggcaaattggggatggaaaggaaaagagagagcaaaggtgagttaggtatttaggtggtagtgttcccaagcagaaaagcaaacattgtgataatatataataaattggagattccaggtaatgtttggaatggaaaagggtcatttggttaaaaaagtggccaactattgtcctttcttttcccattattttatctctcagggcacttaaatatgtattaactaggtatcatttgttaaggaacattttctaaaaatgacttaacaataatttgctctttttgaaagcagacaaa

SEQ ID NO: 316780 - DNA, 552 bp, Homo sapiens
gtgcaagtaccatactcagtaacctaagtctttctgactagtactagctagatgcataagtaatttatttttacatatactaaataaaaactaccttattggcctgtgcagtggctcatgcctgttatcccagcaattgggaggccaaggtgggaggattgctttaggcaaggaattcaagaccagcctgggcaacatagtgagactcccgtctctgcaaaagtaaaaaaaaataagaattagccagatgtggtggcatgtgccttcaggcccaaatacttaagaggctgaggcagcaggatcacttgagcccaggagtttgaggctgcaatgagctatgatcacgaggctatactccagcctgggaaacatagtgagaccctgtctcaaaacaaagctaccttctccattcatctacagagaatgcagtaagatatgaaagaattgctctgatctcttgaggaatctggtctcctagattttaacttcaytgaccttgggtaacatcagtacaacactgagtcattaagaaatctaatctgaaagctgtgg

SEQ ID NO: 316781 - DNA, 586 bp, Homo sapiens
tgtattgtctcctattccacttaagcttcttatggtacttccaaatcactgtaactaggaatgttttcagaatggggctgaataacgtaatagggaaagagtacattaaatgagagttacagaaacattcttttaagttggaccatcattttagggtgctttgctggtttgatttattaattagatttgggttgggatcctcttgaaacattcatgattagtgactgtgaagtggttgatttcaacagatgcaactaggagggctaagcacctcaggcttacctttgccaagtccaccaaagtgtttgcttggtcattcagtttcctctgytccatttttacacttcttaatctaaaagatagaatctggtatcagaaaggttcccttcttcctatggcaatcttatgccttccaaagagcatgcacaaaattgacaagagcaaataactgcatggataatgccttgaacatttggggtaagtccaaactggttatgtgtctggtacaatgagaagcatgcttccccaacaccgcaaaaaagaaaggagagagtgagagcaagagatgagatgtccttaggacaac

SEQ ID NO: 316782 - DNA, 547 bp, Homo sapiens
ttgcatgaataaacgtactcagttacacttttagaagtataaatgtcccccactgtaatggaaacccggtaacccctagatgaatttataaagcaattcagagcatttctgagttgcctgaagcttatctactttagaagtacacattgctacagaagaaacagaataagaaatrtctgacagaagcagaaaaatcacaagtagcttcctctgtcactctatccaaacacaatatgctaagagaccccgtgcaagcgactccacagtacccacccttaagaaagggccgacatgccttgtagggtgcatttgcaacttgcttagggacagtttttaaacttccccaaatactttttttctaatgttttaatgtaaaaacgtaataacctaacggcaaagttgaaagcattttacggtaaaaacccctaaattctcccccaggcttttgaatgtgaatgtattctgaacataatagtccagaagagtcttatattacaagatgtaatacaaatccccactgcacatggctacagaaccgtactataaa

SEQ ID NO: 316783 - DNA, 627 bp, Homo sapiens
aaggttaatcttgtcctttgcaagcctgcttggtatttctggctgtgcactactggaagggcatgtttccagtgctgaatgtataagtacatccagcactgatagcctcccagaatgacttagcaatttgtatgcttgttagtatactttaattaactgacggagtctacgttatgattttgttggaaatttaagtacactgtatttcaaatggatgggacaaatgagaagggtgaaagcactgcagtaacactgccaagacctacagcagctgatgaaaggcayggatacttaatctagtcacttgctttcttgatgaaagtcttcaacaaatcctgggagctgataaagggccagcaagggcagattctgtcttcttccttgctcacactatgggatctgatgacccacagctttcacttgggcttttggattacttactataagaagttgttccatttaattcttttaagtgatggaaaaaggatatttcacaaagagagccacaggttactggggtgctaggtggaggaagataactttttaagaaaggcagtgtagtgcggaagacaaaacaatgagctgagattgataaccgggttctacgtacttgactttgcactaacc

SEQ ID NO: 316784 - DNA, 576 bp, Homo sapiens
ctttttacagtaaagcttcttttaggagtgactctggtttgtaatgcactgcctttggatatctattagactctgtgcatggagagaatcctcaaaccaacagaaaaatgattgacacagaagccaagtgccagcactgcgtataagtaacactaccaccatccacagtgaagttaaaaggagttcgagtaaattcttagatccatcttcatacttccacttcctcagacagccgggagagccacctttcagaagcttttttcatctgatcctcakgtcctttcaaaggtaaggaaatgagtgcagcatgagtagttgttatttgaggaccttgcttttaaggagagaggagtgggaagtgactggccagcagtccctggggttggaatagcctttccctgtgaggaaagagagagtctcagatctctaagcaactgtagatacctggaagattggcaaggggccctgatggaggctctctctctgattttaccagtcgaaggcatagaggagaagcctagatccctgcctggtgaggaagctggaaaaccagttaaaaaccctaggtaaaaacca

SEQ ID NO: 316785 - DNA, 576 bp, Homo sapiens
ctttttacagtaaagcttcttttaggagtgactctggtttgtaatgcactgcctttggatatctattagactctgtgcatggagagaatcctcaaaccaacagaaaaatgattgacacagaagccaagtgccagcactgcgtataagtaacactaccaccatccacagtgaagttaaaaggagttcgagtaaattcttagatccatcttcatacttccacttcctcagacagccgggagagccacctttcagaagcttttttcatctgatcctcatgtcytttcaaaggtaaggaaatgagtgcagcatgagtagttgttatttgaggaccttgcttttaaggagagaggagtgggaagtgactggccagcagtccctggggttggaatagcctttccctgtgaggaaagagagagtctcagatctctaagcaactgtagatacctggaagattggcaaggggccctgatggaggctctctctctgattttaccagtcgaaggcatagaggagaagcctagatccctgcctggtgaggaagctggaaaaccagttaaaaaccctaggtaaaaacca

SEQ ID NO: 316786 - DNA, 617 bp, Homo sapiens
gagaagcctagatccctgcctggtgaggaagctggaaaaccagttaaaaaccctaggtaaaaaccaatgggtcagaaacacagcaatggaacatagcaatcctcaatgtagaacatagcacttgatttcaatttgtattcccatctacaaacagcaaatgccaaattatttctaaagtcaatacgcttttaaaaaggtgaccgatgcattttaaatgattccttctcttgggtatatgaagaaagtggttgaaggggaatacagaatcttaatctcagagttcagtggagtgggggtaatgccctcgaggcyttatgttacaggctttctattcactaagcactcattttagctgatgggcttaaatgaaaatgattcctcatctgaaaatgaaatccctgcagctgcttttaaaaacttctaaatacaggaatttattttgaaacatcccatcccctttctaattccctaataggttgtcaaatacaggaacaaacctcctaaggcatcatatttaactgctacttttcaacatggcagccacaaaacaatatgtcccagaataaaaatcccactctctgcctattactgagatgtgtttctaatagtagggtctt

SEQ ID NO: 316787 - DNA, 324 bp, Homo sapiens
acattaagtgccacatagcgatcagaacaatgtgtattctgttgctatcaggtccactcgatccaaagctgagttcaggttctgaatatctctgttacaattttctgtctcaattatctaatactgacagtgaggtattaaagtctcctattattgtgtggaagtcaatgtctctttgtaggtccctaagtacttgctttatgaatctgggtgttcctgtattgggtrcatatatatttagaatagttaactcttttgttgaattgaaccctttaccattatgtaatgctcttcatctttttttaatctttgttggtttgaagt

SEQ ID NO: 316788 - DNA, 579 bp, Homo sapiens
cctgcctggcttattattattattattattattattattattatttacagagtacttgctatgtgctccatttaccaagcactttatatatatatatatatatgttatttgtcataaacatattattatcacccttcctttacaaaggataaattatggctgcagagcagagtaaagatttggaccctgagctttacagctatcaagttcattctcctaaacttygtgtagtctgaggctaaaaaataaataatactaaataaggtcaaatgtcatctgcttaagcttaattgacaactctgtcttcccagatataaaaatacactgtcagcactttttaaataattaatcctcgggtcatctaagccatgagtgggagagaattgcaaaattaaccagaagggagggctagtaactacaagacagatcatatttccaattcttgacagaaaacattgagttattttataagcaattccctgtatagaggtgatgcttgaatgaagaggagcaaagagtgcagtctactacttcaattatctgactaagggaggacaattcaatacataagacctaagt

SEQ ID NO: 316789 - DNA, 565 bp, Homo sapiens
gagaagaatggttgtgacgtagaacaaaacgtttcgactgccttcaaaagtttataacatattaggaacataaggatataaacagctatgttgtagaactgaatgatataaattccataagataagtaataaacacaattccagggaagtckcagatgaaataaaccagatctaaatagaacacatttaagttggtatcatgaagaatttgaacttgttaataatctttctgtattagagactgtggaagagaagaatgtctggagtggagtgtcatgaagtggtaatgtacaaggagtgttttgggaacatgaggatgcttaaggtacatggtagagattctagactttgtttttattaaataaaacttaaaagctattaaatatttttggcaaattaataatctaagtagagacatgctttataaagacaaaacctatagggaatagaaagcaggaagacaaaaaattctacagacttcatgaaggcagtgatttttagctgtttgttttaccagtgtaggtgctcaataaactttttattgcttgagtgaatcaatttcctg

SEQ ID NO: 316790 - DNA, 546 bp, Homo sapiens
tcatttgccattttaagaggcaatgtccccctttaccagccacccaattaagcaaccattcattaaatatcagatttcaggttcaccctgccacttttgaagtactttgaaaattatagtgatgtattttgtgctctcaacagcttacagttagtggtgggttaaaaatcactatcgaggtaaaaataaccataaataagaaagagactcaagcaaagtttgggatagtgataaaatttatcttggagctcttagggttttgtaaaggaagttccattttaagtgtgtcttgaaagatgaatactaaayctggctgcattttaatggatgaattagaggatcaagaaatgaaaaactcatgctgagatagaagtgctggtgtggcatccatatgaacatgttgatgtaactggtaactgaaaattaagaaataggccacatctagtgaagaaaaattggaagttggcaaattaaaaccaaaggagtaacagagtaacagagatttccgggtaaaaagtgtattgattgaacttaaagatgcagaga

SEQ ID NO: 316791 - DNA, 544 bp, Homo sapiens
tctggatctgaatagtgttgaaagatttaatagtttccaatgttgagaagtttcaacatactggttgaaatcaatgaacaagttatccatttgatagtggggggaagatgtagcacatcaagtttcttggatttttttaggaatcagtactatacaggcagttagatgacatatataattctgcaccattttattttggtcyacaattatatcactactgtattatattttgctgttttaacaaatgagctctgatgaatttgccagtatttaacttttcctgggtctctcattttcattctacttatcctagcttctccactcccccactaacttctataatttttcctttattggaaagttctcagagccttgggctcttcagtagaaagtatagtatgaagctggaagataaataatacatcagatcacttctactcaatctgggcaagtgacatttacaattttaacaaactggaggcatgatggcaaataagagaatatttggaacagagtaaacttcagttacaatacagactaaaat

SEQ ID NO: 316792 - DNA, 546 bp, Homo sapiens
acctatttctatggtctctgactattgtctctttttccaaatcatttcctgttgttttcactaytaatgtaatcaactctcaaagcagctccctctgctgctcttatttttaccatctacttatctgaacaaataatattttctccaaaaaacttgtacatgttctagttatctttccaactaatgactcaaggttgtttgtatcttcttgtaaaaaccagtttttaaaggagatctccttttcctcttggtattagaatttgtatctgtcaccaaattaatctttctgatcccctatttcaatgaccaggtttaacagtcatttttccactttgaaattactttgattaatttttatcaatttttatttcaaagttagttttggactctctcataagttattgtctctcaataaaaaagattcttttctcattaaaactattcaactaggctgggaaacatggaaaaaccccatctttacaaaaaaaaaaaaccaaaaaccaaaaaacaaaacaaaacaaaacaaaaaaacaaaaattagccagg

SEQ ID NO: 316793 - DNA, 540 bp, Homo sapiens
ttgaggtagagcctgaagacattctgtcgggctaacaaaggtgttttagtggctttgtcagggtgtcagacactctagaataggtagagaataagactttgttaatcactttaacttaagagggaaaacagtaggaaaaagggagaaaattttaaaacagtagggaagtgctttttaaatcatgacagaggctaccttttttaasaataaatttcaggtagataagtacagttataagtcgacatattgctgcagacataatattaacttgtctcatattaagaaaatagacccaacaggattttcaaatgatttaaacaatcagttttgccatttgcttctccctgagtcatacctttgataattcacccttttccaaatgttccatgaaaaactgtttaatactggttttgtttagtactaattgtgtttaatactgatgccacacatatataactgatatctcaggtgtgaagggatgtgattgtgagtatgtctgaaaaagtttcttgttataaaaggtttgcaaagtgttaattt

SEQ ID NO: 316794 - DNA, 588 bp, Homo sapiens
catggaggtaaccaccctcaccattcaattacctcctaccaggtcccttccaacaacacatggggattaygggaactatagtttatgatgagatttgagtgaagacacagccaagtcatattaaccagatagaatttgtaactctgttcctgaaattaaggggcctctttatgactcttgaaaatgtaattcacatagctgctcacaaatgaggttaccatgaaggtaaaaatcactgtaaacttctggagaatatcgacaagtatacatgaggcttctgattttaaaaataaagaaaaaataaaaattgtattacatatgattgtattaataagcctagaaatagtaagaaaaaataaaaaattaaaggaaaaaaatttcaattatagatgagtgtattagtccattctcccattgctataaaataccagaaactaggtaatttgtaaaaaaaaaaaagttttattgttaaaaatgttaatcacagttctgtaggctgtacaggaggcaaggcataacagcttctgcttctggggaggcctcaggaaacttatagtcatggtggaaagtgaaggggaagtaggcatg

SEQ ID NO: 316795 - DNA, 602 bp, Homo sapiens
ctatgtgcctgtaaaatcaaaaagaagttagttacttgcaagatacaatggggtataggcattgcgtaaatactcccattccaaaagggagaaatcagccaaaaacaaaaaaaattggaaggatacaggccctatgcatttctgaaacccagcactgcagtcattaaayctcaaaacttcaaaataatctcctttgactccatgtctcacaatcagggcacactgaagcaagggctgagttcccaaggccttgggcagctctgtcccatgactttgtagggttcagtccctatggctgctctcatgggctaatgttgagtggttgctgcttttccaggtgtagggtacaagctgtcagtggatctaccattctggggccctcttctcacaactccactaagtaatgccccagtggggactctgtgtggcggctctgaccccacatttgccttccatactgccccaatagagttattcatgaaggttccacccctgtagtgggcttctgcctggatgcctggatatccaggcttttccattcatcctttgaaatctaagcagaggcttccaagcctcagctcttgtactctgtgcacccacag

SEQ ID NO: 316796 - DNA, 602 bp, Homo sapiens
ctatgtgcctgtaaaatcaaaaagaagttagttacttgcaagatacaatggggtataggcattgcgtaaatactcccattccaaaagggagaaatcagccaaaaacaaaaaaaattggaaggatacaggccctatgcatttctgaaacccagcactgcagtcattaaatctcaaaacttcaaaataatctcctttgactccatgtctcacaatcagggcacactgaagcaagggctgagttcccaaggccttgggcagctctgtcccatgactttgtagggttcagtccctatggctgctctcatgggctaatgttgagtggttgctgcttttccaggtgtagggtacaagctgtcagtggatctaccattctggggccctcttctcacaactccactaagtaatgccccagtggggactctgtgtggyggctctgaccccacatttgccttccatactgccccaatagagttattcatgaaggttccacccctgtagtgggcttctgcctggatgcctggatatccaggcttttccattcatcctttgaaatctaagcagaggcttccaagcctcagctcttgtactctgtgcacccacag

SEQ ID NO: 316797 - DNA, 657 bp, Homo sapiens
caatgtggaattattcagcaacttctcatgtagttgtaagaggatcagcttttatgattgctctcaattggtccttgtcaacttctgatggccagccactacactcctcatcttcaatgctctcatctcctttgcaaaacttcttgaaccaccactgcattgtacattcgttarcagttcctgggccaaatgccttgttgatgttgcgagttgtctctgctgctttatgacccgttttgaacttgaataagaaaatcactcggatttactttttgtctaacatcatttccatagtctaaaataaacataaaataaactgcaagtaataagtcattagcaaaaaaagtaaagagagaatgtctattaaaatgatttataacataaccacatttatttaagaatgtattccaatatcaaacagcaacttccaacaatgcaaaaaccacaattacttttgcactcacctaaaataactatgcatcctactagtcaagttagaaatttgcttttctacctttacatatgttgtttcttctactaggaatatctttgtcattttattcaattgacaaatttctatttattcttcaatttttcaaaaaatcattccaaaacttcccgggaaaaattgtgtgtttcttcttccatagttatata

SEQ ID NO: 316798 - DNA, 484 bp, Homo sapiens
gtgaatttccaaaatggctttacataatggataattatataatgaatgaatctacataatgatggcaagttaaactttcaccataagactgcacaccaataatttatatatgcagttaaaattgactcttttttctgagagttttctttataattttaactttcatttgtctgtttccaaagtcccctctacttctaaccagtaagtggtgagctatgctaatttttaaattcagagctgttaatacctgtgatttgaataaagaaagaaaatttctagtattttaagacacatataatgccagaacaatgggcctcttgatatgatgaatcactataaaaataaatccacaatacttcgaggaaggtgcttacccataaaaaaacaaaaagsaggaacccaccaaacatttcataaaagattttttttcttatggaattttattttctgagagagcaggggcatttaaaaaatgacatgccac

SEQ ID NO: 316799 - DNA, 516 bp, Homo sapiens
tcaatataaaatagttcttgcattcatctggcttctccagaaatatctacaaaaagagacatttgtttatgtcttgaaagtgaataaaggaaataattttaggtgtgactagctaagtagttcagttacagccacagggatgaatacagagtctgtgatagggtcctcatcttgtccagcctccatatgtgtataactcgacctggaacacatttgtctatttagacggctacaacatattccaaaaaatatcttkgtatcgcctttgccatccttctatctttatctgagctgggtgaattttccttaaggtatacatattttatgtatatgtttctcatataacttgatataattgtatttttaatctattttaatgtttattttcttccataatatataagctactggaaaacaactcttttattacatgttaaatcaacagcacctatgtcagtccctagtgcatagcaaatgacaaacattttctaaccaaatgaataatatataaatctg

SEQ ID NO: 316800 - DNA, 582 bp, Homo sapiens
tggtaaaatgttgcctattgcatctttctacttccaggatggtgccccactgcacccactatgctgctctcagtgagtttgaaaatggatgcaagttaataagtcatcatttcttgtagggttagttacattttaacattagtcccttgaaggcaaataaatattctgaggatctttaaaaaaaaaaaagcctttctacttagagtgcagattttaaatataggagagagaattttaaggagaggtctttctggtgttctgtaaatcagtgtttccaaaatctgtagactttggaactcactacatactattggtctagaatatcctaaatcaacctttctcccatcccagaatcamgaaaaactcatccggttatccctgatgattagctgggtgtgggaaactactgttttaaaccaccaaattctgttcaaattccacctgtttcaaaaagccttgtccaatatcagcatcccctcaattctgcctccataaggaagagttagttacaaatctgtgttcccaatacaccttgggaataagtctttgtaggattagtgactctgcattgtgattagaaat

SEQ ID NO: 316801 - DNA, 570 bp, Homo sapiens
ttataaatagtctgcactcaataaccttgtgcgtaaactattctacataattaacttaaaaataaaccaacacaaaattaatgtctactgatttaaacccagaagttttacctattgaacttgttttactcctgtaaaatgggaaaggaaaatgtggaaaatatttgccctctcttagttacttacctatccgcttctgtcttttaatttaaatttcttgagggcaagtaacatgcctttaaacttttgcatttcctttgggtcaagaattattcccttcatgatagtcagtaaaagttggaaggcttaaactgaatatgcaatagttctgaatattcagcaaagcaacacctgtttttgtctccacaagccaccgtgcatgtaaggatttcactggccctcttacacatggcatctgcttccaacaagtgatgcatttctggggagaggagycttgtcagagggattttctcttactaacatcctcttcccagatgtgtattccctgtagcatgtcctgaattatgaggccctggaaggcaattgcaatcactgagaatgacatgtcac

SEQ ID NO: 316802 - DNA, 566 bp, Homo sapiens
ttgattttcttgaggctgagttttggttgtcaaaaaaaattcaaagtatgggtaatttatcgtcacaacagattttagttactagctttaaaggtaatcgtgaaaacatrtctcttgcataaagaaacccaaagaagggaacaattaaaaagatttcagtaaaaatcttatttttctaatgattaccaaggggtgtaattgctatttatttatatttgtgctgtaatagtaacatagtataaattttataaagtaacccaaacttatttatggcataggtcagtcataccctctacaaaagtgaagaatttctgagaacaattttaaggcataggaaaagagcactactaaaatgaaattcaaacaccatatatgtgtttaatagcatctaataataatgactaacactaatgtcaggcacttttctaagtcctttaacatgtagtgacttacttagtctccatagcagccagataggacatgtactattattgtctcctgctctcagataaagacactgaggctgagataaattaaataacttactctaaataatgcagttagcc

SEQ ID NO: 316803 - DNA, 566 bp, Homo sapiens
ttgattttcttgaggctgagttttggttgtcaaaaaaaattcaaagtatgggtaatttatcgtcacaacagattttagttactagctttaaaggtaatcgtgaaaacatgtctcttgcataaagaaacccaaagaagggaacaattaaaaagatttcagtaaaaatyttatttttctaatgattaccaaggggtgtaattgctatttatttatatttgtgctgtaatagtaacatagtataaattttataaagtaacccaaacttatttatggcataggtcagtcataccctctacaaaagtgaagaatttctgagaacaattttaaggcataggaaaagagcactactaaaatgaaattcaaacaccatatatgtgtttaatagcatctaataataatgactaacactaatgtcaggcacttttctaagtcctttaacatgtagtgacttacttagtctccatagcagccagataggacatgtactattattgtctcctgctctcagataaagacactgaggctgagataaattaaataacttactctaaataatgcagttagcc

SEQ ID NO: 316804 - DNA, 566 bp, Homo sapiens
ttgattttcttgaggctgagttttggttgtcaaaaaaaattcaaagtatgggtaatttatcgtcacaacagattttagttactagctttaaaggtaatcgtgaaaacatgtctcttgcataaagaaacccaaagaagggaacaattaaaaagatttcagtaaaaatcttatttttctaatgattaccaaggggtgtaattgcyatttatttatatttgtgctgtaatagtaacatagtataaattttataaagtaacccaaacttatttatggcataggtcagtcataccctctacaaaagtgaagaatttctgagaacaattttaaggcataggaaaagagcactactaaaatgaaattcaaacaccatatatgtgtttaatagcatctaataataatgactaacactaatgtcaggcacttttctaagtcctttaacatgtagtgacttacttagtctccatagcagccagataggacatgtactattattgtctcctgctctcagataaagacactgaggctgagataaattaaataacttactctaaataatgcagttagcc

SEQ ID NO: 316805 - DNA, 544 bp, Homo sapiens
acccttggtttccctcttattctcacactccacatatattatcagaaaatctatttgcctctaactttagagcctcctaacttcatctgctattgtccatgtcccaggcaatcagttctcaacacagaagtcatagtaattctaataaaatcaatcagattgcattgcatttcgcccaaacactccaatagtttcttatctgttatgtactgcattctgttgttagcagaaataaggacattaaaggtgatactgatgagggttctgaaagaaaagwggaagacagtagtgcaagctattattgttttagagaacatatatatcgttaccataatgttagtagaaatatgaacactaaaggtgctctggtagggtctcagctgaaaatgaggaacatgttatcagagactgaaagaaaaactgttcatgctatgaagtggcaaatacttggctgaattgtgttctagtgatctgtggaaggtagagcttaaaaataataaacttagatatttagctgaaaagatttctaagctaagtgttgaag

SEQ ID NO: 316806 - DNA, 588 bp, Homo sapiens
acgacatccataggagcaaaacaaaaaatgttttgttttgctttacattttaacatgttactactagaagtatttgaaagtaccyatgtggctcacattatatttctattgtacaatagagcattatagaacaaagcatttagattaggtataggcaattgaaagctagatgtagaagccagtgggccttttatattttatacaaagaagtcagcatctgttctagtgaggggctaaagaaagctgaggcacaattctgaaactaggatgactcctagaaacacagaaaaagtgatgttggtgccagtaacagcttattatcttctcatggtgatagaattctgcccagcaacaagccccaccatatgcatagaactagtcagcttttcttttcttggaaaagacctagtaattagatgatgggaaaagagatgtccgacaacaaagactatcatcagtggcattgaaaaatgaatccagttatgcatcagctatgattgcatagaaagaaaagtagtaacataaaaataaatgccactatagaccaaatagaacagtaatcctctatttaatatccttagagaggtt

SEQ ID NO: 316807 - DNA, 588 bp, Homo sapiens
acgacatccataggagcaaaacaaaaaatgttttgttttgctttacattttaacatgttactactagaagtatttgaaagtacctatgtggctcacattatatttctattgtacaatagagcattatagaacaaagcatttagattaggtataggcaattgaaagctagatgtagaagccagtgggccttttatattttatacaaagaagtcagcatctgttctagtgaggggctaaagaaagctgaggcacaattctgaaactaggatgactcctagaaacacagaaaaagtgatgttggtgccagtaacagcttattatcttctcatggtgatagaattctgcccagcaacaagccccaccatatgcatagaactagtcagcttttctwttcttggaaaagacctagtaattagatgatgggaaaagagatgtccgacaacaaagactatcatcagtggcattgaaaaatgaatccagttatgcatcagctatgattgcatagaaagaaaagtagtaacataaaaataaatgccactatagaccaaatagaacagtaatcctctatttaatatccttagagaggtt

SEQ ID NO: 316808 - DNA, 511 bp, Homo sapiens
ttgttcagaatagggcaaaacctagttaattttgatgcattagccactgcaattttctcaaacactttttttattgaaaatatgggcagttcatttgtttcttttgctaaatatataaatacattgtgaaggagagataagatcataaaaaaaaaaactggagagtgaaaaaggcatgggactcaaaatcagaagacctggattcttawgaaaattctataatgtgagagccatataatcttacccattatattgagcctcacttttctcttttgcaaatggagaaaggaggtgacaacagaaagtacatactttttaacatctaagtataatttacatgcaccaatccagccttaagtgttcaaagcaatgaattttgacaactgtaaactattgtgtaatcatcatccaaaacaagttatagaatatttccattcactccagtgcccctttctagtcagtctctgttcctctccacacatagaagaagcaagaacttctgatttctgtt

SEQ ID NO: 316809 - DNA, 499 bp, Homo sapiens
ggatgtaaaatagtatttcattggggtttccaatttgcattttctagatggctaatgaggtagagcttcttttcatatgtaaatcacaaagaaattagatgtggtttaaatctccttcagaaaacagtctgagttctattctcctctgtttttaataggcattttacaactcatctgtgtagtttttaaaatctctgcatgctttggtcccacttctacacattttcattcagaagatttagcataagcctctttaaaatatgattctgattcacaaaggaaccactggattatgctccaggtatctgacaggttttcaatactactartatgtttattatagcataaaagggcaatataaaaataattaagaacatcaactttataataaacaagactagatattgaatccttgtctgcacttcctctctatggaattttgtgcaaggtgtggaatctctctaaatctcagcttcttaatctataaattgagaggaat

SEQ ID NO: 316810 - DNA, 429 bp, Homo sapiens
gataaagacaagaatgggcaacacagaatttttgcttttttgttttttctaaaattatgctccctccttggatcagaatttttatgtaactataccgcgagagagacaggtatgaaaaaacagcatgatatcttcaaggtttttttctttatcccaattgacccagataaaaaatacaaatcctatgtcaatgataaagatgtaaaaaagagaaggaaaaaaagaaaatggaaccaaatgaaacgtcaggtgaacagttaagtaaatacrtatttcatttcttatagattctgaaagaattcaataatttctttaaaacacatctaaaatctcagaatcaactgaagagcagcatttgcttttaaagccagagggatatttaaattacagaattatcccatataatactgtgaaataactgctatagta

SEQ ID NO: 316811 - DNA, 623 bp, Homo sapiens
tcaattttaacatacaatggaaaaaatatgaaagttacctttgtggcatctttgaaagtttttttgttttttgcctgggattcaaargtcatatttgcttttttgctagaaggtttgcactgaaggaagggctaccaaaatgtaggtcactttgtcaggtacaggacagtttgagaaacaggggaagctgattctatcaggctaatatacacaggtgagatgcaaatctcctgccaactgttcccattggtatcattagcccttccctccataaataaatgcctcgctgagaaagtgcttctaggcattgtgctgccacttccgagtgatattagcttgcaaaagaggaaagcctaatcaaagagaaagtgttccccaaacaggctatcactatagactgaggcattttctggtctggggaaagaagggcttgacttttttgtgcttctgtagagttgtatgtcagttctcatacacactcttctcttggtaagtaatcagaaagttatttttacatctctgcagtctagttgtcttgggttcatgttcgtggtatttcatagctagcaggaaccttagagatgaacctcttagagacaagaaacattttcaccatcaccttt

SEQ ID NO: 316812 - DNA, 537 bp, Homo sapiens
tttaaaattgatggcatctcgggatagttaaagattatactattccatttataaaatgactattaaccaacagggagcaattcagaacatgctatgtttccaagaggaggtagattgtagcatgtaaggctagaatactgaagacacagattagaaacataaaaaggaaataactcattttgtgaatatggaaaaataatctaagtataaaactaaagttaaatgtgtgttcatataaaccccctaattctcacttagagtttatataatttaattcaaaatattttattgattctacttgaatctacatacgcaataggattmcaaaaaaaaaaaaaaaaaaaagaacttgttaaattgagcaactgaattttccttaggagtaacttagtgaactacctataatactaaagaacaacaaaataataaagtaaatgaaaatgtgctctttcaaatcatttacatactcatctattcatttatttgtcattttttaatatcaagtattgtttaggttctattctttgagggctaaca

SEQ ID NO: 316813 - DNA, 584 bp, Homo sapiens
agtcttttctccatggtacttaattctatttggatattttttatgtaaacaaatatttcagacagtgacaagagccataaagaatattaagcagtgtaagggatgggactgacttagggttgtggactgggaagggggttttttaatatttggtcagagagaggcttgctgagaaaaggacgtatgaacagagaatgacatcatgagaaagagtgaatcattcaaagatctcaaaaagtgatgttccaggtgagggaagagaagaatagggagagagacaagaaacttagacaagatcagctggaatcttgtgaatcatggtttctagcattcgtttattctagctgaaaagggaaagcattaaggttttaagcaaagaagtaacatgctaagatttcaaatttttaaagatcatattagagagaaatattgtaagcattccaaggagctatgagcaagttgaaggcaaggataatatctagaawctatacttttgtatttccgttacccaacacaggcctagacatcatgatagttaataaatgtttgtataattactgatttcaaaacagttatgaaattgc

SEQ ID NO: 316814 - DNA, 528 bp, Homo sapiens
ggaggctagaagctcaagatcaaggtatcctcagggtttttttttttttttttttttgaggactctctccttgacttgtaggtggccatcttattcctttatcttctacttgctcctcttctgtgcttatatgtattttaatctcctcctataagaccaatcacattggattagtgcctatctttacgaccttattttaacttaatttcctctttaagagacctttctccaaatwtagtcacattctagcataccaaggtttagggcttcaaaacatcaattttggggagatataattccgcctataatatatatatatatacttatatatgataaatatgtgtattagtctgttctcacactgctgtaaagaactacttgagactgagtaatttatacagaaaagaggtttaattgactcacagttctgtgtgctgagggaggcctcaggaaacttactcacatggtagaaggtgaaggggaagcaaggcatgtcttacatggcagcaggagagtgcaagagcaagg

SEQ ID NO: 316815 - DNA, 662 bp, Homo sapiens
agcaatgtaagaacaagctgagaacttcgacaaggagatagaaagtataaggtagtaccaaagagaaatactagatatgaagaatgctatagctgcactgaaaattcaatagragcactcaacaacatactagtttaaggtggtagggaggatcagtgaatttgaagacaggtcattcaatctgaggagcaaaaaagaattaaagagtgaagatagcttaaaagcttatggggcataataaaggagaacaacatacataattggcatgccagaagtaatagaaagagagaaagggacagaaaatatattcaaagaagtaatggcagaaaacttccaaatttgagaaagaagttagataaccagatctaggaagcccacaggacaccaaataagatgactctgaagagtcccacaccaaaacacatgatagtcaaattgtcagaagttagagacaaagaaatggtattaaaagcagcaagggagaagtgaattgtcacatagaggagaatcactgtaatactatcaacagtttttagcagaaattgtgcaagtcagaaaatttctttcttttaaaatttcatacctttaatattttggtcatatttcaaaaatatgttcccaactttgaggtagtatcccactctttcagaaataaaaacata

SEQ ID NO: 316816 - DNA, 555 bp, Homo sapiens
ttgatttgcgtatgttgagccatccttaaactcctgggataaaccccatttgttcataatgaataatcttttcaatgtgttgttgaatttggtttgcaagtattttgttgatgaatttgcatcaatattggttaatattgacctatagttttctttttttgatatgtaattgtctgtttttggtatcaaggcaatactggcctcgaagaatgagttttgaagtattctttcctcctctatttttcacaatagtttgagtatgattggtaacaattcttctttgaatgttggaattcagcaatgaatccactggggtctgggctccttttgctggaargctttttattatggcttcattctttttacttgttattggtctgttcaggtttttttattggtctatcagattttgtcattgttcagtcttggtaggttgtatgtatagatacaacatggaatttatccgtgtattctagattttcatcctaattgacatatagttgcacatagtagccactaaagatcctttgaatttctatggtgtcagttgtaata

SEQ ID NO: 316817 - DNA, 555 bp, Homo sapiens
ttgatttgcgtatgttgagccatccttaaactcctgggataaaccccatttgttcataatgaataatcttttcaatgtgttgttgaatttggtttgcaagtattttgttgatgaatttgcatcaatattggttaatattgacctatagttttctttttttgatatgtaattgtctgtttttggtatcaaggcaatactggcctcgaagaatgagttttgaagtattctttcctcctctatttttcacaatagtttgagtatgattggtaacaattcttctttgaatgttggaattcagcaatgaatccactggggtctgggctccttttgctggaaggctttttattatggcttcattctttttacttgttattggtctgttcargtttttttattggtctatcagattttgtcattgttcagtcttggtaggttgtatgtatagatacaacatggaatttatccgtgtattctagattttcatcctaattgacatatagttgcacatagtagccactaaagatcctttgaatttctatggtgtcagttgtaata

SEQ ID NO: 316818 - DNA, 332 bp, Homo sapiens
actttaaatgtgtcatgccactctctcctggcttgtaagttttttgctggaaagtctgccagatgtactggcactccrttgtatgttatttgtttattttctgttgctgcttttaggattctttctttatccttgcctttttggagtttgactattaaatgtcttaaggtagtcttctttgggttatatctgactggtgtttcatatacttcttacacttgaatatagatatattatttgggttaaatcagatttatgttctataaccttcttatacttgaatattgaagtttgggaagtttgttgttattattgctttgaataaactgtct

SEQ ID NO: 316819 - DNA, 555 bp, Homo sapiens
attgccatccttgtggcctagagtacgtttcaagttgacttagaaccccagagcacttcagcccatgaggcaagkcttgccagaactcacgttccaaccactaggatggggaattcacctctggctggggcctgtctaaatgctttctctgtgagcaggcgtcagctgagttcatcttggttttgctttccactgtgacaaggcagcactgagtttaatgcaaagtctcacaaccacttgtgctgtccctccccaaagtgcaaattttctctttacaccatgtggctgcagtcagaggatgagagaaggggtggcatcagagattcaagactttcttttctacccttttcagtcctatctttttatgcctttataagtcaaataaaaaagataatttatgtttcaaaatacttaattgttttttaaaagtcaaaatataggctattttgagcccctctgatctgatgtccctttattcagcttgaagtgcccttaaaaattacataaagttaaaatttttcctctttaaagaaaaagatgaaaaaatataaattg

SEQ ID NO: 316820 - DNA, 442 bp, Homo sapiens
tttcatggctttgatattgtgaatagtgctgcaatgaacatacagtgcatatgtctttatgatagaacgatttatattcctttgggtatatatccagtaatgggattgctgggttgaatggtagttatgttttgatctctgaggaatggcacagtgctttccacaatagttgaactaatttacactcccacagtgtataaccattcctatttctccacaacctctgcaacatttgttatttgactttttaattatrgccattctgactagcccgaaatggtatctcattgtggttttgatttgcatttctctaatgatcagtgatattgagctattttttcatattcttattggccacatgtatgtcttcttttgagaagtgtctattcttctcctttgctcactctttaatggggttgtttttctcttgtaaatttaagtt

SEQ ID NO: 316821 - DNA, 525 bp, Homo sapiens
cagcacaccattgtgtcttaattctttatccagctcacgcaaattagggcaattagcccagttacattcaaggtttgtactgatatgtgtagattggtcctgtcatcatgatgttagctcgttattatgcagacttgttagtgtggttgctttatagtgtcactagtctgtgtacttcatgcatttttgtagtggctgatggtaactgacttttctttccatatttagtgcttcmttcaggaggtcttgtaaggaaggtctgttggtaatgaattccctcagcatttgattgtctgaaagggacatgtgaaccttcacatgtgaacctgagcttggctatatataaagttattgtttttttttttgatgttgagtattggcacccaatctcttctgtcttagggtttctactgagagttacccgttagtctgatgggcttcccattgagggtgacctgacttttctctctagctccctttaacattttttcttcactatggccttggagaatctgatgattatgt

SEQ ID NO: 316822 - DNA, 525 bp, Homo sapiens
cagcacaccattgtgtcttaattctttatccagctcacgcaaattagggcaattagcccagttacattcaaggtttgtactgatatgtgtagattggtcctgtcatcatgatgttagctcgttattatgcagacttgttagtgtggttgctttatagtgtcactagtctgtgtacttcatgcatttttgtagtggctgatggtaactgacttttctttccatatttagtgcttcattcaggaggtcttgtaaggaaggtctgttggtaatgaattccctcagcatttgattgtctgaaagggacatgtgaaccttcacatgtgaacctgagcttggctatatataaarttattgtttttttttttgatgttgagtattggcacccaatctcttctgtcttagggtttctactgagagttacccgttagtctgatgggcttcccattgagggtgacctgacttttctctctagctccctttaacattttttcttcactatggccttggagaatctgatgattatgt

SEQ ID NO: 316823 - DNA, 516 bp, Homo sapiens
tttgattcatttatatccaaaaatttatactgattaaataactcacatacgtgaagatttctatttttttaaacatgaaattgaatttactgactagattatgaactggcaactatattaattctgattcatgagtagttgctctaaattctttaccataattatattacactgtgattttaatgtcagcaagcaaaatttaaatgtctatgataaaatagttgtattaattttgtaaggttkctataaataattacttcaaatttagtggcttcaaacaacataaatgtgttatttcatagttcagtaagttaaaaatctacacagttactactgagttgaaatcaaggtgccagcagaggtgttttcctttctggaggccataggactaaatctgtttccttaccttttagaggccatccacatttttgacatacagtcccctttctccatcttcaaagccagtcacattgaggttctctgattctgcttctgtcttaacatctgtgtctgatc

SEQ ID NO: 316824 - DNA, 516 bp, Homo sapiens
tttgattcatttatatccaaaaatttatactgattaaataactcacatacgtgaagatttctatttttttaaacatgaaattgaatttactgactagattatgaactggcaactatattaattctgattcatgagtagttgctctaaattctttaccataattatattacactgtgattttaatgtcagcaagcaaaatttaaatgtctatgataaaatagttgtattaattttgtaaggtttctataaataattacttcaaatttagtggcttcaaacaacataaatgtgttatttcatagttcagtaagttaaaaatctacacagttactactgagttgaaatcaaggtgccagcagaggtgttttcctttctggaggccrtaggactaaatctgtttccttaccttttagaggccatccacatttttgacatacagtcccctttctccatcttcaaagccagtcacattgaggttctctgattctgcttctgtcttaacatctgtgtctgatc

SEQ ID NO: 316825 - DNA, 589 bp, Homo sapiens
ggtgcagcacaccatcatggcacatgtatacatatgtaacaaacctgcacattgagcacacgtaccctagaacttaaagtataataataaaaaaaagtaagaaaagaattgtgctgcataccaataatacaatttatctatctactttactattaatgaatatttatgttgtttctaaattttgctattacraatttgatactatgaatattcccatatttgccacttggtaaatatgtgtatataattctgctagtatacatgtcacagtaaaattgatgggtgatagagcacatgtatgttcctgtaagctagacaatgcctaacagtttatccaagctctacatatagtgtatgagtatttcacttgttccacatccttgccaacacttagtattgtctgttgctttcattgtagacattctggtggatatcatagtgggaagaaaatatttcttcagtcatcacaaggttcttggctgaggtacctataatgaaagatagataaacaagagaaaagcgtataaatttccttaacataagttttacatgacaggggaaccttcagaaatgaagactctaagaaacg

SEQ ID NO: 316826 - DNA, 556 bp, Homo sapiens
tgccaaaccagtgtgcccagatcaaaatcccttgaatacaacgaaaaactgttgtcatgacctttattcttgackggtccacttttgctttaactggaccactttctactcttggtagtcattgctttgattgtgctttttcttcaggatcatactggtaaagccatgtttcatctcctgttacaattcttccaagaaatgtttcaggaccttgattccacttgtttacaattttcattaaaagctcttctcttgtctgcagctgatctgagcacactggtttggcatgcatggaatagaatgtttgcttaactttaatttttcagtcagaattgtgtaagctgaaccagttgagatgtctatggtgttggctataatttttgctgttaattattagccctcttcatttagggcgtgaaaaagattattttttttctcacaaattgatgtgaatggtctgccatcatggatttcaccttcaacagcatcttgcctcttcttaaaatgatttatccattagtaaactgctgatttgtttggggcattgtctccttaa

SEQ ID NO: 316827 - DNA, 553 bp, Homo sapiens
ccagtttcagctttctacgtatggctagccagttttcccagcaccatttattgggagtggggagggatagcattaggagatatacctaatgtaaatgaggagttaatgggtgcagcacaccaacatggcacatgtaccatatataacaaacctgcatgttgtgcacatgtaccrtagaacttaaagtataataaaaaaagaaaaaggacaaagtgaacgaagtaggcatacataagaattaaaaatctgagtcaagaatttgaaaatatagaaacagaaaaaatgcataaatacaaaggctggctctttgaaaaaaatcagtgagacacttactatttacactagtcaaaaaagaggaacgaaagcaagcaatgagaaaaggagataataacatttgaaatacagaaactaaaaaaattccaaaagtctactttatgccattttatgcaaattaatctgaaaatctgaaggaagtggataataccagtcaacatggtgatgaaaggggacgatagattggaactcgtagaagaatacagtggtgcaagtgaga

SEQ ID NO: 316828 - DNA, 553 bp, Homo sapiens
ccagtttcagctttctacgtatggctagccagttttcccagcaccatttattgggagtggggagggatagcattaggagatatacctaatgtaaatgaggagttaatgggtgcagcacaccaacatggcacatgtaccatatataacaaacctgcatgttgtgcacatgtaccgtagaacttaaagtataataaaaaaagaaaaaggacaaagygaacgaagtaggcatacataagaattaaaaatctgagtcaagaatttgaaaatatagaaacagaaaaaatgcataaatacaaaggctggctctttgaaaaaaatcagtgagacacttactatttacactagtcaaaaaagaggaacgaaagcaagcaatgagaaaaggagataataacatttgaaatacagaaactaaaaaaattccaaaagtctactttatgccattttatgcaaattaatctgaaaatctgaaggaagtggataataccagtcaacatggtgatgaaaggggacgatagattggaactcgtagaagaatacagtggtgcaagtgaga

SEQ ID NO: 316829 - DNA, 553 bp, Homo sapiens
ccagtttcagctttctacgtatggctagccagttttcccagcaccatttattgggagtggggagggatagcattaggagatatacctaatgtaaatgaggagttaatgggtgcagcacaccaacatggcacatgtaccatatataacaaacctgcatgttgtgcacatgtaccgtagaacttaaagtataataaaaaaagaaaaaggacaaagtgaacgaagtaggcatacataagaattaaaaatctgagtcaagaatttgaaaayatagaaacagaaaaaatgcataaatacaaaggctggctctttgaaaaaaatcagtgagacacttactatttacactagtcaaaaaagaggaacgaaagcaagcaatgagaaaaggagataataacatttgaaatacagaaactaaaaaaattccaaaagtctactttatgccattttatgcaaattaatctgaaaatctgaaggaagtggataataccagtcaacatggtgatgaaaggggacgatagattggaactcgtagaagaatacagtggtgcaagtgaga

SEQ ID NO: 316830 - DNA, 553 bp, Homo sapiens
ccagtttcagctttctacgtatggctagccagttttcccagcaccatttattgggagtggggagggatagcattaggagatatacctaatgtaaatgaggagttaatgggtgcagcacaccaacatggcacatgtaccatatataacaaacctgcatgttgtgcacatgtaccgtagaacttaaagtataataaaaaaagaaaaaggacaaagtgaacgaagtaggcatacataagaattaaaaatctgagtcaagaatttgaaaatatagaaacagaaaaaatgcataaatacaaaggctggctctttgaaaaaaatcagtgagacacttactatttacactagtcaaaaaagaggaacgaaagcaagcaatgagaaaaggagataataacatttgaaatacagaaactaaaaaaattccaaaagtctactttatgccattttatgcaaattaatctgaaaatctgaaggaagtgrataataccagtcaacatggtgatgaaaggggacgatagattggaactcgtagaagaatacagtggtgcaagtgaga

SEQ ID NO: 316831 - DNA, 567 bp, Homo sapiens
  misc_feature (1)...(567): n = A,T,C or G
nnnnnnnnnnnnnnnnnnnnnnnnnnnnnnnnnngaattcagcactgctgtagctgcttacagattgtgtcagacctgacactaagaaggaccacttggataagtcttctaattgtggagaaaatgagaatagtaggcccctaaaagcccttgatacctaggacattaacagcttatgttgccactgcaactgccacaaacttcaacagcctaagccaatgaagcacctaaaatgattactgacagataaacacagctgaagaagctatacagagactrtaccactgcatctatccagaagagtcattgcacctttcccaaccaccacgtaaaacccaactgcaggtgaaagttgtttcatgcaaaagctactatagaaagcttggaagtggtgattgtttcaccagatacacagacagcaacacagagacacaagcaagatgaaagaacaaggaaatgtgacaacattaaaggaacataatagctctctagtaacagaccccaatgaaaaagaaatcaatgaagtgtcagaaaaataattcaaaataatgatcttgaggaaactaa

SEQ ID NO: 316832 - DNA, 524 bp, Homo sapiens
ggatgccatgttcaccatttctattcagcatagtattagaagtcctaaccagagaagttaggtaagacaaagaaataaaggacaatcaacttggaaagaaaggagtcaaattgtctctgttttcagatgacatgaccttatatacgaaaagtcctaaaaacttcagcaataaacacttagaattgataagccaatttagtgaaattttaggaaacaaaatcaatatataaaaatcagtagtgtttctatacatygatagaaaaccagaagaaaaagaaatcaagaaagtaatttcatttataatagctacaaaaagtacctagaaataaattaaataaagaagctgaaatatctgtaaaaggaaaactgtaaaacactgaaaaaataattttaagaggttacaggaaaatggaaaggtattccatttttacgaattttaaaattactattttaaaaatgactatactagcaaatgcaatctacagatataaatgcaagccctatcaaaatacaaatgacattct

SEQ ID NO: 316833 - DNA, 383 bp, Homo sapiens
aacaagcaaaaagaaaaagaataaaaatttgccttaactttatttccaagctttttaactttttgttgttttcacttatatcttattgtactgagtatatcttgaaaagttattgttattattatttctgatttttttagactktcccctagaataagggtagtttacacaccacagttacagttctatagtattctgtgtttttctgtgtcgtttctattaccagtaagttttgtaccttcatgtgattattactgctcattaatgtccttttctttctggttgatgtactcccattagtacttcttgtaggatgggcctggtattgatgaaatccatcaggttttttttttttttttttttttttttggtatggggaaggc

SEQ ID NO: 316834 - DNA, 446 bp, Homo sapiens
atttttactgtattattactttttaaaaaaataagaacataatccttaagtagtctggaacattgggcacatttttaacctacaattaagaacataattagttgattgggttcctggtcaacccaacgatgatctatagcttgaatgaatcaatctatagcttgaaagaattgtattagtagcccatgttctggttcctaacagcagagataaatgctgtgtggtcaggtaataaggaaagaaagcctmcttcctttttcctggatataggactgaacttgaacgtgtgatgaatataactcatttgtttagtgctgtatgtttttctgtaccttttctctgtttgcctcttttcagcaccctgtatgccctggtcatattctgtgaaactaaatttttgccctactatgctcctttaattcaatgtacaaatttatgtgctgtgc

SEQ ID NO: 316835 - DNA, 552 bp, Homo sapiens
ttatcaaattttttgtactttattattgtgtcttggaagaaatttttgcttatcataagattttcttttagatattttattgttttccttttttatgcttaggtctatgattcatttcaggttatttttgtgtatggtgtgatgtaatggcgtggcacgtaagctctgaaacraacctcaatgatccctaccttatgaggtccttatgaagtctcacctatgtgggctctacccagggactcacttttaattgatagaatatggttaacgtgatatgatgtcactttcaagattagcttaaacaaagatcttgacttttgttttactttctctctttcaacttccttccctttcgccctcactcctctctcctcactctgagggaagcaagctaccacattttagacccataaagagaccaacaaggcaaggaactgatgtctcctgccaatgccagttaagacccgaggcctgccaacacctacagagtgagcctgggagcagatcctttcctggtcaagctctgagataatgcagctttagtcaatgcgt

SEQ ID NO: 316836 - DNA, 569 bp, Homo sapiens
gggcaatcttggataaaatgggttgtatcctaaaagtttatttgcatgtactttaatttttttggaattttgtgccaaaaatgtcttgttactaaagagggcttagattgttgtttttaaaaataattctaataactaaatgataaaaaataactttttatttttcaaccaggcgyggtggctcacacctgtattcccagcactttgggaggctgaggcgggtggatcacttgaggtcaggagtttgagaccagcctgatcaatatagtgaaaacccatctctactaaatataaaaattcgctgggcgcggtggctcacgcctgtaatcccagcactttgggaggccaaggcaggcggatcacaaggtcaagcgttcaagaccagcctggccaacatggtgaaaccccgtctctactaaaaatacaaaaattagctgggcgtggtggtgcatacctgtcatcccagctacttggtaagctgaggcagaagaattgcttgaacccgggaggcggagtttgcagtgagctgagatcttgccgctctactccagcctgggtgacagaccgag

SEQ ID NO: 316837 - DNA, 569 bp, Homo sapiens
gggcaatcttggataaaatgggttgtatcctaaaagtttatttgcatgtactttaatttttttggaattttgtgccaaaaatgtcttgttactaaagagggcttagattgttgtttttaaaaataattctaataactaaatgataaaaaataactttttatttttcaaccaggcgtggtggctcacacctgtattcccagcactttgggaggctgaggcgggtggatcacttgaggtcaggagtttgagaccagcctgatcaatatagtgaaaacccatctctactaaatataaaaattcgctgggygcggtggctcacgcctgtaatcccagcactttgggaggccaaggcaggcggatcacaaggtcaagcgttcaagaccagcctggccaacatggtgaaaccccgtctctactaaaaatacaaaaattagctgggcgtggtggtgcatacctgtcatcccagctacttggtaagctgaggcagaagaattgcttgaacccgggaggcggagtttgcagtgagctgagatcttgccgctctactccagcctgggtgacagaccgag

SEQ ID NO: 316838 - DNA, 405 bp, Homo sapiens
ttttaaccataggacccaatgcactcccaaatatcccttcacagattccaccaaaacagtatttcccaactactgaatgaaaaggaagttttaaatctgtgagaagaatgcttamattacaaggcagtttctcagatagcttccttctcatttttaccctgggatatttgctttttcgccattggtgtcaaggagctctgaaatgtccattagcataatggaaaaaaacagtatttccaaactgctgaatccagagaaatttttaactctgtgagatgaatgcaagcatcacaaagcattttctctgaaagctttatactagtttctaactgaaaatatttcctttttcaccataggcctcaatgagctcccaagtatcccttcacggattctaccaaaacagtg

SEQ ID NO: 316839 - DNA, 561 bp, Homo sapiens
ctacaccatcatatccacccccaaacatggcaatggacatgatggtgtctttatagcagaggcaagaaggactccagcggttctaattataggggtcacccctcactgctcggcacgttaagagtggtaactccacagccaggaaaactcaggttcaaatytccacattcactttgtttatttagccatccggtgctcggtttccatctgaaacatggggctcatgattatatatggataaaactaggtggagtcctttgggtggctggcaaattgtaagtgcctagttaatgaatgttagttgtgattattaaccatcacttctgagacccctgcattttgctttctctacttataagctcttgcaacctcctctctccctttaggcttccactagtgtgttggctgttactcatcatgttactttaaaaaatgagcatatcacaaagaaaagagacataacattcttaaagcaattactctcttctacgatttcctgaagcccaggtgctctactttattttggagcctggagaggagacagttgtgcttaaaatttat

SEQ ID NO: 316840 - DNA, 561 bp, Homo sapiens
ctacaccatcatatccacccccaaacatggcaatggacatgatggtgtctttatagcagaggcaagaaggactccagcggttctaattataggggtcacccctcactgctcggcacgttaagagtggtaactccacagccaggaaaactcaggttcaaatttccacattcactttgtttatttagccatccggtgctcggtttccatctgmaacatggggctcatgattatatatggataaaactaggtggagtcctttgggtggctggcaaattgtaagtgcctagttaatgaatgttagttgtgattattaaccatcacttctgagacccctgcattttgctttctctacttataagctcttgcaacctcctctctccctttaggcttccactagtgtgttggctgttactcatcatgttactttaaaaaatgagcatatcacaaagaaaagagacataacattcttaaagcaattactctcttctacgatttcctgaagcccaggtgctctactttattttggagcctggagaggagacagttgtgcttaaaatttat

SEQ ID NO: 316841 - DNA, 612 bp, Homo sapiens
gaaacagcagtgaatctataaattactttgggcagtatggccattttcacaatattgattcttcctgtccacaagcatggaatgtttttccatttgtttgtgtcctctcttatttccttgagcagtggtttggagttctccttgaagaggtacgtcacaccccttgtaagtggtattcctaggtattttagtctcttttgtagcaattgtgaatgggagttcactcatgatttggctctctgtttgtctgttgttggtgtacagggatgcttttgatttttgcacgttgattttgtatcctgagatgttgggggaaatcagggaccccgaacagagggactggctgaagccatggcagaaaaacataaattgtgaagatttcatggacayttattagttccccaaattaatacttttataatttcttatgcctgtctttaccgcaatctctgaacataaattgtgaagatttcatggacacttatcacttccccaatcaatacccttgtgatatcctatgcctgtctttattttaatctcttagtaccatcatcttcgtaagctgaggaggatgtatgtcgcctcaggaaccctgtgatgattgtgttaact

SEQ ID NO: 316842 - DNA, 612 bp, Homo sapiens
gaaacagcagtgaatctataaattactttgggcagtatggccattttcacaatattgattcttcctgtccacaagcatggaatgtttttccatttgtttgtgtcctctcttatttccttgagcagtggtttggagttctccttgaagaggtacgtcacaccccttgtaagtggtattcctaggtattttagtctcttttgtagcaattgtgaatgggagttcactcatgatttggctctctgtttgtctgttgttggtgtacagggatgcttttgatttttgcacgttgattttgtatcctgagatgttgggggaaatcagggaccccgaacagagggactggctgaagccatggcagaaaaacataaattgtgaagatttcatggacacttattagttccccaaattaatacttttataatttcttatgcctgtctttaccgcaatctctgaacataaattgtgaagatttcatggacacttatcacttccccaatcaatacccttgtgatatcctaygcctgtctttattttaatctcttagtaccatcatcttcgtaagctgaggaggatgtatgtcgcctcaggaaccctgtgatgattgtgttaact

SEQ ID NO: 316843 - DNA, 660 bp, Homo sapiens
agggatttagattcttgcattccttgatgtatcctcagctcctaaaatggtctctggccaaagtaagggctcaataaatacttcctgattctgatttttttaagcttctcattacyagattttaaaaattaaacttacaattttggagcccaggtaataaaaccaaaaatagatgggattgcatcaaactgaaaagcttctgcatagtaaagaaaacaaccaacagagtagagacaaattatggaatgagagaaaatatctgcaaattacacacctgataagaggttaatatccaaaatatttagagaactcaaacaactcaacagcaagaagacaaataacccaattaaaattgtaagaatgggcaaaggagatgaaaagacatttctcaaaagatgacatacaaatggccaacagatgaaaaagtgctcaacatcactaattggggaaatgtaaattaaaaccacaatgaaatatcaactcatgcttgttgcaatggctattatcaaaaagacataaaataagtattggcaaagatatggagaaaaggaactcttgtgtaatattggcaggaatataaactagtatagccattatggaaaatagtatggagggtcctcaaaatattaaaaatacaactaccatatgattcagcaatcc

SEQ ID NO: 316844 - DNA, 598 bp, Homo sapiens
taaataatcaataaaagcacatgtgagaattggagcaaagaaaaatacttttgctcctctcctgagaaatactgtccctagcttagtggtgctaaagtattttggttgtaacaccctttacactcttaaaactattgaagaytacatgaatgtttatagcaattgtgaaaaaattgaaagcatccaagatatccttcaataggtggagggataagtaaattgtgatatattcatacaataaaatattattcaatgataaaaagaaattaattattgatccatgaaaagatagaggaaacttaaatgcatatttctatgtaaaagaagccagtcccaaaagactacttgctgtatgattccaactatgtaacatctggaaaagacaaaactatagagactgtaaaaagatcaatggttgccaggggtttaggggaagagaggaatacatgggaagaacgcagggaatttttagggcagtgagactattttatacaatactataatgttggatacatgtcatcatatgtttgtaaaaatccataaaatgtacgacacaaaagcaaactctaatgtaaattatgtgctttgtcagataatg

SEQ ID NO: 316845 - DNA, 598 bp, Homo sapiens
taaataatcaataaaagcacatgtgagaattggagcaaagaaaaatacttttgctcctctcctgagaaatactgtccctagcttagtggtgctaaagtattttggttgtaacaccctttacactcttaaaactattgaagattacatgaatgtttatagcaattgtgaaaaaattgaaagcatccaagatatccttcaataggtggagggataagtaaattgtgatatattcatacaataaaatattattcaatgataaaaagaaattaattattgatccatgaaaagatagaggaaacttaaatgcatatttctatgtaaaagaagccartcccaaaagactacttgctgtatgattccaactatgtaacatctggaaaagacaaaactatagagactgtaaaaagatcaatggttgccaggggtttaggggaagagaggaatacatgggaagaacgcagggaatttttagggcagtgagactattttatacaatactataatgttggatacatgtcatcatatgtttgtaaaaatccataaaatgtacgacacaaaagcaaactctaatgtaaattatgtgctttgtcagataatg

SEQ ID NO: 316846 - DNA, 577 bp, Homo sapiens
aaccaaggttcacagggcaaagtactatagagcagtggtcccaacatttctggcactggaaaccagttttgtggaggaatattttcccatgaacagggggttggggtgggggatgggttttggatgtgcagttcacaataggatgcacgctcctatgtagaatctaatgctgccgctgatctgacaggaggcagagctcaggtggtaatgtttgctcgcacacccctccctcacctcctgctatgtagcccggttcytaagaggccatggatgggtaccagtctgggtcccaggggttggggagccctgcagaggacagagtagcatgggaggttaacttcagagatcttccggaggcatcttcaagtattcagatgaatactgagcagcccatgtgtgtgtgaccatccaaggctaggggaagaacaacttgaaagcattggaggggaacagtgcccactgctcacataagactcagattactgtctcatttcaacaaccagagcagaaaactgtataacttatggggccttggattgggcactaagaagggccttgcctcagtagtggggaaaat

SEQ ID NO: 316847 - DNA, 445 bp, Homo sapiens
gaaaaggggcacaaggacacttttgggggtggtggctgtgttcattatcttgattgaggtgatggttttgtagacatattcacatgtcaaaawttattaaattgtgtatcttaagtcatatgtcatttactatattttaattataccttattaaagccatttaaagaaatatctatgttttccaaaacaacttaatgagaaaagtgtcattgcttgacatttttgcacatctggtttatgtcttacttaatacaaggcagctggattctcatatctgcttgctgcattcaaaatgttgcattatgttgttttagtttaagtatataaagaaaatccatcttcacacaaatatgtagtgggaaagggacagatgttttaatagctttttgagataattgtggatattcttctttgatatcacatcagagcttgacaagtggtagtg

SEQ ID NO: 316848 - DNA, 572 bp, Homo sapiens
agacaaatctcccatggagaagaatttcagataaattatgtagatgcttcaccctcaagttggggaacataaattcccattccttgagtgtggactgtgcatagtcacttcctaccgaagagtacagtgtggaaagggtaagagcargaaaagcgtaactctgaagtggagaaacttaacaaacacagtctcagccaggtgatcaaggtcaacatcaaacatcataaatcatgttgatagaatgttctattgacatggcgtgatgcaaatggcactttaccactgtgatcctcctcccagtaactcactgacccagtaatatcatgagaaaaacattagataaattcaaatagtgggccatcctacaaaatatctgatcagtattcctcaaaacagtcaagtcatcaaaagcaaggaaagtctgagaaactgctatagtcaagaggagcctgaagagacaatgcaattacatgtaatgtggtagcttgcatagggtcctggtcaagaaaaagaacagtagttaaaagctaaggacatctaaataagctatgagctttggttaataataatgt

SEQ ID NO: 316849 - DNA, 589 bp, Homo sapiens
caactactctgccatattagctgaactccttgaaatttctcacatactgaatttctcccaccagctggaatatcattccagccagtgttgacataagccataactgctagctgcagccgagtcctgcagcctgacccactgtattggagaagtgacactaaatgttgtggggaagattctgctggcttgaggataactgtcatgtgctttctcgaggctttacagaagttattgggtggtttcagcctcacctggccctgagagactacacgcacagtgcctgtgaagtgtttcccagaggacaaacccacaaggttaacagcccttactctkttacttgcaggaagagaaacagccctaacctcatcttgggaagcgtaacactcacaggttgctctctctccaagtgccccttctgttggaagacatggtttttaatcatttatggaagattagctgtgttcctggtggtctcataagcacaaagctcactttgtgcttttaacttcacctatattcaggtaaaacttcctcagagagcacgaggcaatgtgaaaagcagcaaagatcagcatttgtagcgaatgtc

SEQ ID NO: 316850 - DNA, 595 bp, Homo sapiens
gaactcaaaattttttaaaaaaaaatttaatgggcaaaggacatgaacgttttccaaaagaagatataccaacagttaacaaacatatgaaaaaatgctcaacatcactaatcatcaggcaaatgcaaattaacaccacaatgagatatcatcttacaccagtcagaatggctattattaaaaagtcaaaatcaataaatgttggcaaggatgcagagaaaagggaatgcttatacactgttggtgggaatgtaaattagtacaacctgtatggaaaacagtatggagatttatcaaagaactraaactagaactactatttgatccagcaatcccactactaggtatctaacctaaggagaagaaataattatataaaaaagatacctgatccttttgtagttcatgagcatgatgattggttgttcacgtacatgtgtgagatgtgtcaccctcgaaccttgtggcaatgttggaatattacctgtctgacatgaagaaaatttaaaaacttttaaaagtttaaaaagatatctgcactcatgtgtttatgatagcaccatttataatagcaaagatatggaatcagcctaag

SEQ ID NO: 316851 - DNA, 539 bp, Homo sapiens
gatcaacagctatgaagggagaggaaagaagtttgggaaaggcagaaaataaacttcagtgaaggcccaatgaatgtgggccaacccagcagggtactctggagtaagtagcagagtcaggtacagccttcacaccttgccctgctcagtccttacatgggagccactccagaaagcctgtgacaatggaggagacagcactctgtagtggaggcggccccaccaatcccagcgaacttagtatctgagttctaatctctgtctctcagctcaccaaggtggccaatcaccatgmagagtctccctctctatgccacagtccagaaagatctgcactggctgtgggtctcatctttgcttcacctcactcatggatcgtagttctgtgctttctatactcaagaaaataatcatttaatatatctttttcagttttatagttgttttcaatagaagggctggtccagaacgaattactccatcatgatgggaagaaaaattcttagttcagcttttgtcagctagttatgtagaaattt

SEQ ID NO: 316852 - DNA, 577 bp, Homo sapiens
ttacctttcaaaggcttcacctcctaataccatcatcttggaggttaggattcaacctatgaacctatgaattttaagggtgcacaaacattcagtctatagcagactgtcagtattttttgcacccacatgatctgaggggctgttaagtcaaacctgtgaagcttttaaggtttatgtctttcaagaaagaatatttgggataaaaattgctgattagagtgaggggaacgggagggtatagagggagagcactaaagaccaccagagagtaycaaaggaggtggaatagagaaagaaagagcttttgacatatgtcattttcattcattgttaggtatacagtaggcacttaatagacacttgattattggttgatgtggaatttcatattcagtatagctgatactttccctttaataatggccagctcattttccatcctacattgccctgtggaaaaaatcatcactgtattttggcacttttgaaatagcagcagacattgtgaatgcaggagtgatggcaacagaatggaaaagaatgatcactagtgaggtttctagtgtgggtgttg

SEQ ID NO: 316853 - DNA, 634 bp, Homo sapiens
ataatgtgccagcacataatcgatatttgttcagtgttagctaagacaatttatgttattttttgtttcactaccccaggtgttttagtgcactctatttttttttttttttttttttttttttgggtagaaaatatgtatagagcatgtaatcccagcactttaggaggctgaggcaggaggattgcttgagcccaggctggagttccagacaagcctgggcaaaaaagtgaggccctatctctaaaataaaataaaataaaatatccaggcatgatggtatgcacctgtagtctcagctactcagaagtctgaggcaggaggaccccttgagctcaggagtttgaggttgcagtgagctatgattgcaccactgtactccagactgagtgacagasatagaccttgaaaaaacaaaaaagaaaagaaaagaaggaacgatgaaagaaagaaagtaagttagttccaagatggccaaataggaacagctccggtctgcagctcccagcatgatctatgcagaagatgggtgatttctgcatttccaactgaggtacctggttcatctcactgggactggttggagagtgggtgcagcccacgaaggatgagccaaagaagggcagggcgtcac

SEQ ID NO: 316854 - DNA, 634 bp, Homo sapiens
ataatgtgccagcacataatcgatatttgttcagtgttagctaagacaatttatgttattttttgtttcactaccccaggtgttttagtgcactctatttttttttttttttttttttttttttgggtagaaaatatgtatagagcatgtaatcccagcactttaggaggctgaggcaggaggattgcttgagcccaggctggagttccagacaagcctgggcaaaaaagtgaggccctatctctaaaataaaataaaataaaatatccaggcatgatggtatgcacctgtagtctcagctactcagaagtctgaggcaggaggaccccttgagctcaggagtttgaggttgcagtgagctatgattgcaccactgtactccagactgagtgacagagatagaccttgaaaaaacaaaaaagaaaagaaaagaaggaacgatgaaagaaagaaagtaarttagttccaagatggccaaataggaacagctccggtctgcagctcccagcatgatctatgcagaagatgggtgatttctgcatttccaactgaggtacctggttcatctcactgggactggttggagagtgggtgcagcccacgaaggatgagccaaagaagggcagggcgtcac

SEQ ID NO: 316855 - DNA, 604 bp, Homo sapiens
gaggtctaatgattactgttaccataacactgaaacaaggctataaagcaaagtatcctttgaccaaaattgatcaaataaacatcagcaatacaaactgttcctaatgataaaaatagttactatttattgagtacctcgtataggcagacttagcacccctaatgtctgatttaattcttacaacaaacctgtgagttttgtatgatgatctttattttaaagatggggaaactgcagttcagaggggtttgataacttactcaagatcttctagctgataagggcagaactggacctgacccaagttcttctcacaccaaatcaaacacaggtaacatgacacaatgttcctataatttgtgagtccctttacagctttaagtgctttcatatgagcaagggcaacttccaaaatctgaagacactttgatcaaagttgctatggcaagagattcagaaaacaaagagagtaaaaatcttaagatttagattctaaagttggtgaataaaatgaaagtagacaaaattaattctkagcgcttgtgagagattaagcacagtctgccaatctctttgattacaactaaaaactagacagaat

SEQ ID NO: 316856 - DNA, 556 bp, Homo sapiens
gacataatagatgtacatattttcagagtacctgtgataatttaatacatctgtataatttgcaaagatcaartcagtgtaattgggatagccatcatcttaaatatttgtcattttttatgctaggaatattcaaattattctctttcagctattttgaaatatgcaatagattattgtaaactacagtcaccctaatcaccctgttgatctattaaacactgtcttaaatatattcttgatatgaatccttttttgtactatgtattaccaaattttctcacattctgtggcttttttgtttactatctttatagtgaagaacagaaattaattttattgagactcaatttattaaaaattttattgatcctcaatttattaaaaactttttattttgctattatagggttttttgtgcactgttgaagaaatctttgcctacccataggtcaagaatatattctcctacatatcttttataagccttcttattttaccttttacattcctatctatactgcatctcaaattaacttttgagtgtgatatgagg

SEQ ID NO: 316857 - DNA, 577 bp, Homo sapiens
ccctgatccatgcagcatgttatctttgtacctggtaaggagtgaaatggcttccaattttacggactggttgcttttcattcatatcttcttgccatccctgtctcatgggtgagcacatttcctggatttaaaatgtatgggacagcctgtgagaattacagattccagggaagggscccttttggcacggggggtctgatggtcagagctaatcaggtgtggaagaagctgcctggagaggatccccatctgcatggaatgcccccttcgtggggatggctggcacagctcacacacggaggcactacttcagtcctcccattaccaaactccagggcacacgtgccactgtgtcttgcccacaaacatgcacacagagtatcgatctgtctgatgtttcagggacccagccatgtcatggagggtacatgggcaggtaccatctctgcctggtacatgggcaggggatagatgtgtttccatgggtctccttcacatagaattgtcacctgaacgagaagcccttatccagaagcccagtgcaactcccatctcacaggccaccagcaagttg

SEQ ID NO: 316858 - DNA, 602 bp, Homo sapiens
tagacattcaccatcatggctgaaaaggaaacgacggaaaatgccaagtgttaggatgtggagcagccagaatgctgcctgtgggaatgaaaattggaatgactcctttggtagactgctgggtagtattcactaagagtaaacatatgcccacccaggaccctgcagctccacacataggcatrtattccccagaaacgcaacctgatgctcaccaaaagcatgtacagaatattcttaaacagcaacctacaccagaaactgcctgctggccacaggtggtagaatggatgaatgatgtaggccatgcacacaatggagcaccagtcagcaaggagcatgagggagcactctcccttcagccccatagagaggctgccagacatcaaattgagtgagggacattggacacaaaggtgtatgagttgcatcattcccaccgcataaagttcaaatgtgggcaaagctggtccttgctgctagcagttaggcctgtggttaatctcaaggtcagtgacaggaaatgggagcctgagaggctttctgggggttctgttgcttcctccgggtgctgcacacatgggtcccagggactgaagatg

SEQ ID NO: 316859 - DNA, 559 bp, Homo sapiens
catgtatgtggatagtagccatgtacgtggtatgaagtggacaagttctggatctgtttggcagggaactgatagggctctgtgattgacaggagataggagtggcctgaggtgaggggaggcgaggcatcaaacaaggctggtagactttttatttgaaaggcaaggatggtgggatgatactagctaccgagagggaaatgacctggaaaactaagaactctagttgggtcatgtattaagatcatgtgttcggtttgagatgctgtaatgtatccaggtagagatgacaagtggcagtcataaacaggagtctaactctgggaaaatgtcagaactgaaaataatttgggatttgtgtttatttagtaggtatttaaaaccttgggaccgagcatgtgtacctaagaatccttatatggtcttaattcctcctccagatcagtctggctttgagtcctgattgtgactgatttctgcaaagcaattgctcttttccttgtggcctcttgtsacatcatgttaggaacgttttgttgccagatgcttgcatttaatt

SEQ ID NO: 316860 - DNA, 441 bp, Homo sapiens
gtttgttgcaatttccacaaggaagtatatattcaatgtgtctgttatgtttataggttccaaagaaagcacacacttatctgagagcccagacacagcatacaatccgctttgacaagacatttctcagtgaccacctttctcaactctaggaatacaataaaccaaatacttattgttttcawaatatgacccccaaaaatctaaattttaaaagcatttaattgcatttcagtcaagaaatgtcttccagctttaagagaagaaatcagccacaaaacaaatttcctactcttaggttttaacacagccttaatttataaaagtccacaagccaagaaatacttaggtaatctctcaattcaaagtacttctagcttatgtaggggagactaaaatgtgggagacagtatcttgtcttaaggagtgaactacagggat

SEQ ID NO: 316861 - DNA, 598 bp, Homo sapiens
taaatacctatttaaaataaattcaagaataacttttatatatctagtctgccccttgtatttatttattatttatttttatatttatatttttgagatggagttttgctctgtctctcaggctggagtgcagtggcacgatctcagctcacggcagcctccgcctcctaggttcagcaattctcctgcttcagcctccccagtagctgggattacacgcttgcaccacccaccaccacgcctggctgattttttttgtatttttagtagagatgggatttcaccatgttggccaggctggtcacaaactactgacctcaagtgatctgcctgccctcggtcttccaargtgctgggattacaggcgtgagccagtgtacccagcctcttgtgtttatttaaaaagaaatactggcgtttgtcgaatgatggagtcttattttcaaacttttgtattaaatatattttcgctttcaccagatcagtaaatcagtgtatcagatgagtcttgctggaagtctgatgtagtttgtgtatagttttagaccaaatttatatgcagagataacgcaggaaaagataattaagtctatctaag

SEQ ID NO: 316862 - DNA, 581 bp, Homo sapiens
tcttatgctcagatatgactacagctgtcattctctggctttcacctaaacatgagggaccagacctctgacttagtgacaaccaaagaacagtctggagaagaaactgaaggaacagcctcacacagaccactcacactgtgagagataagcatcgctcccatccctcgacacatccctttgtgtatttacaaactaccaagagagttcctgcattcatcatagggatcttagatgtcttcattayaaataaatatggttctccctcctccactaataggaaaatgtgaaacatgcttggtaggaaacatgtacaggggcagaatgggacaaaggcggagaaaaagttatagagatgacactcctcaattgtagtaagtgtgcaaattctacttctaaaagggataaaaaagaattggcttttaaaaacactgcactcaaagtaatgtttccaataataacctttaaagtttcaatgaaaaagaaaaatctgtgcttatgggcacatgggatttctgattgtgttacttcattttaggtcattcaaaatggacttggtttaatgcatacactatggcaat

SEQ ID NO: 316863 - DNA, 615 bp, Homo sapiens
ggagaaaatctccaggttatcaggatatgtatagtttgcgcaatctttctcagtgatgttggttgggagcatttgacttttgtgatacttttcacrtatgttgatggtaaagtctgctttcctcgttatttaagtatagtaatgacaaaaggtatgtccatatgacattacctgcttccttcccaatgaccctggcagcttctggcgaacaagatgcccctaacattgtgtcagcctttctgtttggtttgcccaagtcttaccctctttctatacctggcttttgccttgagtttgccatcctggtctctgtttttagttcttcaaagccctcctcatgcagttttctgggttctgtctttaccaacaataagaaacagacaacattcttaatttccagctgtctgtgctcatagtttcttcaatactactgaagaatagtagaatattcaaaatacttcaatttctaacaggctataaacacccacagatacttgattattagaacatatagaatgaaattatgtacattgtaaaaagtaaaacaaaaaaaccccaaactctaaaattcctaccttctaaagaaggagaatcaccttccagtttcttaaaatc

SEQ ID NO: 316864 - DNA, 526 bp, Homo sapiens
actctctgggaaattagttacattcttttctgtatgtaataagcacattaaaatgcctctcatacctagacttgtagacagatctctcagaagatgtctagaccacaattcaatgatctattgggagtcttcagtggaaattccacaagtacctcaaacccagccttccccataacaaattcattcattcttttctttccttccatattgtgtatctggggagtgacaccaccatccacccagtctcttgtgtctgcaacttgtgagccctcctagtcttcttcctcttattttatcacaactcataaaatcttattgggcctatctacaacttaactcccaattttatctctttatctcctttttactattctcagcatccctacttcagtcaaggacctagtcrtttttcctttctattttattgacctatttacttcactgccttcattcttgttcacaacacatttgtgtaagtgatatcttggtaaataaaaagcagatgattcaaaagagattcatttca

SEQ ID NO: 316865 - DNA, 603 bp, Homo sapiens
acataagtaacaaacctgcatgttgtacacatgtactctagaacataaagtataataaaaaaattaaaaaataaaaataaaaaaagaaaatacacagaggagatattaggttggtgcaaaagtaattgtggcattcttatagaatatacaaaatagcctcaaaaggacaaatctaagagttattggccttaaasagggggtagagaaacagataggggaagaaagtttattcaaagggataagaacagagaacttcccaaaactagagaaagctatcagcattcaagtacaagaagattatagaacaccaagcagatttaatccaaaaatgactaccttaagtcatttaataatgaaactaccaaaggtcaaggataaagaaaggattcaaaaagcatcaacagaaaaaaaaaataacttacaatggagttctaacatgtctggcagtagacttttcagtggaaaaggctaggagagagcagcatgacatatttgaagtgctgaagtaaaaaaaaaaaaaaggttaccttgcaatagcatatctggtgaaaacatcttcaaacacgaagaagaaataaagactttcccagcaaacaatagctg

SEQ ID NO: 316866 - DNA, 603 bp, Homo sapiens
acataagtaacaaacctgcatgttgtacacatgtactctagaacataaagtataataaaaaaattaaaaaataaaaataaaaaaagaaaatacacagaggagatattaggttggtgcaaaagtaattgtggcattcttatagaatatacaaaatagcctcaaaaggacaaatctaagagttattggccttaaacagggggtagagaaacagataggggaagaaagtttattcaaagggataagaacagagaacttcccaaaactagagaaagctatcagcattcaagtacaagaagattatagaacaccaagcagatttaatccaaaaatgactaccttaagtcatttaataatgaaactaccaaaggtcaaggataaagaaaggattcaaaaagcatcaacagaaaaaaaaaataacttacaatggagttctaayatgtctggcagtagacttttcagtggaaaaggctaggagagagcagcatgacatatttgaagtgctgaagtaaaaaaaaaaaaaaggttaccttgcaatagcatatctggtgaaaacatcttcaaacacgaagaagaaataaagactttcccagcaaacaatagctg

SEQ ID NO: 316867 - DNA, 540 bp, Homo sapiens
ttttgtaattttacaattttatgtaaatttacataattatgtaaatttacaaaattgtttttaattttacaattttatgtaaatttacataattatgtaaatttacaaaattatgttttgtaactttgtaaaagtaagttttgtaaaaacatacttttctttttacaaaagtaaaattatactgtaaatatatatatttatatataggtatatatatttataaataggtatatatatataaaaaawtttttttaccactgtatgatgtatttgtgttttaagctaagtgttattgcaaaagagtcaaaaagaccaggcacagtggctcacacttgtaatcctagcactttgggaggccaaggtggaaggatcacttgagcccaggattttgagacgagccgcagcaacacggtgaaactctgtctctacaaaaactacaacaaaaattagccaggcatggtgacatatgcctgtagtcctagctactcaggaggctgaggtaggaggatcacctgagaccgggaagtcaaggctgcagtg

SEQ ID NO: 316868 - DNA, 361 bp, Homo sapiens
ttccttgctgtctttctgtctttagtatcataattttctttcttcccaaaaagcaactgctatcattaaaatacagtgttctaaagcaatatgtaccctgaatggatatgtgtacatacacacatgcacacrcacataaacacacacacataacatttaaaaacattttaaaactgcatcctctctgtagtaggaaaatggtgaggccaggacatatcaggaaattagacaatactttaaccactttgtgcacaaagtgatattaattagaagtactccacttttctcacctttatttatcaatgctgtgtaatttttttaaatgttcaggctctttttttgtcttctgagggaaaacccc

SEQ ID NO: 316869 - DNA, 601 bp, Homo sapiens
tcagcatttattcattgattgtcttgagtttactgatgaataggtgatttaaagtggcattatctaatttgatatttgcaataactcatagggatggttataaatgttgacattttacatttatggaaagatattattaataggtattactgtctttacaacgttacataactagtaagtggtaaatcagaaatctgagactgaatcatatgattccratttctgtgtatgttttgttagttatatgtctattttgcagccctatttttttctgtttatatgttgactatgatgttcttccttggagggtgttatgtactactaatcaaacaatataaaaagtatcatttagcacagttctagctgaaggaagaatgaatgcagaataagaaaataataaatcaacaatcaaggagaagtcaaggtgagtggtttcaaaaaccatttcatcatatctttgagttgaaattggaacttgaattaaacaatattctcatatcagaaggctaaatatgtaggaaaaacatctgacttgtgttatatttgaacagagaacctatcttgaggctcaaattctacagttctttccagagagtctcag

SEQ ID NO: 316870 - DNA, 629 bp, Homo sapiens
cctaatgaagtaaagatattgacctttattgttctttgacccagaaactaaagagcagttttgactttgggtatctctacagatatcattgtgttctcaggatccagtcctcaatatttattaataattttttattccaaaaatggaatatcatgtttcctccctctcttaccatatatgaaccaactataccattttataagttgttgatttggaatacttctgaaattcttggctgcacatttatgatttgattcacagacttactttctttgaaagtggttttgttactgagaacatttaatcttcttttatagctaaggtaaaagaaaaaagagaataactctgcttctgaaatgtaaacacaaatgaacacaataagtgaaactttaagcacttttcagtgaaaagatattttacataaatcataaaagctaaattccttcttcttggcracatgtttttttcctgatataaaactcagatttcaaaattgttgtctgaacaccaatatacttttttgctaacccatcacggcttttcctttctgcacactaaactttgttcatcctaataactaaaataagactttacttttcaggtgatcaccaattgtaatacttaatgac

SEQ ID NO: 316871 - DNA, 583 bp, Homo sapiens
atgtaagacagaattggccccaaacacaagcaatctgcctcttctaaggttataagagagagggtagatataggtgggtggaaaatgtgtargtcttgtggctggaagttgatgaatttttctccaatagcctctgttatcattatttttttttagtgaagtgtgagtaaagatagtttttttaggacaagaatcacattgtcttgtccatagggtaaatgttcaagaaatgtactttgaagtaatgaaagattattagagatgtttagagatcatgtagttttaccagcatcaacctgggaattatatgtatagctaagatgcttctaaacctttctgttgtcaaaaaaaccaatgaatcccacggaagtctattcctcccccttaatacggcatatgtttacgttggaaagaatttggtctctggtcctatttgctcctgtcattgcacttcaggaaactcaaaagccagccctctgggactccagaacacacaccacaaccatcgtgaaaagtgctgcctcgggatgggcaatttgccatcagacacctagactgaatcgttggtggcccaggagagctg

SEQ ID NO: 316872 - DNA, 583 bp, Homo sapiens
atgtaagacagaattggccccaaacacaagcaatctgcctcttctaaggttataagagagagggtagatataggtgggtggaaaatgtgtaggtcttgtggctggaagttgatgaatttttctccaatagcctctgttatcattatttttttttagtgaagtgtgagtaaagatagtttttttaggacaagaatcacattgtcttgtccatagggtaaatgttcaagaaatgtactttgaagtaatgaaagattattagagatgtttagagatcatgtagttttaccagcatcaacctgggaattatatgtatagctaagatgcttctaaacctttctgttgtcaaaaaaaccaatgaatcccacgkaagtctattcctcccccttaatacggcatatgtttacgttggaaagaatttggtctctggtcctatttgctcctgtcattgcacttcaggaaactcaaaagccagccctctgggactccagaacacacaccacaaccatcgtgaaaagtgctgcctcgggatgggcaatttgccatcagacacctagactgaatcgttggtggcccaggagagctg

SEQ ID NO: 316873 - DNA, 595 bp, Homo sapiens
gttggaaggatatctggcaagtataaacatctgggcttcaatgctgtactcttgtacttttttctgtgactgtttttgatcaaacaattactgttgattaaagaggcaaatccaaaactcaacctttgaaaagtgcgtttattctatcttaagctattcttcctagcaaacttttattttcatttaaaaatttcataagcaaaagaatattttccacacctttctccaaacttctttttaaaatcttagcagattcttcacmaaaagaatagtactttatctctatcttagcctcacatctaactttataatacttaggactctatactgaaacatttgtttacgctattctacaaagccagtttcttatttttttctctagatctcacttaatccccatatcttaggttttgaccatcccctttccagagttttccagcatgatctccctattgggcaattctcttctgcctttccatgtgcatgggtatccttagtatttctctttctcgccaatttgcctttgaaatacatgatgtgactgccattttcatttctttactatccaatcttcctgtctctttccgtttaacat

SEQ ID NO: 316874 - DNA, 595 bp, Homo sapiens
gttggaaggatatctggcaagtataaacatctgggcttcaatgctgtactcttgtacttttttctgtgactgtttttgatcaaacaattactgttgattaaagaggcaaatccaaaactcaacctttgaaaagtgcgtttattctatcttaagctattcttcctagcaaacttttattttcatttaaaaatttcataagcaaaagaatattttccacacctttctccaaacttctttttaaaatcttagcagattcttcacaaaragaatagtactttatctctatcttagcctcacatctaactttataatacttaggactctatactgaaacatttgtttacgctattctacaaagccagtttcttatttttttctctagatctcacttaatccccatatcttaggttttgaccatcccctttccagagttttccagcatgatctccctattgggcaattctcttctgcctttccatgtgcatgggtatccttagtatttctctttctcgccaatttgcctttgaaatacatgatgtgactgccattttcatttctttactatccaatcttcctgtctctttccgtttaacat

SEQ ID NO: 316875 - DNA, 595 bp, Homo sapiens
gttggaaggatatctggcaagtataaacatctgggcttcaatgctgtactcttgtacttttttctgtgactgtttttgatcaaacaattactgttgattaaagaggcaaatccaaaactcaacctttgaaaagtgcgtttattctatcttaagctattcttcctagcaaacttttattttcatttaaaaatttcataagcaaaagaatattttccacacctttctccaaacttctttttaaaatcttagcagattcttcacaaaaagaatagtactttatctctatcttagcctcacatctaactttataatacttakgactctatactgaaacatttgtttacgctattctacaaagccagtttcttatttttttctctagatctcacttaatccccatatcttaggttttgaccatcccctttccagagttttccagcatgatctccctattgggcaattctcttctgcctttccatgtgcatgggtatccttagtatttctctttctcgccaatttgcctttgaaatacatgatgtgactgccattttcatttctttactatccaatcttcctgtctctttccgtttaacat

SEQ ID NO: 316876 - DNA, 551 bp, Homo sapiens
acattaagtgtgaaacataggaagtagaaaatatgtatatacacattcaaaaggccgtggtgcattaacaaatatattcagcctagtgatgcataaaatatactsgtttccttttatcctttttattttatttatattggcattttcttttattgtaactcttttttttcacttttcacatatgttcagctaactacagaacatttccatttcaattcagtgtgtataaaaataaacacaccattttctccaagaaaaaatgttatatgtttttggtaaccaatttctaggccctaaaaatgcaaatctttgggcgattttagctcatgtctgtactttagtcttaataccctatcaggcatgacatatttcttaaaaataactctagcatctgttctttccttcatatttccactgttcccataatataaaaagcttctaccactgaaaatggtttcctaactggtagctttcattttaattgttcatatctaatattctttgtgcacacctatgatacagcttattttttctttcatggattttatcat

SEQ ID NO: 316877 - DNA, 621 bp, Homo sapiens
taaggtgtcccactgtgggttctgcagtatagttttctaagtcttcctgctgagaaaaatttaagttacatcaggtgctaagatttggttatcatgatcttgttggttggttaaactgggtttattttgaacatgggagaagaaaattgttttaatgattgaaaatgttttcatatgaatacaaaagcaaagcagacaaaaccagcctaggaagaaactaagctatttggagaaggaagattactttatgagcactgataaaatgcaataaattgatccagaatctagcaaagtgtgggtactggtgaaaaagttcagagggattcgttgttaaggcgcttgtagcttattctgaataataattcatttgttataatatattttaacacattgagtatcaaatatgtatcatgcactatgttatgcagtctttgaaaaaatggtcatgaagaaagaccccatgtctaytggaggaggcagatggagaactgctgctttgtggggaattaaaaaaagtgtagaacatagaatctaggagtcagggaagactcccaggtgatgtaaactgggtcttcaaggatgcataggagtcagtcaagacaaggaggaggaagaaaggat

SEQ ID NO: 316878 - DNA, 426 bp, Homo sapiens
caagatgagatttgggtggggacacagcccaaccgtatcaccaacattactatgaattaggcattgtaccaggtgtttgttatagttgctcacatattaattcatttaatactaacaatacttacctaagaaatgcactatttttatttcaattttaaagatgaggaaactgaagacacaacaatatttaaattatacaagggttaggaactagaaagtggcagaactaaaattataatccagacaattcgctctagaacctacccttctaagcactaacttgcctctcagtttgtaagttctaaacatacatgactccaaatagtttttcacaaatgatcacgtggtacmtgtgttccacaaaacccactacgctacggaaaaaagtcccaattttaaataattgtatatttaactttacttgga

SEQ ID NO: 316879 - DNA, 616 bp, Homo sapiens
gccttatttggagcaggcatttctcacagcaagtagagatagaaaatgcatcaatttctatagtcttaaactgcactgtaaacaatatcaagattacacaaagtattaacttacaaatccaaagaataaaataaaaatgtctcttgtagctcaagacaatatctgagaaatgtaagttaaataaaactttggcaaaatcaaaagtgatttgtgtaggtatacaaagcatgttggtcgaggaactagaatttgaatgccaagtattctgattttttatgctttacttagccacmttaactattagttggatagatagtaactatacaaggcatgcatttgtatatatctctatttagatacatacacacatgcacatgtaacataaaacataacatgacatataatatgttgttatataatcattacgtatgtgtgcaacaaaatgaagaatataataggctataattttgtaagtttgtgacaatatttgagtaacaatggaatttaaaaacaaaattctcactatatatttgctgcaatttccttaagaatttcaaaacagttcaagtttcagttaacatacccacaaagtcaaaaaggtacaaacaagattaca

SEQ ID NO: 316880 - DNA, 616 bp, Homo sapiens
gccttatttggagcaggcatttctcacagcaagtagagatagaaaatgcatcaatttctatagtcttaaactgcactgtaaacaatatcaagattacacaaagtattaacttacaaatccaaagaataaaataaaaatgtctcttgtagctcaagacaatatctgagaaatgtaagttaaataaaactttggcaaaatcaaaagtgatttgtgtaggtatacaaagcatgttggtcgaggaactagaatttgaatgccaagtattctgattttttatgctttacttagccacattaactattagttggatagatagtaactatacaaggcatgcatttgtatatatctctatttagatacatacacacatgcacatgtaacataaaacataacatgacatataatatgttgttatataatcattacgtatgtgtgcaacaaaatgaagaatataatagkctataattttgtaagtttgtgacaatatttgagtaacaatggaatttaaaaacaaaattctcactatatatttgctgcaatttccttaagaatttcaaaacagttcaagtttcagttaacatacccacaaagtcaaaaaggtacaaacaagattaca

SEQ ID NO: 316881 - DNA, 616 bp, Homo sapiens
gccttatttggagcaggcatttctcacagcaagtagagatagaaaatgcatcaatttctatagtcttaaactgcactgtaaacaatatcaagattacacaaagtattaacttacaaatccaaagaataaaataaaaatgtctcttgtagctcaagacaatatctgagaaatgtaagttaaataaaactttggcaaaatcaaaagtgatttgtgtaggtatacaaagcatgttggtcgaggaactagaatttgaatgccaagtattctgattttttatgctttacttagccacattaactattagttggatagatagtaactatacaaggcatgcatttgtatatatctctatttagatacatacacacatgcacatgtaacataaaacataacatgacatataatatgttgttatataatcattacgtatgtgtgcaacaaaatgaagaatataataggctataattttgtaagtttgtgacaatatttgagtaacaatggaatttaaaaacaaaattctcactatatatttgctgcaatttccttaagaatttcaaaacagttcaagtttcagttaacatacccacaargtcaaaaaggtacaaacaagattaca

SEQ ID NO: 316882 - DNA, 612 bp, Homo sapiens
tggtatagaaagagggcaagggctccaggaaagaaaaaatggtttgttacyaggcaatcatcaagaaattgactgcagtgtgggctggctcagaggtaaaccagagaaaagctgtctcttgacagacaagtagaaggtagttattgagggaataagaatgcagaaggatgcaggctgcaattcccacagctcctagagtatttcttttgtgtattaaaggaagaaatgatctcaaagctggaagagttggagatatataggtaaaagttctttatctcttttatttttaaccatgtattttgttgcttagtaacatttgccactttttaaaacctcatttcaaagtgaccaatttaagagtgcatttaaaggaattatattttaaatttaataccactgtaaaccaaaaagaacttaatagaatttatatattttatatatatacacaaacatatgcataatgtataatatatataataggtagactatataattaaatatgtttttatgtccacagagcagggaattctgtatgtaaatttttcccacttttcagtaagaattattatatataaatctttttcttctacaatatacaattgacatctattt

SEQ ID NO: 316883 - DNA, 612 bp, Homo sapiens
tggtatagaaagagggcaagggctccaggaaagaaaaaatggtttgttaccaggcaatcatcaagaaattgactgcagtgtgggctggctcagaggtaaaccagagaaaagctgtctcttgacagacaagtagaaggtagttattgagggaataagaatgcagaaggatgcaggctgmaattcccacagctcctagagtatttcttttgtgtattaaaggaagaaatgatctcaaagctggaagagttggagatatataggtaaaagttctttatctcttttatttttaaccatgtattttgttgcttagtaacatttgccactttttaaaacctcatttcaaagtgaccaatttaagagtgcatttaaaggaattatattttaaatttaataccactgtaaaccaaaaagaacttaatagaatttatatattttatatatatacacaaacatatgcataatgtataatatatataataggtagactatataattaaatatgtttttatgtccacagagcagggaattctgtatgtaaatttttcccacttttcagtaagaattattatatataaatctttttcttctacaatatacaattgacatctattt

SEQ ID NO: 316884 - DNA, 612 bp, Homo sapiens
tggtatagaaagagggcaagggctccaggaaagaaaaaatggtttgttaccaggcaatcatcaagaaattgactgcagtgtgggctggctcagaggtaaaccagagaaaagctgtctcttgacagacaagtagaaggtagttattgagggaataagaatgcagaaggatgcaggctgcaattcccacagctcctagagtatttcttttgtgtattaaaggaagaaatgatctcaaagctggaagagttggagatatataggtaaaagttctttayctcttttatttttaaccatgtattttgttgcttagtaacatttgccactttttaaaacctcatttcaaagtgaccaatttaagagtgcatttaaaggaattatattttaaatttaataccactgtaaaccaaaaagaacttaatagaatttatatattttatatatatacacaaacatatgcataatgtataatatatataataggtagactatataattaaatatgtttttatgtccacagagcagggaattctgtatgtaaatttttcccacttttcagtaagaattattatatataaatctttttcttctacaatatacaattgacatctattt

SEQ ID NO: 316885 - DNA, 612 bp, Homo sapiens
tggtatagaaagagggcaagggctccaggaaagaaaaaatggtttgttaccaggcaatcatcaagaaattgactgcagtgtgggctggctcagaggtaaaccagagaaaagctgtctcttgacagacaagtagaaggtagttattgagggaataagaatgcagaaggatgcaggctgcaattcccacagctcctagagtatttcttttgtgtattaaaggaagaaatgatctcaaagctggaagagttggagatatataggtaaaagttctttatctcttttatttttaaccatgtattttgttgcttagtaacatttgccactttttaaaacctcatttcaaagtgaccaatttaagagtgcatttaaaggaattatattttaaatttaataccaytgtaaaccaaaaagaacttaatagaatttatatattttatatatatacacaaacatatgcataatgtataatatatataataggtagactatataattaaatatgtttttatgtccacagagcagggaattctgtatgtaaatttttcccacttttcagtaagaattattatatataaatctttttcttctacaatatacaattgacatctattt

SEQ ID NO: 316886 - DNA, 587 bp, Homo sapiens
tggaaactgtcaagttgaggaagcaatgaatatataagttttgcacaatycaactttagatgtctcctgagaccagggctaacattgctaacagttgactttggtagataataaagtttacagataaggctcattagaattagtatgcacttagaaatacatttaaattatgtatgcctaccttcagtctatatgaacattagttgcatactaatgagttgcaagaaaaaattaaaagaagtcatatcaatcgtatcttctgtgccaaagttttaggtacttaatatgatctttctttggaatgtttgcaacaaagttcctctattaaaaatattttattttcttcatttttctgtgtgtcttctctttgcgataaggtatgtgcatttgaacaatggttgttacctaattaggaagttaatatttcatcctatttgccatttaatctaattaaaaatagctagttgtagatctttgaatctttatgttttcttaaaacatgatatgtatcctaatgttatgctttttcactcacttattttttccttatatctatgtactcataacactttcctcaactattttaa

SEQ ID NO: 316887 - DNA, 509 bp, Homo sapiens
atttcatctcagcctttagacctactgtgtaagaatgtttcctcaggagaactcactgtatgcttaattgttcttaatcccatagcaaaggggaaaacaaaatgaattgaaacatgaaataactaaatgtgtattctaccattttaaaactctagtcttcgttttgtttcttcccaactcgccctttgcaattgtgcaacaaataaaagtgataataatggagcttgaargtacatctgagaaggctagatcctcacagaatctttaaatccaataatgggtgtaaaaagtcattattgctgactccaaatgataagagaagtctctgcaaaagagaagccatagaaaaagactgttgactccaggtgagcaatgtgagtgaatttaaatgttgtcaatttaggaagaccataggaatctccattggcggatcaagatgctcccctattttacagtggcagaaggctttagttttgcattgagatctctagaaatagaaacctcaaacc

SEQ ID NO: 316888 - DNA, 531 bp, Homo sapiens
tgtgtctctgcatgtgaggctctacctacctttggtctttgataatggtgacctacagatggggttttggtgtggatgtcctttttgttgatattgatgctattcctttgtgtttgttagttttccttctaatagtcaggtccctcagctgcaggtctgttggagggaggtctactccagaccctgtttgcctgggtatcaccagtggaggctgcagcacagcaaatattgcagaacagcaaatattgctgcctgagccttcctctggaagctttgtcttagaggggcacccagctgtatgaggtgtcagtcagcccctactgggaggtgtctccaagttaggccacatgggggtcagggacccacttgaggaggtggtctgtccattctcagagctcaaacaccatgctgggagaaccactactctcttcagagctgtcagggacgtttaagtctgcagaagtttctgctgccttttrttcagctatgccctgccccccaagatggagtctacagaggcaggcaggcctc

SEQ ID NO: 316889 - DNA, 626 bp, Homo sapiens
tcagaatcattgcgagaggtgagaggcacttcttacattgtggcagcaagagaaaatgaggaagaagcaaaagcagaaacccctgataaacccatcagatctcatgagacttattcactatcatgagaatagcactgggaagactggcccccatgatttaattacctccccttgggttcctcccacaacacgtgggaattctgggagataaaaytcaagttgagatttgaatggggacacagccaaaccatatcactgggtaatttatgaagaaaagtatgggagaaattgtccccatgattcaattacctccacctggttcctcctatgacacatggggattctgggaactgcaattcaaaatgagatttgggtagagacacagtcaagccatataattacaccactggcccctcccacatctcatgtcctcatgtttgaaaacataatcatgcctttccaacagtcccccaacgtcttagctcattccaacattaacccaaaagttcaagtccaaagtctcatctgagaaaaggcaagcccttctgcccatgaacctgtaaaaccaaaagcaagttaattacttcctagatacaaagggggtacaggcgttgggtatatttacc

SEQ ID NO: 316890 - DNA, 633 bp, Homo sapiens
atgagcaagcaagcgcagggtccggccactgcacacagccaggcatgccggctgctgcggcaggttgggtggtcccaggcaccagcacccatgctggctctgtgcaaggatacagctggaatagatgtgctgcaagcggcttccactgtgggcactcacatctagacaaggggaacatagaggcacctggcagcttggagacaccaagaactgcagagccccaaagaggatgtcatagccctggctcggggagcccctaggtctgggctccctraagggccacagctcttctttccttctcgtcaccagcaacatggcaagcaggggaggtgtatgtttcagccatttgtgttacagttctttcagtccctccattcagcaggtcccaagttcttgtcccatgtctgagaagaatgagatacatggacaactggagcaaggtggagaggagcatcattgagcgacagaacagctctcagaagacccaaagttggtagctcctttccacaggcaggatgtcccaatgagtatccaactctcagtggagaggagactcatagtgggtagctccttttctcaggcagatcatcccaacaagtgtgtgagtctggctaaatctggggtttttatatg

SEQ ID NO: 316891 - DNA, 522 bp, Homo sapiens
actgactggtccatgagtggccatgggcaggcctagaaaaagtaccattcaattggccaaatggtcatcaatgaaattctcactctgtgctgcagactttgcctggaactgacagcctggcccccagccttcaggccatccctggattgaaggtggggttttaccagggacccgccacttcctgcctgggaacttgtctgcctttagcatgcaatccatggcgtccaggctgtctgcaccaggaagcacctgcaggcccataccaagccaccctcagcatccccagcccatctcccatgctcgttggtgctcaaagtccagaggcagccaaggcagcagtgggctggtgtgtcagcacttccctgagtgcacacacacccrgccaggttgtgacagtcacaactttgctctgccctgaagtgggtgccaggagcaggaagagtcagggagcaagagcaagcactttcaaggttgcaggggcagggggtttcctgggtccccaagagctcagggatgctgggg

SEQ ID NO: 316892 - DNA, 547 bp, Homo sapiens
tgcaggggcagggggtttcctgggtccccaagagctcagggatgctggggtggctgtggctgtgccagggagcacagactcctgccccgccaactcaggaggcagggctctcgcctgttcccagctcccactggttccacagagtacacagccccacttgtgcctccccsactgcagccagtatcctcacagtggccgctccatatgggccattgtcaccatcactattgttgaagttcataaatatacaattcttgaaaaaagcaattgtagttttgatattttcattaacttctttgtactagataaaatgtgaattaagaaggtgctatgatttgaatgtcccctccaaatttcagctcatgttgaaatgtaattgacattgtagcagtattaagaagtggcacctttaagacatgattagtccatgaaggcctgtgccatcccagtgtggtattacagccattataaaagggtgagttcaccccctcctgctctgtcaccattttgtctttgccaggcatgcaatgacactgcaagaaggccc

SEQ ID NO: 316893 - DNA, 579 bp, Homo sapiens
taagtctcatctttgtctgatttagatgagactttggacttggacttctgagttgatgctggaacaagttaaaacttgtggggcttttaggatggaatcaacgtattttatatgtgagaagatgagttttgaagggccagggatatggtttgaatgtttgtctcctttaaaactcgtgttgaaatttaattgccattttcacagtattaagaggtgggacctttaagaggtgatcagactgaagactctgcccttatgggtgtaatggcataataaaaaggtgagtttagcccctcccaytctctcatcctctcaccttatgccatgtaatgacattataagaaggtcctcaccagatgctggtaccttgatattagacttcccagcctccagaagtgtcaatcaatacattttcattcattatatgttacccaatcatccgtggctttctgttatagcagcacaaaatggacaaatacagaagagaatcaatatttcacaaaatatgcatgtttaaccccttcctaaatttcatactgaaatgactaaatcaatataaaaaagatacagacctgttta

SEQ ID NO: 316894 - DNA, 586 bp, Homo sapiens
tttaagaggtgatcagactgaagactctgcccttatgggtgtaatggcataataaaaaggtgagtttagcccctcccattctctcatcctctcaccttatgccatgtaatgacattataagaaggtcctcaccagatgctggtaccttgatattagacttcccagcctccagaagtgtcaatcaatacattttcattcattatatgttacccaatcatcygtggctttctgttatagcagcacaaaatggacaaatacagaagagaatcaatatttcacaaaatatgcatgtttaaccccttcctaaatttcatactgaaatgactaaatcaatataaaaaagatacagacctgtttaaatccagaaaccattttacaaatgtatccaaaactttaagttaccatcatgatggtactggtagagcaatttggatgaaagtttcaatcctctcaacatcttattaggggtctccactctcattgagaagaccacctgttgtgaactgatacatgtgacaaagcccaatgcccaccagctccaggagcacacttgcagaaaagtccttctacctactgaagttgaaat

SEQ ID NO: 316895 - DNA, 381 bp, Homo sapiens
ttattagaattatctttcactgttgctctttgaaacctgttctgttgttgccacataaaaatcattcttctgtaaaatccacagtgacaaaaccattgagtacagattaattgatagtttagattgctcatttgtgcttcatgagtctagcaatttttttaaatgcacaatttaaaaagacatttaagaacttattcctaagagtgtgaaaaaagatgtatagtttaaccatgctattattggttattttgtggtagaaatattctgaaatgctttttatgtgcattaaacatctttattatagackcagtaaattaatagattatattgttgtgaatgtatctccttaagtttgtttagatttgttttcttgtttgttgc

SEQ ID NO: 316896 - DNA, 528 bp, Homo sapiens
tcgtcgtgtactgaaaatttgctaagagagtagattttaagtgcttgtaacacagacacaaaaggtaactatggaaggtgataggtatgtaaatttgtttgactgtgtaatcattttactatttatatcaaaatctcatgttgtatacctcaaaaatatataataaaaattaacttaaaattctcctagcattattttatcatcctgttatgatgcttagagtaattttatttttgttaataaaagccaaagttgtrgccatatttccttcttgggctcttgtgttcttatctgaatactctttttgatatatcttttccccaggagcaagcctgaaatttggagtcaatgaaaaggacaaggttttacacaccagaaccagctttggtgctgcttagatgaccaccaggtggcatcaagggcttgcttccttatatctttaattaagactttccactgagatgggggggatatagggatgctgcagtaattaggcattattgctatgtctcatgttttcttaattag

SEQ ID NO: 316897 - DNA, 578 bp, Homo sapiens
tgttgcatgttagaagctggagagtgctatggaataaaaacagcaggattagggagaagagagggcagaggagggcataattttactcagtktggtctggatcaggccatttctaccataccagtcatttctttaggtgcttctttcaattaattcccatcccctacaggaagtttgttttccatcaccatagatcactttattctagtctaatacatcagataaaagaaatcacacagaattatactgttttgtttctgattttttcctgttgacatactattttggagttttttctatatttttacatcagtagataattttttattgttgtatagtattccactgcatggatgtgctgcaattcatataaacattcacctgtaatcaactggattgttcatagttttcagctattatgaatataattgctgtaaacattcttgtacaaattatattatatatatattttcattcttagaagggaattgctagatcagagcataggtgaagaaaactagtgtataagacactgttgaatagtcttgcaaagtgactgtattgttttctattataag

SEQ ID NO: 316898 - DNA, 578 bp, Homo sapiens
tgttgcatgttagaagctggagagtgctatggaataaaaacagcaggattagggagaagagagggcagaggagggcataattttactcagtttggtcwggatcaggccatttctaccataccagtcatttctttaggtgcttctttcaattaattcccatcccctacaggaagtttgttttccatcaccatagatcactttattctagtctaatacatcagataaaagaaatcacacagaattatactgttttgtttctgattttttcctgttgacatactattttggagttttttctatatttttacatcagtagataattttttattgttgtatagtattccactgcatggatgtgctgcaattcatataaacattcacctgtaatcaactggattgttcatagttttcagctattatgaatataattgctgtaaacattcttgtacaaattatattatatatatattttcattcttagaagggaattgctagatcagagcataggtgaagaaaactagtgtataagacactgttgaatagtcttgcaaagtgactgtattgttttctattataag

SEQ ID NO: 316899 - DNA, 566 bp, Homo sapiens
tatttcacaatactgtttagtttttcttctctatatattgaatcaatctggctatatgttaatctattaatctatttaacagtatttttttaaaaatgaacctatgaacctttgctttcttaatctttttttatcatatgtttccttttttatttattacataagtatcttttttttttttgagacagaatctcgcactgtcgtctgggttggagtacagtggcacaatctcagctcactgcaacctccacttcccgggatcaagtgattcttctgcctcagcctcccacaggtgccygccaccacacccggctaattttttgtatttttagtagagatggggtttcactatgttagccaggctggtctcaaactcctgacctcgtgatccacctgcctcagcctcccaaagtgctgggattacaggcatgagccaccgcacccggcctccatgagtatctttactacttcttaccatgtaattttcctgaatttattctgcttatattttactcatttcttaggttaaatattaaatttgattttccacatttttcttttgtaaa

SEQ ID NO: 316900 - DNA, 641 bp, Homo sapiens
aatggaagtgttttacattttccaaatgcaaataaatggtaaaactgctttatacaaaatgattttaactttcctttaagaaagaagcttgcaaatattctttcatgttcatagctctcctacaattatgtattctttaatttgtatttgttagctgaataaaggttgttgtgcttataattattttgaaatatggcaataattcattggaatatcgataatgcattttgattttaaataagcacagatttcttatactatatatttgatattttaatrttgtctttctccacctgaggactaggatttcctgcaagtttaggtgtaccaagttactggataaacgtggtacattttctgaaagcatccattttacacaaaaaaaattgggaaaagtttatgttaaatgtttctcaattttactttactagaataaaacattctaatgcattttaaaaacccacagtgagactttaaaagaatttttttttttttttttgagatggagtcttactctgtcactcagactggaatgcagtggcatgatcgtggctcactgcaacctctgcctcctgggttcctgccttcagcgattcttctgcctcagcctcctgagcagctgggaagacaggagtgcgcca

SEQ ID NO: 316901 - DNA, 578 bp, Homo sapiens
acaaactaacttatatactctggtgaacacctcgatctcatgataaaaggaatatacattattttcaagaactgattacacttttacaaagttgaccatatactagttaataaagcaaatctgagaacatattaaaacaattatcatataaactacattctttgatcagaatgaaattaaattagaactcagtataaataaagaacaccaaataatgtgcaagtctggaaacatccttcaaagtaacctataggtcctccaaaaaaaaaaaaatcacactgaggaaatatatatttaaaattctatacttttaaataaaaattatgttaagataaatatagttggtattgtgtttgtaaaaaataatgaaaacttgattgcggaatccataacattatgggaaatagcattgaagaacatatattggaaaagacggaaggttgcatcttagctaatcatgcaaatcataaagtttgtaaaacagcatacctaaaatgtaatagaaagtgtaaaaaataagagyagaaattaaaagtagaaaataggcatcaaatgtagggtaacagtagttaaaaatt

SEQ ID NO: 316902 - DNA, 598 bp, Homo sapiens
aaccatgtcacaggtagctcttgagataagagccttcttttagatcctttaaacacagttttggtattttctagcattttaaataaatatgttgatatctaatttgtaacacaagaaagctaattttaaaattcattattgcctacccactctaagagacaatttgagctgaatcattgaaaagctggattgttgcttgcttgtggcccaataagaaacagatgtatcctaagtgagaatgtattcatttacaaagcaagccatgtttcagtctagtcatagccataacacttcaggaactatctttaacatgatctctccctgggagcaaagcatcttttctcatgagaaaatctgtataagacatttggtttcaaaagggactcaaacaactttctcatctggagaacacatgaaaagggaaataagtgggaaaatgcttttgaaaacttccaataaagacatatatcttcttgtagtcacagaaaagattaagttggtggtgtttagtaactaatggcaagaccctattgtttaaaaaarttgcttactcatgcctgcaggggaagtaataaagtattataccaataaaaagtaa

SEQ ID NO: 316903 - DNA, 419 bp, Homo sapiens
tattatgctttgtatggcgcttataggcattagtgccttgatatatagatacccatgggagtcttacctgttctcataacccccagaattctatgcattctgtagtaaaatattttgcaatgaagaaaaaaactcctctttattgatgataacagatcactaccaactctgatctggtgattgtcatgttcctgtctggtcataggataactgtcatttatcttcatrgctgtggtgagagaggaaagttcctccttttcactgtgtgaacgtggccttccattctgaactacaatctgatggatgaagaattgaagtgctagagagaagtagagtataacccaaggaaaaatggagcccatgacggggaaaaaatcctgttaaacattcactaggaaatggttaaaggtccaaatttg

SEQ ID NO: 316904 - DNA, 542 bp, Homo sapiens
gatgaagaattgaagtgctagagagaagtagagtataacccaaggaaaaatggagcccatgacggggaaaaaatcctgttaaacattcactaggaaatggttaaaggtccaaatttgaggtcagacagacatgggttcaattccttcaccatcctagtcactattccttggaaaatacatcartcacttctgagctcttggctcagcctacaaaataatagtgttacttattttgtaaacatgtcaagataataagttttctatattatacattttatcatttcatgtttaataacaagtagaagaaaatatcaatggtcagcaaaagaaaaaacaacactaaagaaaatatgggccaagctagtaagtcataaatttccattgaaatgtaaatgtaagttagagtctatgaacctcaggtgtgggcaaaggctatgagaaactgtgttgtattaatccttttatctagagatgatagtcaaaatctttaacaaccagtatggaacaaacatcaacaaataagaacgggtgctgaccataga

SEQ ID NO: 316905 - DNA, 542 bp, Homo sapiens
gatgaagaattgaagtgctagagagaagtagagtataacccaaggaaaaatggagcccatgacggggaaaaaatcctgttaaacattcactaggaaatggttaaaggtccaaatttgaggtcagacagacatgggttcaattccttcaccatcctagtcactattccttggaaaatacatcaatcacttctgagctcttggctcagcctacaaaataatagtgttacttattttgtaaacatgtcaagataataagttttctatattatacattttatcatttcatgtttaataacaagtagaagaaaatatcaatggtcagcaaaagaaaaaacaacactaaagaaaatatgggycaagctagtaagtcataaatttccattgaaatgtaaatgtaagttagagtctatgaacctcaggtgtgggcaaaggctatgagaaactgtgttgtattaatccttttatctagagatgatagtcaaaatctttaacaaccagtatggaacaaacatcaacaaataagaacgggtgctgaccataga

SEQ ID NO: 316906 - DNA, 588 bp, Homo sapiens
caggtttttgacaaacatagctacagactttttaatattatatagatcaacaaatactctagtaaattgcccatctgttttgttcttaggggcactgtgatcaattagctaccaccaaggatcctgcagaataacacattctgattaccaggactttttgctgtcctttgtggtagatgcaccccccgccccccaccaacccttgtgtttggctgttaagtgctgctgcgggcctctgctacgctgggtgtcattgtcctcactgaaatcaggaaactcctatttcaaatcaaaacccccaatgacaatactctgcctacaaagggggaacaaccctagaattttcaaggatgctggtactcttctctctagtttatttctcagtgcctcaataaagggagcatcttcygggtagagctgccagatttagccaaaaacaaacaaacaaaaacaaaatatttccagttaaatttgaacattggataagtaccaaaattcagtataagtatgtccctgctctagccctgagttttccccaggccagagttagttcatagctgtcaggcagagtacagagagcagggcaag

SEQ ID NO: 316907 - DNA, 491 bp, Homo sapiens
agttatctcatgggggactgccaaggaagttgagcagacagagcgtctccctccagctgtctcctaccctccactgcatcagcatttctaccaaagcacttcactcttgtctgaagattacactggagttctatgtaggatcttttgkgttgggggggcagattctgccagtaaaaaatgtaccaggatgcacttacattgataacacaggcccttagagcctgctccttgattcttctccatgtactctatcctgatccccaggtagcctcctgtgagacgtccctggttatcatatcatatctatgacatggacctctaagagattatctaaagaaagagaagcacaaggccaaataatctaagaaaaaaagccaatcaaaaattgtgcatgctatgtaaaaggaaaaggttttataatttcttgactctttccaactgaggcccacttgtggaccttaactgggagtagactccttccccccatgggg

SEQ ID NO: 316908 - DNA, 420 bp, Homo sapiens
ctcataaaattttaatagaattggacatatggctaaaaatatcatctgttactgtaattattaagcaactttatgcttcagaacagaatcaagtgaggttgggaaaaacaagtccttagagaaaagttacttgcttgctaattcagtgtgtatggacagagttgtccttaactcaatagtctaacacaggtttgaagtaagcataagagacttagagaattgtagtcccttttcctggggatttagtgttctgtgacaaatagaactcacatatttcttcytgcatgataaaaagtcaccaccagcatttaatgatatccagaatttttaaaaagaaacagctaaaaaaaaaccctaagtatttgcaaaatatacattgatgaacctcctcttcccttattttactatttgtttcatctt

SEQ ID NO: 316909 - DNA, 653 bp, Homo sapiens
tactatttgtttcatcttatattttcaatgtcaaaaaatgcaaaacttcaaaatagtgacagcttaataataactgccatttctttaatgcttaacaaggcacattgccaaatactttacatattgtcgtgtagctagtgagatgtaacttttttcagtcttgagaagcttccagatagttgtgtctgaatggaggcagcagatcccttagagtagatcttcagtggagaggactccgtttcctttcttggatttttgaaggtatgcaaatgcaccacgagtaagtggtaatcattgtctttgaggaaggatgtaacagaatcttctacaaccgaacaaagtcttctcttcccaatgtcctggcattaagaaaagtttagtaaatttactcagaaaattaaaaatgctcatttggggagaaataagaacaagatccaaactctctctttttgaggctcaactctactaaaatttcaatgataaatgaaaatggcacaaaccaagatatttatgtaggaaatgataccaaggaccacraagggcaacttggctttaaggaagagggcatagaatggagacctggatttgacaccagatctgaccacttttgtgcaaacttgacttcagaagaacttgttactagtaattggatt

SEQ ID NO: 316910 - DNA, 619 bp, Homo sapiens
gattcattttgttctgttgggttttgatagcttttttgtgtatcttaggtactagtcatttattgaacatacggtctgctaatcttttctccattgtgtagcttgtctttcatcttttttcaacatgggctttcayatagcaatcgtttttattttgatgaagttcaatgcatcaatttttccttttatggattgtatttcatgcatggagtctaagaactctttgcctagccctaattctcaaattttccttgtgttttcctaaaagttttgtaattttacattttacatttatgtttacaatccatttttggttaatttttctttgaggcatgaagttttcttgcctatgttcatctttttggatatggatgtccaattgctccaggatttgtcaaaaagactgctatcctcccaccattaaattgtttttgtacctgtgcaccatacgaaacagcacattcctatgggtttatttctgggttctctattatgcttcattgttacatgtgtctatctctctgcccatgccattccaaataaaccatagaattggtttgtatatttaattaattaattaattaatagtgaaagaaattgcattaaacctatagatcaa

SEQ ID NO: 316911 - DNA, 619 bp, Homo sapiens
gattcattttgttctgttgggttttgatagcttttttgtgtatcttaggtactagtcatttattgaacatacggtctgctaatcttttctccattgtgtagcttgtctttcatcttttttcaacatgggctttcatatagcaatcgtttttattttgatgaagttcaatgcatcaatttttccttttatggattgtatttcatgcatggagtctaagaactctttgcctagccctaattctcaaattttccttgtgttttcctaaaagttttgtaattttacattttacatttatgtttacaatccatttttggttaatttttctttgaggcatgaagttttcttgcctatgttcatctttttggatatggatgtccarttgctccaggatttgtcaaaaagactgctatcctcccaccattaaattgtttttgtacctgtgcaccatacgaaacagcacattcctatgggtttatttctgggttctctattatgcttcattgttacatgtgtctatctctctgcccatgccattccaaataaaccatagaattggtttgtatatttaattaattaattaattaatagtgaaagaaattgcattaaacctatagatcaa

SEQ ID NO: 316912 - DNA, 217 bp, Homo sapiens
ggaaaatgggggtgggagtggcaggggtaggtagtgaggcaagtggtcacattcttgtgaggttgtcttagcactcactgagtccacatgttacctgtgaaaggagcagggagagaagcagtcaattatacattcatctggtgctcagtagatctgcattttacataggataaagtragcatagagaacaggagttaaatatacatttatctcaggg

SEQ ID NO: 316913 - DNA, 530 bp, Homo sapiens
aaataatttttttaaagacaaaaaccacaacaacaaagacatcaggagacaagccatcacaatggcttcatgtcaatgatttctagaggatggaaagcagatggaagagtgattgagtgtgacagaggaggccacagctcacagaacacataggggtggcaggcttaagaagagacccattctgtcctgtgcagccctggagcagtccagaacatgccaccggtgaaagaatagaagcaagacttgggctggaaacagggagattgattggaagggaatgaacataactgttggtataccaccacactcacccccgcattttgaatttctgacacaaaagaaaaatcctccatagaaactgagacctacactctccagcttctagagattgcctagtataaataacatctaccttcctaagaagmactttaatgtaaaatctataagttggcaaggcctacccatgtactaacagctttcaattaactttttagtgtctcattcctaaagataaatagacaatttaagat

SEQ ID NO: 316914 - DNA, 468 bp, Homo sapiens
tgccttgcctgagcccatcactgtctctgcttctttgctccccatcccacccttggcattggttatgagtcaggcttctgctctggtcctttcgaggtcttgttctgggaagattccctgaccccacttccctccatgactggggtcctgtcttccccttcggtggcccttccctgaggcctggagttctgctgctgattcacagcttccctagtgacgaattcccaggttgtttcacataaactctccacgtaattcctgtttgataataatctggggacccaggccactgactacacttgtggctggtcctagtccatatgttggaactctttttcctcaccttgagccactggagttgccaatgggggaatcatgtttttatctacctagataaacatccrgtttagtatctgaggcaaatctcccagcccattttatgcctgcatgtgcatgtccattgccagc

SEQ ID NO: 316915 - DNA, 594 bp, Homo sapiens
agtagaaatgctccacaaggctaactcgactgtttttctgtttacatcttgacattcatgcattctaccaacactctacttttagtttgctaatgagtaatgaactgcaagcaaaggagctatgggttgccctatctttccctttcttctatatgattttctgcaggaacggttggctaatatagggaagtaataagaggtggaaaaaacgagagtttcttgctcattcatgtttcttacaacatcattgctttctttatgcattcagagaaagttctatttggaaggtgaggcatggmctcttggaattgcaagtgccactgcttcctcagtagtacatgtaacatgcttaccttgtactataattttgagtcttgctgaactctcctgcattgtgggtgcactggaattctgtgatctttggcattgcaaattatttatgcgaatggggcagtaaggaatggctgacatgcattggcttagttcagctgctataataaaatgccatagacagtgtggcttaaaaacaacagaaatctatttctcacacttctggaggctgtaagtccaagatcagcgtgccagtgtggtcag

SEQ ID NO: 316916 - DNA, 598 bp, Homo sapiens
aaccatgtcacaggtagctcttgagataagagccttcttttagatcctttaaacacagttttggtattttctagcattttaaataaatatgttgatatctaatttgtaacacaagaaagctaattttaaaattcattattgcctacccactctaagagacaatttgagctgaatcattgaaaagctggattgttgcttgcttgtggcccaataagaaacagatgtatcctaagtgagaatgtattcatttacaaagcaagccatgtttcagtctagtcatagccataacacttcaggaactatctttaacatgatctctccctgggagcaaagcatcttttctcatgagaaaatctgtataagacatttggtttcaaaakggactcaaacaactttctcatctggagaacacatgaaaagggaaataagtgggaaaatgcttttgaaaacttccaataaagacatatatcttcttgtagtcacagaaaagattaagttggtggtgtttagtaactaatggcaagaccctattgtttaaaaaagttgcttactcatgcctgcaggggaagtaataaagtattataccaataaaaagtaa

SEQ ID NO: 316917 - DNA, 587 bp, Homo sapiens
ttggcttattgttactaactccaaacaatcggtaacagagttatgtagtcctttaaattttacaagaagctttcaaagatgtctcatttgatcctcttagtatcttagttgagcaaggtgggccaggcaatgctatcaccattataaaatgggaagttccaggctcagacaggttgaattgccaagcaagtaactgacaagggtgatctagatcttttagtttgacatggtgcagctcttttcactatgcattcactgtcagtggwcatattacatttatataaggtggacaaaaggggtttagtttcattaatcattgacttcaaacacagcaataacaaccaccacctcaaaaacaatattaactaacagtttgtgaggacttaacattttgcaatcattgctttaagcatcacacttgcaaacctgtggggtaggtaatatttttaaccttctcagcactggagtatattgatctgttatttttcctgttttacaagtgaggaaactgtagttcaaatacattaagtaatttgtccaatggttgaaaacaggcagtctgactaaagaatctgtacaattaactc

SEQ ID NO: 316918 - DNA, 610 bp, Homo sapiens
atattctatttgtaattcaaaactctatttctcctggcccttttgtaaccctctaagaaacacttaactgtctagtctggagaaatatctaaatgttatttacctatggaacattgcattgaatttgtagatgttcattgcattctaaaaatatttggaaaattctagtttgtaaaaattgataatataatgttcgaactgaccatagggctaatatttgaatgactcgaaagtattaatcaaatacattacaagtatatgtaggtacatgcattaaagtttgcagtgttatgtttggacgtaaagaaaaatatyttgaatgggatacaaaaggaagctatgaagagtacattactggaaattctttaaaagtagccaatggcatgattcacttggattgggaggtgaatgcaggaacatcaattttacttttcatctttgtcattaattgtatgattttggatacttaatccatcagcattttacaatcctcttttataaaaccataataataaagtagaatgccttaaaatgtgtaatactagaagtagttatttaaacaaaaggtcagaattaactaatcttgggtgggagctatactaggaaccct

SEQ ID NO: 316919 - DNA, 610 bp, Homo sapiens
atattctatttgtaattcaaaactctatttctcctggcccttttgtaaccctctaagaaacacttaactgtctagtctggagaaatatctaaatgttatttacctatggaacattgcattgaatttgtagatgttcattgcattctaaaaatatttggaaaattctagtttgtaaaaattgataatataatgttcgaactgaccatagggctaatatttgaatgactcgaaagtattaatcaaatacattacaagtatatgtaggtacatgcattaaagtttgcagtgttatgtttggacgtaaagaaaaatatcttgaatgggatacaaaaggaagctatgaagagtacattactggaaattctttaaaagtagccaatggcatgattcacttggattgggaggtgaatgcaggaacatcaattttayttttcatctttgtcattaattgtatgattttggatacttaatccatcagcattttacaatcctcttttataaaaccataataataaagtagaatgccttaaaatgtgtaatactagaagtagttatttaaacaaaaggtcagaattaactaatcttgggtgggagctatactaggaaccct

SEQ ID NO: 316920 - DNA, 596 bp, Homo sapiens
cacaacaaacacgccctgttgccttttgcttgtgttaaccactgagggcagatctctgaataataatacatttagtgggtccacaagagctgcatttcctctgctccagaattcatgcaaggagcacggctggggcttctccactgtcattgttatggcctcaaatgaaggccttgtcaccaggcgggggcgggaaggcactggagcgcagcagcattgagagcatccgaattccctcctctgtccctgattggttgaagaactggggagcaccgaccagccccctgcggctcgactcgccattggctgggaagaggtggcaatcagggcgggccaaggcggctgttctcgctccagctcgatgctgcctccccggcccggttgcgctgtagccgctgccgcctctgcctgggtcccttcggccgtacctctgcgtgggggctgcctccccggctcccggtgcagacaccatggtaagtgctctcagccgggtgcggcccgaacctcacccctcctckgccggcctggcagcgagggaactggccgcgcagccggagcttggctcgggggccctgggcgctcactgccggccacgg

SEQ ID NO: 316921 - DNA, 218 bp, Homo sapiens
actctattgttagaatgacaatttyatatgtcaaaagacaattactagattggattcaggacatgattgaatcctttagcaagtttctaaaaggcagggatgtgtggtgctgtttaaagtcagtgtcatagactgtaactcagtgtttagaatactgaaattaaatttgaaatccagctgagctctcaccatgtcatgctatttcgaatgtaatatgt

SEQ ID NO: 316922 - DNA, 575 bp, Homo sapiens
ctgcctcaaacactcagctattaattattagagctgggatttgaacacagataaagttgtaattatcatgttatgtgttttcctccaaagagaaagacctataaccttcttctttccaaagacaaccaatttagcaaggacatgtgccatgtttatgtgtattagtactgcctgctgctttttcttttttcttggaatgttcaagcatgcgtacaggtgatttttgacaacaatatttttaaaggcgaattgacatgaagcatatacacaagtgtctaagtaaatkcatttgtctgttaaagctgctgaaaatggctcagcagctcaaatgaagatttgtaagttttgtggatatgttttcaaaattggagaaattaccattaagggtctcttgtgactcaaaattggagaaattaccattaagggtctcttcctgacaattgcatgtcaggaagaaacatgcaattatgtatcaagactgttgttgtttcccctaaaactaaggtatgggtgtcactcaggagagcatttattgttactgtttacagtgattggatgagtgagtgaacacattg

SEQ ID NO: 316923 - DNA, 636 bp, Homo sapiens
tatgtaaatatggcaagtcatagtatttgaaaatagtgaaagactatgttcacttgggatttggtaggacttttaaaaataaaaataatagtagtaagcagcaacagactgtaatacaaactaggatgcatgaagattgtagtgctgttggttattatttgatagatgagcactcttgaacacagtttaatccaatttrcttagagtttatatgatattttttgtcatctaagaagcattgaaaaaaatgacagtatgtccaaaattttcagaaaaatcttaaattgtggttctcagggaaacctgtggtttttctcacatgtaaaataagtacaatttaaataataaggtaattgcataatttccctattatgtaattatataattacataataataatgtaacaatgtatacataatgcaacaatttaaacaaaattggagctcaaaaaataattctgaaagaatgaatgagtctataaaatttggtgaatgtacttggctgaatttggataatttaagcccatataaattctacttgtcacaaaaataaattttaaattactagaagtgttattcttgcctttgctcttgaggaaagaacttaaaagttatgggatagcaaagtgggagatgc

SEQ ID NO: 316924 - DNA, 636 bp, Homo sapiens
tatgtaaatatggcaagtcatagtatttgaaaatagtgaaagactatgttcacttgggatttggtaggacttttaaaaataaaaataatagtagtaagcagcaacagactgtaatacaaactaggatgcatgaagattgtagtgctgttggttattatttgatagatgagcactcttgaacacagtttaatccaatttgcttagagttyatatgatattttttgtcatctaagaagcattgaaaaaaatgacagtatgtccaaaattttcagaaaaatcttaaattgtggttctcagggaaacctgtggtttttctcacatgtaaaataagtacaatttaaataataaggtaattgcataatttccctattatgtaattatataattacataataataatgtaacaatgtatacataatgcaacaatttaaacaaaattggagctcaaaaaataattctgaaagaatgaatgagtctataaaatttggtgaatgtacttggctgaatttggataatttaagcccatataaattctacttgtcacaaaaataaattttaaattactagaagtgttattcttgcctttgctcttgaggaaagaacttaaaagttatgggatagcaaagtgggagatgc

SEQ ID NO: 316925 - DNA, 545 bp, Homo sapiens
gaatattctgtcagagtctccaaaattttaatctatagatcagtgttgtttcaaaataaaatgttaatagcaaaatgacaaaacataagktatccatatccgtcaaactatttatcccattcctaggaatttgttctgtttttacatagaagtgtaagaagctataaagatattcataacattttttatacttgtggaaaaaataaaaacatctaactacctaccaagacttcaatatgtctacaatgcaattttatgcagccatggtatagaagtataattatgatatgaaaagatatccatcaaatattcactcaaatgggttttaaagcagtatgttctatatataagtatattcaagcatgaacaacttgaaaattataatagcagtgattatctcaggatagtggaggcttattttctctttttagtttttcctttcctgtactttatatatatttttacaattagaaattagaatgcagaaaatatatagtagcatttatcagaggataagacaatgtttgtatattacgttttcataa

SEQ ID NO: 316926 - DNA, 628 bp, Homo sapiens
ttcctggctgttgtccttgagctctccactgctctactctgctttatttttctccaaagtataatacttascattatatgttatttattaattttatgttgtgtctgttttcccagaatatatgtattgcaagaagtcagggatttttgtctgttttactaaagattgtacccctagtacccagaacaatgtctggcacctaatagggactcaacaaaacttgctaaacatctattaacccaaaagttatttaatttattatatttaatggcaggtattgtattgagcagtagagtactatgtactgttaatcttgctaaaatatacttaaatatatcattttaatttagggagggggatatgacatcatttctgctctctcactagaattttaggtacatgatgatgtttaaacaaatttgcccaaaaaaaccaaattctatttcagagataaagccattgtttatacaattattatacttatagtagctatttttttaacttcaacttttctcttctgtctttcttgtttttgttttccagaaaagaggcacagttagatgaagaaggacagtttcttgtcagaataatatatgatgactccaaaacttatgatttggttgctgct

SEQ ID NO: 316927 - DNA, 628 bp, Homo sapiens
ttcctggctgttgtccttgagctctccactgctctactctgctttatttttctccaaagtataatacttaccattatatgttatttattaattttatgttgtgtctgttttcccagaatatatgtattgcaagaagtcagggatttttgtctgttttactaaagattgtacccctagtacccagaacaaygtctggcacctaatagggactcaacaaaacttgctaaacatctattaacccaaaagttatttaatttattatatttaatggcaggtattgtattgagcagtagagtactatgtactgttaatcttgctaaaatatacttaaatatatcattttaatttagggagggggatatgacatcatttctgctctctcactagaattttaggtacatgatgatgtttaaacaaatttgcccaaaaaaaccaaattctatttcagagataaagccattgtttatacaattattatacttatagtagctatttttttaacttcaacttttctcttctgtctttcttgtttttgttttccagaaaagaggcacagttagatgaagaaggacagtttcttgtcagaataatatatgatgactccaaaacttatgatttggttgctgct

SEQ ID NO: 316928 - DNA, 451 bp, Homo sapiens
tgctttatccaataggacagccactagtgcatgaggctactcagcatttaaaatgagatgtgcaaactggggagtggctcacacctgtagtcccagctacttggaggctgagatgggaggatcacttgagcctgggagatggaggctgcagtgagtgagctgtgatcacatcactgcactccagcctgggtgacagagtgagaccctgtctctacatacatacatacatgtgtacatacatacatacacacaacaaagtgcaatgtgctgcaagtgtaaaatatacaccagatgtcaaagacagtacaaaaagaataaaagatggctcattcacaattttatattgatkgatttcatgttaaaatgttaatattttggatatatttggttatataaaatgtagttaacatagctttaaattatacacaattttattttatttctctttcaa

SEQ ID NO: 316929 - DNA, 608 bp, Homo sapiens
gaaacatcccaagatctttaaaaatgtgacactttattactcaaaggaatgataaattgtcttttgttttctaaatctgtgaagtgtactatgtctgaaattccagtagagtaccccagaataccagaactaatttttcttttataaatgataaatgcaaggtgataaaataaactagactgacagggagcagaattcctgagtagaaaaaccacattcatttgcttgtagaaaaacaataaaatgatattagaacattaagaaatgaaattattaaattaaaacctttaggtatctcaagatatcaaaatagatgaatggacctactctctatatttttcctgttttttgattttatgaagcctagaagaatgaatcaaagcatatttcagatttacatcattgtttcctgggaatctacttgtgctgcaatrtaagagtttacattttttcagtgtcttttttactttcatacatatggacatacttctttgcaattggccacacagctctttactttctgtaagtgcttctgtgggtatatttagaaataacacagaatatcagttttgatatgaaactcttattccccagaatacattgttaga

SEQ ID NO: 316930 - DNA, 568 bp, Homo sapiens
ctatacagtttttatttcaataaaaatattaacattatttttcattttattaatgccattattttgtaaatacattttacaattttgcctatttgctaccattataaattttcactgactcctcatagacagcatattcttaaatgctatatttctttttaataccaacagagtgacaggaaataaagactgggcatggaaaggggaaacagttaaatattgaatgtcatcagcttatttaaagagctctgaatcatttagggatgatagacatgtatacaagtaatgaaaatatgcgatattcataatgaagaaatatattcaaatgcagaaataatacttagagaaagagtaacttgaaagaaaagaggtgaagtggggatagttgttatgcttattttggggggagagttaggaatactcagaaactacattgacactgtcatcttcccagaatcctgcatatatttatttagcatctactttgggtaggyactgctcaagatatttgagaaatgtcattgaacaaaacatctctgcctttgaatacctcatattccaattttta

SEQ ID NO: 316931 - DNA, 605 bp, Homo sapiens
tcaaggaaagaactggtctcagaatttttgccatagccaccagccacaggtggctattgagcacatgaaatgtggcaggttcaaatcgagatgtgagtgtaaaatatacaccagatttcaaacagtaagcactaaaacagatggaaaatagctcctgaacaattcttatrttgattgtttggtcaaatgaaatctattcttaaaattaaattttaaggccaggcgtggtggctcacacctgtaatcctagcactttgggaggcagaggcaggcggatcacctgacgtcacgattgtgagatcaacctggccaacatagtgacactccaacttcattaaaaatacaaaaattagccgggcatggtggtgcacatctgtagtcccagctacttgggaggctgaggcaagagaaacgcttgaacaagggaggtggaggttgcagtgagccgagattgtaccactgcaccccagcctgggcagtgagccgagatcacaccactgtaccccagcctgggctatagagtaagactccgtctcaaaaaaaaaaaaaaaaaaaactaaattttgcttatttctttctacatttttacaggaaaatccaaaatt

SEQ ID NO: 316932 - DNA, 605 bp, Homo sapiens
tcaaggaaagaactggtctcagaatttttgccatagccaccagccacaggtggctattgagcacatgaaatgtggcaggttcaaatcgagatgtgagtgtaaaatatacaccagatttcaaacagtaagcactaaaacagatggaaaatagctcctgaacaattcttatattgattgtttggtcaaatgaaatctattcttaaaattaaattttaaggccaggcgtggtggctcacacctgtaatcctagcactttgggaggcagaggcaggcggatcacctgaygtcacgattgtgagatcaacctggccaacatagtgacactccaacttcattaaaaatacaaaaattagccgggcatggtggtgcacatctgtagtcccagctacttgggaggctgaggcaagagaaacgcttgaacaagggaggtggaggttgcagtgagccgagattgtaccactgcaccccagcctgggcagtgagccgagatcacaccactgtaccccagcctgggctatagagtaagactccgtctcaaaaaaaaaaaaaaaaaaaactaaattttgcttatttctttctacatttttacaggaaaatccaaaatt

SEQ ID NO: 316933 - DNA, 605 bp, Homo sapiens
tcaaggaaagaactggtctcagaatttttgccatagccaccagccacaggtggctattgagcacatgaaatgtggcaggttcaaatcgagatgtgagtgtaaaatatacaccagatttcaaacagtaagcactaaaacagatggaaaatagctcctgaacaattcttatattgattgtttggtcaaatgaaatctattcttaaaattaaattttaaggccaggcgtggtggctcacacctgtaatcctagcactttgggaggcagaggcaggcggatcacctgacgtcacgattgtgagatcaacctggccaacatagtgacactccaacttsattaaaaatacaaaaattagccgggcatggtggtgcacatctgtagtcccagctacttgggaggctgaggcaagagaaacgcttgaacaagggaggtggaggttgcagtgagccgagattgtaccactgcaccccagcctgggcagtgagccgagatcacaccactgtaccccagcctgggctatagagtaagactccgtctcaaaaaaaaaaaaaaaaaaaactaaattttgcttatttctttctacatttttacaggaaaatccaaaatt

SEQ ID NO: 316934 - DNA, 613 bp, Homo sapiens
ccagtaattattcctataatagtgtcyggcaacttttatgccaatccattatttcatcagatcgtacacatgtgcactaattaaatgcctgcagaaagaagactgtaagttaattttaaaaaataactcgaaggattcaaatgtcaattttaaatgacatttagaaattcataggctaacaaaccacagcatacaattcagttatacaggtttctgtcagttaccactaagatgtcttgaataaattaatatatttttctaaatcactggcagagtttctgccattattaatgttgtagaaaaaaaccgagtccttgtcacatgaccatgaaaagttagacacacagacactttgaaggatgaggggggaacaaaatttattggggggaaaggagaaaacactctcagcaaagcgtgaagggttcccattaataggcccccatctcacagattgaatcccagtcactacccaggaataagagaagacagtctcctcccctctgcaaagggcgctcaaacgtcctgaggctccactctgtcctcctagtgcttaggtgggcattaatcagaaagaatcagttggaaaaggacgggcctcatgcccgaccctgca

SEQ ID NO: 316935 - DNA, 613 bp, Homo sapiens
ccagtaattattcctataatagtgtccggcaacttttatgccaatccattatttcatcagatcgtacacatgtgcactaattaaatgcctgcagaaagaagactgtaagttaattttaaaaaataactcgaaggattcaaatgtcaattttaaatgacatttagaaattcataggctaacaaaccacagcatacaattcagttatacaggtttctgtcagttaccactaagatgtcttgaataaattaayatatttttctaaatcactggcagagtttctgccattattaatgttgtagaaaaaaaccgagtccttgtcacatgaccatgaaaagttagacacacagacactttgaaggatgaggggggaacaaaatttattggggggaaaggagaaaacactctcagcaaagcgtgaagggttcccattaataggcccccatctcacagattgaatcccagtcactacccaggaataagagaagacagtctcctcccctctgcaaagggcgctcaaacgtcctgaggctccactctgtcctcctagtgcttaggtgggcattaatcagaaagaatcagttggaaaaggacgggcctcatgcccgaccctgca

SEQ ID NO: 316936 - DNA, 596 bp, Homo sapiens
atcctttccccccaaaaaatgattttcaatactattgcttcatactgttttaagtagcatgtgttctaacaaaaacagagattggttgcagttatccttgactgaaataaaatgtagatattacttccagaatggcaaagtgaggaagtccataaactctatccccttcaaaaccaaccataactggtgaaaaaatatttatcttaaaaggcaaacttttcttttaaaaaagaaacatttaaatagtatctcctcaaattcaagtctactggaacctcagaatgatcatattttaaaattgggtcattacaaatataattacataagttgaggttatactgcactaggatgagccytaaatccaatgactgaagttcttataaggagaagagagaacacacagagatacagcagggaaaattcatgtgaaatagaagcagaaattgataaggttttgccacaagccaaggtatacttaggacaaaaggcataagacatagagaaaacaaaaagtaaaacggcagatgcaaatctaactatattactaatgaaattaaattagaatggattagacaatccaattgaaaggcaaaggt

SEQ ID NO: 316937 - DNA, 590 bp, Homo sapiens
gatttgagagccttgaaagatcactgtggtcctttagttagagtatgtcctaatggaagtcaggtgttcgatggagtttagctcaggtttaaatcacaatgggtccatttcgtcactgaacccatcccgtggttatttccccagttccagaatgcataattggcatatacataattaatagctggaggaagctccacattggttccctracctatggaatgaagacctggtaagaaaggccattggaacttcctctacctaggaaaatactaaaccaaaagtaataccacatacctggagggattagaaaaattagtgccaatataaagaagaaagatacagtggatggtgattctcaccatatacctgttcaactctcctatttggcccgtgcagaagacagacggctcttgtagaatgacagtggattatcttaagcttaattaggtcattacttcaattccgctgctgtaccagatgtggtttgattgcttgagcaaactaacacatctcctggtaactggtatacagctattaatctgacaaatgacttttttctccatacctgcctataaggcccaccagaagca

SEQ ID NO: 316938 - DNA, 521 bp, Homo sapiens
agtttgttttcagctggcaaggacagcaatacaccttcactctcccacttcagggktatatcaactctccagctgtgtgtcataatttagtttccagaaatcttgatcacctttcccttccacaaaatgttacactggtccattactttgatgacattatattgattgaacataatgagccaaaagtagcaaccactctctacttattggtaagacatttgtgtatcagtgggtgggaaataaattggactaaaattcagagccgttctatctcagtaagctttctaggggtccagtggagtggagcgtgtcaagatattccttccaaggtgaaggataaattattgcatttggccccttctatgaccaagaaagaggcacaaggcctagtgggtctatttggattctgcagacaacgtattgggatatgttgctctagcccatttatccagcaacccaaaaagcttctagttttgagtggggcctagaacaagaaaagacactgaaacaggtccaggctg

SEQ ID NO: 316939 - DNA, 658 bp, Homo sapiens
gttttcaatgcagggtccaatagctatatttacatatacagaaaaaatgaaattagttactaaacataacaaaaaaaacttggtatacctatagcaatgcatatttaccaaaaactggtgaaaaatatattgagagatatgttaaatatttgctgaaaagaaaactacttgtctgtatgtgaaaccccatgaatcattttacacatcaggaccaaaaaactaactccttttattcctcaaaaatcaaaagtggtctcatctaacccaaaaatcacagacttgtcagttattgtcttctcattttgaacattatttactattttttctctctaaacagtaagttcttagtcaaaatttattattttgtcccatctagacaatatggtctatggtacttcactagggtggtctaggagtagattctagggagttccccaagctctggcagtacatgtgtcttgtatggggccatatgcacatttttggaggggtgatagtctatgtcttttatccatttctcaaagcaataaaagtgaagacccactagccaactgtagcagtttcccaagtaaaatataaagatgattcactggggtaggtgaagaaaatactrgaatttctatttatattcatgctcatttagaaaagaaaagctgtc

SEQ ID NO: 316940 - DNA, 523 bp, Homo sapiens
tgacatttaaattttgtcctgatttctaccccaatgtttaaatccaagatattaacattttcataaaactaagtttatgatgatggaaaaaactgcactggtgataaaagaagtgtggcttttaraatatcacttttttttccttttgcttaggtttttctgattgaaatctacacattgataaaacttttgctactattttggcagatactatatatgaaaataaatggacataaataaggtaatgggatagctttggatgaaaaatgtgtaggttatgtgggctagtcaaaacagatgcaggtgtggctgtaataagcaaagctgcttcaagggaagtacagatggcaatcaaatgtacagtgattactgcagcttaaaataagaatactgaatgagtgcacatcatcaatataataaaagaaacatttaaagaggagcaacagttcatcaaagatctactagctgacgtgctaagaacagaagaaaactaaactcaacaaagatgacaaaggattaattg

SEQ ID NO: 316941 - DNA, 590 bp, Homo sapiens
atatctactcaccatttctattacattgtattataggttcaagccagggaagataagcaataaaatggaataaaaagcatcaaggttagaaagaaattaataaaactatctgtattttaaaatggcaaatattgtatacagaaaattattaaacttcactgaaaaaagtagaataaatgagttcagcaagattgcaggataaaagttaaatatacaaaatcatttacacttttatacattggcaaacagcagcagaccagaattgaaattaagaaawgaaattccatttagaattgtgttaaaaagaataaaatacttagaaataagattaacaaaaaaagtgtggacattgttgaagaaatgaaggaagacctaaagaaatggaaagacaccctctgtacatggattagaagactcagtcttgttaagacagcaatactccctaaaactgatctaaaggttcaatttaattcctgtcaaagtcccagatgacttctttacaagaattgacaagctgatcctgaaattaataggggaattccagggacccagaatagccaaacaatcttggaaaagaagaaacaaagatg

SEQ ID NO: 316942 - DNA, 540 bp, Homo sapiens
gacaaaaataacatctaccttgcagaattctaaatgaaatttgttgggtagcttctttttttaaaaaagtgcctagtggaagataggtgttctaaaacattagttccctcctcttcactatcatttgcttctccttgtatccaataaactttccagctagtccaatgatctgtaatgtaacatgattttaaataaaatgtgcaaacaatgcatgatctataagtttagacccaactaagaaataagcagaggagatttctctgacctcatagagatttaggaagcctgatttgcttggaattcacaatatttgtctcccacataagctgaacatatacccttccctcctctggctataygtaagaaattctcattttgcaaaaaaactaaaactcactcatgtgcctcaggaacagagacaacttctctctgaattcctttcaaccctacagagaacttgtgttttgaatttgttttcttgattgttcttgcttctattttgtcatggacatgaatttattctagatacataatagtgct

SEQ ID NO: 316943 - DNA, 607 bp, Homo sapiens
gctgggtaagtaaagatagagagtttggaataggtgagtttgattaattataacaacgttcactctgagcttcagttttcttcaacaaataggttgaaggactgaaactttcattttggttctttcagaaagttagaaagaaactctttgctaccgtacaataaataataatgaattcatcaaatgaacatttcctaataatatagagataaagggcttttgggggatatcaaactggaagcagaagctaaagtattaaaargcaaaacgcaactgttaggagcaagttggtggcagattcaggccagagattaagctagaagaaccacaaatccacttaattaagtccttcttaggagcatttgacaagggtcaggagcagctggcagctgtatgcagatgttcaaagtgatgcacataattagtgtcagttaccttaccccaggcctgatagaagcctctcagaaacaagaggtttctctctgtgcttctgtgcttaggcttagttgtagagaatcagaaccaaatcttagcttcacaacttactggatgtatgaccctttccaagacatgatttataaaatggggtagtaaaataatatttttg

SEQ ID NO: 316944 - DNA, 607 bp, Homo sapiens
gctgggtaagtaaagatagagagtttggaataggtgagtttgattaattataacaacgttcactctgagcttcagttttcttcaacaaataggttgaaggactgaaactttcattttggttctttcagaaagttagaaagaaactctttgctaccgtacaataaataataatgaattcatcaaatgaacatttcctaataatatagagataaagggcttttgggggatatcaaactggaagcagaagctaaagtattaaaaagcaaaacgcaactgttaggagcaagttggtggcagattcaggccagagattaagctagaagaaccacaaatccacttaattaagtccttcttaggagcatttgacaagggtcaggagcagctggcagctgtatgcagatgttcaaagtgatgcacataattagtgtcagttacctkaccccaggcctgatagaagcctctcagaaacaagaggtttctctctgtgcttctgtgcttaggcttagttgtagagaatcagaaccaaatcttagcttcacaacttactggatgtatgaccctttccaagacatgatttataaaatggggtagtaaaataatatttttg

SEQ ID NO: 316945 - DNA, 553 bp, Homo sapiens
tggatccttgatgctaggatgcatccgtcagtaaaaaaataacagaaataarattactggcaataaaccccaaaagagaatctgcagattcccttacaataatggtagtgatgataatatcacccaggaaatgttctaatcctattgttattataaataatgatgccatttaataaagcaagctcttaaatgagcttagtcatttattagcaacatatttaataggatgattcctgtattacaggtcagatttggtttaatcttggctctgtcttgattgataacttgaacaactcaattccataaatgttattgagcaacatattaggtagaacaatatatgtgtactaccaataaaaaagaaatatctcctgccttaaatgtattcatggtgcagtagggcagctcagttaatttcatttcaaagatttgtaaaatgggactatgactttagattgcatgaccccctagagtcactttgagctttacaagtattcaagttgaataatattgaacatcacttattcaatttaattttattatttttcactgt

SEQ ID NO: 316946 - DNA, 553 bp, Homo sapiens
tggatccttgatgctaggatgcatccgtcagtaaaaaaataacagaaataagattactggcaataaaccccaaaagagaatctgcagattcccttacaataatggtagtgatgrtaatatcacccaggaaatgttctaatcctattgttattataaataatgatgccatttaataaagcaagctcttaaatgagcttagtcatttattagcaacatatttaataggatgattcctgtattacaggtcagatttggtttaatcttggctctgtcttgattgataacttgaacaactcaattccataaatgttattgagcaacatattaggtagaacaatatatgtgtactaccaataaaaaagaaatatctcctgccttaaatgtattcatggtgcagtagggcagctcagttaatttcatttcaaagatttgtaaaatgggactatgactttagattgcatgaccccctagagtcactttgagctttacaagtattcaagttgaataatattgaacatcacttattcaatttaattttattatttttcactgt

SEQ ID NO: 316947 - DNA, 553 bp, Homo sapiens
tggatccttgatgctaggatgcatccgtcagtaaaaaaataacagaaataagattactggcaataaaccccaaaagagaatctgcagattcccttacaataatggtagtgatgataatatcacccaggaaatgttctaatcctattgttattataaataatgatgccatttaataaagcaagctcttaaatgagcttagtcatttattagcaacatatttaatagratgattcctgtattacaggtcagatttggtttaatcttggctctgtcttgattgataacttgaacaactcaattccataaatgttattgagcaacatattaggtagaacaatatatgtgtactaccaataaaaaagaaatatctcctgccttaaatgtattcatggtgcagtagggcagctcagttaatttcatttcaaagatttgtaaaatgggactatgactttagattgcatgaccccctagagtcactttgagctttacaagtattcaagttgaataatattgaacatcacttattcaatttaattttattatttttcactgt

SEQ ID NO: 316948 - DNA, 553 bp, Homo sapiens
tggatccttgatgctaggatgcatccgtcagtaaaaaaataacagaaataagattactggcaataaaccccaaaagagaatctgcagattcccttacaataatggtagtgatgataatatcacccaggaaatgttctaatcctattgttattataaataatgatgccatttaataaagcaagctcttaaatgagcttagtcatttattagcaacatatttaataggatgattcctgtatwacaggtcagatttggtttaatcttggctctgtcttgattgataacttgaacaactcaattccataaatgttattgagcaacatattaggtagaacaatatatgtgtactaccaataaaaaagaaatatctcctgccttaaatgtattcatggtgcagtagggcagctcagttaatttcatttcaaagatttgtaaaatgggactatgactttagattgcatgaccccctagagtcactttgagctttacaagtattcaagttgaataatattgaacatcacttattcaatttaattttattatttttcactgt

SEQ ID NO: 316949 - DNA, 615 bp, Homo sapiens
gtatttataatactattagagagttaatgagacatccccatgttgtggtctactgtactttatattttctgtgggtttttctcagaattgggaacctaaaactcaaggttttagagctctgcttatgtgtgaccagttggaagaaacgaaagtcattttgctctctgtgacctccatttactgatgaataactgagccaggggaaagtgtccttcagtgttctcggacatatcaagcatatctgacactaactattcttctttgtcaggcatttcrcagctttgtgtctcgggaatacaaattctgtcatccctcacagtgtcccaactgggcagtttgttttcaagtcggcagtaatgtagatgtttcctaaaaggattttgggtaggtactgctaatgggaggatataaaacaggaggatataatcccttgaacaatcaattattctaatattggcttgtaacacttatcaattgatcttatatctattattgccactcagtaaaggaggatactgaggcctcaggggttaaatatcagtcataagattaataatggtagagttaggacaatttcccacattttcttcaattcagttgaaaaaagaacagtta

SEQ ID NO: 316950 - DNA, 580 bp, Homo sapiens
ccccaccaccaccactttgctatcttttgggcttagaattaagtctttcaagcaagaacgtgggccactctagatctaaacacaaccccaaattctcccaaatcaagaaatctcagtataagcaagtgcttttgcataatcttaactgccatttttgtaatttccttattttttaaagctttttcttttgggcaacgactgggtataggtgcataggcattgtctaaatgtttattgttaaatatagatgaggatgaagatgaggatgttacatgtgaatttaaaggggtcaaatgagagaggcttgtggtgatggaacagttttatgtcccgattgtgattgtgatgrttacatgaatctacatctctgatgaaaatgcatagaatatagacacacacacacacacacacacataaataaatgagtgcatataaaacttgtaaaatctgaataaaggcaatggattacaccaatgttaattttctggtttgatattgtagtatagttatacaaaatgctgccactggaggacattgactgacaagtgcataggaactccctgtacattatttttatatc

SEQ ID NO: 316951 - DNA, 582 bp, Homo sapiens
acattcaaaaagaaaaataaaatttacttctccatagaatgaatatgaaagaatttgcagccatcttcattctaccgcagacttcatcaagcaaaagtaatttgattccggatggaaagtcaaagttgtgaaaagaaatcatgaacaaaaaacctgataactggataagtctataggtataacaataatatgaaacaatgatagtgttgttatgcatgtagaaaaagaaataaaactaaaatatataacaaaagactatatagctagggaggagaggaaaagacttaaaatattttggagtattctgttttattcaaaagaaagaaaaacttcagattaacaggaggtttttgtaagtgaagtatgtatattaaagatatcagagtaactcctaaaatttaaaaaaacagtttgtatagtttccaataagtagattggaaaagaaaaggaatargaagacttcaaaagaaaagaagaaaaaagaggaaatagtaaagatgggacaaatagaaagcagaaagtaagataaaaaataaattcaaccatatcaataattacaatgaatgtaaattaactagttat

SEQ ID NO: 316952 - DNA, 567 bp, Homo sapiens
tttacaacaagcattacaaaacactagtaaaagaaatcagagatgacacaaacaagtggaaaaaacatttcatattcttggatagactcaatattattaaaatgcccatactgcccaaagcaatttacagtttgaatgctgtttgtatcaaactaccaatgtygtttttcacaattaaagaaaactcttctaaaattaatatggaatcaaaaaagagatggatagccaaagcaatcctaagcaaaaagaacaaagccagaggcatcacactatctgacatcaaactagactacaaggctacagtaacaaaaaccacatgatactgatacaaatacaggcacatagaccaaaaaacagattacagaacccagaaataaagctgcacatgtacaaccacttgatcttcaacaaagtcaacaataataagtaatgggggaagaactctttattcaataaagtgtgttgggataactggctagccatatgcagaagattgaaactggatgcttacctttcaccatatacaaaaatcaacttacaataaattaaagacttaaatgtaagacc

SEQ ID NO: 316953 - DNA, 555 bp, Homo sapiens
cagattctctatttcctagatatataatttttatcattttcagaaaactatttaacatgataaagatttctcaactgaaacatggagaaatgatagtatttcctcatgcactttactaataatcatgtagatgtttagtattaaaatttaattggcagtaaatttaaatgacatagaaattttttcaaatttagctcttacctcaatataaataaggtaaatgacttcaagcagaatgacgtcggagccccaggcatgaacatgcaggctttccttcatagctttactagagcacacarcacagaagttaaagagtgtgttctctggattcaaaccacccaggattgaatctctgctctgttacctttacaagctgtatgaactcaggcaagatatttaaattctctgtgggttttcttaccctgaagggtacatatgggtgttgagggcctaaagcttaaaaaatttggaaggtatcttttaagaaaatgaatacaaaattacaactatgaaaataggtctctgattttgatatttcaattttattaattctag

SEQ ID NO: 316954 - DNA, 578 bp, Homo sapiens
ttaacagcactaaagaagagagtaaacttctatgtcaaggctttgtaaaaccattaggtcatgtgtttttatcatttttatctaactagaataaaagtgccccatctgtttatcaaaatrttgaggctaaaaagcaaaataataataatcatcatcatctaatttgcctctatcagctttcaagtacaaaatctataactgaatgtatacacgttttttagatgttcctgagatttaccaaaatttttggtctatcagaactgacattctttactaactataactccaaagcacaggatagagactggaccagttttctgaatgggctttgtaagcattcttttcacagaagctcagtcctcattcaggaataacagggttgtccaatctaattaaatgcaatttactctcccatgtgacatttctggcatggtcatggctattaaattggattatccaattagatcttggtgaaaatgaagatagatttttttaattgaaactttacaaataaccacattattatggaaagtaaattgatttaataaaggcccagatagttttgtagacagggccaa

SEQ ID NO: 316955 - DNA, 578 bp, Homo sapiens
ttaacagcactaaagaagagagtaaacttctatgtcaaggctttgtaaaaccattaggtcatgtgtttttatcatttttatctaactagaataaaagtgccccatctgtttatcaaaatattgaggctaaaaagcaaaataataataatcatcatcatctaatttgcctctatcagctttcaagtacaaaatctataactgaatgkatacacgttttttagatgttcctgagatttaccaaaatttttggtctatcagaactgacattctttactaactataactccaaagcacaggatagagactggaccagttttctgaatgggctttgtaagcattcttttcacagaagctcagtcctcattcaggaataacagggttgtccaatctaattaaatgcaatttactctcccatgtgacatttctggcatggtcatggctattaaattggattatccaattagatcttggtgaaaatgaagatagatttttttaattgaaactttacaaataaccacattattatggaaagtaaattgatttaataaaggcccagatagttttgtagacagggccaa

SEQ ID NO: 316956 - DNA, 578 bp, Homo sapiens
ttaacagcactaaagaagagagtaaacttctatgtcaaggctttgtaaaaccattaggtcatgtgtttttatcatttttatctaactagaataaaagtgccccatctgtttatcaaaatattgaggctaaaaagcaaaataataataatcatcatcatctaatttgcctctatcagctttcaagtacaaaatctataactgaatgtatacacgttttttagatgttcctgagatttaccaaaatttttggtctatcagaactgacattctttacyaactataactccaaagcacaggatagagactggaccagttttctgaatgggctttgtaagcattcttttcacagaagctcagtcctcattcaggaataacagggttgtccaatctaattaaatgcaatttactctcccatgtgacatttctggcatggtcatggctattaaattggattatccaattagatcttggtgaaaatgaagatagatttttttaattgaaactttacaaataaccacattattatggaaagtaaattgatttaataaaggcccagatagttttgtagacagggccaa

SEQ ID NO: 316957 - DNA, 578 bp, Homo sapiens
ttaacagcactaaagaagagagtaaacttctatgtcaaggctttgtaaaaccattaggtcatgtgtttttatcatttttatctaactagaataaaagtgccccatctgtttatcaaaatattgaggctaaaaagcaaaataataataatcatcatcatctaatttgcctctatcagctttcaagtacaaaatctataactgaatgtatacacgttttttagatgttcctgagatttaccaaaatttttggtctatcagaactgacattctttactaactataactccaaagcacaggatagagactggaccagttttctgaatgggctttgtaagcattcttttcacagaagctcagtcctcattcaggaataacagggttgtccaatctaattaaatgcaatttactctcccatgtgacatttctggcatggtcatggctattaaattggattatccaattagatcttggtgaaaatgaagatagattttttwaattgaaactttacaaataaccacattattatggaaagtaaattgatttaataaaggcccagatagttttgtagacagggccaa

SEQ ID NO: 316958 - DNA, 586 bp, Homo sapiens
atggaaagaatattcacatttggaaatattttgaccayagagccaacaggatgtgctgagattagaaatagaagttgagattttaaaaaaataataatctaaaatttttgacctaagcaactaaaaaaaaaaatggagcttctatacagaaatggagaagatgttggaaaaacacactctatatgggaaagttgaagtttggttttggacatattaagtctgtgtggtcaaagtggtgattttgaatagatgattgaatatatgagcctggagttcagagaagaaactcatgtcagagataagaatttggggatcctcagctttcgtaactaactgagatttccaagggtgtgggtgcaaacaaaggagaggccctaagcctgagtgatacatcattttgtgttttgtgaatagggagataatgaggaataaacaaagagtgtggatgggttatcattgtttttggagaataattaaggaagtgttttgcattacattcaaatgaagagttttaatcaaaaaggaaagagtaatcaactctgttaaaaatatatcaaaaaagataagggcagagaattgacttacc

SEQ ID NO: 316959 - DNA, 586 bp, Homo sapiens
atggaaagaatattcacatttggaaatattttgaccatagagccaacaggatgtgctgagattagaaatagaagttgagatttwaaaaaaataataatctaaaatttttgacctaagcaactaaaaaaaaaaatggagcttctatacagaaatggagaagatgttggaaaaacacactctatatgggaaagttgaagtttggttttggacatattaagtctgtgtggtcaaagtggtgattttgaatagatgattgaatatatgagcctggagttcagagaagaaactcatgtcagagataagaatttggggatcctcagctttcgtaactaactgagatttccaagggtgtgggtgcaaacaaaggagaggccctaagcctgagtgatacatcattttgtgttttgtgaatagggagataatgaggaataaacaaagagtgtggatgggttatcattgtttttggagaataattaaggaagtgttttgcattacattcaaatgaagagttttaatcaaaaaggaaagagtaatcaactctgttaaaaatatatcaaaaaagataagggcagagaattgacttacc

SEQ ID NO: 316960 - DNA, 586 bp, Homo sapiens
atggaaagaatattcacatttggaaatattttgaccatagagccaacaggatgtgctgagattagaaatagaagttgagattttaaaaaaataataatctaaaatttttgacctaagcaactaaaaaaaaaaatggagcttctatacagaaatggagaagatgttggaaaaacacactctataygggaaagttgaagtttggttttggacatattaagtctgtgtggtcaaagtggtgattttgaatagatgattgaatatatgagcctggagttcagagaagaaactcatgtcagagataagaatttggggatcctcagctttcgtaactaactgagatttccaagggtgtgggtgcaaacaaaggagaggccctaagcctgagtgatacatcattttgtgttttgtgaatagggagataatgaggaataaacaaagagtgtggatgggttatcattgtttttggagaataattaaggaagtgttttgcattacattcaaatgaagagttttaatcaaaaaggaaagagtaatcaactctgttaaaaatatatcaaaaaagataagggcagagaattgacttacc

SEQ ID NO: 316961 - DNA, 586 bp, Homo sapiens
atggaaagaatattcacatttggaaatattttgaccatagagccaacaggatgtgctgagattagaaatagaagttgagattttaaaaaaataataatctaaaatttttgacctaagcaactaaaaaaaaaaatggagcttctatacagaaatggagaagatgttggaaaaacacactctatatgggaaagttgaagtttggttttggacatattaagtctgtgtggtcaaagtggtgattttgaatagatgattgaatatatgagcctggagttcagagaagaaactcatgtcagagataagaatttggkgatcctcagctttcgtaactaactgagatttccaagggtgtgggtgcaaacaaaggagaggccctaagcctgagtgatacatcattttgtgttttgtgaatagggagataatgaggaataaacaaagagtgtggatgggttatcattgtttttggagaataattaaggaagtgttttgcattacattcaaatgaagagttttaatcaaaaaggaaagagtaatcaactctgttaaaaatatatcaaaaaagataagggcagagaattgacttacc

SEQ ID NO: 316962 - DNA, 564 bp, Homo sapiens
cagtggctatcattacacacagaaagttatgtggcctcatctggcatcagtgggaaaaatctctgaggcttaccataaccacagctaacaggtatggtagaaggatctagaagaatcactattcccataccatatgttaccatctcttctttaaaccccaatgctgcmcaaatcattgatttttaaaactttgcacatggttagtgcagagattaatctctgcacatgccattttattctctatactctgtctcaaaggagtagcttcatggacctcttaatgttttcatcagtctagttcaaagaaatttccttactcacagaaatctttccactgtttgaaattttcatactttttattctggttactggcctaaggaacataactcaaattcccagagttgagatgattgaatcattagattatgagcctggttaggtgatttcctataatcactcaaataagctcctgaatctcatttcatcccctcatggccaccacagctaggcttggaagctgacccaagaactgcaaaaaacagtcaattgtgctactactagatt

SEQ ID NO: 316963 - DNA, 540 bp, Homo sapiens
gaattaataagaaatcataggactagagtagatgcagcatagaagcrtagaacgtttaggaaagaatcaatatggaatacttttcatatccaaaacaaagtcttctagattctttatacatcctattcaatgctcatgtcaatgctgtgaagtcaggagtcaagagcctggtcattgaatcataggaccaatacttactagtgctatgactttaagcacgttaactaatctcattgtgctttcatttcttcccctggaaaataaagataataatgatacctatctcacagggttattacaatagtacctggttcatagtaagcattatatataaacattagtaactttaattatgctgaacttagccagtgatcacatagaaaacggtgataaatcctagcctaattccaaagaactaaatctataatgatccaaaaccatttttcaaatttaagaatttccattatcttgccttatgctattcactgactattttttcaacaaatatcaataagcacctgttatgtgctaggaactgga

SEQ ID NO: 316964 - DNA, 540 bp, Homo sapiens
gaattaataagaaatcataggactagagtagatgcagcatagaagcatagaacgtttaggaaagaatcaatatggaatacttttcayatccaaaacaaagtcttctagattctttatacatcctattcaatgctcatgtcaatgctgtgaagtcaggagtcaagagcctggtcattgaatcataggaccaatacttactagtgctatgactttaagcacgttaactaatctcattgtgctttcatttcttcccctggaaaataaagataataatgatacctatctcacagggttattacaatagtacctggttcatagtaagcattatatataaacattagtaactttaattatgctgaacttagccagtgatcacatagaaaacggtgataaatcctagcctaattccaaagaactaaatctataatgatccaaaaccatttttcaaatttaagaatttccattatcttgccttatgctattcactgactattttttcaacaaatatcaataagcacctgttatgtgctaggaactgga

SEQ ID NO: 316965 - DNA, 540 bp, Homo sapiens
gaattaataagaaatcataggactagagtagatgcagcatagaagcatagaacgtttaggaaagaatcaatatggaatacttttcatatccaaaacaaagtcttctagattctttatacatcctattcaatgctcatgtcaatgctgtgaagtcaggagtcaagagcctggtcattgaatcataggaccaatacttactagtgctatgactttaagcacgttaactaatctcattgtgctttcatttcttcccctggaaaataaagataataatgatacctatctcacagggttattacaatagtacctggttcatagtaagcattatatataaacattagtaactttaattatgctgaacttagccagtgatcacatagaaaacggtgataaatcctagcctaattccaaagaactaaatctataatgatccaaaamcatttttcaaatttaagaatttccattatcttgccttatgctattcactgactattttttcaacaaatatcaataagcacctgttatgtgctaggaactgga

SEQ ID NO: 316966 - DNA, 626 bp, Homo sapiens
cattcctaaatttaaaaagaaaagctgagggagttcatcatcacttgaccaaccttacaagaaatactaaagagagttattcaaattaaaatcaaaggacactaagtaacaacatgaaaatataaaacttactgctaaaggtaaacatgtagtcaaattcagaatactttcatactgtaatagtggtacataaattattttaaactctaatttaaaaatcagaagacaaaagtactaaacataactgtatytacaataatttgttaatggatacacactataaaaatcaaattgtgacatcaaaaacacaaaatggtgtgagaagtaaaagtgtagatttttatatgcaatcaaagttattattggcttaaaaactgttagaaatagtagacaaaatcagtaaagtgcagaaataattcaatatacaaaagccaattatattttatatactaaaacgctatttgaaaatttaattaaaaaatgatgtaatctacaatagcatcaaaaattcttaggaataaatttaaccaaggacatgaaagatctgtatattaaaacccataatacattaatgaaagaaactgaagaagatacaaataaatggaaagacattctgtattcatgaa

SEQ ID NO: 316967 - DNA, 626 bp, Homo sapiens
cattcctaaatttaaaaagaaaagctgagggagttcatcatcacttgaccaaccttacaagaaatactaaagagagttattcaaattaaaatcaaaggacactaagtaacaacatgaaaatataaaacttactgctaaaggtaaacatgtagtcaaattcagaatactttcatactgtaatagtggtacataaattattttaaactctaatttaaaaatcagaagacaaaagtactaaacataactgtatctacaataatttgttaatggatacacactataaaaatyaaattgtgacatcaaaaacacaaaatggtgtgagaagtaaaagtgtagatttttatatgcaatcaaagttattattggcttaaaaactgttagaaatagtagacaaaatcagtaaagtgcagaaataattcaatatacaaaagccaattatattttatatactaaaacgctatttgaaaatttaattaaaaaatgatgtaatctacaatagcatcaaaaattcttaggaataaatttaaccaaggacatgaaagatctgtatattaaaacccataatacattaatgaaagaaactgaagaagatacaaataaatggaaagacattctgtattcatgaa

SEQ ID NO: 316968 - DNA, 580 bp, Homo sapiens
gtagtaggtcttcagtgttttctcactacaataaataattattgtagaatggccacaaatagtgaacatgcaatatacctgacaaattgctactctggaaatccagcaggacatccccactmtaagtcatgtgttaatttcctcaatgtaagagagatatttgtattttatgttgtcatgtgcaattaaagattatgtatcacaggagggtggcaggcttgttgaagaggcaaaacattacatttgttaagcagtcattatgcctcaggcattatgcttggcactttataaatacagactccttcaatattgtgaggtaaataacatgagcctaatgtcaatttagagaggttaaacttttacacagagcaacaaattgcttatcctgagttttgaactacttggactggctccaataaattcgtcttgtactgtaagagaataactctgccactctgacttgtgtatatagttttatttttttagttaaaatattgaacaattgtgacagagctaacttttttttagtgtttgaaggatttgagtttaactataatgtgctcaggagttaggtagacta

SEQ ID NO: 316969 - DNA, 580 bp, Homo sapiens
gtagtaggtcttcagtgttttctcactacaataaataattattgtagaatggccacaaatagtgaacatgcaatatacctgacaaattgctactctggaaatccagcaggacatccccactctaagtcatgtgttaatttcctcaatgtaagagagatatttgtattttatgttgtcatgtgcaattaaagattatgtatcacargagggtggcaggcttgttgaagaggcaaaacattacatttgttaagcagtcattatgcctcaggcattatgcttggcactttataaatacagactccttcaatattgtgaggtaaataacatgagcctaatgtcaatttagagaggttaaacttttacacagagcaacaaattgcttatcctgagttttgaactacttggactggctccaataaattcgtcttgtactgtaagagaataactctgccactctgacttgtgtatatagttttatttttttagttaaaatattgaacaattgtgacagagctaacttttttttagtgtttgaaggatttgagtttaactataatgtgctcaggagttaggtagacta

SEQ ID NO: 316970 - DNA, 580 bp, Homo sapiens
gtagtaggtcttcagtgttttctcactacaataaataattattgtagaatggccacaaatagtgaacatgcaatatacctgacaaattgctactctggaaatccagcaggacatccccactctaagtcatgtgttaatttcctcaatgtaagagagatatttgtattttatgttgtcatgtgcaattaaagattatgtatcacaggagggtggcaggcttgttgaagaggcaaaacattacatttgttaagcagtcattatgcctcaggcattatgcttggcactttataaatacagactccttcaatattgtgaggtaaataacatgagcctaatgtcaatttagagaggttaaacktttacacagagcaacaaattgcttatcctgagttttgaactacttggactggctccaataaattcgtcttgtactgtaagagaataactctgccactctgacttgtgtatatagttttatttttttagttaaaatattgaacaattgtgacagagctaacttttttttagtgtttgaaggatttgagtttaactataatgtgctcaggagttaggtagacta

SEQ ID NO: 316971 - DNA, 580 bp, Homo sapiens
gtagtaggtcttcagtgttttctcactacaataaataattattgtagaatggccacaaatagtgaacatgcaatatacctgacaaattgctactctggaaatccagcaggacatccccactctaagtcatgtgttaatttcctcaatgtaagagagatatttgtattttatgttgtcatgtgcaattaaagattatgtatcacaggagggtggcaggcttgttgaagaggcaaaacattacatttgttaagcagtcattatgcctcaggcattatgcttggcactttataaatacagactccttcaatattgtgaggtaaataacatgagcctaatgtcaatttagagaggttaaacttttacacagagcaacaaattgcttatcctgagttttgaactacttggactggctccaataaattcrtcttgtactgtaagagaataactctgccactctgacttgtgtatatagttttatttttttagttaaaatattgaacaattgtgacagagctaacttttttttagtgtttgaaggatttgagtttaactataatgtgctcaggagttaggtagacta

SEQ ID NO: 316972 - DNA, 563 bp, Homo sapiens
tgggatggacgattatgcagggggtagagtgggtggtttatggcccttagatagagctgttttgtaaaattaatgacacctgttgcaattcacagatgagcaaatggagacataaaagygagcaagtggatttgactaggttgttagcaccaactctagcatgaaaaagctctcaggcgcttcgccaatgaggctaacctttcccaaaatagtgccctatttctggccctgcctgaagcccaagaagaacaactgcaaactatgtatatgcctcatatttggaaaggccttgccaggcgtggtggctcacgcctgtaatcccagcactttgggaggccaaggcaggcacatcacctgaggtcaggagttcgagaccagcctggccagcatggtgaaactccatctctactaaattacaaaaattagctgggcatgatggtgtgtgcctgtaatcccagctgcccaggaggctgagacaggagaacctctggaaccggggaggcagagactgcagtgagcagagattatgccactgcactccagcctgggtgacagagcaaggc

SEQ ID NO: 316973 - DNA, 563 bp, Homo sapiens
tgggatggacgattatgcagggggtagagtgggtggtttatggcccttagatagagctgttttgtaaaattaatgacacctgttgcaattcacagatgagcaaatggagacataaaagtgagcaagtggatttgactaggttgttagcaccaactctagcatgaaaaagctctcaggcgcttcgccaatgaggctaacctttcccaaaatagtgccctatttctggccctgcctgaagcccaagaagaacaactgcaaactatgtatatgcctcatatttggaaaggccttgccaggcgtggtggctcacgcctgtaatcccagcactttgggaggccaaggcaggcacatcacctgaggtcaggagttcgagaccagcctggccagcatggtgamactccatctctactaaattacaaaaattagctgggcatgatggtgtgtgcctgtaatcccagctgcccaggaggctgagacaggagaacctctggaaccggggaggcagagactgcagtgagcagagattatgccactgcactccagcctgggtgacagagcaaggc

SEQ ID NO: 316974 - DNA, 457 bp, Homo sapiens
gtgtgtactgagataaaattatctttaaaatcaatatgcatatatgaatgcatatatacatatataaaatcaatatggatatataaatttaatatatatataggtatattaaaaaacagggtctcactctgttgcacaggctgaagtgcagtgcctgctttaacggctcactgcagcctygaccttcctgggctaaggtgattctcctacattagcctcccaagtagctgggactatgggcacacaccactatgcctggctaatttttgtattttttgtagagacgaggtctccctatgttgcccaggctggtctcaaactcctgggctcaagtgaattatctgcctcagtctcccaaagtgctgagattacaggaattagccaccatgcctgaccctaatatgcttataaattgagggaggtgattgtgttcaggaagggtactcagggggacatt

SEQ ID NO: 316975 - DNA, 512 bp, Homo sapiens
catgagtacatctaggtagcttctcctgacagaatgtcaactctatgaaaggaaggagtgggaggaaaatcataattaaagaagagagacaaagcgaaaattgaagttttgctccaaaatcagcactgtctttattcaagaaccattttaaagtaacattcttgtatcttgatattttcttctattatttttmtatggataattttcctttttcaagaaatacaagcccagaaaatagcttatattttttcactgaaatgacaaattgataagaaccccagagtgttcttcaatgttgtgaggtaaaaaacaattatgcattattccaaaataactgcagcagctaaaaattggggacgcaatacccaaatggctgtggaaaataaacggagagaattgagaactttttaatgtggagtttgtagcctgagctcaagttgtaaatatcagcaaatgttctaccatgcttcacagcgttcctatagtgcaatttgtttagtgcttcgagatat

SEQ ID NO: 316976 - DNA, 512 bp, Homo sapiens
catgagtacatctaggtagcttctcctgacagaatgtcaactctatgaaaggaaggagtgggaggaaaatcataattaaagaagagagacaaagcgaaaattgaagttttgctccaaaatcagcactgtctttattcaagaaccattttaaagtaacattcttgtatcttgatattttcttctattatttttatatggataattttcctttttcaagaaatacaagcccagaaaatagcttatattttttcactgaaatgacaaattgataagaaccccagagtgttcttcaatgttgtgaggtaaaaaacaattatgcattattccaaaataactgcagcagctaaaaattggggacgcaatacccaaatggctgtggaaaataaacggagagaattgagaactttttaatgtggagtttgtagcctgagctcaagttgtaaatatcagcaaatgttctaccatgcttcacagcgttcctmtagtgcaatttgtttagtgcttcgagatat

SEQ ID NO: 316977 - DNA, 637 bp, Homo sapiens
caagtaatataaaaatggctatttactctgttcaaagtggtacagtccattatcactctccactgatgtcgttacaaggatagcaaatcaataatcagttctcattccctaactcagtaaaccagctgcttccattattgtaaaccatgctcagtktggatacaacctttactgccatgctagcagctgattcatttgacaagaccacaggcatcaccacaggaaaattattccttaattacctttctctaacatttaaatggttaagtgctagggaatttctttgcaatgggagaaaccaaaatagcaagatgttgtaaatatatcaaccaagtgaaagactttgtctaaattgttaaattacagagtccatcttgcacagcttttcttgaattaagattgctcaagtaaacattggctctatctgggaaacctgagttagatatttcatcacagcctttaaaaaacattgctttcagaagcaaacattgagatccactgcaaaatcctgaaaagtgagatggaaattgtggacatgttgcaggttaaaaattcaatggccccaagctcaagtgtatgcagtataactctttgttttaaatgtcagtttaattgttaattccaagcctccattgca

SEQ ID NO: 316978 - DNA, 596 bp, Homo sapiens
tgtctattccaatcttatctatttctgttttatgctaggatcttttgagatttttatttgcccttattttgtttcaagtgtgttccctttaagcaggcaatgcacaaagataaagatacagaggcacagaatgggccaacctttgttatttcttttaaagttccatattttatttcaggttctctttctggcctgcgggtttcctctttctgctaacttctgtgctcccttccataggcacgggaagaattggctgctattttgtgttgctttgggactgcaggtggwtccagaacagagcaaaccttcacactgtctttatcagcccttgcagccatctctgctctattgctttcacattagtgtgacacaagagacattggaaaagcttctgactgccagagttccagacatgaccagggaggcacaagtactctttttactaagattcgcaggctatctttggaatacagacagaccaactagcacttgcctcttatccaattgcttttctatttccagctcatggaatctattcctggttaggtatggaacaggaaaaaaaagcacaaaacctaagtttgtatgaccatgtg

SEQ ID NO: 316979 - DNA, 596 bp, Homo sapiens
tgtctattccaatcttatctatttctgttttatgctaggatcttttgagatttttatttgcccttattttgtttcaagtgtgttccctttaagcaggcaatgcacaaagataaagatacagaggcacagaatgggccaacctttgttatttcttttaaagttccatattttatttcaggttctctttctggcctgcgggtttcctctttctgctaacttctgtgctcccttccataggcacgggaagaattggctgctattttgtgttgctttgggactgcaggtggatccagaacagagcaaaccttcacmctgtctttatcagcccttgcagccatctctgctctattgctttcacattagtgtgacacaagagacattggaaaagcttctgactgccagagttccagacatgaccagggaggcacaagtactctttttactaagattcgcaggctatctttggaatacagacagaccaactagcacttgcctcttatccaattgcttttctatttccagctcatggaatctattcctggttaggtatggaacaggaaaaaaaagcacaaaacctaagtttgtatgaccatgtg

SEQ ID NO: 316980 - DNA, 596 bp, Homo sapiens
tgtctattccaatcttatctatttctgttttatgctaggatcttttgagatttttatttgcccttattttgtttcaagtgtgttccctttaagcaggcaatgcacaaagataaagatacagaggcacagaatgggccaacctttgttatttcttttaaagttccatattttatttcaggttctctttctggcctgcgggtttcctctttctgctaacttctgtgctcccttccataggcacgggaagaattggctgctattttgtgttgctttgggactgcaggtggatccagaacagagcaaaccttcacactgtctttatcagcccttgcagccatctctgctctattgctttcacattagtgtgacacaagagacattggaaaagcttctgactgccagagttccagacatgaccagggaggcacaagtactctttttactaagattcgcaggctatctttggaatacagacagaccaactagcacttgcctcttatccarttgcttttctatttccagctcatggaatctattcctggttaggtatggaacaggaaaaaaaagcacaaaacctaagtttgtatgaccatgtg

SEQ ID NO: 316981 - DNA, 596 bp, Homo sapiens
tgtctattccaatcttatctatttctgttttatgctaggatcttttgagatttttatttgcccttattttgtttcaagtgtgttccctttaagcaggcaatgcacaaagataaagatacagaggcacagaatgggccaacctttgttatttcttttaaagttccatattttatttcaggttctctttctggcctgcgggtttcctctttctgctaacttctgtgctcccttccataggcacgggaagaattggctgctattttgtgttgctttgggactgcaggtggatccagaacagagcaaaccttcacactgtctttatcagcccttgcagccatctctgctctattgctttcacattagtgtgacacaagagacattggaaaagcttctgactgccagagttccagacatgaccagggaggcacaagtactctttttactaagattcgcaggctatctttggaatacagacagaccaactagcacttgcctcttatccaattgcttttctatttccagctcatggaatctattcctggttaggtatggarcaggaaaaaaaagcacaaaacctaagtttgtatgaccatgtg

SEQ ID NO: 316982 - DNA, 523 bp, Homo sapiens
  misc_feature (1)...(523): n = A,T,C or G
nnnnnnnnnnnnnnnnatctccccaggctagtatcagactttgggaactcaacctaatgtaaatcagttgataaaaactagctttgaaatatggagttttgagctggattcccagctcaaatatttacaagttgtgtgactgtgggtagggcatgtgggtcacgcattttgttggattcctaattttttgtctctgtaagaatgtgtcacacaatttcctatattatcattctttaaaagaagttgtgaggctcaaataagataacatattctaaaatatttagtgtctttgattctgtggctttgtgacagtatggattgaaatatcacactaaaatcttgaattccgtttaatgtttcctcatatagaccctatctsttcatattcagatcttttagctttcattgatttctttcttgtattttatgttccagctatacacatcaagataaaaggatattttataataaataaaatcaacaaaggtacaaaacacatattttagttctataaaatgtcatg

SEQ ID NO: 316983 - DNA, 523 bp, Homo sapiens
  misc_feature (1)...(523): n = A,T,C or G
nnnnnnnnnnnnnnnnatctccccaggctagtatcagactttgggaactcaacctaatgtaaatcagttgataaaaactagctttgaaatatggagttttgagctggattcccagctcaaatatttacaagttgtgtgactgtgggtagggcatgtgggtcacgcattttgttggattcctaattttttgtctctgtaagaatgtgtcacacaatttcctatattatcattctttaaaagaagttgtgaggctcaaataagataacatattctaaaatatttagtgtctttgattctgtggctttgtgacagtatggattgaaatatcacactaaaatcttgaattccgtttaatgtttcctcatatagaccctatctcttcatattcagwtcttttagctttcattgatttctttcttgtattttatgttccagctatacacatcaagataaaaggatattttataataaataaaatcaacaaaggtacaaaacacatattttagttctataaaatgtcatg

SEQ ID NO: 316984 - DNA, 210 bp, Homo sapiens
acacaggttcatttgttcattatccttttgaattttagagatcaggttttaaaaattttgtttcagaattatgtaaattatttacactgtcccaaatttaaatatagaaaacaragtacattcatagaattttaacttttctggctgttcctactctggaggcggatttgatctatagattgttaacatacaagaattctctccttcttt

SEQ ID NO: 316985 - DNA, 624 bp, Homo sapiens
aaaaatggaaattggtttatgagcaaaagtatttatagtcataatacttaaacactatatttaataattatggtataatcatattgaaaaggataaagaagaagagtgaaaagtataagaaaggtaaaagatttttaccttttatttcatagtactgtgtcaatcaatacatttaaatatttaaaagatgagtgtgtgtgtgtgtgcatgcgctcacaattttaaaggtatataagagaagaaatggatgggaggtaaatttccaaaggtgatagyaggagaatgagaggaacagctatattttttataagcttatgtttatttaactttttaaactatccgcatggattcttttaagaaacataaaagttgatttaaaatggataaaaataaaagtccataaatttagcatataaacttgatttattcacatatagtcataaaataaatctacaaactatatagtgaaaacaaaataaatctcaccctgtagttatatattgatttacatttgtgtgcaatttggtgatgagaaacaaacaggcataaaataaaaattggagccttgggctttaatataagagtgaaaattaaatatacacataaataaaaatataaagtaaa

SEQ ID NO: 316986 - DNA, 624 bp, Homo sapiens
aaaaatggaaattggtttatgagcaaaagtatttatagtcataatacttaaacactatatttaataattatggtataatcatattgaaaaggataaagaagaagagtgaaaagtataagaaaggtaaaagatttttaccttttatttcatagtactgtgtcaatcaatacatttaaatatttaaaagatgagtgtgtgtgtgtgtgcatgcgctcacaattttaaaggtatataagagaagaaatggatgggaggtaaatttccaaaggtgatagtaggagaatgagaggaacagctatattttttataagcttatgtttatttaactttttaaactatcygcatggattcttttaagaaacataaaagttgatttaaaatggataaaaataaaagtccataaatttagcatataaacttgatttattcacatatagtcataaaataaatctacaaactatatagtgaaaacaaaataaatctcaccctgtagttatatattgatttacatttgtgtgcaatttggtgatgagaaacaaacaggcataaaataaaaattggagccttgggctttaatataagagtgaaaattaaatatacacataaataaaaatataaagtaaa

SEQ ID NO: 316987 - DNA, 435 bp, Homo sapiens
ataaaaacgtctactattttttcaaaaacagtcttgggatgaggcttaaaaccttttaaagtgtttaagccaagttttattaatttgaattatctgtcttakagaatatatatatacacacacatatacatatatttatataagatttatatacataatttcacatgtaactttatatataattatacacatatatacacacacccatagacatgcaattgttccacagtatgtatgagggactggttccaggatccctgtaaataccaaaatttcaggatgcgcaatcacttatgtaaaatgatgtaacatttgcatatagggtatatttgcatatacaatatacagtcatctgtagatttcttataatacctaatacaatgtaaatgctgtgtaaatagttgttatgccatatttttaagtttatattgtttt

SEQ ID NO: 316988 - DNA, 573 bp, Homo sapiens
cttccaatattaacaattgtacctgggttttctaggttactaggaaacctcctatttagcactttctacacaaaatagccctcctttctattcccagcctgaattaggtatacctctcctatggccacaagtctcttatagcacctgtcactttgggtctaagtaatttgggcatataattatcttcctcttaattgagaaacctttatgacaggaaacatctattagccatatttatgttctcaagcagcatagttggccctcagcagatgttctatgtataaattgatggaaccatgaaataattaattaatgagctggcttcttgaccttgtcttcacaaacrggttaaaaaaaagatttgcatcttccaaatcataccttacttagaaatgagaatttccaaatgaatggctgttagtttcctttctaagcatgaaaatttaattcattcttgttaaatgcacactctcaagcaggattgttggcatctctctattttcaccctggtaaaggaagtcggaaggactactctgacaaaagcagcactaaactatagagtaattaccataa

SEQ ID NO: 316989 - DNA, 633 bp, Homo sapiens
tgtggtgatttctgagatttttggtgcatccctcacccaagcagtgtacactgtacccaatatgtagctttttattcctcgtccctctcccagccttctcctccaagtccccaragtccattatatcattcttatgcctttgcatcctcatagcttagctaccactcatgaatgagaaactatgatatttggttttccattccggagttacttcacttagaataatggcctctaactccatccaagttgctgtataaaacattattttgtttctttttatggctgaatagtagtccatggtttataatacaccacaatttctttatccacttactggttgatgtgcacttaggttggtttcatatctttgctatttgcaaattgtgctgctataaacatgcccatgcatgtgtctttttcatatagtgacttctttgcctttgggtggataccctatagtgggattgctagattgaatagtagttctatttttagttctttaaggaatctctatactattttccatagtagttgtactaatttacattcccaccagcaatggcaatgtaaaagcgttcgcttcttgccacatccacaccaacatctgttgatttttgatattttaattatagt

SEQ ID NO: 316990 - DNA, 568 bp, Homo sapiens
ttacttcacttagaataatggcctctaactccatccaagttgctgtataaaacattattttgtttctttttatggctgaatagtagtccatggtttataatacaccacaatttctttatccacttactggttgatgtgcacttaggttggtttcatatctttgctatttgcaaattgtgctgctataaacatgcccatgcatgtgtctttttcatatagtgacttctttgcctttgggtggataccctrtagtgggattgctagattgaatagtagttctatttttagttctttaaggaatctctatactattttccatagtagttgtactaatttacattcccaccagcaatggcaatgtaaaagcgttcgcttcttgccacatccacaccaacatctgttgatttttgatattttaattatagtcattcttgcaggagtaagttagtaatctcattgtggttttaactatctccctggtaattagtgatattgagcaattttttcctatgtttgttggctatttgtatatcttcttttgagaattttctattcatgtccttagtcc

SEQ ID NO: 316991 - DNA, 505 bp, Homo sapiens
tttctcctttaatctgtaaatataattatttatatcaatmtatctgttgcagtcaaatgtgtttcactgttgagaaattaatcttagatatgatctattattattttcacatttctggattctgtttgctaatgttatgtttacaattgtttatgagtgagcatgtccctttaaatttttataatgtcaatattgggtttcaatgtcactatactagtctcacacactttctgggattattttttaaagaatttatatatgattaaaattatttctctcttgaatgctttggagagtttcctaatgaaaccaagtaggcttagagttagttttagttttagaaataattttaacatgaattctacattttaagaaaatataaaatacttacataatatttttaatgtaggctcattttatctaaatttttaatttaatagtttataggactttgtaatagacttttcttactgtaccatcttttctgatgtcatttctttttctt

SEQ ID NO: 316992 - DNA, 500 bp, Homo sapiens
ctacattttaagaaaatataaaatacttacataatatttttaatgtaggctcattttatctaaatttttaatttaatagtttataggactttgtaatagacttttcttactgtaccatcttttctgatgtcatttctttttcttttctgatgacaactacatgtgccttctcaactcttccctgtccctaccatagtcaatctaatcagagatttaacgatttcattagccttttaaaatagctgttcactgcactgatcctttcaagtaaatgtttattttatttttgtttgcttgttttcaacattttgattattatttccttccttctgattttcacaagtttgcttcgatattgtttctaacttctcgagatggggtcttacyttgttgtactagtttgttttcatgctgccaataaagacatacccaagactgggtaatttataaagaaaaagtggtttgatggactcacagtttcacatggctggtgaggcctc

SEQ ID NO: 316993 - DNA, 547 bp, Homo sapiens
aactcagtgtccagtgagttcctggttcatgggtggcaccttcttgttgtgttctcatttggtggaaggggcaaacaagctctcttgagcgtattttataaggactataggacgctatccaatttatgagggctctgctctcttggcctactgacctctcaaaaggccccatcccctaatcccatcaccttgggggttagggcttcaacatatgaattttatggggaaacaaacattcagaccttaacagctaccatttcccttttctctcttttttaacttacatcaatgccacatgttaccagctgttatccaagggacaggtgatccyatctctttcaagagtatgcatatctgtattctgttgccaatcagatctcctaaaatagatgtttgatttttaggagttgtgggcaatatctgcagtttaattacaaatcagtctaagaatagaaaatggaattgcagatcaatcaaatagagaatgagcttctggggcaaactggcctatgagctatttgtaaaaccagtccttgaattttccaag

SEQ ID NO: 316994 - DNA, 605 bp, Homo sapiens
ccacactgtgtgtgatatctyttaacaatttgtatgcccatgctcacctcaccattcagggtaggtagcatgatgttgtaaacaaaacaaaactgtgagattctttggtcagtcgaacttgaattcctggctccacacgtcttttctgggtaaacctaagggtaaactaacttaggcttttcttttggaaaacattgcctatttttgagtttctttaaagataaaaaacatatgtaaaataacaggcttatattctgataaagagtaagggccctgtatatgtttgcctcctctcttttatttccacttaggaagctgtatatagagataccaattttgtaaatcagtaattggcttgtactttataatgccacagggacctctgagaaatttcttacggacactgttgcatctgatcctctggcccctcaagacaaagtcaatctaggtttagaacagttagagctcttatagctgtatccatgtgtgccgatattaaatgtcgaccaaagacagagcacgttgtgctaattgtaatacatgcacctataagcatgcaaattggctttggtcagaactgaaattcccagcagcccccaggcctc

SEQ ID NO: 316995 - DNA, 577 bp, Homo sapiens
ctccttgcttcatagttctggaagcttctgacaccctctggaagctctcagcattctccagaagtacttggcagcctttataaatgttcatcacacaccaaatatcacaatggttgagagcacttggaatcttgcaataggcacagctggggaaagctgggagcaacaaaagcagggagaaacgaggaaaggttggcaattagaaaaggaaaacacagctttcttggcaggtactagtcagatgatacacggtaagagattccctcctcattcgctaaactcaactgcycagccaggcaacctttgattctgccaaaaagccagaatggaattcagggtgagaaatttgttcctcaattctggaagatttttaggacataagactgtggcttgcttttcccatgactccttatattcaactaggcatatctcagagacatgttgtataaacacagatgttaaaacttcctggaatacgatgttattttgtttaccttgagagtgtagactttttcagtgatccgtgttaacatactgtcagaacacagaaaatgctggcctaagtgctccaccagcc

SEQ ID NO: 316996 - DNA, 577 bp, Homo sapiens
ctccttgcttcatagttctggaagcttctgacaccctctggaagctctcagcattctccagaagtacttggcagcctttataaatgttcatcacacaccaaatatcacaatggttgagagcacttggaatcttgcaataggcacagctggggaaagctgggagcaacaaaagcagggagaaacgaggaaaggttggcaattagaaaaggaaaacacagctttcttggcaggtactagtcagatgatacacggtaagagattccctcctcattcgctaaactcaactgctcagccaggcaacctttgattctgccaaaaagccagaatggaattcagggtgagaaatttgttcctcaattctggaagatttttaggacataagactgtggcttgcttttcccatgactccttatattcaactaggcatatctcagagacatgttrtataaacacagatgttaaaacttcctggaatacgatgttattttgtttaccttgagagtgtagactttttcagtgatccgtgttaacatactgtcagaacacagaaaatgctggcctaagtgctccaccagcc

SEQ ID NO: 316997 - DNA, 334 bp, Homo sapiens
tggtggaagtgatggcatgccgcttctgagatcggattataaagactgcagtttccattttcggcacttgtgttctctctttctctcttggattttctcattctgagataccacactgagagaacattcagacagcccatggaaagctactcatatagtgaggaactgaagattcaggtccacaggcagcaaggaacaaaggcttgccaatagccatgcaagtgagcatcatatgagaccctccttggagaaacttcacaaggctacagctccagccaataactaaattgcaaygtaatgacagaccctgagtcagaagcacccaactgaaccg

SEQ ID NO: 316998 - DNA, 574 bp, Homo sapiens
catcccctcaagctgctctttaaaatagggtttgtttgtttaataacttttcaaaacactgtgtaaagcataatttagattttcaaattttcctacaataaaaawgtattgaaatctgtttaatagagtttttcttttccccaaaccagctaattcatcggaccatgaagttgagtttctctttcttagcgcctctccaccctacctggcatttctctcctagttagcatttattaacatctattgggaattccattccatttcactgagaaacacagtgcctgataatttctcaatcattattgtttggtatcagccttataattcatttgttcagtcacccatttatttaacaaacgtttactactctacatagaacctaccctgtgcaagacagcctcctatgtatgagagataaagcaaggtgagtcaaagctcttcctactttggaactttttctctgaaggctgcagtgtccagtatgatcatgagttggtggagccaccctcagccatgtgaaactggggtttaattacatatcccatcattgatgattctgcaaacctcagaaaat

SEQ ID NO: 316999 - DNA, 574 bp, Homo sapiens
catcccctcaagctgctctttaaaatagggtttgtttgtttaataacttttcaaaacactgtgtaaagcataatttagattttcaaattttcctacaataaaaaagtattgaaatctgtttaatagagtttttcttttccccaaaccagctaattcatmggaccatgaagttgagtttctctttcttagcgcctctccaccctacctggcatttctctcctagttagcatttattaacatctattgggaattccattccatttcactgagaaacacagtgcctgataatttctcaatcattattgtttggtatcagccttataattcatttgttcagtcacccatttatttaacaaacgtttactactctacatagaacctaccctgtgcaagacagcctcctatgtatgagagataaagcaaggtgagtcaaagctcttcctactttggaactttttctctgaaggctgcagtgtccagtatgatcatgagttggtggagccaccctcagccatgtgaaactggggtttaattacatatcccatcattgatgattctgcaaacctcagaaaat

SEQ ID NO: 317000 - DNA, 574 bp, Homo sapiens
catcccctcaagctgctctttaaaatagggtttgtttgtttaataacttttcaaaacactgtgtaaagcataatttagattttcaaattttcctacaataaaaaagtattgaaatctgtttaatagagtttttcttttccccaaaccagctaattcatcggaccatgaagttgagtttctctttcttagcgcctctccaccctacctggcatttctctcctagttagcatttattaacatctattgggaattccattccatttcactgagaaacacagtgcctgataatttctcaatcattattgtttggtatcagccttataattcatttgttcagtcacccatttatttaacaaacgtttactactctacatagaacctaccctgtgcaagacagcctcctatgtatgagagataaagcaaggtgagtcaaagctcttcctactttggaactttttctctgaaggctgcagtgtccagtatgatcatgasttggtggagccaccctcagccatgtgaaactggggtttaattacatatcccatcattgatgattctgcaaacctcagaaaat

SEQ ID NO: 317001 - DNA, 558 bp, Homo sapiens
ttgctggcttcagggcatagcagtgcacatcctcccaattaatagcgtctttccctcatcagcgatgccagtagaagaaggcacatgttctagtttctttgtttgcaaattagagaatattggaaaattatcctgtaytttaaagatcaaaaccaaaatggcctggccaatctgggttgatgcttcagtttcttttttttttcttttcctttcttttagagacggggtctcactctttcacctaggctggagtgcactggtgtgtttatagctcactgcaacctccaactcctgggcacaaatgatccctcacttcagcctcccgagtagcttggactacaggcacatgcttggctatttttttttatttttatttttttgtagagccaggtgtcttgctttgcggccaaactggtctctaactcctggcctccggcactttggcctctcaaagtgctgggattaccggtatggccaccatgccaggcttcagtttcttcgaaatgaaaacagagtttaagtgaaatacaacatgagaaatttgaagtgaattcatct

SEQ ID NO: 317002 - DNA, 595 bp, Homo sapiens
tgcttctggcagatcgataaagtacttgaagacacttgtttcagtggctctttgaattccgcatcatcatttgatttgctccgataacattcaagtcttgcctctttaagttattgttttagcaaattcaatttacaattactttccatatgaaaagcttaagagattcagtttaatgccttattagctgtaaaatcaactgctgtttcaactacgcggtgtgaggagcagtgaaaaggcttcggttcttggcgaaactttccctctgggcttctgacgaggggcagcttcttcagttgtggagctatcttcacaatacctgctttctaagctcctagtcattggacccaaattcaaattacatttccctcccgtgtcagggatttctggggtaaaaataagctactttgaagacaggttgctctcagcagggattttttgctcatcaaatgtgatccatgcaacaggcacctttgaaaactcaccatgacgccgattttatttttaaatggagggactaaatggccattacagraagtcggcctgagtggagtgggggttggggggagagagtttattactgttgtttgaatca

SEQ ID NO: 317003 - DNA, 575 bp, Homo sapiens
ataattaactaatctattaaaaaccatttggggaataaagaaaattatgtttccatattgataataaatatatagaaaaaataaataaaaaggggagatgagagggctcttgtttatggcagaataccatgtgctggctaataaatgtggaaagagtactgggatagaaaatcagcaacttgcagccattgtttataaagattagatgagccaaggattatgaatgaatgcaaaaaattagggagaaaaattgatgtggagaagaatatgtgcatggtcttaatgtgtctctccacagattaaagagtgcaagggaaaaaatattaattatacagtagagaaatcagacaacaccttaaccaaatggtcaaaattaacaccaccgattagragtagatgggagtcctgccaccagatgtggcaccccgagagggacacgccatcacctatgcaatattctggccaagcatgcataacctaaatctaatcaggaagaaacattagatgaagcccaaatgaagatcattccgttaacacatatgggtattgaggagtgtattttttaatgtcaatgt

SEQ ID NO: 317004 - DNA, 575 bp, Homo sapiens
ataattaactaatctattaaaaaccatttggggaataaagaaaattatgtttccatattgataataaatatatagaaaaaataaataaaaaggggagatgagagggctcttgtttatggcagaataccatgtgctggctaataaatgtggaaagagtactgggatagaaaatcagcaacttgcagccattgtttataaagattagatgagccaaggattatgaatgaatgcaaaaaattagggagaaaaattgatgtggagaagaatatgtgcatggtcttaatgtgtctctccacagattaaagagtgcaagggaaaaaatattaattatacagtagagaaatcagacaacaccttaaccaaatggtcaaaattaacaccaccgattagaagtagatgggagtcctgccaccagatgtggcaccccgagagggacacgccatcacctatgcaatattctggccaagcatgcataacctaaatctaatcaggaagaaacattagatgaagcccaaatgaagatcattccgttaacacatatgggtrttgaggagtgtattttttaatgtcaatgt

SEQ ID NO: 317005 - DNA, 564 bp, Homo sapiens
ggcctcaccaggaacctaccctgccagctcattgatcttggacttgtgaaycccaaaaatctgagacagctttcagcgaatttagaaaatttattttgccaaggttgaggatgcactctactgacacagcctcaggaggtcctgatgacatgggccaaagatggtcagagcacagtctgattttacacattctagggagacatgtgacatcaatcaacataagcaagatgaacactggttcagtctggaaaggtggaacaactcgaagcaaaggtgggaagagtagaagaggggagggggcttccaggtcataggtagataagagacaaattgttgccttcttttgagtttccgattagcctctccaaaggaggcaattagatatgcatttatctcagtgagcagtggagtgacttagaatagaaagggaggcaggtttgccctaagcagttcccagcttgagttttcccttcagcttagtgattttggggccccaagatttattttcctttcttttagcatctggactgtaagaaaataagtttctgttggtgaagccatcta

SEQ ID NO: 317006 - DNA, 608 bp, Homo sapiens
gtttctgttggtgaagccatctagtccgtgatattctgtaatggcagcctgagtagactaatatacttggtgtaaatttttttgagtttatcttgtttgtggtttgctaaccttgattctgtaggtttatgtcttttgcctaattaggaagtttttggtaattatttcttcagatgctttttcagctctgccctctttttcctctcctcctgggactccaatgacgtgaaggttgactcyttggttgtagtcccatgacttcctgaagctctatttatttatttgtgtaatctatattcttttatttagattgggtaatttctattgctttatcttccagttgactgttctttcatctgttctacccattctaattttgagcccatgcgttgaggttttttaattttggttaatgtatttttcaaatctataatttacgtattgctgttcttcatattttctatttctttggagagactttctatttctttgctaaaatgatgttttttcatttgttttaagagtgttcttaattgcttgttaaagcatttttgtggaggctgctttaaaagtttttgtcagttaattctaacatctatgtcaagttt

SEQ ID NO: 317007 - DNA, 608 bp, Homo sapiens
gtttctgttggtgaagccatctagtccgtgatattctgtaatggcagcctgagtagactaatatacttggtgtaaatttttttgagtttatcttgtttgtggtttgctaaccttgattctgtaggtttatgtcttttgcctaattaggaagtttttggtaattatttcttcagatgctttttcagctctgccctctttttcctctcctcctgggactccaatgacgtgaaggttgactctttggttrtagtcccatgacttcctgaagctctatttatttatttgtgtaatctatattcttttatttagattgggtaatttctattgctttatcttccagttgactgttctttcatctgttctacccattctaattttgagcccatgcgttgaggttttttaattttggttaatgtatttttcaaatctataatttacgtattgctgttcttcatattttctatttctttggagagactttctatttctttgctaaaatgatgttttttcatttgttttaagagtgttcttaattgcttgttaaagcatttttgtggaggctgctttaaaagtttttgtcagttaattctaacatctatgtcaagttt

SEQ ID NO: 317008 - DNA, 608 bp, Homo sapiens
gtttctgttggtgaagccatctagtccgtgatattctgtaatggcagcctgagtagactaatatacttggtgtaaatttttttgagtttatcttgtttgtggtttgctaaccttgattctgtaggtttatgtcttttgcctaattaggaagtttttggtaattatttcttcagatgctttttcagctctgccctctttttcctctcctcctgggactccaatgacgtgaaggttgactctttggttgtagtcccatgacttcctgaagctctatttatttatttgtrtaatctatattcttttatttagattgggtaatttctattgctttatcttccagttgactgttctttcatctgttctacccattctaattttgagcccatgcgttgaggttttttaattttggttaatgtatttttcaaatctataatttacgtattgctgttcttcatattttctatttctttggagagactttctatttctttgctaaaatgatgttttttcatttgttttaagagtgttcttaattgcttgttaaagcatttttgtggaggctgctttaaaagtttttgtcagttaattctaacatctatgtcaagttt

SEQ ID NO: 317009 - DNA, 583 bp, Homo sapiens
agggaatccctttcttatttgtgctctygcctttaatttaatcccggtccacaactctttcccttccaaatgcttcaaaaatctcagaatcatagttgcttcttatacaagtatgaggcaaagacctggagaaaatcaaatgtgattttgctaaaatatgtatattaatagtggaaagagagaataagatctcttgttctctaacaaaaaaaggtattcctgtctttgttacatttctgtaactctctctttctctctttgttatatttctgtaatctccctgggggcaaggaagggaaaaataaaacaccactaacaatgggtgattaatggcaggaataaacccaaatcaaacaaaaaagccatgcatagacaagtgaagtttgataaatagccagtgtcctctaatgtgaatcctttttgacatttctggaatacaacccacctggtatcaagctgaagaggaactgagtaggttctccttggtattctcatagaaaaaggtgaaaacatatactattagttgatatttgttgtaaaacaaatgaagtcttttattctggttgaaagtgatggaaagaca

SEQ ID NO: 317010 - DNA, 583 bp, Homo sapiens
agggaatccctttcttatttgtgctctcgcctttaatttaatcccggtccacaactctttcccttccaaatgcttcaaaaatctcagaatcatagttgcttcttatacaagtatgaggcaaagacctggagaaaatcaaatgtgattttgctaaaatatgtatattaatagtggaaagagagaataagatctcttgttctctawcaaaaaaaggtattcctgtctttgttacatttctgtaactctctctttctctctttgttatatttctgtaatctccctgggggcaaggaagggaaaaataaaacaccactaacaatgggtgattaatggcaggaataaacccaaatcaaacaaaaaagccatgcatagacaagtgaagtttgataaatagccagtgtcctctaatgtgaatcctttttgacatttctggaatacaacccacctggtatcaagctgaagaggaactgagtaggttctccttggtattctcatagaaaaaggtgaaaacatatactattagttgatatttgttgtaaaacaaatgaagtcttttattctggttgaaagtgatggaaagaca

SEQ ID NO: 317011 - DNA, 583 bp, Homo sapiens
agggaatccctttcttatttgtgctctcgcctttaatttaatcccggtccacaactctttcccttccaaatgcttcaaaaatctcagaatcatagttgcttcttatacaagtatgaggcaaagacctggagaaaatcaaatgtgattttgctaaaatatgtatattaatagtggaaagagagaataagatctcttgttctctaacaaaaaaaggtattcctgtctttgttacatttctgtaactctctctttctctctttgttatatttctgtaatctccctgggggcaaggaagggaaaaataaaacaccactaacaatgggtgattaatggcaggaataaacccaaatcaaacaaaaaagccatgcatagacaagtgaagtttgataaatagccagtgtcctctaatgtgaatcctttttgacatttctggaatacaacccacctggtatcaagctgaagaggaactgagtaggttctccttggtattctcatagaaaaaggtgaaaacatatactattagtygatatttgttgtaaaacaaatgaagtcttttattctggttgaaagtgatggaaagaca

SEQ ID NO: 317012 - DNA, 602 bp, Homo sapiens
tgtcctgcacccactgtccggcactccccattgagatgaacccggtacctcagttggaaatgcagaaatcacctgtcttctgcgtcgctcatgctgggagctgtagactggagctgttcctatttggccatcttggctccaccctccttttcatttaaggaaatcttgttgctctgtgattcctcacccatcagatccatagccttcataggttaggaatgggcaagtatcacccagaagaaagagatcattgttgattgagtgttgggtttgggatggggccraagaatttgcattctaacatatttttctaacatgctgatgtttagagcactttgaaagcaacctagagagataatagtcttgaaagtcaagtttactgagatagaacaaagatttataaattttagagtttccatttccatatcaataccaaaacctggagttctaaaactggttttaccataaatagatgtaagtaggccttgccagacaggacaaaaaatcctgctgctactggacagaggtggggaaggagacaaaatgactaagaaaagatagaatgttcttactcctagccaggtgcagtggcttatgcctgt

SEQ ID NO: 317013 - DNA, 602 bp, Homo sapiens
tgtcctgcacccactgtccggcactccccattgagatgaacccggtacctcagttggaaatgcagaaatcacctgtcttctgcgtcgctcatgctgggagctgtagactggagctgttcctatttggccatcttggctccaccctccttttcatttaaggaaatcttgttgctctgtgattcctcacccatcagatccatagccttcataggttaggaatgggcaagtatcacccagaagaaagagatcattgttgattgagtgttgggtttgggatggggccaaagaatttgcattctaacatatttttctaacatgctgatstttagagcactttgaaagcaacctagagagataatagtcttgaaagtcaagtttactgagatagaacaaagatttataaattttagagtttccatttccatatcaataccaaaacctggagttctaaaactggttttaccataaatagatgtaagtaggccttgccagacaggacaaaaaatcctgctgctactggacagaggtggggaaggagacaaaatgactaagaaaagatagaatgttcttactcctagccaggtgcagtggcttatgcctgt

SEQ ID NO: 317014 - DNA, 571 bp, Homo sapiens
ggtatctactgggtagggaccaaggatattgctaaacaccctacaatgtacaggacagcccctgcagcaaagaattatgcagcccaaaatgtcagtagcatcaaagttgagaatgctgccttagctcatttcctcaacctcttttgtctgaacataaatagccttctaatcagtttctttacctttagttttatccttatccacactgctgctatgactagctctttaaacacaaataaatcatgctgttctcttgctctgtttagctctgtcactctggatggctacctgggttcaaattatgattcaaacagttcaggatcatatgaccttgggcaagtgattcgtagcacctggctcaataatgttcttgtgaggattttaacactttgtagctagcataaattaagtcttcaataaatgctatctaccattttaaaaaaatctttgaaggctttctactgcctacagaagaaagcctatccttgtcaacatgatatyccttcactgtgttttattactcagagcctcttctctgggatactgccctggttgccctgtgtccagtcct

SEQ ID NO: 317015 - DNA, 551 bp, Homo sapiens
ataagaaatgtgcaacctagatcccttgcatgtgcagttcacaatagggttcatgctcgtatgagaatctaatgccctgctgatctgacaggaggtagagctcaggcggtaatgctcacttgcctcctgctgtgtggcccagctcctaacaggccacggattggtactggtccatggcctgggggttagggacccctggtttagaatatacctacaaattctccccttgaatatcaactggcctccgtgatttacttctaataaatagaatgcagcagaaattacactgtctgacatttgagcacaggtcagcggtcagcgcattttttctgcaartgctcacattgtaaatattttcagcttcacaggccatacccacatggcctctgtcacaactccatagctctgctattgtagcatgtagcagccatagataatatacagacaaccttggctattttctgatgaaaatttatttcaccttgaagccaccatgctagagaggttatgaggaaagaatacatagagatagaaagagatgctcatgaagc

SEQ ID NO: 317016 - DNA, 575 bp, Homo sapiens
tttttaatggttggatagcttctattgtgtatatataccatattttctttatctattcatctggtgatgaacatttaggttgatcccatatcttggctatgtgaatagtgttgcaataaacatggggggcagatatatgcttgtaaaagaattgccttttctctgcatcctcttctgcatttgttattttttgtctttttgataataaccattctgatgggagtgaggtgatatctcactgtagtttggatttacattttcctaatgattggtgatattgagcatttttttcatatacttcttggccatttgtatatcttcttttgagaagtgttttttcagatcctttgcccacttttaagtcaratctttttttgtatgaattgtttgagttccttgtatattctggatattagttccttttcagattaatagtttgcaaatattttttctcgttcaacacattgtctctctctcatgttgattgtttcctttggtgtacagaagctttttagtttgatatagtgccatttgtctttttttgtttctgttgcttgtgcttttgaaatcttagt

SEQ ID NO: 317017 - DNA, 526 bp, Homo sapiens
ctaatgtacagaaaaatttgagaaccaatggagtaatggttmaaggcttgcactttgaatctagacagatcttagtttcaatcccggctttaccactaatccacatgactttgggcaagttatttgacccctctgagctccaggtctttttgcaaatcagagataaaaatagtacctggcacttagggttattattaataatactaaatatatgcttagcacagtgcctagcacacagtaagtactcagaagacactaaccaatattatttaatactagtaccagagtttcaatgttagaagaaggcttgacagtggtcaaggtatacttaataaccaagacaccatggggtggagaaaaacatagcttctcactagccctgcctccagcaatcaggcagtgggaataatagagaaagcttgtgtgtgtgtgtgtgtgtgtgtgtgtgtgtgtgtgtgtgttactccccagggattctgccttgcaggatctcatcaatcaacccatttgacttattaccattatg

SEQ ID NO: 317018 - DNA, 526 bp, Homo sapiens
ctaatgtacagaaaaatttgagaaccaatggagtaatggttaaaggcttgcactttgaatctagacagatcttagtttcaatcccggctttaccactartccacatgactttgggcaagttatttgacccctctgagctccaggtctttttgcaaatcagagataaaaatagtacctggcacttagggttattattaataatactaaatatatgcttagcacagtgcctagcacacagtaagtactcagaagacactaaccaatattatttaatactagtaccagagtttcaatgttagaagaaggcttgacagtggtcaaggtatacttaataaccaagacaccatggggtggagaaaaacatagcttctcactagccctgcctccagcaatcaggcagtgggaataatagagaaagcttgtgtgtgtgtgtgtgtgtgtgtgtgtgtgtgtgtgtgtgttactccccagggattctgccttgcaggatctcatcaatcaacccatttgacttattaccattatg

SEQ ID NO: 317019 - DNA, 526 bp, Homo sapiens
ctaatgtacagaaaaatttgagaaccaatggagtaatggttaaaggcttgcactttgaatctagacagatcttagtttcaatcccggctttaccactaawccacatgactttgggcaagttatttgacccctctgagctccaggtctttttgcaaatcagagataaaaatagtacctggcacttagggttattattaataatactaaatatatgcttagcacagtgcctagcacacagtaagtactcagaagacactaaccaatattatttaatactagtaccagagtttcaatgttagaagaaggcttgacagtggtcaaggtatacttaataaccaagacaccatggggtggagaaaaacatagcttctcactagccctgcctccagcaatcaggcagtgggaataatagagaaagcttgtgtgtgtgtgtgtgtgtgtgtgtgtgtgtgtgtgtgtgttactccccagggattctgccttgcaggatctcatcaatcaacccatttgacttattaccattatg

SEQ ID NO: 317020 - DNA, 526 bp, Homo sapiens
ctaatgtacagaaaaatttgagaaccaatggagtaatggttaaaggcttgcactttgaatctagacagatcttagtttcaatcccggctttaccactaatccacatgactttgggcaagttatttgacccctctgagctccaggtctttttgcaaatcagagataaaaatagtacctggcacttagggttattattaataatactaaatatatgcttagcrcagtgcctagcacacagtaagtactcagaagacactaaccaatattatttaatactagtaccagagtttcaatgttagaagaaggcttgacagtggtcaaggtatacttaataaccaagacaccatggggtggagaaaaacatagcttctcactagccctgcctccagcaatcaggcagtgggaataatagagaaagcttgtgtgtgtgtgtgtgtgtgtgtgtgtgtgtgtgtgtgtgttactccccagggattctgccttgcaggatctcatcaatcaacccatttgacttattaccattatg

SEQ ID NO: 317021 - DNA, 581 bp, Homo sapiens
tggctaatttttttgtacttttagtaaagacggggtttcaccatgttggacaggctggtcttgaactcctgaactcaggtgatccacttgccttggcctcacagagtgccatggccakccaataattcttagtaatccttagatggatgtggtcttaactattaacgcatgtttattttagatttgccatttcaacagatttattggtttcttttttctctcagcctcctagctacctttaaaaaattgaaaatggaatcccatacctgcataaatattaagggcaaattaacttcaaggctgtgtagagacaggaagacctcagatccatatttacatgttttacctgggaatgggggtgggattcagaagaatagaaaagataattgtttccccactgattatacttcctgtgtttcattttcagttttccaataataacatagaaaaaaggaagaatttgagagtttctcagattaggcaattccttgaagaatctgagaacacagaagctcccctccctactttccatgattgaaatcagtgattcattggtttctttgtgtgggcttttgaaagat

SEQ ID NO: 317022 - DNA, 581 bp, Homo sapiens
tggctaatttttttgtacttttagtaaagacggggtttcaccatgttggacaggctggtcttgaactcctgaactcaggtgatccacttgccttggcctcacagagtgccatggccagccaataattcttagtaatccttagatggatgtggtcttaactattaacgcatgtttattttagatttgccatttcaacwgatttattggtttcttttttctctcagcctcctagctacctttaaaaaattgaaaatggaatcccatacctgcataaatattaagggcaaattaacttcaaggctgtgtagagacaggaagacctcagatccatatttacatgttttacctgggaatgggggtgggattcagaagaatagaaaagataattgtttccccactgattatacttcctgtgtttcattttcagttttccaataataacatagaaaaaaggaagaatttgagagtttctcagattaggcaattccttgaagaatctgagaacacagaagctcccctccctactttccatgattgaaatcagtgattcattggtttctttgtgtgggcttttgaaagat

SEQ ID NO: 317023 - DNA, 617 bp, Homo sapiens
aaatatttgaaaaagtaaaatttgctcattctaataagttaaaccatggcagaaacataaaaaaactcatcatcttttgtactgcccacatccttaaggtggygaacgtgaacaggttggtatgaatattttcatatcttttgctgtaggtaggttttaatatattttaaaccaaatgatattatacgaaacccaatcatctgcatcttttttttcttttaggttttgtaaaagcatgtgcttccctgcaggaactgtttactgctagagagcacagaaacctaggacagggtgtgtcacgggaggctagatctgtggcccttacaagtctagaccccaagcaggaagattacaactcagtgattctcatgggggcatatttggggggtattttgccaccccactctccagggaacatttgatagtgccagaggcactttgctgtcacacccgtggggggtgctcctggtattttgtgggtacagcccagggattctgctcaccattctaccatgtacaaggcagccactgcccctacccccacccctgccaactgcccacacagcaaagaatgaactagcccaaaacgttaatggtgccagattgagaaatattag

SEQ ID NO: 317024 - DNA, 593 bp, Homo sapiens
cattttttatccttcacaccatatttttattrtatcttttctatgtttagattttttttttttttttttgagacagagttttgctcgttgcccaggctggagtgcaaaatggcacagtcttggctcactacaacctcacctccctggttcaagtgattctcctgccttagcctctccagtagctgggattacaggcatgcgccaccatgcctggctaattttgtatttttagtagaggtggggtttcaccatgttggtcacaaatacttcccatagtgttacgattgtctaaagtattcagtcaagtaacatgctctgtaggtttgtagccaaggagcaacaggctatatattatataggctacatgtggaagaggctataccatttaggtttatgtaagtacactctcatgttcgcacaataatgaaattgcctaatgatgtattttttagaatgtatccatgtcatcaagtgacacatgaccgtaattttctaaagttttcctctatatactttagaactgtatcagaaagtattatactctttgcttcaatcatcaaacataatttagaaaacacaacaggagatgaaaa

SEQ ID NO: 317025 - DNA, 593 bp, Homo sapiens
cattttttatccttcacaccatatttttattgtatcttttctatgtttagattttttttttttttttttgagacagagttttgctcgttgcccaggctggagtgcaaaatggcacagtcttggctcactacaacctcacctccctggttcaagtgattctcctgccttagcctctccagtagctgggattacaggcatgcgccaccatgcctggctaattttgtatttttagtagaggtggggtttcaccatgttggtcacaaatacttcccatagtgttacgattgtctaaagtattcagtcaagtaacatgctctgtaggtttgtagccaaggagcaacaggctatatattatataggctacatgtggaagaggctataccatttaggtttatgtaagtacactctcatgttcgcacaataatgaaattgcctaatgatgtattttttagaatgtatccatgtcatcaagtgacacatgaccgtaattttctaaagttttcctctatatactttagaactrtatcagaaagtattatactctttgcttcaatcatcaaacataatttagaaaacacaacaggagatgaaaa

SEQ ID NO: 317026 - DNA, 536 bp, Homo sapiens
gcaggattagggtaatcatacaaaatcagtttagtcagattctcacccttgggaaaatctggcttaacaccccttggctagcagaacaagtatgccattatcacagtaacagctttttggtagaaactcaaaagccacttgttgattaattggtagaaatgggaggaaagtttatrtcagagacaacttgattttgcaagatctagcaaggttagcattaactctcactgtcacagaatgtgcaatataaaggccacagtgttaggagattgggtagattgttataaaatgtcaatccatctaacaagaaggataagccaattttattgaccgtaagtcttaaagtattttattgacttaacagccaaataagaaagaaaaatggagaaggaaaaaaatgaatcagtaaagaaagttgaattacaataatatcgctgctgagatttgtaattcaatggaaacaagtcatttaaattcagcctttaaaaataattatagagaatttttttggaattattacgaatatgggattttga

SEQ ID NO: 317027 - DNA, 614 bp, Homo sapiens
accctttggtctccctgagaaattcctgtagggaatctgtgaaagaaagggcaggattagggtaatcatacaaaatcagtttagtcagattctcacccttgggaaaatctggcttaacaccccttggctagcagaacaagtatgccattatcacagtaacagctttttggtagaaactcaaaagccacttgttgattaattggtagaaatgggaggaaagtttatatcagagacaacttgattttgcaagatctagcaaggttagcattaactctcactgtcacagaatgtgcaatataaaggccacagtgttaggagattgggtagattgttataaaatgtcaatccatctaacaagaaggataagccaattttattgaccgtaagtcttaaagtattttattgacttaayagccaaataagaaagaaaaatggagaaggaaaaaaatgaatcagtaaagaaagttgaattacaataatatcgctgctgagatttgtaattcaatggaaacaagtcatttaaattcagcctttaaaaataattatagagaatttttttggaattattacgaatatgggattttgaaggggtttaaaactgtgtgtgtgtatat

SEQ ID NO: 317028 - DNA, 546 bp, Homo sapiens
cgaggagttgtgatcctttggaggagaagaggcattctggtttttggaattttcagcctttttgtgctggtttctccccatctttgtggatttatctacatttggtctttgatgttggtaaccttcagatgaggtttttgagtggacgtgctattcctttctgtttcttagttttccttctgacagtcaggctcctctgctgcaggtctgctggagtttgctggaggtccactcccaactctgtttgcctgggtatcagcagcagaggctccagaacagcaaatattgcttcctgctttttcctctggagactttgtcccagaggggcacctgccagatgccagtcagagctctcctttatgaggtgtctgttggctcctactgggaggtatctcccagttaggatacatgggggtcagagagccacttgaggaggtagtctgacccttagcagagcttgaacactatgctgggaggtctgctgctctcttcagagctgtcargcagggatgtttaagtttgctgaagctgcgcccacagctgccc

SEQ ID NO: 317029 - DNA, 572 bp, Homo sapiens
actttctcttgcagctttaataccagctcagccatattaggataaggcaacacacaaagccttaatgcccccattccaggccctagctcccagatagcactttctgacaccccctggaccagaaaggaacccattgccttgaaaggaagggctgagtcctggcaagattcatcayatgctgactgaagagccctttgacccttttcagcagtggtaaccaagtagcacatgctatgggccttggatgaaactctgaaacatgtgggcttcaggtatgacccagcacattaataatcatgatggctatgagcacagatgccttctgcttgaaaaaaaacagagagaggagtaaagaagactttgtcttgaacataggtaccagctcggtcacagtagggaagaacatcaagcaggcacttacggtccttagtaccaggcttcggctcttgagcagcatctctggacctagcctgggccagaggagagcccctgccctgaaaaatgggtaccaggcctggcagtatccatcacaagctgactgaagagcccttaagtcttaagtaaacatcggt

SEQ ID NO: 317030 - DNA, 574 bp, Homo sapiens
agatagcactttctgacaccccctggaccagaaaggaacccattgccttgaaaggaagggctgagtcctggcaagattcatcatatgctgactgaagagccctttgacccttttcagcagtggtaaccaagtagcacatgctatgggccttggatgaaactctgaaacatgtgggcttcaggtatgacccagcacattaataatcatgatggctatgagcacagatgccttctgcttgaaaaaaaacagagagaggagtaaagaagactttgtcttgaacataggtaccagctcggtcacagtagggaagaacatcaagcaggcacttacggtccttagtaccaggcttcggctcttgagcagcatctctggacctagcctgggccagaggagagcccctgccctgaaaaatgggyaccaggcctggcagtatccatcacaagctgactgaagagcccttaagtcttaagtaaacatcggtggtatcctggcagtattccctatgggcctatggtggtggtagacacaaggagagacacctctgattgaggaatgaggggggaagagtgagaaa

SEQ ID NO: 317031 - DNA, 543 bp, Homo sapiens
actgaacctggggtgctgcctaatgcagatatagctgcagtgaccaaaaaagatcataacatccaagatccttcaaattcctggaaagccttccaaagaaggacaggtacaaacaagctcagatagtgagtctaaaataagyagtaaagtttattcaaagagataataccagagcacttctcaaacctatagaaaggtaccaatatccaataacaagaaggttatagaacaccaaggagatttaactcaaagaagactacctcaagccatttaataatcaaactccaaagatcaagggtgaagaaaagattctaaaagcagtaaaagaaaagaaataaataatatacaatggagcttcaatacatctcgtagcacacttttcagtgggaacctcacaggtcaggagagagtgacatgacatatttaaagtgctgaaggaaaaaaaaaaacaaagcaaaaaccttataccctagaacagtatatcttgcaaaaatatccttcaaatatgaagcagaaatactttcccagacaaacaaaagctga

SEQ ID NO: 317032 - DNA, 543 bp, Homo sapiens
ctgagcccaggagtttgagagcagcatgagaaaaaaggaaagatcttgtctccacacacaacaaaatttaaaaatagcctgaatgatgacaaatgcctgtgttcccagctacttgggaggatttggtgggaagatccctttagaccacaaagtcaaagttgtagaaagctgtgattgtgccactgcactccagcctgagtgaaagagcaagactctgtctcaaaaaaataaataaataaataaataaaagggaaaactgattaaaaataactatagcaacttttcaagacatgaaaagtacaataagatatgaatagaaatggcaaaaawtttaaaacagggagatgaagttaaatcatagaattttaattggttttctttttgcttggttgtttgtttatgcaatcactgttaagttgtcattatcagtttaaaacactgtttatgtgatacttgaaaacctcctggtaacctaatttctaaaaaaatacagcaaatacataaaaattagaagcaagaaattaaaacataccaccagagaaa

SEQ ID NO: 317033 - DNA, 572 bp, Homo sapiens
tacaaatggctaatagtatatcaaaaggtgctcaaccttactgagcaacagaaaaatgcaaaccaaaatggcaatgaaatatcctctaacccacttataatggcttttatccaaaagacaggcaataactaatactggtgatgatgtggagaaaagagaactctcatacactgttggtgggaatgtaaattaatacaaccattatggagatcagtttggaggttcctcaaagagttaaagatggccaggagctgtggctcacgcctgtaatctgagtactttaggaggccaagacgggcagatcatgaggtcaggagttctagacaagcctggccaacatagtgaaaccccgtctctactaaaaatacaaaaattcactgggtgtggtggtgcatgcctgtaatctcagctactcaggaggctgaggcaggataattgcttgaacccgggaggcggagkttacagtgaggagagattgcgccactgtactcccgcctgggcaacagagcaagactctgtcttagaaaaaagaaaaaaaaaaagttaaaaatgaagctacaatatgattaagc

SEQ ID NO: 317034 - DNA, 549 bp, Homo sapiens
gccagtagtggctcagtccaagtcccaaagccaaaaaagtagggaagccaaaagcatagccttcaggctatggttgaagccctgagatcccctggaaaaccactggtgtaagtccaagtmcaaaggaggaagaacctaaagtctgatgttcaaggacagaaagcattcaacatgggagaaagatgaaaaccagaagattcagcaacccagcatagtccaccttctcctgcctgctttttctaaccatgccagcagccaactggatggtgctcacacacattgagggtgggtcttcctttaccagtccactgactcaaatgttaatctcctctagtaacatcctcacagacacactcagaaacaaaactttgcatccttcagtccaattctgaatcagtcacctgattcagcacctttatattaaccatcacacctatcaaatgccttttacaacaacttgaactttttcacattttgttgtaaatgaagttaggtcatttgtggaggtattgggaactctattttatgtcctgtttctcttcccagccc

SEQ ID NO: 317035 - DNA, 549 bp, Homo sapiens
gccagtagtggctcagtccaagtcccaaagccaaaaaagtagggaagccaaaagcatagccttcaggctatggttgaagccctgagatcccctggaaaaccactggtgtaagtccaagtcmaaaggaggaagaacctaaagtctgatgttcaaggacagaaagcattcaacatgggagaaagatgaaaaccagaagattcagcaacccagcatagtccaccttctcctgcctgctttttctaaccatgccagcagccaactggatggtgctcacacacattgagggtgggtcttcctttaccagtccactgactcaaatgttaatctcctctagtaacatcctcacagacacactcagaaacaaaactttgcatccttcagtccaattctgaatcagtcacctgattcagcacctttatattaaccatcacacctatcaaatgccttttacaacaacttgaactttttcacattttgttgtaaatgaagttaggtcatttgtggaggtattgggaactctattttatgtcctgtttctcttcccagccc

SEQ ID NO: 317036 - DNA, 549 bp, Homo sapiens
gccagtagtggctcagtccaagtcccaaagccaaaaaagtagggaagccaaaagcatagccttcaggctatggttgaagccctgagatcccctggaaaaccactggtgtaagtccaagtccaaaggaggaagaacctaaagtctgatgttcaaggacagaaagcattcaacatgggagaaagatgaaaaccagaagattcagcaacccagcatagtccaccttctyctgcctgctttttctaaccatgccagcagccaactggatggtgctcacacacattgagggtgggtcttcctttaccagtccactgactcaaatgttaatctcctctagtaacatcctcacagacacactcagaaacaaaactttgcatccttcagtccaattctgaatcagtcacctgattcagcacctttatattaaccatcacacctatcaaatgccttttacaacaacttgaactttttcacattttgttgtaaatgaagttaggtcatttgtggaggtattgggaactctattttatgtcctgtttctcttcccagccc

SEQ ID NO: 317037 - DNA, 595 bp, Homo sapiens
gtccaccttctcctgcctgctttttctaaccatgccagcagccaactggatggtgctcacacacattgagggtgggtcttcctttaccagtccactgactcaaatgttaatctcctctagtaacatcctcacagacacactcagaaacaaaactttgcatccttcagtccaattctgaatcagtcacctgattcagcacctttatattaaccatcacacctatcaaatgccttttacaacaacttgaactttttcacattttgttgtaaatgaagttaggtcatttgtggaggtattgggaactctattttatgtcctgtttctcttcccagccctggtgctcatggcaaggccactaggctgatgatgcactyttctgagtgacacccccaatttaggagctgagagattggtatctggcacatatctgatagcccttggcatgtggtacacatctgatagacctctcttctggtagcctctctgggctacccccatgggcctggctaagggtaatgagagccctgatattctcagtcatgctctgctcaaaacagaatattaatctcataattgggaattagccaaatgaaga

SEQ ID NO: 317038 - DNA, 264 bp, Homo sapiens
agctgagagattggtatctggcacatatctgatagcccttggcatgtggyacacatctgatagacctctcttctggtagcctctctgggctacccccatgggcctggctaagggtaatgagagccctgatattctcagtcatgctctgctcaaaacagaatattaatctcataattgggaattagccaaatgaagagaatccccacttcttggctgaacttgcccagaagtttggctcagtaactaatagctggacacagagct

SEQ ID NO: 317039 - DNA, 483 bp, Homo sapiens
agggagtggttctgagtctagaaaacataatagacaaaacaagaaagaaattatatgatattatggargtttcagatactagcataatatgccaaaggaattccaagaggagattgagttatatcttagcatccgctatccagcatatatccaaggaactgttcagggccaggtacaccattccacaatatgccatttaatataatttatcacagttaattagtttaaaaggtttatttcagactatgctccgatcagggtgtaaggaaatgtagaatttacaaatgatgaaattatgattcaagactgaccaattttgctagattttcaattagagattgattataaatgcttctctgagaataaatataatcttctgagattttcccatctgcaaaagccagctctcctaagccaattctatctttagtctaccttgtacaaatctcacaaggcatagcctaggacctattgccttgccag

SEQ ID NO: 317040 - DNA, 569 bp, Homo sapiens
aggaatgtgtatacaagtttgataaaatctctaagaaaaaaaaaccctgaactcatagaaaataagtagttctcttattccattgcacgttacatattttctttttcrtttatttatttatttatttatttattttttgagacagagtctcattattgtctcccaggctggagtgcagtggcgtgatctcatagtctcatggtgttgacttctaattttattctacggtagtccgtgaatcatagagagactggactgggaacttcccagggtacttgtccacaggtcctcagggatggtaatagggtggggcaggctgatcctcaggtcactcaggtgaggacaagcagaatacttaggcggttacagaatgctcaggtagcagcagccacagggcagatccaaggcctctctgggctgagctttcaggagggctcagggccacaactgaaacaatcagatgggatggggtggctgtgctgcaggtttgtcactggcgaagacaggcccccatcagcagcagtggaggcaggcagttgaaaaatatgttgcctgcttgcacctcgcta

SEQ ID NO: 317041 - DNA, 569 bp, Homo sapiens
aggaatgtgtatacaagtttgataaaatctctaagaaaaaaaaaccctgaactcatagaaaataagtagttctcttattccattgcacgttacatattttctttttcatttatttatttatttatttatttattttttgagacagagtctcattattgtctcccaggctggagtgcagtggcgtgatctcatagtctcatggtgttgacttctaattttattctacggtagtccgtgaatcatagagagactggactgggaacttcccagggtacttgtccacaggtcctcagggatggtaatagggtggggcaggctgatcctcaggtcactcaggtgaggacaagcagaatacttaggcggttacagaatgctcaggtagcagcagccacagggcagatccaaggcctctctgggctgagctttcaggagggctcagggccacaactgaaacaatcagatgggatggggtggctgtgcygcaggtttgtcactggcgaagacaggcccccatcagcagcagtggaggcaggcagttgaaaaatatgttgcctgcttgcacctcgcta

SEQ ID NO: 317042 - DNA, 579 bp, Homo sapiens
aactaaactctaaaaaactctaaaatgtccagggttgatgagaatagctctcatgccaacccatgtcccagtatattcttgcaataaaatttagtcaactaagataacccatatgctttttttttcttaaatgactcaaagttatgaggcaaaggggttggattagtttgtttcacactgctgataaagacatacccaagactgagtgctttataaagaaaagaggtttaattgactcacagttccacatggctggagaggcctcacaatcatggcagaaggcaaggaggagcaagtcacatcttacatggcagcagggaagasagagcttgtgcaaggcaactcttccttataaaacaatcagatctcatgagctgtattcactatcaccagaacaggatagaacagacctgtctcacaattaagttacttcccactggatcccttccatgtcatgtgggaattgtgggagctataattcaagatgagattttgggtggggacacagtcaaaccatatgaggggatgtcccttagtttctcaggcgatgcatgatctgcttatataggaccagagttt

SEQ ID NO: 317043 - DNA, 579 bp, Homo sapiens
aactaaactctaaaaaactctaaaatgtccagggttgatgagaatagctctcatgccaacccatgtcccagtatattcttgcaataaaatttagtcaactaagataacccatatgctttttttttcttaaatgactcaaagttatgaggcaaaggggttggattagtttgtttcacactgctgataaagacatacccaagactgagtgctttataaagaaaagaggtttaattgactcacagttccacatggctggagaggcctcacaatcatggcagaaggcaaggaggagcaagtcacatcttacatggcagcagggaagagagagcttgtgcaaggcaactcttccttataaaacaatcagatctcatgagctgtattcactatcaccagaacaggatagaacagacctgtctcacaattaagttacttcccactggatcccttccatgtcatgtgggaattgtrggagctataattcaagatgagattttgggtggggacacagtcaaaccatatgaggggatgtcccttagtttctcaggcgatgcatgatctgcttatataggaccagagttt

SEQ ID NO: 317044 - DNA, 587 bp, Homo sapiens
tgacttgggtgctcttaaaagcatgcagttttatgcattcacaaagaggtggtttagaaatggaactaatatttaaagtggaaggagagcataaaagattggaaaatttgcagcctgaggatgttatagaaaagaaaaacccatttcctgaggagaaatttgagccagctgcagaaatatgcataagtaacaagcagccaaatgttaaatcatgaagacaatgggaaaaatatctccagggcatgtgagagacctttctggtagcctcccccatcacaggccaagaggcctaagagaaaaaaagtggttttgtgggccgggtccagggccttgctgctttgtgcagtctcagcatttggtgccgtgcatcccagtcattggtaaaaggggccaacgtacatcctaggcaattgctttagaaggtaaaagcctcaaaccttggtggcttacacatggtgttgaacctggaggggcacagaagtcaagaattgaggtttgggaacctctgccyagatttcagagaatgtatgagaatgcctggatgtttaggcagaagttggctgcaggagcagaaccctcatggagaa

SEQ ID NO: 317045 - DNA, 566 bp, Homo sapiens
catgatctcggctcactgcaacctctgcctcccacgttcaataatttttcctgcttcagcctcccaagtagctgggactacaggcacgtaccaccacacctagctaattttttgtattttttagtagagacaggtttcactatgttagccagcatggtctccatctcctgacctcgtgatccacccacctyggcctcccaaggtgttgggtttacaggcatgagccaccaggcccagccaacttttatctattttttaaaaacatttttgtctgcatttggccaaactgaactgataatattgttaaatatagagttatatttctgaattcattaattttaattttccacaaaattccttttttgataatataaatcactctattacaaagatacatgcacacgtatgttcatgcagcacattttacaatagcaaagacatggaatcaatccaaatgcccatcaatgatagactggataaagaaaatgtggtgcatatacaccatggaattctatgcagccataaaaaggaatgagatgatgtcctttgatgggacatggatgagg

SEQ ID NO: 317046 - DNA, 566 bp, Homo sapiens
catgatctcggctcactgcaacctctgcctcccacgttcaataatttttcctgcttcagcctcccaagtagctgggactacaggcacgtaccaccacacctagctaattttttgtattttttagtagagacaggtttcactatgttagccagcatggtctccatctcctgacctcgtgatccacccacctcggcctcccaaggtgttgggtttacaggcatgagccaccaggcccagccaacttttatctattttttaaaaayatttttgtctgcatttggccaaactgaactgataatattgttaaatatagagttatatttctgaattcattaattttaattttccacaaaattccttttttgataatataaatcactctattacaaagatacatgcacacgtatgttcatgcagcacattttacaatagcaaagacatggaatcaatccaaatgcccatcaatgatagactggataaagaaaatgtggtgcatatacaccatggaattctatgcagccataaaaaggaatgagatgatgtcctttgatgggacatggatgagg

SEQ ID NO: 317047 - DNA, 498 bp, Homo sapiens
ggtactatgcttattacctgtgtgacaaaataatctgtacatcaaacatcaaatcatgmaatttgcctttataacaaacctgcacatgtacccttgaccctaaaataaaagttaaaaagtatcttttggggaaaggaagacattagagaaaagagcagttcataaagacatgcagtaaagataacaaagtttggtatacacatacacatacttgcacctgctgaatattagagtctttttattttgtctattatagtttgcagaggagaaccctcaaacatatttttacatttagatattccaataaatgtaaaaattgtacagacagactatcctcatcttacttttttttttttttgaggaaaaaatatttgggaattagaatggtaagtgcttttctgaagtttgtatagttagtaagtcatggagactatacacaaactcagccttgagattcaacctccacattgctgtccatggcaccaagttcacaaattg

SEQ ID NO: 317048 - DNA, 498 bp, Homo sapiens
ggtactatgcttattacctgtgtgacaaaataatctgtacatcaaacatcaaatcatgcaayttgcctttataacaaacctgcacatgtacccttgaccctaaaataaaagttaaaaagtatcttttggggaaaggaagacattagagaaaagagcagttcataaagacatgcagtaaagataacaaagtttggtatacacatacacatacttgcacctgctgaatattagagtctttttattttgtctattatagtttgcagaggagaaccctcaaacatatttttacatttagatattccaataaatgtaaaaattgtacagacagactatcctcatcttacttttttttttttttgaggaaaaaatatttgggaattagaatggtaagtgcttttctgaagtttgtatagttagtaagtcatggagactatacacaaactcagccttgagattcaacctccacattgctgtccatggcaccaagttcacaaattg

SEQ ID NO: 317049 - DNA, 498 bp, Homo sapiens
ggtactatgcttattacctgtgtgacaaaataatctgtacatcaaacatcaaatcatgcaatttgcctttataacaaacctgcacatgtacccttgaccctaaaataaaagttaaaaartatcttttggggaaaggaagacattagagaaaagagcagttcataaagacatgcagtaaagataacaaagtttggtatacacatacacatacttgcacctgctgaatattagagtctttttattttgtctattatagtttgcagaggagaaccctcaaacatatttttacatttagatattccaataaatgtaaaaattgtacagacagactatcctcatcttacttttttttttttttgaggaaaaaatatttgggaattagaatggtaagtgcttttctgaagtttgtatagttagtaagtcatggagactatacacaaactcagccttgagattcaacctccacattgctgtccatggcaccaagttcacaaattg

SEQ ID NO: 317050 - DNA, 498 bp, Homo sapiens
ggtactatgcttattacctgtgtgacaaaataatctgtacatcaaacatcaaatcatgcaatttgcctttataacaaacctgcacatgtacccttgaccctaaaataaaagttaaaaagtatcttttggggaaaggaagacattagagaaaagagcagttcataaagacatgcagtaaagataacaaagtttggtatacacatacacatacttgcasctgctgaatattagagtctttttattttgtctattatagtttgcagaggagaaccctcaaacatatttttacatttagatattccaataaatgtaaaaattgtacagacagactatcctcatcttacttttttttttttttgaggaaaaaatatttgggaattagaatggtaagtgcttttctgaagtttgtatagttagtaagtcatggagactatacacaaactcagccttgagattcaacctccacattgctgtccatggcaccaagttcacaaattg

SEQ ID NO: 317051 - DNA, 520 bp, Homo sapiens
tctacacctctttctgtgagtctcaagtgccaaatcctattgtatgaaatgctaatgtaatcttgatgatttttgtgcaagaaaaatgggagaacaaagtaaatatatatatacacacacacctacacacatatcacatatatatgtatgtgtacacacacacatctacacatctatattttatatatatrtatatatatatatatagccttaattgaattttatgtggagaagaaaaaataaattggttggaataaaacatttttgctgattaagtaccacctattaaagttctgtgagatgtttggtatttatgttatgttatgggccataaatgtaaaaaaatgatgactgtcatattatagaaaaatagagtatcttttcaaaatcccacaatcaaaattttatatcatgaaataaaatagtttgagttagaagacatagcataataatataatgtggcttggtttaataaattttaaaagataataaaaatgttatttttttctcttcaaatgag

SEQ ID NO: 317052 - DNA, 570 bp, Homo sapiens
acacacatatcacatatatatgtatgtgtacacacacacatctacacatctatattttatatatatatatatatatatatatagccttaattgaattttatgtggagaagaaaaaataaattggttggaataaaacatttttgctgattaagtaccacctattaaagttctgtgagatgtttggtatttatgttatgttatgggccataaatgtaaaaaaatgatgactgtcatattatagaaaaatagagtatcttttcaawatcccacaatcaaaattttatatcatgaaataaaatagtttgagttagaagacatagcataataatataatgtggcttggtttaataaattttaaaagataataaaaatgttatttttttctcttcaaatgagtcccaatattctggtgtttctgcaaactttgaaagaaatttgatttgtagacataaacattttgggaatactagaagaatactagaatacagggaagaatatagaacaaaacatttttaaaatgatgtatttctgaatggctgtatatcatgacttacaaagatgggagaagtt

SEQ ID NO: 317053 - DNA, 570 bp, Homo sapiens
acacacatatcacatatatatgtatgtgtacacacacacatctacacatctatattttatatatatatatatatatatatatagccttaattgaattttatgtggagaagaaaaaataaattggttggaataaaacatttttgctgattaagtaccacctattaaagttctgtgagatgtttggtatttatgttatgttatgggccataaatgtaaaaaaatgatgactgtcatattatagaaaaatagagtatcttttcaaaatcccacaatcaaaattttatatcatgaaataaaatagtttgagttagaagacatagcataataatataatgtggcttggtttaataaattttaaaagataataaaaatgttatttttttctcttcaaatgagtcccaatattctggtgtttctgcaaactttgaaagaaatttgatttgtagacataaacattttgggartactagaagaatactagaatacagggaagaatatagaacaaaacatttttaaaatgatgtatttctgaatggctgtatatcatgacttacaaagatgggagaagtt

SEQ ID NO: 317054 - DNA, 581 bp, Homo sapiens
catcaatgctaaagagcaatctccagaggaaagagaagctcaaatacacagacccatggaagtttgagttatctttaacgaaatctaaagaatttcattgtttttatttatttgggaagaaaattatttacacatcattaaaaaatgtaaaaaaagaaaactgcgaaaagatggaaaatagagaagagtaaataatcattatgttttccaccactcatacagttttacttttcaagtttctctttctaatttaatagagctgagtttcaggmttaaagttacaaagtggcgagaatactcataaatcatttagttaagtttcccattaataaaatcaaatatgttaaatagtaaattaataaattactaaatataattataaattatttggaatttgcagttattattcacttgctcattgtaaactcttctataaaagaagtgtgtttttctaatgtatattggattcacttattgactacaaagtttataggaacataaaagatgtgtgagagcaacagcaacatttgaaccaaaatacaaaaaaaaattagtgatttttaacaatatgaaataaaggt

SEQ ID NO: 317055 - DNA, 550 bp, Homo sapiens
aagagaaagctgagttgcttgatatgtactgtagattaaggtctgtagctgctgttgcctgccattttagacagacgattcatcttctaaagagatgacataaattttgggtattgataagtacagaacagtactctctttcttatgattttcttaataatattttcttttctctagtcttctttattgtaagaatataatacataatacatgtaacacataaaatatgtataagtcagctgcttgttattgataaagctcctggttaacagtaggctactagtagctaggttttgggggaatcagaagttaaatacggattattgactgtgtgggggaggttgatgctcctaatgcctgtgttgttaaaaactcaactgtaattaaaaggaaagaacttttcatagggagattaccttggattatgaaggtgagttcaawctaatcacacatgatctctttaaaacggggaactgtcactggttggagtcagcgagatgtgatagtagaattctgagacattagaaatgtgtgaggggctagaaatgct

SEQ ID NO: 317056 - DNA, 581 bp, Homo sapiens
cagtcaattctctcccacaggcagacttgttcaatttatatcagatagattagttttttcatctgcaagcaaatagaatcattcagacttctgcttctagcaagatgaattaactgtgattggacctaccctcctatttaaaacaactaaaaacattagatgaaatatatttaaaaacagttgtatgtcattggacatcagacaaygaagatcagtgaccctcgtgttgagatttctattgtaatttggtcttgatgtctctctcttgaaaatgtcaataaaccagacacccactctctaggagagccccgatcggtgggaaaattaggttcaggtagacgtattagggagtgaaagcaaaacgtataacatagaagaaatgtgttacttacaggtccagagaagttaggggtgccaataggaggccaaggagaagtttggaggagtaagggaactcaaccagcaggtagggagtgatagagaaaggaaacctttgggattatgtctttattaaggtttatggtattttcctttaggcttttccttaggggttgtgaattgcctattttaaagaaaatgca

SEQ ID NO: 317057 - DNA, 468 bp, Homo sapiens
aataaaaactataaattacagatcagaagagtttatataaattcacacagaaaaaaaatgaagaaaattacaccaaggcatattataaccaaataaaatttgttccaaatagaaggtaaagataaaacgttaaaagtagaaataaaagaaagattcattacatacagaggaacaaagaaataaatagcacattcttgtcagaaacaatgcaagagacaatacagaaaacatatattttatatattaaaaagataaaatgtcaaatttgaattctatattcacaaaaataaaaacaaaggtgacataatgacttttttggacatacaaatcctgaagacatttatcaccaacggtttctcacaacaagaaatattaaataaacttcatcagtgaraaggaaaatgatacaagaattgtgaatgtacccaaataaatgaagagcaccaaaaaaagttaaccacttaggtg

SEQ ID NO: 317058 - DNA, 599 bp, Homo sapiens
caacaatgcataaagttcaaagaccttcatggtgcaagataactgaagtcagagctactacagaaactttmatctctattggttgtttattgaatcccaagtgtctacttatcttttgtagcataaattggacattctgaaaatagccataaattggacattctgagagtggccattattattattattttgagaaaggctttcactgtgtcacccaggctggtgtgcagtggcactgcaacctccgccccaggggctcaagtgatcctctcacctcagcctcctgagtagctgggaccacatgcgtgcaccaccaagccaggcaacttttttttttttttttgtagaattggggatctcaccatgttgccctggctggcctgaaactcctgaacttaagcaatccatccacctcggcctcccaaagtgctgagattacaggtgtgagccactgaactcggcccaagaatggcctttagtaaaattcctcttttcttttgaattgtgaaccacactaaaaatatgcactggagtctgatgaagatgagtattaataactgctttattaatagtaaagctgtatttgaactggtagctat

SEQ ID NO: 317059 - DNA, 572 bp, Homo sapiens
gaatcaaatatttttatttctagcctttatagtgaagggagagaggcaagggagacgagtgttgagtcaacaactcccaaaccctacaaatcaatacccagggagtatttcttacatatatagacatgagtcctataagagcaaatgttatgctttttcttttagcttcaaactcatctctattcttcgttgtgctagagctgagactttgcaaatcaaatttctatttttccagctggttccctcttaggttatgccagtagaatggtgctagagagagasagagaggccagaggagaggggaaggatttgctacctttgttttgcttcctgctaatatcaacccagtcgcccttcactctgtcagcaactgttgtgtccattttacaggttataattcttttcatatcccaaaagactagtatcatcatgcttcctcaaagacatcagcagcagctggatgatccccagatgaactgggacccttgtccatcaccctatggtctctcaccactagtaggcagcaaccctccatcccaactctgcagtaacccttctctaaatttctaaat

SEQ ID NO: 317060 - DNA, 572 bp, Homo sapiens
gaatcaaatatttttatttctagcctttatagtgaagggagagaggcaagggagacgagtgttgagtcaacaactcccaaaccctacaaatcaatacccagggagtatttcttacatatatagacatgagtcctataagagcaaatgttatgctttttcttttagcttcaaactcatctctattcttcgttgtgctagagctgagactttgcaaatcaaatttctatttttccagctggttccctcttaggttatgccagtagaatggtgctagagagagagagagaggccagaggagaggggaaggatttgctacctttgttttgcttcctgctaatatcaacccagtcgcccttcactctgtcagcaactgttgtgtccattttacaggttataattcttttcatatcccraaagactagtatcatcatgcttcctcaaagacatcagcagcagctggatgatccccagatgaactgggacccttgtccatcaccctatggtctctcaccactagtaggcagcaaccctccatcccaactctgcagtaacccttctctaaatttctaaat

SEQ ID NO: 317061 - DNA, 585 bp, Homo sapiens
actaatccaattatcatctgtggttgattgtgataatgtccttccttgaaaaaagttctttgaagaacaaaatggctattatgcccttagctattgcagcaatgacaatgaccataaggatcatagagtgagatgcttttcttgattacactgaaattcttataaagaataaaataataataaactcaaattttaaaattgtcagcttaagtcttggtctggaaactagagaacttctatggtgaccctaaaagaacctcttatttttgtagcttcaaggttgatgtcactgacattgtatgttctatagaattgctacctaagttgattttcaatgtggatgctgtgatgtgctggccaaatcccccttgaacaatcaataccttaagtcttccatctgctggcagtgctagttgatcaatcttagttgtgtcattacctttggggaataattggactgtataaaaatatgtctccaaggtcatgcctcattccagaggcgttctrcatctccagtgactgattgattctgttggctaaaaacccggtcctctcaataccacttggtgtaatgctgaagagatg

SEQ ID NO: 317062 - DNA, 567 bp, Homo sapiens
caatatatacaaatcagagagagccaacctgtagtggaaagtgtcataaaatacatatgtgtaccaacacataaaggaaaaatcttggtgaaaataatatattgcagtcgggcaaggatgataacccttcagatggctgaggatggaagatccagtttaatatagaagcaatgtagaaatctaatgtctcacctaggccctactaaacatactagggaaagagacaactaaggaaacagaattatgtcttattgctccagaaaaggagcaagaaccactttctcatagctattaaggtastatgggtccctcaagagctaaaaagctcaaaaagttgaacaaaggcaagatttgaggactcagttataaagaagatatcagtccttcttttaccaatatgtcatcctgggcaaaaactctaggttacttaaaattaatcaaggttttggagaatctttaacatgtgatcctgcagctaagataattgggtggacaaaaggaaagactgccttaggaggcagagcacaacattacaatacatcccatagaagaagtagcagttgcaat

SEQ ID NO: 317063 - DNA, 567 bp, Homo sapiens
caatatatacaaatcagagagagccaacctgtagtggaaagtgtcataaaatacatatgtgtaccaacacataaaggaaaaatcttggtgaaaataatatattgcagtcgggcaaggatgataacccttcagatggctgaggatggaagatccagtttaatatagaagcaatgtagaaatctaatgtctcacctaggccctactaaacatactagggaaagagacaactaaggaaacagaattatgtcttattgctccagaaaaggagcaagaaccactttctcatagctattaaggtagtatgggyccctcaagagctaaaaagctcaaaaagttgaacaaaggcaagatttgaggactcagttataaagaagatatcagtccttcttttaccaatatgtcatcctgggcaaaaactctaggttacttaaaattaatcaaggttttggagaatctttaacatgtgatcctgcagctaagataattgggtggacaaaaggaaagactgccttaggaggcagagcacaacattacaatacatcccatagaagaagtagcagttgcaat

SEQ ID NO: 317064 - DNA, 619 bp, Homo sapiens
aaccagcctgtgattcccctgttgcttcagcaggagacatatgctgcatatcactaaatattacaccccaaatggcaagacactgtgaaacaatggctcttatttttccccttaacccacagagcagttcatgtgaaacagctttggtgatttgatatgaaaaggagttccatgttgtgtgaagagggatataaaatccagaggaatagaaaatatcttctcatgctgctctgtggtgcttgtatggcatctagtacagatgtgacattaaggtagattagatagtgtggttatatgctctcttaaagaggaacaaacttaccaaatagatggagagaacaaaccactcaatagtggccaaaccacatcctgggcttgtggttagagcatcctgcagcaaggaggtaaaagaacagaagggaaaatccycaaattcatgcaaatgcagaaacctatgattagtatacttgggctgacctatgctcattataataatgaaaaccacatcagtgggtggagaattaaaatgctaataagacatatgaggtatatactagcatgtacaacaatagcacatgggcattaaggagaccacccacaatacgcttaacaacaatgc

SEQ ID NO: 317065 - DNA, 590 bp, Homo sapiens
atcacaacaaaatcttggatataggggcataagtcagtcagtattttaagagaataagaaaaggttcaaggctaggaatatttgatgtagaaagacctggtatgtggatgtcacagtaaggagttatggagagacagaaggttctggtttagtgggaaggcacttggtacataagaattaatttttaaaaagaagaaaaggatgatcaaagggataccatgttttacaactagcattttaaaaaattagctaamctttaccactcattctgaccatgccatgtttgtatttagaactcagcatgtcaatgtagaggcagaaaagcaatgccttcatttacgtgctataaagctctctattgaaaaggtcatgaggtgttcatatattaaacacatgcatgagaaactctgccaaagatggagaaatttcatggattttctttaatgtgaaaatgctccggtccaaagccaaagctatccataggtattatagatcatgtgtagtatctcatgtaaactcaaggtattaattttggatgcaaaactgaggactagcatatttccataaattttatacacaattgaattatg

SEQ ID NO: 317066 - DNA, 590 bp, Homo sapiens
atcacaacaaaatcttggatataggggcataagtcagtcagtattttaagagaataagaaaaggttcaaggctaggaatatttgatgtagaaagacctggtatgtggatgtcacagtaaggagttatggagagacagaaggttctggtttagtgggaaggcacttggtacataagaattaatttttaaaaagaagaaaaggatgatcaaagggataccatgttttacaactagcattttaaaaaattagctaaactttaccactcattctgaccatgccatgtttgtatttagaactcagcatgtcaatgtagaggcagaaaagcaatgccttcatttacgtgctataaagctctctattgaaaaggtcatgaggtgttcatatattaaacacatgcatgagaaactctgccaaagayggagaaatttcatggattttctttaatgtgaaaatgctccggtccaaagccaaagctatccataggtattatagatcatgtgtagtatctcatgtaaactcaaggtattaattttggatgcaaaactgaggactagcatatttccataaattttatacacaattgaattatg

SEQ ID NO: 317067 - DNA, 575 bp, Homo sapiens
aatggtaggtaactggggatagtattaaattaaaggtgaaaaaagtcaataaaggaagaagagggagtacttcagaaaggatttcatagtacaaagtttcaatagaggtgtggatggtttcttcaaggtyttagactgacataattttgaaataggtaataacttacagaaaaaaagaaaagagagaagaaacattttcttaggtcatataaatgagacagtttatattatttgtattcccttatagaaagcagaagtctcacttagaagtgcatatttaaaaagaagtatttatacatgtcaacacattgattttgttttaaaaccttaatctgtcactaaaatcctcaaaatggtcataggataatatcttattaaaatagtatttaacattaaatataaattgttaattttaaaaagttcttatttaatacattttgtgatctataattctccttttggaattcagaattctccatgtttcagtaaggtaaacctcttttacttattttgtagttttcaaagaaaagtaggtttacctgtttccttattatttacagttcagaggaaagact

SEQ ID NO: 317068 - DNA, 575 bp, Homo sapiens
aatggtaggtaactggggatagtattaaattaaaggtgaaaaaagtcaataaaggaagaagagggagtacttcagaaaggatttcatagtacaaagtttcaatagaggtgtggatggtttcttcaaggtcttagactgacataattttgaaataggtaataacttacagaaaaaaagaaaagagagaagaaacattttcttaggtcatataaatgagacagtttatattatttgtattcccttatagaaagcagaagtctcacttagaagtgcatatttaaaaagaagtatttatacatgtcaacacattgattttgttttaaaaccttaatctgtcactaaaatcctcaaaatggtcataggataatatcttattaaaatagtatttaacattaaatataaattgttaattttaaaaagttcttatttaatacattttgtgwtctataattctccttttggaattcagaattctccatgtttcagtaaggtaaacctcttttacttattttgtagttttcaaagaaaagtaggtttacctgtttccttattatttacagttcagaggaaagact

SEQ ID NO: 317069 - DNA, 578 bp, Homo sapiens
tttggaattcagaattctccatgtttcagtaaggtaaacctcttttacttattttgtagttttcaaagaaaagtaggtttacctgtttccttattatttacagttcagaggaaagacttttactctactgggaaagttttttgagggctctatttgggggtttttctaagataataagacttcaggcttttsacacccttaggcgatacacccaagagataagatatcctagaaaagagctctgatgagaattttgagctattataccaaatgagcatgagatgagctggacagggagacttctaaatccctcccaaaggttttgctttcataagaacatcttgcaatttaaaaagacaagccttttacacttagagagctccttgtgactggaaacaatattggtatcaatatcctgttattgcacaaaaaaaagactaaatcatttggggaatagattaactgctataataaagttaagcctttttccttgggctcagctctaaacgccaagttaaacaagcaaacaaacaaaagaaaacaagacaggaagagaagcacaacttaggtctacgtca

SEQ ID NO: 317070 - DNA, 591 bp, Homo sapiens
ttaatattgttaaaataatcatactgcccaaagcaatatacagattcaatgcaattcctataaaaataccacttttttatagaaatagaaaaaaaatcataaattttatatgaaataaaaatgagcccaaatagacaaagtaatcgtgagtaaaaggaacaaagccagaggcatcacattacctgcttcaaattatactacaaggctgtagtaaccaaaacagcataatattggcataaaaacagaaacacagactaatagcatggactatagaaccccccaaaacatccacatacttacagacaactgatttttttgagaaaggcatcaagaacatacaatgaaaaaaggacatcatcttcaatagctagtgctgtaaaattagatatcaacttgcagaagaatgaaactggatttttatctctcactatatgcaacactcaactcaagatagattaaagacttaaacataataccaaaagttrtaaagctactggaagaaattatagggaaactcttcaggacattggtgtatgcaaataatttatggctaagacttctaaaacacagacaacaaaaacataaatagac

SEQ ID NO: 317071 - DNA, 579 bp, Homo sapiens
ccttatttttagacagcaaaaaagacagacacacaccaaaccttcatttagttagctgtcctgccatatatgaaaaaaggctgctgggtgtggtggctcacatttgtaattccagcactttgggaggctgagatgggaagatcacctgagyccaggagttgaagaccagcctgggcaacatggtgatacaccatctctacaaaaatttttttaaaaattagctgggcatggtggcatgtgcctgtggtcccaggtacttgggaggctgaagtgggaggattgcttgattctgggaggtcgaggctcccgtgagccatatttgtgccattgcactagagcctgggtgacagagggagacagcgggagaccctgtctcaaaaacaaaacaaaaaaacaaaaacagcctgacacgcagaagatactcaaaacggttcatatcacttcactatgattatatgcatgactcaggacagaatgatgtcttgttaatcttaagttcttgatttctggagggaagtcctaaagtatagggcttcaagttgaacttttgttgtcacctagcaggaagtactgtgagtg

SEQ ID NO: 317072 - DNA, 579 bp, Homo sapiens
ccttatttttagacagcaaaaaagacagacacacaccaaaccttcatttagttagctgtcctgccatatatgaaaaaaggctgctgggtgtggtggctcacatttgtaattccagcactttgggaggctgagatgggaagatcacctgagcccaggagttgaagaccagcctgggcaacatggtgatacaccatctctacaaaaatttttttaaaaattagctgggcatggtggcatgtgcctgtggtcccaggtacttgggaggctgaagtgggaggattgcttgatyctgggaggtcgaggctcccgtgagccatatttgtgccattgcactagagcctgggtgacagagggagacagcgggagaccctgtctcaaaaacaaaacaaaaaaacaaaaacagcctgacacgcagaagatactcaaaacggttcatatcacttcactatgattatatgcatgactcaggacagaatgatgtcttgttaatcttaagttcttgatttctggagggaagtcctaaagtatagggcttcaagttgaacttttgttgtcacctagcaggaagtactgtgagtg

SEQ ID NO: 317073 - DNA, 611 bp, Homo sapiens
aaactcacacttctgcactccaaaccttcatacctgaggtcacgctttgtctttcaggtggcctgaagccagtctttaagccttttggttactacttttgaaatcagcctcctagtcattctaaaggtcatatcctcagtcaaggtttgctgtgtctctgtttattgtctttgcttttgagtgtgcatcacattttcctgtttcttcatatgttgcatcattttggrtgacttcctagacagtgtgaatgaaattttataaacaatcttgattatgacatgttcttctaactgtgatatgttcttatgtatgtatgcatgcatatattatatatataaacagtcagctagcctggctgaacaaaaactgcaaacttggtctcccctgcactggtggaaactgaagtctctgttcaatctcaggtgaattgcttacagtcttccctgtgtgcatatttcagggacagtcagagttgggcagcgtatatagacaggatttagggcgcccccaaccatgacgctcttctttctgagactgcactctcccctcattttctaactcatgtgactgccccaaactccatcctctggtttttcatgccagtgaagctg

SEQ ID NO: 317074 - DNA, 611 bp, Homo sapiens
aaactcacacttctgcactccaaaccttcatacctgaggtcacgctttgtctttcaggtggcctgaagccagtctttaagccttttggttactacttttgaaatcagcctcctagtcattctaaaggtcatatcctcagtcaaggtttgctgtgtctctgtttattgtctttgcttttgagtgtgcatcacattttcctgtttcttcatatgttgcatcattttggatgacttcctagacagtgtgaatgaaattttataaacaatcttgattatgacatgttcttctaactgtgatatgttcttatgtatgtatgcatgcatatattatatatataaacagtcagctagcctggctgaacaaaaactgcaaacttggtctcccctgcactggtggaaactgaagtctctgttcaatctcaggtgaattgcttacagtcttccctgtgtkcatatttcagggacagtcagagttgggcagcgtatatagacaggatttagggcgcccccaaccatgacgctcttctttctgagactgcactctcccctcattttctaactcatgtgactgccccaaactccatcctctggtttttcatgccagtgaagctg

SEQ ID NO: 317075 - DNA, 604 bp, Homo sapiens
aagctagcaagtgttttttttctaatttctggttaagaaacctaggtatttgtatgtgtttagtttccacgtatatgccattagcaaaccgtctggaaaagaactgaagcaagcaatactatttacaatacctaccaaaaaattaaaatacctagaaatatattgaatgaaggaggtgaaagatctttacaatgaaaattataaaacatttataaaagaagatgaagaggacacaaataaatgaaaatatattaaactttcttggaaccacaaaagactctggatagccaaagcaatcttgagaaaaaaacaaacaaacaaaaaacaaacaaaacaaaaacaaacagagctggaggcaccatactayctgatttcaaaatgtactacaaagctacaatagccaaaacagcacagtactggcataaaaacacatacaccagtggaacaatacagaaagcccagaaacaaacccacatattatagccaactgtttttgacaaggtgccaagaagacaatggagaaaaaaactgtctcttcaacaaacagtgttagggaaaactggatatccacatgcgaaataacgaaatttgatacctatctctc

SEQ ID NO: 317076 - DNA, 568 bp, Homo sapiens
cttcatcagaattaacttttgtgactcaaaatacaccactgagacaatccaagaaagtaagaaaatatttccaaatcacagagctgatagaggactattatccagaaaatacggatcactcatacaactcaaaaataaaaagacgaatataataatgaaaagtgagtgtggtggctcccacctgtaatcccagctctttgggaggcttaggcaggcagatcacgaggtcaggagttcgagactagcctgaccaacatggtgaaaccctgtctctactaaaaatacaaaattagctgggcgtggtggtgcgcgcctataatcccagctactcaggaggctgaggcaggagaatcacttgaaccagggaggcagaggttgcagtgagccgagatcctgccactacactccagcctgggcaacagagcaagactctgtctcaaaaaaaaaaaaatgtgagtaaactgtgtcaatagacatttctccaaacgactayagaaatgtccactaagggcataaaaatatgtttagcacttttagtccatagtgaaatgcaaatctaaaccatcat

SEQ ID NO: 317077 - DNA, 524 bp, Homo sapiens
agccgctcgttaccaccaaactcttaattattgctatccttttgccttttctatagagtcatataaatgaaattgcacagtattttgcctttaccaacttacattttttcacttagcaatatttagcaatatttttttttagaatttgaagtataatcccgtgtctgtttagattttagttcccctaatttttgcaggataggtgacacccaaaattggggcttcgcctggagggttattggctttgccaagtaaagaatttaagggtgaaccagtggtggtagaaatctttttattttatggtacttctccttgcagagcagggctaactcttaggcagtctctccagagttggcaatctatggcctcttgacaactgtatttacactaacgtaaatctgctttcagttacatgaaaattgagggttggatcawtacaaattgagaggtgggttatttagaactttctagggaatgggcagtaactaatgggtcattgccattgaaatggctgttaactttca

SEQ ID NO: 317078 - DNA, 413 bp, Homo sapiens
tccaaaatccaaagtctcatctgtcagcctaasaaatcaaaacaagttatcttcatacaaaattcagtgattagattgttaaggcccaatggattcatcttggctgctgcccagatagagccacattaccaagacagggaaattgctatgtagagaaaacttagtacatgtagagctggctaaaggagagaccagagttttcttattactccaaacagcctccccagatattaagaggctagggtttttatagatagtttggcatgcaaggggctagggaaaggggaatgctgattggtgggtgtcagggataaaatcttaggaagtcaaagtcatcttctctttctgactcagttcctggatgggggccacatgtccagatgagccggtttactggtttgggtggcacctgc

SEQ ID NO: 317079 - DNA, 413 bp, Homo sapiens
tccaaaatccaaagtctcatctgtcagcctaacaaatcaaaacaagttatcttcatacaaaattcagtgattagattgttaaggcccaatggattcatcttggctgctgcccagatagagccacattaccaagacagggaaattgctatgtagagaaaayttagtacatgtagagctggctaaaggagagaccagagttttcttattactccaaacagcctccccagatattaagaggctagggtttttatagatagtttggcatgcaaggggctagggaaaggggaatgctgattggtgggtgtcagggataaaatcttaggaagtcaaagtcatcttctctttctgactcagttcctggatgggggccacatgtccagatgagccggtttactggtttgggtggcacctgc

SEQ ID NO: 317080 - DNA, 413 bp, Homo sapiens
tccaaaatccaaagtctcatctgtcagcctaacaaatcaaaacaagttatcttcatacaaaattcagtgattagattgttaaggcccaatggattcatcttggctgctgcccagatagagccacattaccaagacagggaaattgctatgtagagaaaacttartacatgtagagctggctaaaggagagaccagagttttcttattactccaaacagcctccccagatattaagaggctagggtttttatagatagtttggcatgcaaggggctagggaaaggggaatgctgattggtgggtgtcagggataaaatcttaggaagtcaaagtcatcttctctttctgactcagttcctggatgggggccacatgtccagatgagccggtttactggtttgggtggcacctgc

SEQ ID NO: 317081 - DNA, 413 bp, Homo sapiens
tccaaaatccaaagtctcatctgtcagcctaacaaatcaaaacaagttatcttcatacaaaattcagtgattagattgttaaggcccaatggattcatcttggctgctgcccagatagagccacattaccaagacagggaaattgctatgtagagaaaacttagtacatgtagagctggctaaaggagagaccagagttttcttattactccaaacagcctccccaratattaagaggctagggtttttatagatagtttggcatgcaaggggctagggaaaggggaatgctgattggtgggtgtcagggataaaatcttaggaagtcaaagtcatcttctctttctgactcagttcctggatgggggccacatgtccagatgagccggtttactggtttgggtggcacctgc

SEQ ID NO: 317082 - DNA, 537 bp, Homo sapiens
ttttcattccaggaattatttctctattccagttagatccatacactgtgggtaagtagcaccctgctggtagatacagtgccagagacagcctttatttgaagagaactaggcagaaaattgggctgttctccagatctgccactagtgagagattggcaaacacaagggatatatccctatgagctcctaagtttgtaatggcctcatgggttcatcttgactgatgcccagatggagccaatttatcaagaggggaattactatagagaaagggtttgatacttgtagagccaggtaaacaagagacaagatttatattattacycaaagcaagcttccaaaaaaatctgaggttaggatttttttgtagataatttggaatgcaggaggctggagaatggggaatttagattatttgggtcagagatgaaattatagtaagcagataggaggacagataggcaacaggaggacatctcctcttgcattgtgtcagttcctgtgtgggggccacaagtccagatgagacaggtt

SEQ ID NO: 317083 - DNA, 537 bp, Homo sapiens
ttttcattccaggaattatttctctattccagttagatccatacactgtgggtaagtagcaccctgctggtagatacagtgccagagacagcctttatttgaagagaactaggcagaaaattgggctgttctccagatctgccactagtgagagattggcaaacacaagggatatatccctatgagctcctaagtttgtaatggcctcatgggttcatcttgactgatgcccagatggagccaatttatcaagaggggaattactatagagaaagggtttgatacttgtagagccaggtaaacaagagacaagatttatattattactcaaagcaagcttccaaaaaaatctgaggttaggatttttttgtagataatttggmatgcaggaggctggagaatggggaatttagattatttgggtcagagatgaaattatagtaagcagataggaggacagataggcaacaggaggacatctcctcttgcattgtgtcagttcctgtgtgggggccacaagtccagatgagacaggtt

SEQ ID NO: 317084 - DNA, 642 bp, Homo sapiens
atgggtgctgattcacgggacgtatagccttccagagaaccttgcaacagtctcctaaagtactgtcacctagcaagtgctggamccgaagtctccaaaggacatcccgtaattttatcaagccactttcttcaggattacagacgacatggtaaactcacagaagtttctgagcatgaactcacttctgcccctctttgtctgtgaaatgagttccctgttcagaagtgatgctgtgtgaaataccatgatggtagataaggtattctgtatgtctatggatggtagttttcacagaataattatgtgctatttctttaaatttctataaatttcaatttatagaaagagtaactatcttactattcagggaaagacaaaatgctgccccttccttgatgaaagctgcccaaggtaatcagcctaccaccagggagttgccagatcatcctggggaatggtgccatatgaggggctcagtgggtgttaatttctgctgctgacagtttgagcactcagagggagctgtaacctggttggctatggtgagtggaattccaggttgctgtgtgcatgcataatcccatccctaccactgtggccgctttattcatgagtctagtgggtgatgacacaggtggg

SEQ ID NO: 317085 - DNA, 515 bp, Homo sapiens
cctttcccttgctattctaaggtagatctgattgtctctaggctgcaaccccaattgctcatatccctgggtgattaccctctgcagcttgattgcttccagtctcattcttaacctgaatactggggtcaaaaattgattaaaaamaggatcatcaccagcaggccaagcaggaacaaagtatggttgaacaggacactctttattgcactccagatgtccttagagctgctcttggtcaacacaaaggagtgaggccgttcttcttgtttgaatatttgctttattttagcttctatctccatagagggtttaacccaggtgcaacaagtggtattggtgatcacacatactcttgtttattttgccaggagctagtctaaggctaactgattgtccagcactacattagctagccgattgaaagaaggttgtatattttgaataaccttcctggtattacttgctagattttttgtttgggttgtatttattagggtatcctcatgtacgta

SEQ ID NO: 317086 - DNA, 580 bp, Homo sapiens
gtgattttacaattaaacagacaccagaagcagcttacacttcacaaacacacctctaagtatataatgaaaaaaagagacttaggcacatgatcactgtacaggtggcgatcagacaaattaaaagtggcatggcatcaaattcaatacggcataggtaattgtgaacaatataaarccaatctagaaaagtatagttacactaaacccatagacctggcacgttcaacttgggctaacaaaagatttttattggatactgaatcatccctacccacaaacatatgcactaaaaaagctggatatatgtacagcaatttgcatagcaataaagttagccacttacctgccaaatacaccatctcagccttagaatttatggtagctcactgtgcagcccctaaaaaatttggaagtgatcaggtaactcattttgcatcaagcaataacaggcattggcagataaatgggatatataatggaattttttttcctaccttatcatctcacagcagctgcatatatatagatttaaaatggattatcaaaaagagaattaaaaactttaggaaaaaatgag

SEQ ID NO: 317087 - DNA, 580 bp, Homo sapiens
gtgattttacaattaaacagacaccagaagcagcttacacttcacaaacacacctctaagtatataatgaaaaaaagagacttaggcacatgatcactgtacaggtggcgatcagacaaattaaaagtggcatggcatcaaattcaatacggcataggtaattgtgaacaatataaaaccaatctagaaaagtatagttayactaaacccatagacctggcacgttcaacttgggctaacaaaagatttttattggatactgaatcatccctacccacaaacatatgcactaaaaaagctggatatatgtacagcaatttgcatagcaataaagttagccacttacctgccaaatacaccatctcagccttagaatttatggtagctcactgtgcagcccctaaaaaatttggaagtgatcaggtaactcattttgcatcaagcaataacaggcattggcagataaatgggatatataatggaattttttttcctaccttatcatctcacagcagctgcatatatatagatttaaaatggattatcaaaaagagaattaaaaactttaggaaaaaatgag

SEQ ID NO: 317088 - DNA, 580 bp, Homo sapiens
gtgattttacaattaaacagacaccagaagcagcttacacttcacaaacacacctctaagtatataatgaaaaaaagagacttaggcacatgatcactgtacaggtggcgatcagacaaattaaaagtggcatggcatcaaattcaatacggcataggtaattgtgaacaatataaaaccaatctagaaaagtatagttacactaaacccatagacctggcacgttcaacttgggctaacaaaagatttttattggatactgaatcatccctacccacaaacatatgcactaaaaaagctggatatatgtacagcaatttgcatagcaataaagttagccacttacctgccaaatacaccatctcagccttagaatttatggtagctcactrtgcagcccctaaaaaatttggaagtgatcaggtaactcattttgcatcaagcaataacaggcattggcagataaatgggatatataatggaattttttttcctaccttatcatctcacagcagctgcatatatatagatttaaaatggattatcaaaaagagaattaaaaactttaggaaaaaatgag

SEQ ID NO: 317089 - DNA, 580 bp, Homo sapiens
gtgattttacaattaaacagacaccagaagcagcttacacttcacaaacacacctctaagtatataatgaaaaaaagagacttaggcacatgatcactgtacaggtggcgatcagacaaattaaaagtggcatggcatcaaattcaatacggcataggtaattgtgaacaatataaaaccaatctagaaaagtatagttacactaaacccatagacctggcacgttcaacttgggctaacaaaagatttttattggatactgaatcatccctacccacaaacatatgcactaaaaaagctggatatatgtacagcaatttgcatagcaataaagttagccacttacctgccaaatacaccatctcagccttagaatttatggtagctcactgtgcagcccctaaaaaatttgraagtgatcaggtaactcattttgcatcaagcaataacaggcattggcagataaatgggatatataatggaattttttttcctaccttatcatctcacagcagctgcatatatatagatttaaaatggattatcaaaaagagaattaaaaactttaggaaaaaatgag

SEQ ID NO: 317090 - DNA, 627 bp, Homo sapiens
ggcaccatcacagttcactgtagcttcaaagtcctggggtcaagtgaccctcccacctcagtctcctgtgaagctagaactgcaggtccacaccaccatgctcagctcgttttattttttatagagacaggttcacattatgtagtccaggctggtgttaaactcctgggcccaaggkatcctcctgccttggctttttaatcagtgcatcttcatagaagttctttatgtattcctaaatacaccttggaagaaagcatacgtgacatgactaaagacgactcacccaccttatatacctacagccaagcatttgttgacatcacaaatcaacggacagcacacgtagtagatatagaaatactagtataaacagaaatagcaatcaaaggatgtcattacataaaaagccacatatcagaccaaacaccaattctagtagcccatatagaactatatattgaaggatctaagaattgtaatgtttttaaatcgaagtatgtcctggtgactcttgaaagcagtttactctgattgttgcctttgccctggtgccaagatgagactttggttaacttgaatttggtgttagataatggcaggagtcggtgccactttttagatgag

SEQ ID NO: 317091 - DNA, 570 bp, Homo sapiens
tcctggggtcaagtgaccctcccacctcagtctcctgtgaagctagaactgcaggtccacaccaccatgctcagctcgttttattttttatagagacaggttcacattatgtagtccaggctggtgttaaactcctgggcccaagggatcctcctgccttggctttttaatcagtgcatcttcatagaagttctttatgtattcctaaatacaccttggaagaaagcatacgtgacatgactaaagacgactcacccaccttatatasctacagccaagcatttgttgacatcacaaatcaacggacagcacacgtagtagatatagaaatactagtataaacagaaatagcaatcaaaggatgtcattacataaaaagccacatatcagaccaaacaccaattctagtagcccatatagaactatatattgaaggatctaagaattgtaatgtttttaaatcgaagtatgtcctggtgactcttgaaagcagtttactctgattgttgcctttgccctggtgccaagatgagactttggttaacttgaatttggtgttagataatggca

SEQ ID NO: 317092 - DNA, 570 bp, Homo sapiens
tcctggggtcaagtgaccctcccacctcagtctcctgtgaagctagaactgcaggtccacaccaccatgctcagctcgttttattttttatagagacaggttcacattatgtagtccaggctggtgttaaactcctgggcccaagggatcctcctgccttggctttttaatcagtgcatcttcatagaagttctttatgtattcctaaatacaccttggaagaaagcatacgtgacatgactaaagacgactcacccaccttatatacctacagccaagcatttgttgacatcacaaatcaacggacagcacacrtagtagatatagaaatactagtataaacagaaatagcaatcaaaggatgtcattacataaaaagccacatatcagaccaaacaccaattctagtagcccatatagaactatatattgaaggatctaagaattgtaatgtttttaaatcgaagtatgtcctggtgactcttgaaagcagtttactctgattgttgcctttgccctggtgccaagatgagactttggttaacttgaatttggtgttagataatggca

SEQ ID NO: 317093 - DNA, 584 bp, Homo sapiens
cttatttgccacctaattgaactctaatcaattttcatagcgttctagcttttttaaattagaaaatggaattagaaatgaagatttagccaccaagtttatacattgtgaatcagaaatctttgattcaagactttgtacctgagaaagcaaacaaatacatctgtgcattcttgttttactgacacagaatatatatgttaacatgggtcaatattcatttacattaaattcaaggtgaatctattgtttccagccacacatgatctgattcagtaacacaggamtctatctacccattaccccttacttgtatatagcctactgctctaacagtaagctagatgtttctgttaatataatcataccctgaaaatacaggttgagtattacctgtccaaactgtgtgggaccagaagtatttcagattttggaattttggggttttggaatattttcatatacatgatgagatattttatggatggtggtgtggggtaacaatggccagtggtgcaaggataaaatagtttaccaagagactaatgggtagagaaaggcagatttattagagaaagtaggaa

SEQ ID NO: 317094 - DNA, 584 bp, Homo sapiens
cttatttgccacctaattgaactctaatcaattttcatagcgttctagcttttttaaattagaaaatggaattagaaatgaagatttagccaccaagtttatacattgtgaatcagaaatctttgattcaagactttgtacctgagaaagcaaacaaatacatctgtgcattcttgttttactgacacagaatatatatgttaacatgggtcaatattcatttacattaaattcaaggtgaatctattgtttccagccacacatgatctgattcagtaacacaggactctatctacccattaccccttacttgtatatagcctactgctctaacagtaagctagatgtttctgttaatrtaatcataccctgaaaatacaggttgagtattacctgtccaaactgtgtgggaccagaagtatttcagattttggaattttggggttttggaatattttcatatacatgatgagatattttatggatggtggtgtggggtaacaatggccagtggtgcaaggataaaatagtttaccaagagactaatgggtagagaaaggcagatttattagagaaagtaggaa

SEQ ID NO: 317095 - DNA, 620 bp, Homo sapiens
gtcaatattcatttacattaaattcaaggtgaatctattgtttccagccacacatgatctgattcagtaacacaggactctatctacccattaccccttacttgtatatagcctactgctctaacagtaagctagatgtttctgttaatataatcataccctgaaaatacaggttgagtattacctgtccaaactgtgtgggaccagaagtatttcagattttggaattttggggttttggaatattttcatatacatgatgagatattttatggatggtggtgtggggtaacaatggccagtggtgcaaggataaaatagtttaccaagagactaatgggtagagaaaggcagatttattagagaaagtaggaaaacacattgcaaggatggcaatggtcaagttaacgtgagggaagctaactgtgaggaaacaaaggcttgctgaggattttataggatggaacctgggctaattgataatgtcaaggtagcagggcacttaacctgcattcttctttcagctggcgtccgctggggtgtttgataaattgaggcatwtgatggtaagcaggaagtttgtgagttatgtatgttttctgagtaggagggccatgtgt

SEQ ID NO: 317096 - DNA, 616 bp, Homo sapiens
tgctttaactctttttgttcccctggtcctgaagtgtggcatgtgggtgaaggtcttatcttctaactgcttcctgctgattggaggtgtagagctggccccatctaggattgttagtaggtcaggtggttacatgggcctaaatccttgaattgggacttaaactgggcagagttgatgtgggacagtaggggaacaacatttgcagcctaaaattttgtcctgctgcatccaaaggagatttatgaatttctcttactgactgatattttcgctacagtaacctcttggttcaaaattgttgcattctagaagacacaaaacaagatattgcatgaataatacrtggtgcaaataaatgaatatgagcactgttataggtgacaaagtggagcctgatagaaaagacttttaaatattagtgggataagagaaaattgaggaaaagttgtaaatgtattagtgaggttgagaagttgtctagtcttgaccccgttcttacatattccatcctggttgctgaactatttataggcataaaggaattactacaaattttgctgccattaacttcgttgtttccccaccatagagaaaacctgcagaggtacacgta

SEQ ID NO: 317097 - DNA, 616 bp, Homo sapiens
tgctttaactctttttgttcccctggtcctgaagtgtggcatgtgggtgaaggtcttatcttctaactgcttcctgctgattggaggtgtagagctggccccatctaggattgttagtaggtcaggtggttacatgggcctaaatccttgaattgggacttaaactgggcagagttgatgtgggacagtaggggaacaacatttgcagcctaaaattttgtcctgctgcatccaaaggagatttatgaatttctcttactgactgatattttcgctacagtaacctcttggttcaaaattgttgcattctagaagacacaaaacaagatattgcatgaataatacatggtgcaaataaatgaatatgagcactgttataggtgacaaagtggagcctgatagaaaagacttttaaatattagtgggataagagaaaattgaggaaaagttgtaaatgtattagtgaggttgagaagttgtctagtcttgaccccrttcttacatattccatcctggttgctgaactatttataggcataaaggaattactacaaattttgctgccattaacttcgttgtttccccaccatagagaaaacctgcagaggtacacgta

SEQ ID NO: 317098 - DNA, 552 bp, Homo sapiens
gttgcacatggtggcttagatttatagagtgagtgtccttgtgagcaaggcagagcagaataccttttgtgaccttgattcagatgccacccagcatcccagtcatcctgtggagcagtcataagtccacctggtttcaagaagaggggcatagactccacctccacctccacctctagacggaagtagtgtcaaagcatttgtggcccatttttttacaaccaccacaagtttcaaaagagctaaatttcccttagtggaagtattaaatggaggggaaaacctgctaattcaccatttaatatattgtctatgattgtgcatttttaactgacatatcatattctatgttttttattgtgtacaacattctgcttttaagtatatgtatcttgtggaatggtcaaatatggacaactaacaaatgcattacctctcatagttactttgtggtcaaagcacataacatccactttctttacattttttaagcatacaatatattatcattarctatagtcaccttgctgttcaatagatgtcttgaaattt

SEQ ID NO: 317099 - DNA, 553 bp, Homo sapiens
gatgcctcttagacatagtgatttcatttcctttggatatatataccctgtaatgagattgctggatcatagggtagttcaatttttatttttggaggaaccatcatagtgctttccataatggctgttctaatttacattaccaccaacagtgtgtaagagttcttttttctacacatacttaccagcatttgttatttcttgtcattttgttaatagccattctaactggggtgaggtgatatctcattgtggttttgatttgcatttccctgattattattgatattcagcattttaatgtacatgtcggctatttgtatgtcttcttttgaggaatgtctattcatgttgttggtcagtttttaagctggctttttatttgtttgggtttgctattgagttgagttccttaaatattttggatagtgaccccttgacatcatatgtatagtttgcaaacattttctaccagtctgtaggttgtcttttcactctgttgattgtttcctttgctgagsagaagctttttagtttgatgtaatcccatttg

SEQ ID NO: 317100 - DNA, 569 bp, Homo sapiens
aacattcacaatattcagcattcactcaaaaatcactaaacatgtgaaaagcaggaaaatatgacccataactaggagaaaaatctgtcaattgaaatagactcagatgtggtgggattagcggacagaatttagaatgtatagtgtatatactttactttaaataactctttatttataaatggcatgttaatatatattttaaaattctaaggagtctacaaaacatacagtaaaagtgagcagtggatttgacaagattgtagggcacagagtcaaaacacaaaaattcattgtatctctgtttaccactagcaaacaatttgaaaatgataaataaaacattaccacttatagcraccaacaaacacaaaatcaggatatatttaacaaaatattttcaagacctctgcactgaaaactacaacagtcaccaggagaatttaaagatctaaataaatggaaatatatagcatggtcatggccatacgggctcaatattgttaagatatcaagtagatgtataatgtgcaaactcatcaaaataacagcatgatttttaaataaaa

SEQ ID NO: 317101 - DNA, 454 bp, Homo sapiens
tttggcaaaaccaaaacttcctattttactcttgagaaatttgcattgcagtgaacacaatattgggaattaactaattttgtagtctgccactctccattcatgactattaatgatagtcctagatgaggactgtgaccaggtcctgagtttgagatcaacgtaatatttatgcatggtatcccacaaatgcatggttgcaggacgggagatgatacaataagaagcaaagaatagggaggcataggaaaaaaatgtatgccaaatgcctcataatatcactgctgtttaatgcttaaaattgagtttggctttatgacattgtttcagttaatatcatagtcttgtcacacacagtgtgacyttaagaaacatattttctcagtcttagagtattgtgtttttaaacttctttaagtgctgttttctatttttatctttaagacaagatgtg

SEQ ID NO: 317102 - DNA, 541 bp, Homo sapiens
atctttaagacaagatgtgtaaattcatgtgaataactattaagataatggctagcaattattcaattcattttacgtgtcaagaattgttccatgtgttttccatgaatcacgtcatgccatggctactgttacaggtctgactcagtgtaaggtgattctccctacaagaaaatgataagcccctggagtaaacccacagcttaactggtaggtgtttagtttgagcaagtatacagtattttacaactgagcaagtaatccacacatgccatctgtcaagagatgtaatggtaatccccatcacygacctcaactcatcctccaatactggaggaataagaaggtctacatgttgagcgtggtagaaaagaaaatcaggttgggactcaggacatacctgagctttcagaacagtccaagatggttacgatgatttgaatatttgatgtgatatgaaataaatcctcattgcatcttaaagaaatgagattaagatttttcttttataccagaattcttaaaacatggtctttaggct

SEQ ID NO: 317103 - DNA, 595 bp, Homo sapiens
cagacagcctaagaatgatgagctttcctactgggctggaaccagatgaagatcttcctttaccttctttcctcgtacctaggctgatcactcagtgagagtacctggactggccatccagcataaggcccttgaggggccgagtggtcttttccaataggtgggtacacstttaatgtacccggagttccttagggctgctggcccttgagcagcatgttttccagtccaaccgtaagaccaaccctgtccattcctgcaaactcacttaggctgtattttaaagcactgggacaaattcaacccccaaaccctcagaaagaaacaccctcttatgtaatacaacatggctcatataagaaaaaccctcaaattgccctccctagcctaaatttataatggagagcaaaatgaggagaaaagggttaaagaaaaaagcagagacaaaagggaggctcaaatgttggctgctttacaagccccatccccttataggtttaggtccgaggagctaaaggagaaaaacaaaaggaaaaaaggtgctggctccacaccctacagtggctaagaggctcacaagctctcctgtaaaacg

SEQ ID NO: 317104 - DNA, 526 bp, Homo sapiens
cagcaacccacatccaagagcacctgttaagagttctataactgattatagaacgaccttgacaataactaagtaaaacaattgtagatgaaagaagtcttagaacacccatggttaaggtctggttatctctgtggcacacaataatttaacgtaacaatcataattattactgatagtgtatactgagacatatcacaattatgggaatcttataaaattctggaacacacatcaatgacaataacacagttatataagtgtaactcaaagtatgctaaacaccattttgtacttgataatgtttcttatatgaatttaataccaaataagccaaatatgggttttttgggactttaaagtatttaatatctgcaaaaactaaayaatctccttcaaatcttagcaatttgttaaggagatccacagaattttctttacaagattaaccttttagaaacctattacaacttgcttaaaccttctgttttattccattacttttaggttaaggcaatccttaaaa

SEQ ID NO: 317105 - DNA, 515 bp, Homo sapiens
aatcacagaaacaaagttacaataaataattttgggaataatttactatttcattaatctagaaaaaatatgcatcactatattcataaaagtgagtttaacaatactgtgcatagtgactataactactactgcaattctggaatcaaataatgaaagtatactatcatgtattggaaataaatgaatactttaattttccagccttctatttattctatatacatttcaatattctgctttccaaaaatgttggaaataatgccagtgtgaatgataaaataagttttgactgttattaactagtatggctaattccagttatgcctgatgaaatatttgtgaaatgaaaagactaatccaaatagttagaatgttttggagcgttctgagaacaagataaattcctgaatttcaamtgaaaggagtaaatgaacaagttgtattgttatttatcatttcctctttgtcttcaatacctcaatcattaacaaaattgcaaaaaaaaaaaaagc

SEQ ID NO: 317106 - DNA, 615 bp, Homo sapiens
ctttgtgaggctaaggtgggaggattgcctgaggccatggttcaagacctgtccaggcaacatagcaagaccttgtctctataaaaaataaactagtggccaggtgcggtggctcatgcctgtaatcccagtactttgggaggctgaagtgggcagatcacaaggttggaagtttgagaccagcctggccaacatggtgaaaccccatctctactaaaaatacaaaaattagccgggcgtggtggtatgtgcctgtaatcccagctactcaggaggctgaggcaggagaatctcttgaacccaggagacggaggttgcagtgagccaagatcatgccattcactccagcctaggcgacaaagtgagactccatctcaaaaataaataaataaatataaataaataaaataaactagccaggtgtggtggcacgatgcaccctattagactgaggcaggaggattgcttgagcctcagagttcaggcttcagtgagctatgaatgtgtagtattttatgagtataaaattataacacaatttaatgttgattrtacctaatgttagatatatttggtatctaatattttttaatgtagatgatattagtttgcaag

SEQ ID NO: 317107 - DNA, 617 bp, Homo sapiens
ttaatgccatcttggaaaaaaacaacagtattgagtaataatttactgctactttcttagccttgtcatccaatttaaaatgtaaagctggcttcccatctcacaacaaggacagaacaatggtgagaacaatggccaaaacagtaccaacagctccagttgttaatggaaggaaggattttgaggcacagagttcaggctacatgggaattcccaatgagctacaattaagaggaaagaaaatctggcccagaatgcttacttttccattaataataaaagtatttatgtcatcattgttactgctcttgccatacttgttaatcttaaggtttctcaaccatctgttgggagtgagaaaataaacggagtggttctttttaggygggattgaatataggacttagttcagagaaactattcctaatgccatcaatttgaagttaagataaaagattttctaggcatctcaccagcagtgacatggtaatggaagcgttcttttttttatccaagaaaggtatgagactagaaataaatgtataggtacaaaaaacattttgttagaggttcgggtgggagaaagaggttctctgggtgtctgagtcacactgttt

SEQ ID NO: 317108 - DNA, 332 bp, Homo sapiens
cactttgccattacatcaatatttttattagcctggctccaaaatttcagatgagttcctgayaggttactggccacgagcagtagtgccacatgatgccaggctatgccaccattctggaggttatagtgttgtgtgttgataggaagtaaatggcaaagacaccagggtatatcatatccctttctccccaactctctccacctgcaaattagcaaatgaacccaagactaggaaataggcatagtgcctaaaaggaaaggactccaattacagcccctttccttatgtcttattaaaaataataaagcagggatgatctataaacagta

SEQ ID NO: 317109 - DNA, 648 bp, Homo sapiens
ccacccaccccagctgttacattttaactgtgactgtattcacattgacttgcatgggatatttctcagttctatagtaaatgtgggtggttagaatatataatggaragaactctgggtttgggtttaggagactggagttaggaactgggtgctctagctcagtcatgtgatctggtgtggtcctattttatacaatttttaattaagtattgaatataaagtattaaatcacttttaaggcaaacaactcgaattaatgcaattcctcccaaatcgatcaagaactgtatatcaaagctgtttgggcctattgaattataagctgtattgattttattcaaatatttccacactagctggtgaatggaaatactcaatatccgctgtcatgagaatagtcttaaaatacacaaatgtcagtcagactctgcaaggtcttcagaaaggcacctcatgtataaaaggcaatctttctggcctcagtaagtcatctgccttttcttcacttcatttttctcactggggaaaactgggggactaaaacctacctcctagtaaatgagaaaatgtacatagaaggtgcctagtttagtacctgctacagagcaagcgctcagtgaatgttattagatttggaaaatatat

SEQ ID NO: 317110 - DNA, 640 bp, Homo sapiens
gctgaggcaggagaatcgcttgaacctgggacgcagaatttgcagtgagtcgagatcgtatcattgcgctccagcctgagtgacagagcaagattctgtctcaaaaaaaaaaaaaaaaccagaaagaaagaaaaaaagaaaaaaaaatggaatcagaggacatcctacttcatggatataygtggattttgagcctatgcctgcgttttcccatgatttattttatttctttgttgaaataatgagtaagatggccagaaatgttttaaaaatagatctgaagaaactgctctcttggttccctatttcttaaagggccagaaaattttaaataatagacacacatttttgaaaggaaatttaaatcaactcgtacaggacgctctttaccctagttacgacatgaatgtaatagtccaatagcttcttttatccgggtataaacatctttaaagttccccaattattcagaaggacatcaagtcactttcacagatatgtgaaggttaagaaaaaagggactcttgggtgatgtaggatagggtagatttacaacactttctcttgttcaccttaagaactgaaaatataagattttccaaattatagtgctatcagatatattaatcatgtcttaatt

SEQ ID NO: 317111 - DNA, 640 bp, Homo sapiens
gctgaggcaggagaatcgcttgaacctgggacgcagaatttgcagtgagtcgagatcgtatcattgcgctccagcctgagtgacagagcaagattctgtctcaaaaaaaaaaaaaaaaccagaaagaaagaaaaaaagaaaaaaaaatggaatcagaggacatcctacttcatggatatacgtggattttgagcctatgcctgcgttttcccatgatttattttatttctttgttgaaataatgagtaagatggccagaaatgttttaaaaatagatctgaaraaactgctctcttggttccctatttcttaaagggccagaaaattttaaataatagacacacatttttgaaaggaaatttaaatcaactcgtacaggacgctctttaccctagttacgacatgaatgtaatagtccaatagcttcttttatccgggtataaacatctttaaagttccccaattattcagaaggacatcaagtcactttcacagatatgtgaaggttaagaaaaaagggactcttgggtgatgtaggatagggtagatttacaacactttctcttgttcaccttaagaactgaaaatataagattttccaaattatagtgctatcagatatattaatcatgtcttaatt

SEQ ID NO: 317112 - DNA, 640 bp, Homo sapiens
gctgaggcaggagaatcgcttgaacctgggacgcagaatttgcagtgagtcgagatcgtatcattgcgctccagcctgagtgacagagcaagattctgtctcaaaaaaaaaaaaaaaaccagaaagaaagaaaaaaagaaaaaaaaatggaatcagaggacatcctacttcatggatatacgtggattttgagcctatgcctgcgttttcccatgatttattttatttctttgttgaaataatgagtaagatggccagaaatgttttaaaaatagatctgaagaaactgctctcttggttccctatttcttaaagggccagaaaattttaaataatagacacacatttttgaaaggaaatttaaatcaactcgtacaggacgctctttaccctagttacgacatgaatgtaatagtccaatagcttcttttatccgggtataaacatctttaaagttccccaattattcagaaggacatcaagtcactttcacagatatgtgaaggttaaraaaaaagggactcttgggtgatgtaggatagggtagatttacaacactttctcttgttcaccttaagaactgaaaatataagattttccaaattatagtgctatcagatatattaatcatgtcttaatt

SEQ ID NO: 317113 - DNA, 561 bp, Homo sapiens
cactctggagtttttctaagttaatgagcaattgcatcatggataacccacattgtggtttctttagatgcaatgtggccaatggcaatagtgtgtgtgtatgagggggtggtggcaggatgaggggagagatatcaaggactcttgagatctggaattcataaaaatgatttgttctttagtttttagatgaacttaaatttttctyttattatagaaataatgtttattgtagaaaacttagaaaatatatatgggctcccaaaaataaataaacatgatgtctcagaattagtcacagttaagattttggttcaacttattccaatctcgtgtgtgtggggtgtgtgtgtgtgtgtgtgagtatgtgtgaacattcatacatatgtttattcttgcataaataagcctatagtataaatattcttctatgaattatcttttcagatgtatctattcatcaaatattcttccatgacatcatttttaatgtctgtaaaattcttgttatatggctataccatatcttttggacataagatttattattatgatttttgt

SEQ ID NO: 317114 - DNA, 561 bp, Homo sapiens
cactctggagtttttctaagttaatgagcaattgcatcatggataacccacattgtggtttctttagatgcaatgtggccaatggcaatagtgtgtgtgtatgagggggtggtggcaggatgaggggagagatatcaaggactcttgagatctggaattcataaaaatgatttgttctttagtttttagatgaacttaaatttttctcttattatagaaataatgtttattgtagaaaacttagaaaatatatatgggctcccaaaaataaataaacatgatgtctcagaattagtcacagttaagattttggttcaacttattccaatctcrtgtgtgtggggtgtgtgtgtgtgtgtgtgagtatgtgtgaacattcatacatatgtttattcttgcataaataagcctatagtataaatattcttctatgaattatcttttcagatgtatctattcatcaaatattcttccatgacatcatttttaatgtctgtaaaattcttgttatatggctataccatatcttttggacataagatttattattatgatttttgt

SEQ ID NO: 317115 - DNA, 561 bp, Homo sapiens
cactctggagtttttctaagttaatgagcaattgcatcatggataacccacattgtggtttctttagatgcaatgtggccaatggcaatagtgtgtgtgtatgagggggtggtggcaggatgaggggagagatatcaaggactcttgagatctggaattcataaaaatgatttgttctttagtttttagatgaacttaaatttttctcttattatagaaataatgtttattgtagaaaacttagaaaatatatatgggctcccaaaaataaataaacatgatgtctcagaattagtcacagttaagattttggttcaacttattccaatctcgtgtgtgtggggtgtgtgtgtgtgtgtgtgagtatgtgtgaacattcatacatatgtttattcttgcataaataagcctatagtataaatattcttctatgaattatcttttcagatgtatctattcatcmaatattcttccatgacatcatttttaatgtctgtaaaattcttgttatatggctataccatatcttttggacataagatttattattatgatttttgt

SEQ ID NO: 317116 - DNA, 575 bp, Homo sapiens
acctgacctcaggtaatacctgttggattcagccttgtaatttctccagtaatcaggacattctccctcctctttgaggtattattgtaagaaagctattttttggctactggaatcaatttagtcagtggcccaccagcctgatgactgtctctctcagaaagaagaaagtcaactattattcccatgcatatttcaaaataatataaaagcaaaacaaaacaaataaaaaccaaaaaaaagtcattcatgcttgtgtatggaatgtatggtggtcctgtaggggtagatatttaacagagaccaacaggggaaaatgrcgttagcaattaaccttctcaaagatgcttgatgttcagtaaacttaaaaccattgtgtatcccattttgtatttctcttcctctgcctcttagcaaaccttcataggatcctaaataccttgttgtctttttcgcctccccatctcccatctttcatgtcccactttcacagaattgagctttctgacctagcaacattccagactgttctgtgcaccgctgtcagcaatcgcaggatctggtgataagtcaca

SEQ ID NO: 317117 - DNA, 570 bp, Homo sapiens
atcaatatacattcctttttattttaawttttttagagacagggtgtcactttatcattcaggctagagtgcagtggcacaatcatagctcactgcagccatgaactcctgggctcaagcaatctccccacctcggcctctcaagtagctgggactacaggtgtgcaccaccatgcctggttgagtattttaattttttgtagaggtgagctctcacttttgcccaggctggtctagaattcttggccttaaggcatgctcccacctcagcctcccaaagtgctgggattacaggagtgagccaccatacctggccccagtatatattcttaacttgcctctgttagagaaaagggagcagtctatacaattatgcatcctttttactttgtatattctggatatctttttatatcaagacatagagagcttatcattctcttttatttttaaaaaattattattcaatagcactgtggcattcttttttattaatggatagcattgacattaacatcaagtcaactagtttgaaagctcaaataacatttgatgtgtgtgttattaatc

SEQ ID NO: 317118 - DNA, 573 bp, Homo sapiens
cttctgaacattaatctagaaaaagaacctatgactaagaccttaaaagcacaagcaagagacaaaaatagacaaataggacttggttaatctaaaaagcttatgcatagcaaaagaaataacagagtgaagagacacctgcagaatgagagaaaatgtttgcaaactattcatctaatatctagaatttacaagtagctctaacatatcaacaacaacaaaaaccatataatcccattaaaaagtgggcaaagtgacttcaaagtacactacaaggctacagttactaaaacagcatgctactggtacaaaaatacacacacagaccgatggaacaagttagagaacccagaaataaagctgcacacctacaactctgatttttgacacagtcagcattaacaagcaatkgggaaaggacttattattcaataaatggtgcagggataactggctagccatatgcagaagattaaaacagagcccctacctttcaccatatacaaaaatcaactagagatgtatcaaagacttaaatgtaaaatctaaaactataaaaaccttagaagaaaa

SEQ ID NO: 317119 - DNA, 575 bp, Homo sapiens
gttttattttgtgtgtgtgttttttgttgcctaggaaaaagaataggctctaaagcagggctggctgcatcacacctgatctgtctagagcgctcttatttcagtcccagagaggaagcgcccagccccggactacagagctgtgaatgaacccacgcagggcgagtggagaatttattccaggggttagctggtgattaggacaccgtgcaaggggtggggcttgctatgcctagagcagcccgcttgagctcggctccctagctagcacctttacaaaggatggagagacggaatccgcaaacgctatccctttgaataaaggcagccttgttagggaaaggaaagactgtcagtccccccactggcttctttcccttggggatatttgttctgccctcyttgtattgttcatttctcctgccatgttgacctggatatgggatgtagcatctattaaagattcttatttgaatttgaattattttatttgaattttgaaataagattcccatccccctttttaatctttctactcccagaagcagctaggatagtggtttttagtccaaacc

SEQ ID NO: 317120 - DNA, 559 bp, Homo sapiens
ttataaaagaatgtttaaataatgacttgaytcattgtgaactaacaaatgtatttttgttttgcagaagtccacaaaaggaagataggataccaatggcagatgagtattatgaatataagcacataaaagccaaactgagactattagaggtcctcatcagcaagcaagatgtggccaaaactatttgaggttcaggaaatgttatgatcactttcacccatgatataaagtaaagtttattttcctctgccatccttgctaagtagttttgacacaatgaaaatggaagcactttagtggtagtattagctgtttttaagaaggaatagcaagtttaattatatacaaggagaagggatttaaacggggggaagaatacaacaggtagccatataattgggaaaaaattcagtgtcctccatgccaagcagaaaactcatagtcaatacaagtatttttaaaaatgtctaatattttatcaaatctaaataacatagctaggacacttgttagggaaagtttatttagtatccaaagactgtttatgttgatgtat

SEQ ID NO: 317121 - DNA, 513 bp, Homo sapiens
ttaatttactaaagaggagctgactttactcagcatgctccccacaaagcccacattgaacttgaacttgctgactctctgctcctgttatcatggcttagactggctgtttgcctaataaggcaatgatttctgtttagagctctttgagattctgaatagtcctcagcatttttttttttttttattccagagcgtccgacagtgaatttttagcatgagagttatttccttggctttcctgataaagcaaagaacagaacaactgaaaatataagacaaaatagaatgtatatgagrtttctggttattagagattttacctagttacagagtgtgtttataacctggataccattggcaacttttaaaaataaacaataaattaaactattttagggaataacaagaacaataaatgtgagtggggggctagatgacactgagaacccaaaccacatacacccaaaaaacttaatgcatacattaacataactttactatttagctgct

SEQ ID NO: 317122 - DNA, 566 bp, Homo sapiens
tccaaactcttctgcccctccacttctacttacagaccttcagtgattataatggaagagagatgccatgttagtcccttcagctccctcccataaaaataacttgtggatatggagtcacacgtagtcaggcacccacagaarccaatttatccataatgttgcagaaattcaagtccctcagtggaaaactgaagcaaatagtactgaaatagtcccatgttatttgcaaaaatagaatacgatttttgattgaattattgatgcttcctagaagttcataggtagaactcacaggccaacattctgtataatgagccaatgaatgtttagtagtactgtaaggccatcaattgaatggccagttctttaccactttcattgagtcatttattatgttgatgtagtcattatctagacagagttttaacttcaaaggtttttccccatatacataagcagtttttcttagtctcctctcttttcctttcttttcctttcctttcctttccttcccttcctccacctcttccttcctttttttcttccttatttccttttcaaca

SEQ ID NO: 317123 - DNA, 582 bp, Homo sapiens
ttaaatagaaaaaagcttatggaataactatataaaaaggaaaatgtgtacagttgtataatatatttgtgttttaaggtaagtactattacagtagagtcaaaaggttaaaaaatttaaagttaaaaagttacagtatgctaaggttagttttttatgaaagaaagaaaactatttttaataaatttagtgtagcctaagtgtgcagtgtttagaaagtctacagtagtgtacaggaatgtcctaggcattcacattcactcaccattcactcatgactaactcagaaacttctacctctgcaagctccattcatggttagtgccctatacaggtatgccatttttaaaagtctttattctgtattttgactgtattttttctgtgtttagatacacaaacactcatcactgtgttccagttgcttacagtgtttggaacagtttcatgcagcacaggtttgtagcctaggagaaacaggttacatcacatagcctagtatgtagtagactacatcatctaggtttgtatgaaaaccctctatgatattaattcacacaatkacaaaattgcctaacaatg

SEQ ID NO: 317124 - DNA, 616 bp, Homo sapiens
tggctctggggtgtcggcggactctgataatctgggtctgccttatgacataactgcccaaaccattcacaatgatcttgggccacatggaaaagtataatgttaagaagacggagacacaaattctgttttactcttcactgaacagaccacaacctggagtaatatgttcagtgtagggctgccctttaagaggacattatcacactttacccggggctacacawgatgctgaaggtcttctaagtgatgtcatatgagattctactgaaggaattggatctcttcggctgggatatgagggacattcaagccacaggtgaaagtaacaagagataggggaaggtttatgtggattttttttttcaagatttgaaggatccaataaaagagcttccaaagtgtgaatttttggcctctgaaggtctcaagcaacagttggagattgtcctggaagtttaggtattaaaaaaataagtaggccgggtgtggtggctcacgcctgtaatcctaacactttgggaggctgaggcgggaggatcacaagttcaggagatcgagactatcctggccaacatggtgaaaccccatctctactaaaaatacaaaaattagc

SEQ ID NO: 317125 - DNA, 578 bp, Homo sapiens
tagggaagaaaaggccaaggccattgtgatgaaaacattggggtggaaaaagaaattgaatttgtctagagctgcatagatagtgccagggctgggaaaaaccaagaagaaaataaaatctgtccttgagtccctcccaatttccctttccccttgactcttctaggactcccagctggccaagcataaccataaccataacaggttagaaaataggttaggtaaaataattcatattaaagtattcatgacaatttgaatccacttcccaagggcacaaactttttaatttccaatttaataagggtcactaccagaggccttcatccaaagaaatcatctstaggtgaaatttcaggcatcgaagaaaataagtgggtgtgagtagaaggatgtaggaatggggtggggacaggaggcagaggagctcttcttgtatccagaacatagaggggagaaaagtccctcctccgtgtaggccaagaccacacccaaacatttcctgagaacctgctatgtctgtgtctcaggatatagcaccttggtcctgagggctatggggtcatgcccagagaagc

SEQ ID NO: 317126 - DNA, 573 bp, Homo sapiens
gttctcaataggctccttagatttttatattagccaaatggcataccaattatctctcagtgccttttaaaataaatcactgtcactcctctgaaagtaaaaacatgatcttatgcaatcagaactccttggggagtgtccaaagacaaggcaccaggctctccccagcatttaaccacgaaacctctacagaaaaaaaaaaaaaaaaaaaaaaaaaagtccacgtgaaatctggagctaagtgtctccattttgaacctgcygtgcctgtgactgaccgaggatttggccacaccaggctcctgagaatcggggccagaaagcacttagtactttaagcacagcaaagggaggagagcagtacctgtgcacctggagcaggaagtccaggcctcatcttcggcctgcagatgcacactttggcacacctctctccccttctctcaggcctttagaaaagcaacattgcagcacaggttaccaagcaatcttataaacagaatgtgggtccaaatgagtattttacattgcttcttctaaagtcaatcctgttttttttttaagtgactccac

SEQ ID NO: 317127 - DNA, 582 bp, Homo sapiens
gtcttcactgggatttttattctcccatttcaatttgtactttactctttccttcccccttattctcagtgttttaatgttactttatttctaatctcctattcttctttaattagtaaaaatcaatcacatatttttccttaattaattttatgtcatgactgacaagaagtgtgattatagatgcggtagccacaggggggacctgtgctagaaataataagaggaagctttcctctcctcttggtcaatcctgtcttcgcagagcccctcttagaaatatcattgccyatctttctactatgctatttctttcttatgatttcataagagtatttaacatttattgattatgcatttattacagtggagttattcaggtctctggggacctgaatttggggcatagcagtggtctgataggccccacccagaatcaaagggaagaagaaaattgattagctataaaacattctttaagtaaaaaatttctcacaaaaggcacctatgaactgagatgatggtggtgtatatagtggcttaggaaaatatttcagattatttcactcactcactgggtga

SEQ ID NO: 317128 - DNA, 652 bp, Homo sapiens
gttgcggtactttgctcatcttttacaccttgccaaatccatgctggcttagaatcttgtgaaaaatttatctttgtgagtaatagcactagatttacatagttatactttcactcattcattaatttactcattaagtaaaatattagtgagtatcctattgtgtgttaggtactgtgcaaagccctaggaatagaatgtaagtaagacgtagaaattgatctcaaggagcacactgtctggtatgggaaacagatgtgtaagcacaatctcatgaccacagtacaaacaacttacagagggagcaaagataaggaagaagttaattctgactggtggtcgtggtggatgtgggagtcatgggagatcacacacacacacacacacacacacacacacayacacagtggcacttgaataacttgtgtatgcaatgaatgaggaacgtttcttctcaactaggaggaaaacatatgcaaaggccagagaaagcatgcttggagaagaaagaaggaataatgggtaaagccagagcagggcaaaaaaaaaaaaagattttgtaagaaatgaggaaatttagtctgggatttgtcgtggatgtgtatatgtcagcccagcaacttggaaaattccccttctcccattcttagtc

SEQ ID NO: 317129 - DNA, 598 bp, Homo sapiens
taactatttgttcatactgttccctctgcctagcatggaattccctcttctctctcagcagagaaacttaatactcccaattcaaaacgcagatggcaccacgcgaggtcagagaaagaggcaagaagttttagtcaacctgtctttgattattggcttgccatatgcagtctacgtgtacttgatcatcgcttaactttttagcctgtttctcatgtatgaaacgagaataatgatatccagctcatgggttgtttaaaggaatacatgacatgataaggtaagagcttattacatattatttttctttggtttcctttttcccttgcagtatcacttgctttcagctatgtactggcaccactcagaataattttagagtcattaattttatttatttatttttctcttttatttcttttaactttwttttttttaattttaaagacatggtcttgctttgttgcccaggctggtctcaaactcctgggctcaggtgatccttctgcctcagcctcccaaaatgctggaattacaggcatgagccacagcacatggatccaagtcattaattttgttttatttaatgtaatttatt

SEQ ID NO: 317130 - DNA, 571 bp, Homo sapiens
gcttacaatgctgaatgtcttctgatccagctcttcagattcttcagaaatgggaactggttcaccacttgccgtgatatgaactggagcatctgacactgaagatttcttggatctttccctaccatcagacttggattcactcaactaaagaaaaagtgaaaagaaaacaaaaacaaaaccccaatagcaacaaaggcaaaatgactaacacttccagaaaataattactgtctcattttattctacaagtgctcattctcattgaatatcctcatctattttaatttgtttttttcccccaattttatttggggaaacaatcaaagctactctgtaatgttactctgaaggtaaagcattaaagagtgttcagacctactattctcctctactgcatacccaaacaygcttctgaagaactcagttattgagactaataagggctgatatgcaatttagtctcctaaaatgtaaatatgctgattgtttttactttctacattttttattatgatttgcataccttttcttcctttatgtctttttctttctgtatagcttcttttac

SEQ ID NO: 317131 - DNA, 580 bp, Homo sapiens
aaattttatctaaataatttttattcaggtaaatgaacagcaaaataagcataataataaaataattatgtcccaaaccaatatcatatgtgtatatttgcattatattttcccagtcatctatactaaaaaacctatagatactatacatattgtactgtgtgtgtgtatatatacacatatatctatgaatgtacatatgtgtgtgtataaaacagtaatttctgaccttacctcccagacagaaaatgtcaggggaattaaaaacagattctactgccttygaattgcaattctgttctccatttcctattacccagaatagctttactttgttttataaataaccttttgagactgatgaataaataatttaagatataatatctagctcaataaagcatattttgaagctttcatttacttctcttttaaatcactctcagtttaatgttacctgttcgttctgttcctgaagaactatcctttaatgctttaatgcaaccattatgtaccaattctcccagtcgtctaaggtctgtttctgacttatcaactaactcagcatctcgagcaattg

SEQ ID NO: 317132 - DNA, 533 bp, Homo sapiens
gaaccaaactgtttaaacagctggtagcctaaaactggaatatttcccacaagggaaaaataattatttggggaatgtatgttaccacaaactcatctgacttggaaagtgcgcctttacaccaaatcaaataactgaacaatgggattagaaacttttaattattattaacctcggccaccgggcgccgtggctcacgcctgtaattccagcactttggaaggcagtggcaggtggatcgctcgagctcaggagttcaacaccaacctagcaacatgacaaaacmccgcctctacaaacataaataaaaaacaaaaatcattaaccttgagtgagtcaagttcatctgcagactgaaaaaaataaagtgtaacagaattttgatttaaaaaacgctttcaaaaaagcatttcaaaatgctctaagtatgtttcaaaaatacacttaaaaatatgtttccaacacactgaagggatttaactaagatccacaattacagttacgatacaaactgtaagctaaaaggcagcaac

SEQ ID NO: 317133 - DNA, 496 bp, Homo sapiens
aataggcagtgaacagcaaattatcaaaatgagtatgctgaagagaaagaaaggatarcactttactagtgccagcacagaaagaggagttggcattaattgacatttcagagcattttcagacatatcctcacagggaactttttctttctcatacattttggtaagaatgactctcatttttgtgtggcagtctctcattaataaaaattcgcatataaagaactttacatggatgacacacaggaaaagccatgacacataactttagctggaataattttttgtgcttcctgttttattcacgctgctcttcaacaagctataacaaatttcctacgtaagtttgaagccaaaaaatttttatggctaaattttacatcaacagtctatccacatactttgaataggatgttttgaaagcaatctgttagaaaatctctggtgctcaatatttcagatttttccccatcttttgaaagcataaagttttaaa

SEQ ID NO: 317134 - DNA, 496 bp, Homo sapiens
aataggcagtgaacagcaaattatcaaaatgagtatgctgaagagaaagaaaggatagcactttactagtgccagcacagaaagaggagttggcattaattgacatttcagagcattttcagacatatcctcacagggaactttttctttctcatacattttggtaagaatgactctcatttttgtgtggcagtctctcattaataaaaattcrcatataaagaactttacatggatgacacacaggaaaagccatgacacataactttagctggaataattttttgtgcttcctgttttattcacgctgctcttcaacaagctataacaaatttcctacgtaagtttgaagccaaaaaatttttatggctaaattttacatcaacagtctatccacatactttgaataggatgttttgaaagcaatctgttagaaaatctctggtgctcaatatttcagatttttccccatcttttgaaagcataaagttttaaa

SEQ ID NO: 317135 - DNA, 496 bp, Homo sapiens
aataggcagtgaacagcaaattatcaaaatgagtatgctgaagagaaagaaaggatagcactttactagtgccagcacagaaagaggagttggcattaattgacatttcagagcattttcagacatatcctcacagggaactttttctttctcatacattttggtaagaatgactctcatttttgtgtggcagtctctcattaataaaaattcgcayataaagaactttacatggatgacacacaggaaaagccatgacacataactttagctggaataattttttgtgcttcctgttttattcacgctgctcttcaacaagctataacaaatttcctacgtaagtttgaagccaaaaaatttttatggctaaattttacatcaacagtctatccacatactttgaataggatgttttgaaagcaatctgttagaaaatctctggtgctcaatatttcagatttttccccatcttttgaaagcataaagttttaaa

SEQ ID NO: 317136 - DNA, 629 bp, Homo sapiens
taattataataagtaatatttattgaatgagtgctatgttctatgaattttacctgtattagctatctgatttaacttaaccctaaaatgatcctgtgggtgtgattattttccccattttataatggaggcaactatgatttagagggataaaataatttattctcaaccacaaagctaataaacagctggagttcaaaacccagctctctgagaatgcagatcccacttcaaaaaacactgggcaaactcaaccatggccaaactgtgctaagtgcagcaggacttgtattcagagagaccagcagccatgtgctcacctgcctgtcactaattaagaccacaaagcctgggaactggacagccttgcagccaaatccaggttccaccacttactgggtgcatatcattgaacgagttgcttaaactttctgaatttcagtgtcctaatgtgaaaaatggaattcaattgtaatacaatagctaacattcattgagcacttattattaacctcaaaacaatctatgatataaayattgtcccatttctacaaatgacaaaacttgggcttagaaaagtaaaaaaaaaaaaaaaacttgattaaggtagcacagctagtaggagtgaa

SEQ ID NO: 317137 - DNA, 549 bp, Homo sapiens
ttacattttgtaatgcagagacattaaatggcttcctcatggtcctctgcatagatgaattgtcctcatrtttaacatcaaaagcttaaattgctgatgtttgttattttcttatgacttttttctcaattagatataatgaatggaaatcttgacatcaccaaaacgaacatgttaaaattaaaggattagatttgtattgtgccaggaaagactaaaagatgaactatgttataatttcatccttttcaaactttatgaaaacacaactatacaaaaagctaccttggggaaagagaatataatgacaagcatttttaattactttttttgcaaatttactggctccaggatggctgacattatattctgtgccccatcctcattatactctgaaatgctaaataataaagcactcatgaatactgatgacttaaggatgtgttctcaaataattggaggatagacgaagggaagtgacaaaatggggaatgaaagaaattgatgaacctcttggctggtgtaatgtagtcaaagatgccagaaaca

SEQ ID NO: 317138 - DNA, 569 bp, Homo sapiens
tgctccagggagggaggatgacttcctgacggtcctcctgccgctcctccctcgggccaattatgaaactctgggcactcttgacctcaccccgttagggcccgggaggggctccctagtataaagttcgcagcaccagacagttgagctcacttgcctgatatttccagtgtcagagggacacagccaacgtggggtcccttctaggctgacagccgctctccagccactgccgcgagcccgtctgctcccgccctgcccgtgcactctccgcagccgccctccgccaagccccagcgcccgctcccatcgccgatgaccgcggggaggaggatggagatgctctgtgccggcagggtccctgcgctgctgctctgcctgggtaagttctccccctctggcttccggccgccccaaagaggagacaaataaggaaggctcctgtgcatttgtcattcgacaagtacggagttgtctccaggttcaagtgtgctctatttaaaattacgtcttgttttgtgagtctgtcttccsctatggtgggactggggtgggggggactggggatc

SEQ ID NO: 317139 - DNA, 551 bp, Homo sapiens
ttgcactctgtaattgcactttttaagtttgaagagccattttggtaaacggtttttattaaagatgctatggaacataaagttgtattgcatgcaatttraagtaacttatttgactatgaatgttatcggattactgaattgtatcaatttgtttgtgttcaatatcagctttgataattgtgtaccttaagatattgaaggagaaaatagataatttacaagatattattaatttttatttatttttcttgggaattgaaaaaaattgaaataaataaaaatgcattgaacatcttgcattcaaaatcttcactgacaatgcagcctcattctttttttttcttttgcaattttttccccacaatacattaaagggtttaaaagcagtgacagggatataatgtgtgtagacataatgactcaatggtgttaatttgggaaaacattctataaatgtatcacgttttatagccagcatagtgaagaatttcttgtaatagaaggagccacattagttataaaattctaggtgttggtatttaaaaatc

SEQ ID NO: 317140 - DNA, 551 bp, Homo sapiens
ttgcactctgtaattgcactttttaagtttgaagagccattttggtaaacggtttttattaaagatgctatggaacataaagttgtattgcatgcaatttgaagtaacttatttgactatgaatrttatcggattactgaattgtatcaatttgtttgtgttcaatatcagctttgataattgtgtaccttaagatattgaaggagaaaatagataatttacaagatattattaatttttatttatttttcttgggaattgaaaaaaattgaaataaataaaaatgcattgaacatcttgcattcaaaatcttcactgacaatgcagcctcattctttttttttcttttgcaattttttccccacaatacattaaagggtttaaaagcagtgacagggatataatgtgtgtagacataatgactcaatggtgttaatttgggaaaacattctataaatgtatcacgttttatagccagcatagtgaagaatttcttgtaatagaaggagccacattagttataaaattctaggtgttggtatttaaaaatc

SEQ ID NO: 317141 - DNA, 551 bp, Homo sapiens
ttgcactctgtaattgcactttttaagtttgaagagccattttggtaaacggtttttattaaagatgctatggaacataaagttgtattgcatgcaatttgaagtaacttatttgactatgaatgttatcggattactgaattgtatcaatttgtttgtgttcaatatcagctttgataattgtgtaccttaagatattgaaggagaaaatagataatttacaagatattattaatttttatttatttttcttgggaattgaaaaaaattgaaataaataaaaatgcattgaacatcttgcattcaaaatcttcactgacaatgcagcctcattctttttttttcttttgcaattttttccccacaatacattaaagggtttaaaagcagtgacagggatataatgtgtgtagayataatgactcaatggtgttaatttgggaaaacattctataaatgtatcacgttttatagccagcatagtgaagaatttcttgtaatagaaggagccacattagttataaaattctaggtgttggtatttaaaaatc

SEQ ID NO: 317142 - DNA, 572 bp, Homo sapiens
ctatggcttcaaccctttgacagggaggttaagcaattgtcctgggtcacaccactggcaataggtggaggtgtcatgagaattcaggtcttctcactcctaattccactgatgttcgggccatgtcagaggcagaggaagattataaggagttagtctcagatctagtttagagttttcttgggagaaatagaaattcttgtaaaatagaatctttgaattgtcatwgaatcattacactgattttgttcaaggtctgagaatccagaagattaaggaagagaactcttagaaacacttttttttctcttggtttccaggatatcacactcatctgcttttctacctgcttctcagtctttagctagatcttcctcaatatttccctattctctaccatggacctatcaaaaatagagtgccccagagctcaatattgtaatttttctctccatatagccactccctacttcatttcatacagtttcatatctttaattgctgtctatatactgatttctcccagtctagatatttgccatgagttccagatatctgtgtccgattaccta

SEQ ID NO: 317143 - DNA, 520 bp, Homo sapiens
atatagttactatttcaataaaattcaactcaatctttcttttatctcagaccaaaaacctgctatctctctctctgggaattgctaaattactcatcttcaagtgatttcagagagaaataacctaaacttttacaatgrtggcagaattggtcattttgaagagattatgcagagggaggaaaaagattccaagaaactggagttaaacagaatatcagagtcttcaaaaggataaaattataagcactgaatttgactctgatcaattctagaacatatttttccctaaacagtcataaaacatgaaatatatgtgctgttcattaagttccaacatgaattcattaagaaaagacataaaacatggatcacttttaaatatcctgtctggtcacccactaatgctaactatctgtcatacaaaatcaaacacagatactctgctcagtttatctaaatttcagagaaatacttgggaaaagacttccataattttcttattagcttgtagggcaaa

SEQ ID NO: 317144 - DNA, 520 bp, Homo sapiens
atatagttactatttcaataaaattcaactcaatctttcttttatctcagaccaaaaacctgctatctctctctctgggaattgctaaattactcatcttcaagtgatttcagagagaaataacctaaacttttacaatggtggcagaattggtcattttgaagagattatgcagagggaggaaaaagattccaagaaactggagttaaacagaatatcagagtcttcaaaaggayaaaattataagcactgaatttgactctgatcaattctagaacatatttttccctaaacagtcataaaacatgaaatatatgtgctgttcattaagttccaacatgaattcattaagaaaagacataaaacatggatcacttttaaatatcctgtctggtcacccactaatgctaactatctgtcatacaaaatcaaacacagatactctgctcagtttatctaaatttcagagaaatacttgggaaaagacttccataattttcttattagcttgtagggcaaa

SEQ ID NO: 317145 - DNA, 520 bp, Homo sapiens
atatagttactatttcaataaaattcaactcaatctttcttttatctcagaccaaaaacctgctatctctctctctgggaattgctaaattactcatcttcaagtgatttcagagagaaataacctaaacttttacaatggtggcagaattggtcattttgaagagattatgcagagggaggaaaaagattccaagaaactggagttaaacagaatatcagagtcttcaaaaggataaaattataagcactgaatttgactctgatcaattctagaacatatttttccctaaacagtcataaaacatgaaatatatgtgctgttcattaagttccaacatgaattcattaagaaaaracataaaacatggatcacttttaaatatcctgtctggtcacccactaatgctaactatctgtcatacaaaatcaaacacagatactctgctcagtttatctaaatttcagagaaatacttgggaaaagacttccataattttcttattagcttgtagggcaaa

SEQ ID NO: 317146 - DNA, 552 bp, Homo sapiens
cttcctttagcccaggtatctattagacttctgaattgtaagataataaattctattgttttaagtcactgaaatcatagcartttgttgatattaaaagaaatctaatatggttaattttttggaaagattgaaatgagattatttgagaacactacttgagagaggcaggaggcagagagacctactaatggagtgttgtaatgacctagatgtaaactgaagaaagttgagactaggattatgtctgggagaacagagcaggaggagcattttagatatgtcacagagggaaaatcaggtgtttagtaattggatatgagaaatgagagaaagcaaagttggaaagaattgagtttaggaaggaggaaaaatggtttccatatgttgactctaagataacagcagggtatatagtagaaatagcatatttgaggtacctgacaacacttcaaaattacttactgttttacaatttacaaaatactttcacatctattaaatctgtttcgacacacactttgatatagaaggtaagattcataattatta

SEQ ID NO: 317147 - DNA, 552 bp, Homo sapiens
cttcctttagcccaggtatctattagacttctgaattgtaagataataaattctattgttttaagtcactgaaatcatagcagtttgttgatattaaaagaaatctaatatggttaattttttggaaagattgaaatgagattatttgagaacactacttgagagaggcaggaggcagagagacctactaatggagtgttgtaatgacctagatgtaaactgaagaaagttgagactaggattatgtctgggaraacagagcaggaggagcattttagatatgtcacagagggaaaatcaggtgtttagtaattggatatgagaaatgagagaaagcaaagttggaaagaattgagtttaggaaggaggaaaaatggtttccatatgttgactctaagataacagcagggtatatagtagaaatagcatatttgaggtacctgacaacacttcaaaattacttactgttttacaatttacaaaatactttcacatctattaaatctgtttcgacacacactttgatatagaaggtaagattcataattatta

SEQ ID NO: 317148 - DNA, 552 bp, Homo sapiens
cttcctttagcccaggtatctattagacttctgaattgtaagataataaattctattgttttaagtcactgaaatcatagcagtttgttgatattaaaagaaatctaatatggttaattttttggaaagattgaaatgagattatttgagaacactacttgagagaggcaggaggcagagagacctactaatggagtgttgtaatgacctagatgtaaactgaagaaagttgagactaggattatgtctgggagaacagagcaggaggagcattttagatatgtcacagagggaaaatcaggtgtttagtaattggatatgagaaatgagagaaagcaaagttggaaagaattgagtttaggaaggargaaaaatggtttccatatgttgactctaagataacagcagggtatatagtagaaatagcatatttgaggtacctgacaacacttcaaaattacttactgttttacaatttacaaaatactttcacatctattaaatctgtttcgacacacactttgatatagaaggtaagattcataattatta

SEQ ID NO: 317149 - DNA, 578 bp, Homo sapiens
gagtattgtttcaaattttctgttggaaacatatttttttctcaagacaatcttacataagaagagcttttttataaccttttctaccttgactcccttccatcgggcttctcacttctataaatccaacttaaattattcttacattattattccaaaagaaamatctcctgaaggcgcaacagtttggactataagtgtctgcaatttgccttcttttcattatggccacattgtggcaggaagcctggatatttaatggcatcttgagaagcatattgactatattgtattctctgtagatgcctatggccaaacatgaatctgcaaggataaagttttaatcagtgagagcacacaaaacaagagaaagggaatccattaaagatgatttcaaaagactcgaaattaattactttttattcagagaacccacataatacaactcacacactgcaggctgctaaggaattctactttcagataatatagtttatgaaaatatagtttgagttgacattggcgaccttgacttcagtgagagccacatatgcctccatagcatgatagctggtggg

SEQ ID NO: 317150 - DNA, 408 bp, Homo sapiens
attacaggtgtgcaccaccacgcccagctaatttttgtatttttagtgaagactgggttttaccatgttggtcaggctggtgttgaactcctgacctcaaatgatctgcccaccttggcctcccaaagtgttgggattataggcttgagccaccgtgcctaaccggttaagcacttgacttctaaagaaaggaattcattcattgaacagggagttttctagtcctaaaagcaaggttcttcaccaggtacaagraacacaaatataaataagacatggtcctggctgctggaggtcacagaacagtggatttcactccagtgctgtcccactataattcttactattccctactcatcacatatgtcatgtagatcctttctttgtatttcctttctccttctcctc

SEQ ID NO: 317151 - DNA, 563 bp, Homo sapiens
ctacaggataaaattaaaatttcttaatttattatgatatctggtttttcctaaatgttatgcttcatctttcacaactcacagacaggcacctgtcattttgaaagagtaaatattttctttgctatatgcatagcattttatagctctaagctgccagaagtctcattgccttttattctgcctagtgaatttctgttcattctgtgggatgaaacccgactcattcatgtacttttcagagtcagaggaaaagagctattacttcctctccaatgatgctctctctctctgtttttatttttcaatctatctgtgtctcttacacacrtaaacacacacacacacacacacacactgtctccttttctaaacagatagacatgtacatatacatacatacatgtatctaatattgcactagcaagctgtattacactaatttgtttgcacatctttctcctccactagtgtctggacttctcaagagctgaaccaagtttatatatatatatttttctaatgcctgctatatggcttaatatgtaccagtggcaaaatta

SEQ ID NO: 317152 - DNA, 471 bp, Homo sapiens
atctgtcaaatttaggtattgataacataagtgttaacgttttaattaacattattcttatacacttttgggtatatttaagtatttcctaacataaaccttttaaagacctggacataaaaatataacaaagtgataatatcaaaggctacagacataacttgaaaggaagaacctcacttcttcccaagcccatgatatacatgcatggacccaaatagaattaagtttaaatgatgtatcatttgaccatctaaagtatatttccaaggaagtctgtgattctccacagtgaagaaagatctttgatataaattgttctttactgaagcttttttggatattgctatcaatgcttgttttactcatgaaaaatcagaartagtacatatatatgtgttgagagaagagcctcaaaagaaaaaaaatcaacctcagctaaccatgtactaataccatagattgaaaaaa

SEQ ID NO: 317153 - DNA, 573 bp, Homo sapiens
tcactcaggaagcactcagggccgtaagtgagcaagttgtactcccgggttgcatgagctgtggggatggtggagctatttccttgccccaccccttggaacttctccatgtcctggtttcctgaaaattacgaaccctgtttcaaggaggaggaaatacaccygggggaaaaccctattgagccctaggataatgtttgatgggagtgtttctaagacttgataatatgattggagaagtggtgaaaggaaattcgttggtcactttgtactttatgacaagtaagtatgaatattctgagttactaaattgcccatttatcctgttttatatcatggtatctgtcattaaaagtgttgcaatagacactctaaagttacaactgtgaaggttcattcgtcatgctggaagggatggcttagtggccaaaaatgccagctttcaccaccgtgacactgcatccagagcttgacatgcaagtggcattgactcagcagctcatttcctgaatatagtttcagagtttactcagatgggtggagggtaatgtggacaatgtctaaaaaaacttg

SEQ ID NO: 317154 - DNA, 549 bp, Homo sapiens
tccccgggccagtagcagcagtagcacctaggaaattgtatttctaactacttcctaagtctcttcctaaacctactaaatcaataactttggaagctgggcccagtaattagtgtttgaagagaactacagtagttctgaaaggatagcatacatcagaattatttagagggcttgttaacttcctcaatgtatattctgggaaacagcagcattgttagaaatgcagactctcaggccctaccccagacctaccacatcagaatctgcagtttaacaagattcccaggtgacttaggcacattaaaatttgagaaccactggcctagagtaatgtcttccaaacttttttgactcaaagaaaatgttctttgtgacacaatacacacacacacacacacacacacacacacacacacacacacacactgyagtggagtcaggagtgaggtgaataagatacccaggatatgaaatttaaagaggatctcactttcagagtcctgcaagtgaacttgcataagtgagtgcctcttttaattttgtact

SEQ ID NO: 317155 - DNA, 612 bp, Homo sapiens
actccactgaaccacactgtatccataaacaagaagtcttttatgcagctggtgtttatgggaattggaaattttgacctgtacagctgtgagataataaatgagtgctgttttaagccattactttttttatttttttaatttacttttattttttatttccttcagtttttggggaacagatggtacttgtttacattagtaagttctttagtggtgatttgtgagattttggtgcacccatcacctgagaagtatacactgaacccaatttatactcttttatccctcactcccctcccacccttcccccgagtctccaaagtccattgtatcattcttatgcctttgcattctcataacttagctaccgcttatgaatgagaacatatgatgtttggtttcccattcctgagttagttcacttagaataatagtcttcaattccatccaggttgctgtgaatgccattaattcattcctttatatgttaagccacaaatttgtagtaatttattatggcagcaacagaaaactaatacatatacatwcatacctactgcatgtatgtatataattggtgtcaaaaaatactcttactaaaagaacata

SEQ ID NO: 317156 - DNA, 571 bp, Homo sapiens
atttcagtgctggtcaaggtggtaaagggtcactttgaatcagtattggctcaccatagccaataataccactaaaagaattagaacccagccttatgtcwaacaaaattccaaaacatttcaaataaattcacgatctaaatttttttaaacttattttgaaaaagaaaaatttagagttttgtaatcctaggttacaaaaagtcttttaaaggcagagataaatacaaatagtccctaatattcaatttatttggcctaaattttttcactttaccacagtgtgaaagtgacatacatttaggatgctcctctacttatgatggattatcccaacataggcccatcgttaagtctaggagcatctatacataaagtaaaaaattgacagtaaaagactgttcattggttcagcaaaacattaaaatattttataatattctgtcttaaggaaggaatgagagaaaggacagtttaatacattgttgataggaatgtaaagtaatatactttggaaagtcagcttgatgatttacattttaaaatcttaaaattttagtttcctttgttt

SEQ ID NO: 317157 - DNA, 213 bp, Homo sapiens
gtggttaggcttttctgggaatagctaggtaaagcaggatagtcttcaggcccacttggtgttagtggtgggctaggcatacctttccttgggcccctaggcaacatacgccggcactgatgttagtgagcctagatatgccaattcttgggtctccagggagcttgttcaggtgtcagctgtggcarcaatagaatttgtggttaggtgggg

SEQ ID NO: 317158 - DNA, 497 bp, Homo sapiens
catttaatgaggtcagtctaaacctaaaagaaactattcaacccatttaggaagactagcctaaccctgatataaaaccaaaggaasgactctagaacagaaaactgtaggccatacccacttgtgaccatagaaacaaataatatacataacaaatctatgcacatgctattatatatgctatgtaaacaatgtataacatatgattatataatatgtatatgtacatattacttacatgtaatatgttataaaatattacacacatacacatataaaaagattaaataaggctttcccagaaatgaaacattagaaagcttatcattgtaatgtacctcgataacatcttaaaggtgaaggtgggtctcaaagctctttcccagctgtcttttggagatattgacaagctgatcctaaaatttttgtaaaaagccaactgacccaaaatagccaaaacaattttgaaaaagaacaaacttggaggactcatgctt

SEQ ID NO: 317159 - DNA, 557 bp, Homo sapiens
tgtcacttccttctactgccttggccctgcacttatgttgcattgtgacacataaatggatagtgtacacaggtgatgtgattcttttttttttttttgaggtgggggtggttctgccaataggaagctttgtaacatatcacttggctcagcacctagctgatgtttcttctgtcttgcctgggccctgacaaccagagagattgtgacatattgctgtacccaaggtaaggtcaccctcctgccttggtcctgcacacaggggccattgtgacatatatccaggccaattgcctaggtgaagtttgtctcctttcctgcctaagccctgcccacggggaagatttagatatatcwctaaaaccagcacccaagtgatgtgactcttcaccagagtcctgcccacaaggaggattgtgacatttcactggaccagcacccactcaggtgatgtgactcctttcttctccttgcctacatatgatattatgcatatacctgaggccagatcaaaggcctaataacgactcttgtacctggagccatgaaatacacgg

SEQ ID NO: 317160 - DNA, 600 bp, Homo sapiens
caggtcttgtggcaacagattacctcagcatttgctgatctgaactggatcatatttatttttttacttctgaagcttactttggttgaatatgaaatttcaggttggagctcttcttttaaggatgttgaatattggcccctaatctcttttgacttgtaggatttcagatgaaaggtttgttgtttgtctgataggctttttttggaggttacctggcttttctccctagctgcctttaaaacattttttctttcattttgaccttggagaatctcatgattatatgtcttggggatgaccttctcatgggttatcttactggggttctccacatttcctgcatttaaatgttggcctctctatctgagttagggaaattctcatggacaatatcccaaaatatgtatttcaagttgttttcattatccttattactttcaggcattctctttaattgtagatttgctttcttacataatcccatatttcttagaggttttgttcrttcctctttattcttttttcactcctcttgtcagtcttatttcagaaagcgagttgtgaagctctgagattctttcctctgcatggcctatt

SEQ ID NO: 317161 - DNA, 444 bp, Homo sapiens
gtgagggtggctttgtcaactgagaatctgcctcagattcgttgtacaatgtcagttccaatatatgagatgactgatagtagatttgtaattcctgtagggcctcagaatgatatttggcctcatgggagcacgtagcccatgaatgctgttgttatagtcgtgaataggaggataatgccaatatttcaggtttctaggaatggaaatgaaccgtagtwtaagcctcaacaacatgtaagaagaggcagatgaaaaatattgaagccccgttggcatgaaaatagcagaccattcagccttagtttacatcttggccaatatgagcgactgaagaaaaggcagctgaggtgtctgatgtatagtgcatggccaaaaataatcctgtgatgatctggagaattaggcaggcaccaagaagagagccgaagtttcatcatgtgg

SEQ ID NO: 317162 - DNA, 622 bp, Homo sapiens
gtaacaatacactattgggtgacagtgaagtaacatccctagtgattcctttgtcagtgatctttatcttaaaataatttggtaaatatggctcctacaacttacatttttgtttttcttgtaactccaggttattatgatggttgtaatgaagattatatgagtataatggagctatttgtttctgaattctgaacaactatttacaaaatatcctacttttttctgttaaacatatgacttctttggtctgctaaacacatacagacctttagttttgatttatatgcatttaaatatacagatatatcactctaaaataaactttaggtgtgtaacctaaatatgattataaagaataatcatatttgtttatggttgtgtacctactttgagaagaaaaaaatattagaatgaaatagataattttacaagtgttgataacttgccagcaaaccagaaagttcaaagattttgaaagcaaatctattttctctgctttgtattaaactcatttatctaaaatgttattgytcctggcttagaatcatcttatgcaaattctccttttttgttgttgttgtttgtctgtttgcctgttgctctctgtagacatataatc

SEQ ID NO: 317163 - DNA, 554 bp, Homo sapiens
cacttgacaaatatgacctctgtgatcatgagcttctaagcaatctggacaatgcacaacgtaaaaacctatgaaagggagatgagtaggtctgatggaaacaatttcccacctttttccttggcaagttcaaacaactgggaaggtagacaaatgtgcagaagagggcagcatagtataactcctcatcatgtgagttgacaaccaagagttttccattctagctgtgagagctccaaatgaaaaccagaagttacttcactgtgcatctatcaatgattggatgcaccacattttgtctatcatactgaggaatcttcactgaggatcttcccattgaacatatggagatagtgacaggaaaaggtaaaatagcaactccatgaaatcattaatcaaagtgtagaaatgttcctcttaactcattagcatttttgcacatatttgcatgtatatctacccataaagctgacatttttataataatttttataataattaagttatatgtcaagttaaaattaaaaaaaawtttttcagctgtacaagtggca

SEQ ID NO: 317164 - DNA, 568 bp, Homo sapiens
tgaattagaccatgaggctgacatcaaaacacctcatatctaataggaaatcgaaatatgcctaaataacaaaactatgttaatcaccataagataatttttttaaaaaatgttcaatcgcctctgtgatggcacagatcattttcttctttctctctggtcatcccttgcacctggaatagtgcttggcccatagcaggtgctcgtgcttattgaatggggaagcggggaaatgaatgaatgagaaaagaggtgacacatgacctgggcttggataatggaataatctggtcatcagaaattacataaggcaatttaaaaaatcaagatcattctcgtgagttttattttgacttaattcagttcttttcaacaataattacctcagcatggtcttaaacctccctctccacacttgycctgtcacaacaacttaagaaaacatccatgaacataaaggcaaaggcagtcccaggaactaggggagatttgttgaactatggttcatccatcaaaaggtgctgttcatttcaaaagagtcacctttggtgtgttatgcacttagttc

SEQ ID NO: 317165 - DNA, 593 bp, Homo sapiens
ttcaaaagagtcacctttggtgtgttatgcacttagttccatgatgctaacaatatttaatatatgcataaaactccagaagttgccttcagaatctgcatcagctcctctaaacatccacaatggctacattgttatcttttaaaagtggctttgatatttgagcttcctgatattttctctaattaaatgtacaaataaatcagttgagtaacattattgctggatatcttaaagaggtactccaattacattctcagaatatttgctgtacataatggcaaagtatataaaaagtggaaaggagacttgtttagattttatttaatgtaataagcattaattataaataattatataaaattattttatataattatttttaattttttattatgtattttaatatatattatgtaaacraaatgacttgtttacaattttatttaaatacatattcagctactcactacaatataatagaatattttttgaaagatcaatggggctgaagtactaagtgaccatatactggagcttctgagttaccaacaatttaataaaagcttggaataaaataagaccaatgactt

SEQ ID NO: 317166 - DNA, 621 bp, Homo sapiens
gagggctgcagaagagacaggagattccaaacattatcaacaattcctaatgaggtgaccctcaaaaaacttacacttgagaaaacataagagaatgtaagtgaattaagatgatgctttttttgccttaactttcactcttattcttttcaaatttcaaaatcttctcattttttactattattaacaaatttattgtgatcttacccgatgtctgattcagacacaacaatattttattctagttgctaatgctgctctattctgtgccattctttagttcattcatccaaacactatccatttgccacacatttactgagtgtctgttaggtatcaggctctgtaataggcactggcattacagagatgaacgagcaatctttgaactcagtttcatctcttaaagatgaatataatgaatgcctgagaatgatcaatgtattgaattgttgtttcatgttagagtttcataattgttgagccataaaatattctttaccctaagaacccctgcaattcttaaaatgattgaacaacttccatattttacttactgtgcatttactgattactwtctatttggtagtgaggctatcctggttttcaggaagaccaacc

SEQ ID NO: 317167 - DNA, 601 bp, Homo sapiens
cagggactcagaattaaaacccaaagagacgcataattaaagagcttctaacagcttctgtccatttattggttggatgacaaatgaaaaagtttctttggccttgacaatctccatcaaagaaaccaaataagcatgttaaggaaacatacagtatatgaacagttaattcttgtattgcttggacatcaataaatctaataaaaacgaccaagaatagtcactcagttttacaatatagaaggcagagaaaactctgacactccaagttgtgaagacaatgaaacattccagtactccattagaggactttttgtatctacagctgcctgtgctttgaaggtaaaaacccagaatttaaattcaaacatattcagttaatgcacttatgcattttacaaatttttgttctggtatagcatatgaaagggagctatatctgcccccatttctcttttatgacacatgcccagtggtactgatggctaaaaagatggtatttaatgttgagggatattgttytaacttgcttgaaagggcaatgtttctgaaatgccttaaaaaaaaaaactgtctttttttctaaattaatattggacag

SEQ ID NO: 317168 - DNA, 645 bp, Homo sapiens
caaaggggagttcttttttgtttttgtttttttcctttctgagacagagtttcactcttgttgcccagactggagtgcaatggtgcaatctcagctcactgcaacctccgcctcccgagttcaagtgwttttcctgtctcagcctccctagtagctgggattacaggcacataccaccatgcctggataattttgtatttttagtagagatggggtttcaccatgttggcctgactggtctcgaactcgcgacctcaggtgatccacccacctcggcctcccaaagtgctgggattacaggtgtgagccaccacacccggccaggggggcttttaaagtgccttttaagtagtcattcctttgtgggggtatttgcttttattgcagtttattaagcctgaaacagctgacatgaagatggatactttgactcaggtttggttgcctgatccatgaagctttaatcttacttgcccacagatacacacacacatacccctacctgtattaatttgcactttaaatatgcccattcctctgctattaagatataggaaagttgatagtatcagattaatttcaggtgaactattctacctataaaagaataggagctaataggagctcctataaaagaacaggagc

SEQ ID NO: 317169 - DNA, 645 bp, Homo sapiens
caaaggggagttcttttttgtttttgtttttttcctttctgagacagagtttcactcttgttgcccagactggagtgcaatggtgcaatctcagctcactgcaacctccgcctcccgagttcaagtgtttttcctgtctcagcctccctagtagctgggattacaggcacataccaccatgcctggataattttgtatttttagtagagatggggtttcaccatgttggcctgactggtctcgaactcgcgacctcaggtgatccacccacctcggmctcccaaagtgctgggattacaggtgtgagccaccacacccggccaggggggcttttaaagtgccttttaagtagtcattcctttgtgggggtatttgcttttattgcagtttattaagcctgaaacagctgacatgaagatggatactttgactcaggtttggttgcctgatccatgaagctttaatcttacttgcccacagatacacacacacatacccctacctgtattaatttgcactttaaatatgcccattcctctgctattaagatataggaaagttgatagtatcagattaatttcaggtgaactattctacctataaaagaataggagctaataggagctcctataaaagaacaggagc

SEQ ID NO: 317170 - DNA, 645 bp, Homo sapiens
caaaggggagttcttttttgtttttgtttttttcctttctgagacagagtttcactcttgttgcccagactggagtgcaatggtgcaatctcagctcactgcaacctccgcctcccgagttcaagtgtttttcctgtctcagcctccctagtagctgggattacaggcacataccaccatgcctggataattttgtatttttagtagagatggggtttcaccatgttggcctgactggtctcgaactcgcgacctcaggtgatccacccacctcggcctcccaaagtgctgggattacaggtgtgagccaccacacccggccaggggggcttttaaagtgccttttaagtagtcattcctttgtgggggtatttgcttttattgcagtttattaagcctgaaacagctgacatgaagatggatactttgactcaggtttggttgcctgatccatgaagctttaatcttacttgcccacagatacacacacacatacccctacctgtattaatttgcactttaaatatgcccattcctctgctattawgatataggaaagttgatagtatcagattaatttcaggtgaactattctacctataaaagaataggagctaataggagctcctataaaagaacaggagc

SEQ ID NO: 317171 - DNA, 598 bp, Homo sapiens
gagtatctgaaggctcaactgggctagatgtccaagatgacttacattatacctttccatttatactgaaaaaaatagagttgagaaatgattaatatgtaaatatttttcaagatactaatttgtgttgccaaactggccattgatgctggttgctgagygttagttcagctagggctgtcaactgtaatgcctacacataacacctccagcatgatggctttaggatagtcagacttttttatttttatttttggagacagagtcttgccctgttgcccaggctggagtgcagcggcgcgatcttagctcactgcaacatccacctcccgggttcaagcgattcttctgcctcagcctcctgagtagctgggattacaggtgcccaccaccaagcccggctaatttttgtatttttagtaaagatgaggtttcaccatgttggccaggctggtctcgaactcctgacctcgtgatctgcctgcctcgacctcccaaagtgctgggattacaagcgtgagccaccgtgcacggcctagggtagtcagacttcttatatagtaatttagagcttcaagagtgagtgttctagtgccta

SEQ ID NO: 317172 - DNA, 552 bp, Homo sapiens
ggaaaactgcttggaacatctacttgaactaaacatacattgttttcctagacttatgccgaagagatataaaacatttacatccaacaaaaacattcacaaaaatgcccacagaagttttattcttaagagtcagaaactggaaataacttaaatatccatcaacagtacaatggataaatagtgacatttatacaatgaaatactacacatcaataaaaacatgaactactgctccaaacagataaatctaaaagacattacgtcgaatgaaagaaaccaataaaaaaaaagtacatcctgtaagattgtatttatatgaagttcaggaacagacaagttactctrcagtgatagatgttaggatagaagttactctcaagagtggctgggtgttgactgggaaggggccaagtgagccttctggagtttgtgggaatgtttatatcttgatctgggtggtggttgtatgggtatatacatttgcaaaaatccactgaatcatgtgcttgagattagtgcactcactgtaggcatgtcatacctcaattt

SEQ ID NO: 317173 - DNA, 566 bp, Homo sapiens
ccatggtaacaatacgtttcattttcttcacactaaatagcaacttacagcaagtctgaaaaagacagagtgaaacgtgggtgtcagcagaaattacaaggacatgttaaggtggaggttgcaagctggtggcccatgggctgaatctattctatactcatgttttatttggcccatagagcatttaaaatgttcttgaattatttactagcatttaatattcaggtgatttgattaagaagattcctagctttttgawcagtggacaatctggttacagtaaaccagattgctgcctggacctgaggtcaggctgcctcttcagatgaacatgaactctctggttctgtagtttgccacagcccctcctcagtggcttcagttggttaacatcacctgcctggtccctctggccttggagtgtgtgatccatactgaagaagagaagtagaatgcaatgctctctgaaaactgcatccttcttaagaaaaatatagagcattccctgctctatgctcttcaaatgaaaaatcaactccagattattcaaagtttgaataatcctc

SEQ ID NO: 317174 - DNA, 603 bp, Homo sapiens
aagggtcacaaacacttggttccattttgaaatgcaaatttgctaccaatttgtcactaccaatttgtgatgtgtcatcagggcctgtatttcaagaatggcattttcattgccagctctcccagactatctcagtaatcaccacarttacgcagagttgcagaaggatctatggaagacaagaggttcctaccagctgaggagtcagataagaaagtgctatgccactgtaatggtatccccagcatggagatatcacagcatcatgctgctctaggtgactcacactcttcagtaattcagttttctagggcctgactttaatgaggctctttgtgtatccataggacttcccaacaaagatgtctttcagggccccactataactcagctgcacaatggaaagagaaaattataagaagtcttggacactggaaatttagacacaagaaaaccccagagaacatgagagaagaaaattcttccacttttctctcaggatgaatgcttggtgactttgagaatcagtacattgtaatgggatccagtgtactatgagatcatagtgaaagccaattgctaatgattttagttaaagatgaa

SEQ ID NO: 317175 - DNA, 603 bp, Homo sapiens
aagggtcacaaacacttggttccattttgaaatgcaaatttgctaccaatttgtcactaccaatttgtgatgtgtcatcagggcctgtatttcaagaatggcattttcattgccagctctcccagactatctcagtaatcaccacagttacgcagagttgcagaaggatctatggaagacaagaggttcctaccagctgaggagtcagataagaaagtgctatgccactgtaatggtatccccagcatggagatatcacagcatcatgctgctctaggtgactcacactcttcagtaattcagwtttctagggcctgactttaatgaggctctttgtgtatccataggacttcccaacaaagatgtctttcagggccccactataactcagctgcacaatggaaagagaaaattataagaagtcttggacactggaaatttagacacaagaaaaccccagagaacatgagagaagaaaattcttccacttttctctcaggatgaatgcttggtgactttgagaatcagtacattgtaatgggatccagtgtactatgagatcatagtgaaagccaattgctaatgattttagttaaagatgaa

SEQ ID NO: 317176 - DNA, 603 bp, Homo sapiens
aagggtcacaaacacttggttccattttgaaatgcaaatttgctaccaatttgtcactaccaatttgtgatgtgtcatcagggcctgtatttcaagaatggcattttcattgccagctctcccagactatctcagtaatcaccacagttacgcagagttgcagaaggatctatggaagacaagaggttcctaccagctgaggagtcagataagaaagtgctatgccactgtaatggtatccccagcatggagatatcacagcatcatgctgctctaggtgactcacactcttcagtaattcagttttctagggcctgactttaatgaggctctttgtgtatccataggacttcccaacaaagatgtctttcagggccccactataactcagctgcacaatggaaagagaaaattataagaagtcttggacactggaaatttagacacaagaaaacccmagagaacatgagagaagaaaattcttccacttttctctcaggatgaatgcttggtgactttgagaatcagtacattgtaatgggatccagtgtactatgagatcatagtgaaagccaattgctaatgattttagttaaagatgaa

SEQ ID NO: 317177 - DNA, 295 bp, Homo sapiens
gagttgacatcagttaaatactactgaggtggtaggcaaggaaagggccatatcaactcttgaaatctcatatcatttctaattttataaatctattagtaattcctacaggactgtaaggcaagtctaagacayggaagttacattaaagctttatcttttgttggaaaaggctgtcatataaaaacattttgattcagtaaaaaatattcaacctaaaactacttcagaagcattaggccagcccatgctgagtataattagattattcattttgagaggaagctaaaacacc

SEQ ID NO: 317178 - DNA, 534 bp, Homo sapiens
tgctttgtaaggcttgccatacccaacatccccttttaagctgaaactgactcatccttagcccctgcctttgataagcagtgtcctgatccataacgaccaacaagaaactctttctagaaacattggcaattagccaagagaaatcaactaagaccccctacaaaattggggctaccaagtgctcaagaaataggctggggagaagtgaaaggagaaagatgcagatactcaaaaggcttttatgaggaaggccgtgtagtacatgtgaaagaaatgaagggagtagcaagtccgtggagctactgcagacacccacagatctcytgcttcagatccagtaaagaatgtcttctcagcaacttccccgtttactttctttccttttaaaaacaatttattataaacaatttttattatagtttatgtacagaaaagtgtaaaaatcactttcacagatggaactcacccctgtatccagcacccaaccctccagaatcctctatcctattcctttcctttttgctaactccc

SEQ ID NO: 317179 - DNA, 628 bp, Homo sapiens
ttttttatattagccatcctagcagctataaacagctattagtgagtgttaaactcagtatgctttaaatgtgaaaccgttttatctttctagcccctgctctcaaccacrctgtcaaatcctattttcccatcacttaataatatggtgggggaaaaaaatctcaatttttgggtttttccattattaaagtgtatttgggctcagtttataatatcagtctctgattcagggctcattccctcttccagtccagactagacctgtggctttaagagccttagaatggagaggcacccatttacagaccaccctcttctcccttgtctggttctagttctagtttgggggcagggaaggagtttttttgaaaagtcttgctaattagttgtgtaaggtcacagtcatctccggttggtgtggctgtttctctggctacaactggtgtggtataatggggaatatttcttttctttgtccccagttcctggcagtttcacaaatccttggaatttcctgagtgataggatatctgttatgctaatgaggtgacactgatggatccctagatagctttgggataagagatctggtcaccagagagaccaaccgcatggctacggaaatg

SEQ ID NO: 317180 - DNA, 628 bp, Homo sapiens
ttttttatattagccatcctagcagctataaacagctattagtgagtgttaaactcagtatgctttaaatgtgaaaccgttttatctttctagcccctgctctcaaccacgctgtcaaatcctattttcccatcacttaataatatggtgggggaaaaaaatctcaatttttgggtttttccattrttaaagtgtatttgggctcagtttataatatcagtctctgattcagggctcattccctcttccagtccagactagacctgtggctttaagagccttagaatggagaggcacccatttacagaccaccctcttctcccttgtctggttctagttctagtttgggggcagggaaggagtttttttgaaaagtcttgctaattagttgtgtaaggtcacagtcatctccggttggtgtggctgtttctctggctacaactggtgtggtataatggggaatatttcttttctttgtccccagttcctggcagtttcacaaatccttggaatttcctgagtgataggatatctgttatgctaatgaggtgacactgatggatccctagatagctttgggataagagatctggtcaccagagagaccaaccgcatggctacggaaatg

SEQ ID NO: 317181 - DNA, 628 bp, Homo sapiens
ttttttatattagccatcctagcagctataaacagctattagtgagtgttaaactcagtatgctttaaatgtgaaaccgttttatctttctagcccctgctctcaaccacgctgtcaaatcctattttcccatcacttaataatatggtgggggaaaaaaatctcaatttttgggtttttccattattaaagtgtatttgggctcagtttataatatcagtctctgattcagggctcattccctcttccagtccagactagacctgtggctttaagagccttagaatggagaggcacccatttacagaccaccctcttctcccttgtctggttctagttctagtttgggggcagggaaggagtttttttgaaaagtcttgctaattagttgtgtaaggtcrcagtcatctccggttggtgtggctgtttctctggctacaactggtgtggtataatggggaatatttcttttctttgtccccagttcctggcagtttcacaaatccttggaatttcctgagtgataggatatctgttatgctaatgaggtgacactgatggatccctagatagctttgggataagagatctggtcaccagagagaccaaccgcatggctacggaaatg

SEQ ID NO: 317182 - DNA, 479 bp, Homo sapiens
gggcctttgccttcaaagaaggcaatttattcttctgcataattcatagatcttccacttggaaatgttctgaattacagtttcttattcaaattaggtttaagaaaacagtttttatttcytagacacttgcctctcaaagcatatttcttgaggtttagcaactattctcttagtttttcagggactggtaactcaagaatagaattgggaaggttttgacctccccaatataagaagggaagagtggcagtgtttgtgctttccttagtagttttctggactgtggcctcttttaagtcacatagggtgactgtcttgctgcacgtcactgtatgcatcctactgattgatccactagggtgactgaatgaaggccgtgttgtaataatagtagtagaaatagcaataacaacagtaattacagccacctcaggtggctacttattagaacttcctaacactttatatctattgca

SEQ ID NO: 317183 - DNA, 479 bp, Homo sapiens
gggcctttgccttcaaagaaggcaatttattcttctgcataattcatagatcttccacttggaaatgttctgaattacagtttcttattcaaattaggtttaagaaaacagtttttatttcckagacacttgcctctcaaagcatatttcttgaggtttagcaactattctcttagtttttcagggactggtaactcaagaatagaattgggaaggttttgacctccccaatataagaagggaagagtggcagtgtttgtgctttccttagtagttttctggactgtggcctcttttaagtcacatagggtgactgtcttgctgcacgtcactgtatgcatcctactgattgatccactagggtgactgaatgaaggccgtgttgtaataatagtagtagaaatagcaataacaacagtaattacagccacctcaggtggctacttattagaacttcctaacactttatatctattgca

SEQ ID NO: 317184 - DNA, 553 bp, Homo sapiens
ttaaaaggacagataaattgttatataatggagaacacttttcagaccattcaagtcttggggcctgttttggctgagacatgagacaaaactgtcctctttgtgggaactagttctcttgtccctcttgccttttaaagtcattaacagcacgctaagcaatttgggaatgtccaaccactgactcagctaggtttcattgctttgtttactttgctttacatcttcagcctcttcatattggcattatgtaaaaggcttcttcctaaaaatatagacatttcagttggatttgagcaacccagaaaaagttgttttcttaatttgggaaagatccatttgtcagtgtttttgcctatctgtagatgtacatgttwctatacattgggtgatacacacacacagttcattggagttggggttcatcattccacaagcatagattgagtttagaaactacaggaagccttggaaagtattcaccacttttaaggttttgataccttggttcagttcctaagtgttgggaagtttcaaagggtaggacaaactg

SEQ ID NO: 317185 - DNA, 493 bp, Homo sapiens
ccccagctagcgcatccagtgcatcactggttggtgggcaaaacttcctcttgtgatcaattttagtaactataattccaccttactgctcttatctgaatgtggcagagatttgctagctggccagcaaacctgtttcttcttcctcctggacacttagctggtggacacaagtagatttgctgagtaaatgtggtcacrtggtcaattcctgatcagtggattttaggcagaagtgataagagtcccttccagccctggtccattaaaaacctcctacatgtgatcctccatgctttcctcttgtaagttacacttgatgatgggagagccacaagatgaaaggagcctcggtcactgggtaactgagtcaccccttaaaaagaggtgcttattaatcaagaatacttggtttgaaatgtatgtgagcaagagataaactcagtcattgtgacttgggggttctcttgcatctgttgcagcagcaagagtt

SEQ ID NO: 317186 - DNA, 473 bp, Homo sapiens
atgctgatttttgcaaagataatcatcataagccttcgagttagagaaacagagagctaccttatcccagagtgacagacaatattttgcagaagatattagaggaaagcaggatcttccatagaaatcaattcataaagacatcatcttcgaaacctgcatttgggcaaattataagccaaaaagtaaaatttaataatgaatacattgaagcaagcagcagacacctaaacatggataacagtgtttgaggcaagattaccatggaacattcaacaggctctagactggaccaatagagggatggctcccttagccccacaggttaaaggctgtctctggggcctccatgagaagggaatcaggaatgctataaagcttagggtataccttcttattaattgcatgcagttaatatttgaaarttgcattagctcttacttcagaatatgggcgtaatcattctcatcaag

SEQ ID NO: 317187 - DNA, 588 bp, Homo sapiens
ggtggtgggtcatcttcccttgaatggcrcacatatttcacagtcagaaacaagcacctgattcccatgtagttcttgtgaatctccctctccgtgctgactcttctccctatatagtgcttccctcagaacaatctcccagtctttggctgcatgtgcccccagtccaactctcctccctcttcccacccacagtccagtaagcctttagggctaagggcctccctttaccttctttctaattccaacctaacacaccattcaatttcctttcagttctcaaaggcatttcctcttgagaaaacctgattctaacaaataaaaaaagttggttttcaaaacaactgttctggtaaaggctgcaagagcttactttgtaagaccaaaactgcacattcaaatatttttctttagagatatttctagaatcagatccacatatatacagttacttgatgtatgagaggcacaataagaaaaggatcttttttatgtcatgtagaaataattagatagccatataaaaaaattaaccttaaccctgacctcacattatccttaaatattaattcaggatggacaatagcc

SEQ ID NO: 317188 - DNA, 536 bp, Homo sapiens
tgtaacactctagtttttaaaagaattacttctttcctctgctgtgttttcggatataattgcaaaattatcaaaattttaatgttttataacattaaataatctaaaatagattgtaatctatataaaatagatcattttcatgtcttatataagccaagattatattttatataattaattatacccccaattgaaacttaaagaaggcaggtgacaatggaacacaaattgctgagtgacctatgatgaaacacattattgtgacggtgatgaaacaagattgtatatgttctgccatcttcactgatacttttgaaataaattctaaatatggaaagatggggtttttgtgagactaggggggaaactttctaatgtattgtaaggaaaggagcttctttttagcataatacttattttaraaaaatatatgtgtttgtatttttgaatataaacaaaagatttagacgtggctagttaatatcccacatacgaattgtaatgaaggtggatgagaatggaatacagattgt

SEQ ID NO: 317189 - DNA, 556 bp, Homo sapiens
tactctgtaaaatttgatggatttcttcaggattgggaccctgaaaataaaatatagcaattgctctaaaaggtaactgggggaaaatatccaatgctgctgattttaagtccattaayttccccaaagaagtaacagaagtaattttctgttgtatctttggtctatcagaccaaaagatccaatagcaatgagatttaactgtatacacacaaaattacctatttcaaaaataatgacaacacacaatggcaaaaggaaaaacatttaatacataaaaaagcacaattaaaaagtattaaaagcattacatagtgcaaacaccaaaaagacagagctattaacttagtggtgcttataaggaaaactaggcaagaatgcagaaaatgccttcctctttcctcatctagtgagctggccacattcaataagttgttgttattattattattattattattattagcgaaagactgaagttttattattactcaattcagtctcccaaaaagttattttaaattgctgctttcttcccacttgatgaaaccacatt

SEQ ID NO: 317190 - DNA, 592 bp, Homo sapiens
acctggcacatagtaaggtagtgggtctcaaccttggctgtgcattagaatcacctggggagctttaaaaaaaccagatgctcagcactgcagaccaattaaatccaggtctctaggggtgagatacgtacattaccaccttttaaaaagctcccaggtgacttacatatgcagccaagrttgagagtcactgaattaagtgctcaataaatttacaacgccctttataagctacccagccacccccatcctaacagcctccctctcctcctccttccccagggtcccatctctcactctggctcccatgggaagacctgagtgaagcctaaccttggctttggcttctagagtggatgctgaggaccacgtggaagatgaactccagttcattcactcagtggctcatccactcaggcgctccttcactcagtcatcatcaacccagctgcctttacggcacccacgaggtgctcgggggatgcagggatgagtcaaatccagtgctgtcctcaggagttggtaacaaagaacaaaagatgtagaataatagactctcagattccgaagggtcctccagccccacctccca

SEQ ID NO: 317191 - DNA, 483 bp, Homo sapiens
tgtcaactctaccttggaataatattccaaacccaacacctatcaccaccaatgctcccactgctccaaaccatcactatctttgcctgaatcctaaaatagcctctcaactgttccctcagcttccattctttccactttgcagttgattctccacacagctgtcataggcattctgctaaaatgtcagccaaatcgttcactcctctgctccaaaatcctctaatagctccccatcttactcacagtaaaaytcaatgcactcaatggccaaagatctatgcagtctatagttgccaccccccaccccctgaactaatcaccagctcctctccccaccctgattgtgatctcacctcactggcttccttgctattcttcaaccgcaccaggcatgctcctgctttagggcctctgcctttgctgttctctgccagatctctatctgtatagcttgctcctttagatatgcacagctcacct

SEQ ID NO: 317192 - DNA, 548 bp, Homo sapiens
aaggaaaataaacattattttgtaatcaagaaccatatctgagtatggtaatagcgatgctgaagagataagcaacatggaaaaaagatgcattttatttaacctcaaatatacagtgttctcctgggtgtcatgatcttcctcattcctggaccagattctgtaattctacctagtgaccctctagcccttagctttcaaactgcagaagaggggctccctacatttttgtgtaacattattgcaaggactccaataccatggtgttaaatatatatgacataattcagtagggcagctcttagtcatttcactcaaaatcttcttgctctgctaaaggggctttgctgaaagacaaatcctgatgactgacagcatatggcactcagatttgtctgtcctcctccctagaactcgtatcctgagtcatgctcacatgtctggaacttcacccataggaactctcttctggaagaactttcattaaattttgccracagccttctgtaagattgctccactctactgtcagaaatgctgatttgtct

SEQ ID NO: 317193 - DNA, 619 bp, Homo sapiens
agtggaggtggataattggactgattcaatgttaggctttttaaggatgatcttggtggagaacaagggaactaaggattttgaagcctcagtaggagtgaccagaaatatgtggtttccaatgacaaggagggatagcaggtgtcatatatttcaaagaaggaggattttttttcaagagtattgatggattagccaggtgtggtggcacgcacctctagtcccagctacttgggaggctaaggcaggaggatcccttgagtccaggagattgaggctgcaataagctatgattgtgccgctgcacttcagtctaggcaaaacagcaagactccatctcttaagaaaaaaaagtgacggtataaaagtgatatttggaacccaacacaagctgtatttaggggacagagtgacctattactcaaggcagaagggttgagggaactttctgtgaaaaattagaaaatatatagaaagtgaagggaggggccttatctttgaatatagctcctggtgagtgaggttacatataggayggcagccttgaacaaataagaatttattatgatctttgcaatggtattgggaaaaataatcatttgattgcttaaataagtat

SEQ ID NO: 317194 - DNA, 586 bp, Homo sapiens
gtgtctcacatttctctgaggctctgtccggttttcttcattcttctttctctttgctcgttggctagcataacctctatcaatctgttctcaagtatactgattctttcagccagttcaaatctactgagcctctccagaaaattttttattttggttatttcactttttgacttcaaatttccattagttcttttacaaaaatttcttttatttttatacatctatctttactttaggagacagggtgttactctctaacccagactggagtgtgtagtaatgcagtcacagctcactgcagcctcgaccacccaggctcaggtgattctccacctcagcctcccaggtagctgagactacaggcacacagcaccaagcccagctaattttttgtagcgacagggtttctccattgttgcccagactgatcttgaactcctgggctcaagtgattgacctgcctggktctcccaaagtgctaggatggcaggcatgagccaccacacctggcccttttataaaaacgtctgtgtttttgttggtattctttatttgattagacattgtcatcataacatctttt

SEQ ID NO: 317195 - DNA, 541 bp, Homo sapiens
agacctataggtaataagacctagaaaaagacttttgagctcatttaggacaatgccccatcttagaaacaaaaaaatagcccaaggcccggagaggtgtaaagatagtgccaaaggagtggagctcattagtggcagcttgaagcctrtaaccaagcttgtgcccattccactgcaacacacgccagcaccacccttagcattctgtgcttcattttctagcctttagtcagttgaaaaatatacataaaattttatccatcatgaaaatatttaaatgtgttaacattaagaatatatagtgcttttctaacaatattttattccttacaaaaaattattataaattttaactatacactaaaatagaggaaatagtataagacattctcatactacctattgattaaattcaatagcttttaacattttggcacacttgttttatccctctttttgttctttctttttctttggtactgcaaatattttaaggcaaatttctgacattatgtctacgtcatttcaaccttaaatactt

SEQ ID NO: 317196 - DNA, 541 bp, Homo sapiens
agacctataggtaataagacctagaaaaagacttttgagctcatttaggacaatgccccatcttagaaacaaaaaaatagcccaaggcccggagaggtgtaaagatagtgccaaaggagtggagctcattagtggcagcttgaagcctgtaaccaagcttgtgcccattccactgcaacacacgccarcaccacccttagcattctgtgcttcattttctagcctttagtcagttgaaaaatatacataaaattttatccatcatgaaaatatttaaatgtgttaacattaagaatatatagtgcttttctaacaatattttattccttacaaaaaattattataaattttaactatacactaaaatagaggaaatagtataagacattctcatactacctattgattaaattcaatagcttttaacattttggcacacttgttttatccctctttttgttctttctttttctttggtactgcaaatattttaaggcaaatttctgacattatgtctacgtcatttcaaccttaaatactt

SEQ ID NO: 317197 - DNA, 541 bp, Homo sapiens
agacctataggtaataagacctagaaaaagacttttgagctcatttaggacaatgccccatcttagaaacaaaaaaatagcccaaggcccggagaggtgtaaagatagtgccaaaggagtggagctcattagtggcagcttgaagcctgtaaccaagcttgtgcccattccactgcaacacacgccagcaccacccttagcattctgtgcttcattttctagcctttagtcagttgaaaaatatacataaaattttatccatcatgaaaatatttaaatgtgttaacattaagaatatatagtgcttttctaacaatattttattycttacaaaaaattattataaattttaactatacactaaaatagaggaaatagtataagacattctcatactacctattgattaaattcaatagcttttaacattttggcacacttgttttatccctctttttgttctttctttttctttggtactgcaaatattttaaggcaaatttctgacattatgtctacgtcatttcaaccttaaatactt

SEQ ID NO: 317198 - DNA, 541 bp, Homo sapiens
agacctataggtaataagacctagaaaaagacttttgagctcatttaggacaatgccccatcttagaaacaaaaaaatagcccaaggcccggagaggtgtaaagatagtgccaaaggagtggagctcattagtggcagcttgaagcctgtaaccaagcttgtgcccattccactgcaacacacgccagcaccacccttagcattctgtgcttcattttctagcctttagtcagttgaaaaatatacataaaattttatccatcatgaaaatatttaaatgtgttaacattaagaatatatagtgcttttctaacaatattttattccttacaaaaaattattataaattttaactatacactaaaatagaggaaatagtataagacattctcatactacctattgattaaattcaatagcttttaacattttggcacacttgttttatccctctttttgttctttctttttctttgktactgcaaatattttaaggcaaatttctgacattatgtctacgtcatttcaaccttaaatactt

SEQ ID NO: 317199 - DNA, 495 bp, Homo sapiens
tctttttacatttattttagtcattttaaatatgtatttctattttactgcaaagtagtattctatatttggattcagcaatccaatttttcttgctttttataaacttctattctgaactggtaccttagttacaagggccttayatataagtcattaaattcaggcacacctacctaatcctgaccccagccataatatatttttaacacttcaatgattactacagatatccttcctgctttttcaccccaatacacacaagctatgactccctcattactttctccagtctattaaaattacataaaattccattaaaaaggcctttttatatcacagataaaatcacacttgctatatatacagtgattgtgattcatacagctgtaattataattcaataaatctagatattttcttgctccatcaatgctaacgtgatgattgggtttggctgtactcaaaatttgatatggctcctttcttagccag

SEQ ID NO: 317200 - DNA, 495 bp, Homo sapiens
tctttttacatttattttagtcattttaaatatgtatttctattttactgcaaagtagtattctatatttggattcagcaatccaatttttcttgctttttataaacttctattctgaactggtaccttagttacaagggccttacatataagtcattaaattcaggcacacctacctaatcctgaycccagccataatatatttttaacacttcaatgattactacagatatccttcctgctttttcaccccaatacacacaagctatgactccctcattactttctccagtctattaaaattacataaaattccattaaaaaggcctttttatatcacagataaaatcacacttgctatatatacagtgattgtgattcatacagctgtaattataattcaataaatctagatattttcttgctccatcaatgctaacgtgatgattgggtttggctgtactcaaaatttgatatggctcctttcttagccag

SEQ ID NO: 317201 - DNA, 576 bp, Homo sapiens
tagtttaaaggaatactttaggagaaatgtacaccattaaatgcacactagaaaagaagtaaaactaaaaattaatgaggtaagtattagtcacaagaagttaggaaaagcacagcaaattaaagtcaaaataggaagaaaataataaagattatatcgaaattagtaaaacattaaaaaatcttacaacagaggttcaataaagcaaaattaggtaaattgaaaacactattaaagttgataattgtatggtaagaatgaccaaggcaggaagagagagaaggcagagatttacaacacatatatagaaaagaataaattactacatataccaactattaaaacaatattaagaggtggctactaacaactttatgacaataaattaaaattttagataaaacaaacttcttagaaaatacaatttaccaaaatgacacaagaagtagaaaatctaaacagctcattaactattaaaagaacattaaatccaccaaggaagcttcaggccaggtggcttcmcaggctaattccaccaaacagtcaaggaagaaataatgtcaatcttacataaca

SEQ ID NO: 317202 - DNA, 586 bp, Homo sapiens
ctattgaagcttgtgtatgtgtcacgaagttttcatgctatggttttcagctccatcaggtcattaagatcttctctatactgtttattctagttagccattcatctaacctttcttcaaggttttagcttccttgtggtgggtttgaacatgctcctttagctcagaggagtttgttattaccaactttctgaagcctatttctgtcaactcatcaaagtcattctccatgcagctttgtttgattggtggcgaggagctgtgatggagaagaggtactctggtrtttagaattttcagtttttctgctctgatttctctccatctttgtggttttaatctacctttgctctttgatgttggtgacctaccaatggggtgtagatgtcctttttgatgttgatgctattcctttctgtttgttagctttcattctaacagtcaggaccctcagctgcaggtctgttggagtttgctggaggtccactccagaccctgtttgccttggtatcacaagcagaggctgcagaacagcaaatattgctgcctgatccttcctctggaagctttgtcccagaggggcatc

SEQ ID NO: 317203 - DNA, 593 bp, Homo sapiens
gaacagaagtgttaattttgatgtagtacaatttatcaattttttcttttatggattgtacttttgagataaaatctttaaaaagtcacaatggttttttctttttttctttttcttttttctttttttttttttgatggggtcttactctgtcacccaggctgaagtacagtggcatgaacatagcttcctgcagcctctagctcctgagcttaagtgatcctcttgcctcagcctcctgagttamtggaaccacaggcacctgccaccatgctcggttaattttaaaactttttatagatatgaggtctcgctatgttgcccaatctggtcttgaactcctgggctcaagcaatcctcctacctcagcctcccaaagcgctgggattataggcttgagacaccatgactggcctctccatgttttattttagaagttttatagatttaggttttacatttatgcctatgattaatcctgtattttgcttatggaatgagatataaattgaagtacatttatttggatatggatgtcaaattgtctagcacaattaacaaaaagactttttcaatagtcttttctacactga

SEQ ID NO: 317204 - DNA, 593 bp, Homo sapiens
gaacagaagtgttaattttgatgtagtacaatttatcaattttttcttttatggattgtacttttgagataaaatctttaaaaagtcacaatggttttttctttttttctttttcttttttctttttttttttttgatggggtcttactctgtcacccaggctgaagtacagtggcatgaacatagcttcctgcagcctctagctcctgagcttaagtgatcctcttgcctcagcctcctgagttactggaaccacaggcacctgccaccatgctcggttaattttaaaactttttatagatatgaggtctcgctatgttgcccaatctggtcttgaactcctgggctcaagcaatcctcctacctcagcctcccaaagcgctgggattataggcttgagmcaccatgactggcctctccatgttttattttagaagttttatagatttaggttttacatttatgcctatgattaatcctgtattttgcttatggaatgagatataaattgaagtacatttatttggatatggatgtcaaattgtctagcacaattaacaaaaagactttttcaatagtcttttctacactga

SEQ ID NO: 317205 - DNA, 481 bp, Homo sapiens
ataggtttaccatgaggatttatgtaaagccttagcacagtagctgtactatagcacacagtaaatgttggccggatttattcggctgtacacatgagccactggatttgtctggatgcagaagtctactgcggtacaccttcttcagcaagctcttgggaaagcaggggagatttcctggtaccctaggaagtggaggatactaaagccatgtcacagggaggggcattattcttsgtgcgcgcttgctcgccggggtcgggttgctgctccgcgcgcgtccaccaggggccgctcgagctacctaagctccgtgcgctacccggcggcgctcccgcgcgtgctcactcggagcagcgcgcgccccgcaatcgccgcagccgcccccgccgtcggccgccgcaccccaagcgactgcccaaactaagcctccgtggctgggtacgggagcgctttggggacaaaaattctccctcaactg

SEQ ID NO: 317206 - DNA, 556 bp, Homo sapiens
ctttaaaaaatggcagcaaaggcccagaaatattgaaaaggaaactctctaatgaaatatgtgtcttggcttgctttaatagccttcagaatggacagtttgggtaagggggaatttttatttgcatctttttttgtcctagaatggtttaggtastcatcgctgcaacaaatatgcataaattaagagttatctaaaaggttatgtagtatcaatataaatagagacccagggagacctaaacgacatacaggacagtgagtagagaacagttgcctttaactaaacaaacacataaagattagtaaatagtaaaatagcttagttctaggcagatgagttagatggcctcataagccctttctgctgctcatgttctatgattccatggtgtgttagctaagacaataagctttggaaagactgcccaggtttgaatttcaatgcttcctcttatgaatggtattaagctcacaagaggaagaactgaaattcaaaccagagcagtcttgaccatagagaggtaaattatttcacctctctatgtttatttcct

SEQ ID NO: 317207 - DNA, 583 bp, Homo sapiens
agttgtaaaaatccagaattaaaatattagcaaatctaatccagctatctataaaactgataatataccacaatcaagttgggtttattccaggaaygcaagattagtttaacatttaacaagtcaataaaattcacattaataaaattcatagaataaaagacaaaaaacctcctccatatggttatctcaataaacaaagaaaaaaagcattgatagaaaatcaacacatttttatgaaagctcttagaaacctcagcaataaaaggctataacccaaaactcatatagaatatctacaaaaatattatgtgaacatcacacatgatattgaattattgaaagttctccttcctcatatagggaaaaaagggtgccagctctcaccatttctattcagaattgtagtgaagtcttagctagtgctatatggcaagaaaaataaatattataaggattggaaaggaataaataaaaatgtcattgttcatgaatgacatgattatgtatgtataaaattttagaagtacagatacaatgttaaaattagtaaatgaatttggcaagatcaaaatacaaaaat

SEQ ID NO: 317208 - DNA, 505 bp, Homo sapiens
ttctattcagaattgtagtgaagtcttagctagtgctatatggcaagaaaaataaatattataaggaytggaaaggaataaataaaaatgtcattgttcatgaatgacatgattatgtatgtataaaattttagaagtacagatacaatgttaaaattagtaaatgaatttggcaagatcaaaatacaaaaatcaatcatgtttatatgtagtgaagaattttaaaatgataatttttgcaataccatggaaaacacttaggaatatatcctaagaaatgatgtaagagatatctacagagaaaactccaaaatatttctgagagaaagacataaataaatgggaagacataccatatgtagatttggaagacaacatagtttcctccaaactgatctctagatccattgcaatcccaatcagaatccaagccggttttttctttttgttttttaatgtaatgcaatctcaaacccctggaagctttcttaaaacttgataagct

SEQ ID NO: 317209 - DNA, 494 bp, Homo sapiens
gtgtacatggctctcattctcatttttttttttttttttttgagatggagtctggctctgtcacccaggctggagtgcaatggcgcgatctcagctcrctcactgaaacctctgcttcccagattcaagcgactctcctgcctcagtcttccaagtagctgggattacaggcacatgctgccatgcctggctaatttttttttttttttgtatttttagtagagacgaggtttcactatgttggccaggctggtctcgaactcctgactctgtgatctgcctgcctccgcctcccaaagtgctaggattacaggcatgagctgctgcgcccagctatggctctcattctctacaggatggtggataatacaagcatgttggaattactatggaggcacaatgcttacaagaaacccaacttgcaaaactaagattacaggtatttataattgtaaatgattgcatattataaattgtaaacgactactgtaatt

SEQ ID NO: 317210 - DNA, 554 bp, Homo sapiens
ggaaaaactgagactaataattgctccaaagttggcaaatttgaagccagaagcttctgacccagataaagataatgacaaatttactgtaaatatttttctctacatacatttatttatttattcatagagttgtggcacaatagaaacatattttcaaaactgttactktatttgtacccatgagaacagaagatttataaattgatttaaaaaatttgagattttctttaaaaggcaaggtattacaattctaaattgaaattcttccggcaaaacatttcctattgatgcataatgatgaacgtatgtatttatggggtagatgtggtttgaaaaatgcatacaatgtatacaatgtataatgatgaaatcagggtaattagaattcaaacatttatcatcatctccttgtgttgacaacattccacctcttctcttccagctatttggaaatatagaatgcattattgatatctataggtaccttactgtgctatgaaacaccagaaattatttattctatctaattgtattttttgtaccattaacca

SEQ ID NO: 317211 - DNA, 638 bp, Homo sapiens
atatgtgtgaaaataagatcagataaaatatatgtggaaatagtagaactaacaaattgtgggtgaaacctgtgtgccttgtgtatgaatctaagtccttatgtactcatgagcagtaaatatccttgcaaagaatgttacagagacaggatatttttttcttcatgctgaaagtgtaaaatgatcaaaattgcacattttatatttcataaaggacaatattactcaaccagaaaatataagcggatcctcctaaccaaaacaaagggagatgtttagcccaagtccatcctttgatgaaataattggtaattgggaatggggcagtgagtggtggcatacatcccagctctgaggatttagaaacagctagatctcatgcaagcttcctggatctgcccttatttttgatcatagrccaataaggtagagaaaaccaactgtgaaaagatggccctcatgtgatccaggaacaggaaatgtccctcttccactcttctttctcctcaccgcaacctcaacctcagttgaaaataaaacttacaatttgaaaacgttatttattcatctattaaacaaatattcgtgaagcacttagcaatggaccaagaataattgtaagcattagaaatatcacc

SEQ ID NO: 317212 - DNA, 638 bp, Homo sapiens
atatgtgtgaaaataagatcagataaaatatatgtggaaatagtagaactaacaaattgtgggtgaaacctgtgtgccttgtgtatgaatctaagtccttatgtactcatgagcagtaaatatccttgcaaagaatgttacagagacaggatatttttttcttcatgctgaaagtgtaaaatgatcaaaattgcacattttatatttcataaaggacaatattactcaaccagaaaatataagcggatcctcctaaccaaaacaaagggagatgtttagcccaagtccatcctttgatgaaataattggtaattgggaatggggcagtgagtggtggcatacatcccagctctgaggatttagaaacagctagatctcatgcaagcttcctggatctgcccttatttttgatcatagaccaataaggtagagaaaaccaactgtgaaaagatggccctcatgtgatccaggaacaggaaatgtccctcttccactcttctttctcctcaccgcaacctcaacctcagttgaaaataaaacttacaatttgaaaacgttatttattcatctattaaacaaatattcgtgaagcacttagcaatggaccargaataattgtaagcattagaaatatcacc

SEQ ID NO: 317213 - DNA, 631 bp, Homo sapiens
aataaacaataaagcttaaatatttgtttagcttgacttactgacaaagacaataaagaacattgcatgtctctaaggaaacagtaactctaagacactgctggtagaagaataatttgcagcaactttactggagggcaattagtcaatacacatttaaaaactcagagttttaaatgtgacctagaaattccactcttggaatttgtcctgagagactaataagagaagtgagaaaaaaatgtataaatttagagctatgatagctataaagtggaacccacctaaatatccaataagaagggaatggttaaaaaatatattatgttaataacagtaaatatattgcaaaatgtgacatacatgtgcatttattcatagtgaagtatattcacagtattcttgtaagtgaaaagcacaacagaatagaaagcaacatgaagaatatgattccatcttttatacagactcacacaatttatgartatccttacattagaacaatttggaaaatatagcagatttttaacatgcaatggtgtaattaattatgtataattcattttatttttacttatctaaaatttctactttttgtagaaatgttttcttatacttaagaaatacattg

SEQ ID NO: 317214 - DNA, 631 bp, Homo sapiens
aataaacaataaagcttaaatatttgtttagcttgacttactgacaaagacaataaagaacattgcatgtctctaaggaaacagtaactctaagacactgctggtagaagaataatttgcagcaactttactggagggcaattagtcaatacacatttaaaaactcagagttttaaatgtgacctagaaattccactcttggaatttgtcctgagagactaataagagaagtgagaaaaaaatgtataaatttagagctatgatagctataaagtggaacccacctaaatatccaataagaagggaatggttaaaaaatatattatgttaataacagtaaatatattgcaaaatgtgacatacatgtgcatttattcatagtgaagtatattcacagtattcttgtaagtgaaaagcacaacagaatagaaagcaacatgaagaatatgattccatcttttatacagactcacacaatttatgaatatccttacattagaacaatttggaaaatatagcagatttttaacatgcaatggtgtaattaattatgtataattcattttatttttacttatctaaaatttctactttttgtagaaatgtttycttatacttaagaaatacattg

SEQ ID NO: 317215 - DNA, 573 bp, Homo sapiens
acatgcatgcatttatattcaaatgtattatttgaagcaagacagtaatttctatgttgtaaaaaaaaaaaatccagccttgttttgagaattatcaaaacccttcccttcaacttagcttgaaccattacacacatacacacactcaaatgtctatggctatcagcccaattcattgtatagaacaccaaatttgacataattgataaatctgggtgttctgggtgttcattctttgcattgaatctgaagacttgcatttagctttaaaatttccattaatrtgttgatagagttgcttcatatattttttctgtgtccaatttttaaactaattataacaaacaatttcagtacctaccccatgcaaagccttctgtggggcacaaagtaagtaaaaccttgacctccaggctgttacaattcactaagagaaggcacacacatccaaccactagcttggcataagcaaagctcaagcaatacagtagttcagagtaaagaaaaacaaccaggcaggcaggctcatttgttgcccggattcctgctgcatcttattgttccatcagacta

SEQ ID NO: 317216 - DNA, 573 bp, Homo sapiens
caccatcgcactcctgcctgggcaacagagcaagactctgtctttaaaaaagaaaaaaaaatatatatatatatatatatatataaaataaaataaataaaaatatatgcatatatatagtatattataggatgataagtacatatggaaaaaagaaagcagggaaaagggaaataagatgccactgtgaggtgaaactgtaggaggaaaatctaaggagggcctcgctgagagagtaatgattgaatggaaggaaatgagggagtgagccatgaagatctcagggaagagcgtttcaggcagaatgaacactgagtgygaagggtgtgagatgagaacatgcctagtgtgttcaagaaggatcaaggcgtctctatggcaggagcaggaggagtgagatgaaattgagagtgacaagggactgggttatgtagtaactatagatcactacaggattttagcttttattctgggtgagatggcgagtctgtgccagctactgacctattagctcttggttccaaagcacccttcagtactcttctttatgatgactctgtaaactacattttc

SEQ ID NO: 317217 - DNA, 582 bp, Homo sapiens
tccagcctcccatgagttgtggcatttccagcacagcgctgtggcacactctcggaggaatcagcagctctagggcagtggctattttcctagaagtatagaaccagctctgcagagcccctcttctaagctcctagattctggtaaccccaccccttcccttttgtttcaacaaccagcagtatcagctgttgcctgagtttttaaatctctgtgttaccctttttctctttcaggcacccaacatctgtggaaaacacctcttagactgagatatccagtgtggctcctattttcctggctagactctaactgatacgaagtcatggagggttttgagatctcaaaagatttgtcttgcattctgatagcatcamcctggctgttgtgtcggaattgactgagggatcgaccagctaggaggctatttcaatcaaaatagatggggataaagaagtggttacattctgtatatattttgaaggtattaatgatgggatttgtagacattcaggtgtgagtttcaaggaaagaataaaaaagtatgaactgttatctaggagagtaggagactgattagaa

SEQ ID NO: 317218 - DNA, 328 bp, Homo sapiens
gagtccatgatcaaattaaatggttaaatttccataattgattaaagatgttacttaagttgaataaaataatcactaaaaaaagaagaagggaaaaaaatcctaaacaactcatagacaaataagaackcattgaaagtagaatatatacagaatacttcaaaacccaacaaaagtttcaaagtacacataccaaaagttgagagataattgctgatgcaattcttaaaggaaaatttatagctttaaacattatccttagaaaagaagaaaagtggaaaaattattaaaataattactctgtgagttagaaaaaggacagtagaat

SEQ ID NO: 317219 - DNA, 540 bp, Homo sapiens
ctactgccacttagagaacttaagtagatctgaaaggattaaacacaaccttgggaccactgtgccacaataaataatgataataataataataaattagatagacactggaaagcacttaaaaaagagtgtgtgtgtatgtatgtgtgtgtgtgattttatgacttcaaaatatgttaagatctcaacacatcaaagcattttaatgaaatctctaatacgttagcaaaatttaamtggacacagattatctatgccatatctaatctgatgagctgagagacaaccatcaccctggtagtctcaccgtgttttctcttcaaggcctaagacaaaaactgtttggaaaataatttgtctagaaaaccaaatagtaataaatgaatgtggattttatttttatttgtgaatttattcagttgagatgcccatcagatggcttggtggccaagctttgtactttaatgggtaataaaattactgtaaaaaataataaaaactaattaattttcactaaatatcatgttttgttaaaatgga

SEQ ID NO: 317220 - DNA, 569 bp, Homo sapiens
aggatcacacctgagaaactattcctccatgatgacattttaaaatggctacatacagttgcatccttgcacatataaacatttatttctggtgagtcccaccccctttttcctagaatagataaggtatttgaaaataaacttcctctaaaggtttatcaggagacatattttctcagattttacatgtaacaacatagcctcaaaaaatgatttycaagaaaataaactatatcagcataaaaggctgccacaatcccatattgtaaaacattgaggctgtttctaatatttcagtggataaagctgtagaagcatttttaaatatattatgcccttaagtataaattcctagaagtggaatttctgaattaaacaatataatgttttttaagacttttggtacctatcttcaatttacatgccagaaaaaaattgcacctatcagcagtatatgacatttatctaaatagtcagcaatattgtattttacaactttttaatatttgccaattgcagagttgaaagaaagtatcttgttttatttgcattttttgaccagagaggat

SEQ ID NO: 317221 - DNA, 375 bp, Homo sapiens
taattcacaaactataaaggaaaaggaggaaaatttttctgtgaatatctaacctccatgtcttacaacttatagaacagatcagacagcacaaatttctgctaactgtgcactsttctggaagttcatcaacaaccatgatagcaagtcttgagtaaaaatatgtaaagaatacccaaaactgcttatttcctactcgttgacacaaacaagcaaaatgaaatgcacctgttctgaaaactgtttatgtacaaccttacaatttctttccatcacattattaattccaagtacaaagaaattgaaggacagaataacctgttacaacagttatataattgtaacttcttgcgattgaagaaagactaaagagag

SEQ ID NO: 317222 - DNA, 670 bp, Homo sapiens
ctgatgagggaaatatttaaatttttgttcaattaaaatccaacataagttgaatttcaatcttaacagctttattgaataaaatcaacataaagtaatccacgttctaacatgtacattttgtttactcattcacctaaggatggacattttrgttgtttccaatttgggactattaggtataaaattattgtgaataaaggtttgtagggacatatgctttcatttctctttggtaaatgtatacgaatgggatagctggatcgcatagcaggtataagtttaaattctttaggaattgccaaatagtcttccaaaattgtattgctttacactcccacagtattgtatgagcactgcagttacttcactaacacttggtatttattatcaggcatttggaggggtactggtccagtattttgtaaattgcccttcatttgcctaatggtctgtctatctgagacgttctaataggttaaagaagtatctcactgtggctttaatttgcattttcctcatggctgatgttaagcttatttccatgtgcttattttccgtccaatttctctttttgatgaagtatatttggtaaaccatttaaatacattgcttattttttattaagttgctagttttcttattagattttgagacttctttataggtt

SEQ ID NO: 317223 - DNA, 517 bp, Homo sapiens
ctatgtttgtgcaattagaatcatgcgggtgaacaataacaaaatattctccccaccctctgaagggggtgacagctcctgggcacagtgatactccataaacagcccaagtggcagaacatccctagcagcagaatccactggctgcttcccaatctgaatgtttttgtactatccttgacttctacagttggcagagagagggaaaaaaatgtttcaraaagtagagatgttgaagggatggatgtccagaaatggaagatggggaaagagaaatgtttctctcacactttgtgatgcatcggaaacaataacgtggtcactttagagatcccaaatgttttagaagtgcagaaggtaacaaaaacctcctgatatttcaaaatgcaaatcacccagcttcatctctttttaagaaccttcgcattactgtagggtacaaatagagaaacaagtacaactacagtcccagcgaaacatactcagactctcataaaaactccactggtgaaaacag

SEQ ID NO: 317224 - DNA, 596 bp, Homo sapiens
ttatttcactttcattcatgaaagatatttttgctgggtagagaactctaagttgacagtgcatttctttcattatttaaagatgttactccgttawgtaccagtttgcattgcttacaataagaaatctgctgtcattcttattctccatgagtaactcctctgtatgttcccctgtagtgtgttcttccctctggcttcttctaatattttctctttatcactgaatttaatcaacttgattgtaatgtgacatggtgcagttttcttcatgttccttgtacttggggatttgttgagatcattagatcacacagatctactgttttcactaaatttaggaatttttggccattatcgcttcagacattattctatacattgtcctcccctgctccaatctatcccctctccagcaactctgattacttcagtgttataatataagatattctagctaccatttgtctaatgataaacatttccattgtttccaggattttttgactcttaaaataacgctgtaatactaattgggtgcaagacaacaatgattgaatttcaatttgttggtggctggaaatgtttatatttca

SEQ ID NO: 317225 - DNA, 596 bp, Homo sapiens
ttatttcactttcattcatgaaagatatttttgctgggtagagaactctaagttgacagtgcatttctttcattatttaaagatgttactccgttaagtaccagtttgcattgcttacaataagaaatctgctgtcattcttattctccatgagtaactcctctgtatgttcccctgtagtgtgttcttccctctggcttcttctaatattttctctttatcactgaatktaatcaacttgattgtaatgtgacatggtgcagttttcttcatgttccttgtacttggggatttgttgagatcattagatcacacagatctactgttttcactaaatttaggaatttttggccattatcgcttcagacattattctatacattgtcctcccctgctccaatctatcccctctccagcaactctgattacttcagtgttataatataagatattctagctaccatttgtctaatgataaacatttccattgtttccaggattttttgactcttaaaataacgctgtaatactaattgggtgcaagacaacaatgattgaatttcaatttgttggtggctggaaatgtttatatttca

SEQ ID NO: 317226 - DNA, 583 bp, Homo sapiens
cataccaccccaggtacttgcacacgagaattttctggaagcttgaaactaagtagaggggagaaaaacaaatatcttctgagaccacataagcaagaaccatacccaaaataggtaataggtctgcattctgaattgacattatgacagaagcctaatacactcaagcagagaatttagtttaaagtgatcttgtgctgttacggaggcaaaaaaaaaaaawattttccagtgtattaaaggaacaaataaaacccaacaggaagagtagaatgaggagagatttaagtcaattaaactgataaacacagaaacaaagtaacaataaactgcatccagagatgtaaaaaaaggaatagactatgcctaaattgtcttcatcccaggaatgcaaggtaggttaatattagtaaattaattattctaatttaccactttaaatggtgaaataaggataattatatcatttttagtaaacacagaattcctaatttgataaaaagtgcctatgtttaaaaaaataccaaatagaataattggtaaataattgaaagcattccctttaaaattaagaacagagcaa

SEQ ID NO: 317227 - DNA, 566 bp, Homo sapiens
taacttaaaacactcagctacacgtgccattcaatacaagaacaagatttaatataggacacttgtttttgaagcatacagttttgygtatgaagccccatgctacttctgagttccattgtatatgccagagatctgttcttactacaactattttcatcctggaacaaactggaagtatatcctacaatcaatatcttctttctgtgcgttaactcttggtcactagttcatctgttcttactgtaactattttcatcctcgaacacgtatcttctttctgtgtgttaactcttggtcaggagttcacccagcaaactgctcacaaatctcttcccaagtagaagctgaggcaggcagatcacctgaggttgggagttcgagaccagcctgaccaatatggagaaaccccgtctctactaaaaatataaaactagccgggcgtggtggcgcatgcctgtaatcccagctactcgggaggctaaggcaggagaatcccttgaacctgggaggcggaggttgcagtgagctgagatcacaccactgcactccagcctgggcaacaa

SEQ ID NO: 317228 - DNA, 566 bp, Homo sapiens
taacttaaaacactcagctacacgtgccattcaatacaagaacaagatttaatataggacacttgtttttgaagcatacagttttgcgtatgaagccccatgctacttctgagttccattgtatatgccagagatctgttcttactacaactattttcatcctggaacaaactggaagtatatcctayaatcaatatcttctttctgtgcgttaactcttggtcactagttcatctgttcttactgtaactattttcatcctcgaacacgtatcttctttctgtgtgttaactcttggtcaggagttcacccagcaaactgctcacaaatctcttcccaagtagaagctgaggcaggcagatcacctgaggttgggagttcgagaccagcctgaccaatatggagaaaccccgtctctactaaaaatataaaactagccgggcgtggtggcgcatgcctgtaatcccagctactcgggaggctaaggcaggagaatcccttgaacctgggaggcggaggttgcagtgagctgagatcacaccactgcactccagcctgggcaacaa

SEQ ID NO: 317229 - DNA, 648 bp, Homo sapiens
cagtcctgtggaagtgttactgtatttctgaggttcctgttagtaacaggaacgccctgaagccatttgggagctccaaggatgcagacctgtctaacagcaagcactgaggactaagaagctgagatttgacccctactgggcctttttggcactctgtgttcatgatcttatgcaggaaagatcagtttaccttgatttcttcctttgaaacagagagttgttacaagaaacaaataaaataatattgaaaaacactttggaaaaggaaaatgttccacagacatgtaaaataacacaagagctgttataaatacaaatgaagtcccttgagaccatttaaaccagtgcaggggcctatggagtccaaccagcgctgaggtgactttggaaactcagccaggtcaacaggtcctcagcagcagcagcctggggtggctcaaatcttgcttgcatttctgttgcccttccctgtgagctgcgggttgttaggctgattaagtttaagagttaattyctaaacaccttaagaacaatgttaacagtttattaaactactgtttattaaccactagtgtaacactgtttaataaactactgtttattctcctgcaaatggaagtttcattctaatgtcctctgttctcc

SEQ ID NO: 317230 - DNA, 631 bp, Homo sapiens
ttgttagggttttttgttttgattgtgttctcaaatcctccatcttttataactagtttctattgccaaatgtaacttatgtgtttgtgtatatgtgtgtagatatatttaatggagacataaacagaaatgttagtaccattcaaatgcccattgatgtaatccacataagataacctaataaatctgagaaaaaaaaataggaagaaaaaaatccattacagtgtctcatcaggatcatcatttatctgttgaacataaggaattatttaagtcatagcatctatcttgtccttcttcatgtccttctccaaaatatttattcagtttactttgcrcttagtaaaacttaaaaacacaatttgaattgtatccgcttggcaataaataccaaaaggaagaaatttggattactaattgcaaactaccagccaaacctaaatttaatagacagggttgtttctgtgagttttgtttgctccaagttggtttgtggggacaagccaaatagaaatgaaatatccattgttgataaaaataaaacatttatctaaaaatggaggcaaatagaaaactcaaagaaaggttatatttcaagtgactaaactatcagaccaagtcacactgtccc

SEQ ID NO: 317231 - DNA, 561 bp, Homo sapiens
ctgatttactgtgtcatgctttttacatagttaagatcattaacaaatatgtttgccaattttatgaagtgcttcttatttcatgataattctatttatttttgctgggcatgtcctgtgaaaggaagcatttatttactatattagaataaaaatggctaataaaaagtcccattacatattgaattaattgctctaataattgctttcctgttttactagaattaagagcgaacagcttcaggttctctgcatgtggtctcatggttttaaaagagtaagccataaactttgcactgattttatagccaaacacatgacaacttccatttctcatagcaattattactatagagcaagaaaacaaaggagaaccaactaatttttacaggttttctagaaatgtttcaatckaattccttgaaattattaaagtgttttatttttaaatgagagctgtagtaaaacattattctagcaaaggatttaattacttttaatgttgatgttggaacccaaatgaatgagcagacttttaaaaattcttctaaagagcagtgc

SEQ ID NO: 317232 - DNA, 566 bp, Homo sapiens
taaaataaaatacaaattaaattttatagggaaattgcttaggaagtcttgggagacatactttatrctcataatgtaaaaatatgaaaacagtactatattagctaaataaaggggacagaaaatggccagatgagaggcgttctaatgtcagtcactatattattggggaatttataaagaacaccagtaatgtttattttttagtttgaggggttttgtattattaatggaatttttcaaagaaaattatcctagttttatttaatctgtagccagatttgtgtgtgtgtgtgtgtgtgtgtgtgtgtgtgtgtgcatgctgaatttcttgcctgccagtggaaaaactatgtatagattttgccgatcactagaaaaataccaattaataataataaccaacttttttaatgttgctagcttacatctgctagggagtacattgcatgcataattttatctagttctcagtttaaccctattaggtatttcatttctgtttcaaaaaccaagagagtgtagctagggaagtaacttgctcaaggcaagatagctactaaatg

SEQ ID NO: 317233 - DNA, 566 bp, Homo sapiens
taaaataaaatacaaattaaattttatagggaaattgcttaggaagtcttgggagacatactttatgctcataatgtaaaaatatgaaaacagtactatattagctaaataaaggggacagaaaatggccagatgagaggcgttctaatgtcagtcactatattattggggaatttataaagaacaycagtaatgtttattttttagtttgaggggttttgtattattaatggaatttttcaaagaaaattatcctagttttatttaatctgtagccagatttgtgtgtgtgtgtgtgtgtgtgtgtgtgtgtgtgtgcatgctgaatttcttgcctgccagtggaaaaactatgtatagattttgccgatcactagaaaaataccaattaataataataaccaacttttttaatgttgctagcttacatctgctagggagtacattgcatgcataattttatctagttctcagtttaaccctattaggtatttcatttctgtttcaaaaaccaagagagtgtagctagggaagtaacttgctcaaggcaagatagctactaaatg

SEQ ID NO: 317234 - DNA, 545 bp, Homo sapiens
aaaaatatcacatatattaattaacttattctttgtaacaactctatgaaatatcactatccctaaaattatctgcgttttatgaatgagaaaactgaggacacttgaggttacaaaagcaggtacaaagttaccaagctaggaagtagagagctggaaattgcactgagggactgtttccaagctctatactcttgtgcctccttaactaggtgttcagggtacaacagtgaggattcagtaaaggagcagaggttacataattggaaacctactagtggactcaagcctttgagtcccattaggttggaaatragaagacctccttcttattccattccactgcccccatttcactttggccaagctgttgcccaaaggaagaatgcaatcatttctggatgtcattaagcaattatatatgtttttttaatacacaagtcagtggatattctgaagagtgatacagcaagtgatgcctaaaacagcaaacaaatccaaagtgccaacaatgaatacatgcagcttccccgtccagactcaga

SEQ ID NO: 317235 - DNA, 545 bp, Homo sapiens
aaaaatatcacatatattaattaacttattctttgtaacaactctatgaaatatcactatccctaaaattatctgcgttttatgaatgagaaaactgaggacacttgaggttacaaaagcaggtacaaagttaccaagctaggaagtagagagctggaaattgcactgagggactgtttccaagctctatactcttgtgcctccttaactaggtgttcagggtacaacagtgaggattcagtaaaggagcagaggttacataattggaaacctactagtggactcaagcctttgagtcccattaggttggaaatargaagacctccttcttattccattccactgcccccatttcactttggccaagctgttgcccaaaggaagaatgcaatcatttctggatgtcattaagcaattatatatgtttttttaatacacaagtcagtggatattctgaagagtgatacagcaagtgatgcctaaaacagcaaacaaatccaaagtgccaacaatgaatacatgcagcttccccgtccagactcaga

SEQ ID NO: 317236 - DNA, 574 bp, Homo sapiens
ttttttcaagttaggaagagggtaaaaagacaggctggcggggggaaggcaaacagtgcatccccaaatcctcacacttttgctctyttgcagtcagttgctttgctggcttctgcaggcttttaaggtctcgcggcgtagaaatgcctggcccccacccccttcctcggtctcccctttcaattcagatgtgctgatgtgcagaccggattcatcttctcggagctgcggcggcggctttgggctcaggcggcggcggctcgcgctcggccgcggagtcctggcagcagcggggacgcggcgcgggagtccgagctctggtggcagctgagcccgcggggcgccgctcgccgagccgcggccgcgggaagttcggcagccagaaggacgacctggcaggctgcgagcgccagcgccgccagagccgagtttgcctgcgccctccccgcctccgagtgcagagttccttacctgccctccgcccacccgtgggcccctagccaacttctccctgcgactgggggtaacaggcagtgcttgccctctctactgtcccggcggcatccacatgttt

SEQ ID NO: 317237 - DNA, 580 bp, Homo sapiens
agtgcatccccaaatcctcacacttttgctctcttgcagtcagttgctttgctggcttctgcaggcttttaaggtctcgcggcgtagaaatgcctggcccccacccccttcctcggtctcccctttcaattcagatgtgctgatgtgcagaccggattcatcttctcggagctgcggcggcggctttgggctcaggcggcggcggctcgcgctcggccgcggagtcctggcagcagcggggacgcggcgcgggagtccgagctctggtggcagctgagcccgcggggcgccgctcgccgagccgcggccgcgggaagttcggcagccagaaggacgacctggcaggctgcgagcgccagcgccgccagagccgagtttgcctgcgccctccccgcctccgagtgcagagttccttacctgccctccgcccacccgygggcccctagccaacttctccctgcgactgggggtaacaggcagtgcttgccctctctactgtcccggcggcatccacatgtttccggacacctgagcaccccggtcccgccgaggagcctccgggtggggagaagagcaccgg

SEQ ID NO: 317238 - DNA, 559 bp, Homo sapiens
ctctcgcgcgcgcggggcggckcttccctctcgccgcctaaggtcggaggcgcacgtgcccggggccgctaccacgtgagcgcagcgcctgagggcgcccagcactggccgcggctcgtgtccgggcttcgggagctcctggttccttgctctattgggctgtggctgaggtgatccgcgctcagtgtggacgcacaagtaacttcgtaaaggttgcatggtggttggggctaacctagcagagcggtttgtaagcggaaggcacgttaggttccatcccaagaggtgtgggctttagcgaagcgcagaggaagggagtggacaaagtcaaatatatctagggttctgcagattccgtgcggggttgctctgtgactagcttttcttcccttccataactagataagcattattcaccctctcttgggcctggaggaaggagaggtgtacacaatgaagaaaaatgctggaaattccctagttaatttttacctttgatgacccattgttctgacaaaaagggtatgtgtgttgtgttcacattatcacatctttctcg

SEQ ID NO: 317239 - DNA, 589 bp, Homo sapiens
aggggacaggtgcttatgtacgcttcttaggggaaagggatttgggaaagtgtgaataattttagggggagtagtaaatgatttttaggggaattctgtgggcttggagaatatacaatgacaaaagtctgtcccagtgtgttgacagactttactcttcctgtgaatgaagattcaggaagggagcagaggtaactgttttcttctttggtgggtccagattttaggcagataaggagatgtcagagaataacttcattctctggtttgggagagacagaagattgagagacaagatgagggaaaggtcasagagaccatgtggcttcttctttagttcgtcattcaaagtttcatattttgggatatcagtttctgagtgccagcactatttataaatgcatcaataagccaacataagcttgattagtctatttttagatttttatatagatggtatcttactatatatgtagtaagagatgataaatattccacacatgttttttaataacaattttattatttaagactcactcatgttgataacataggtgtagtttctttgtcttaattaagctattttatt

SEQ ID NO: 317240 - DNA, 575 bp, Homo sapiens
tatctcccacaaaagtgagccaggcacgatggttttgtttaccgtcatatagccagaacttagcatgacacctggaagatagcagacacttccatgaaaatattgatgggtgaataaattgattaatttaattgatgaatgagtgatgttgtgctatgaagttgaaggatgatttttctctaaaacatatatctaacaatgaactccaggttcatctcaggctgcaaacccctttagactttactcacttgagaaaccatgagatgtatactctttatgattctcaccttaaagctttttattttagtcatgggtaatgtcttcctttcttcacacatggttatcattagaaattagggttagaagtttccatgacactccttgataccctgaactaaaactctgagttaaataagtaaccagatgctcaawgatagaagaaaaaagaaaggaggaggtaacataaagatttctttaattaattaaaattaaatctattttgctcacaaaaggacaattttgaagtaaaagttttttccaattttgattctttactactttttaaaattcaaaac

SEQ ID NO: 317241 - DNA, 623 bp, Homo sapiens
agagttatgcagactgttttcattaaaaccatggcatattttgattttcttcttcagttatcccaaaaagggaatgtttctgagaccagtcatttgtgctgcatttccccttgagaagcaccgctattaattggaacaaaaatgtttgaatagcaaatgtcattgaatctctcaggatgtttcaagcctctgcagcaatgagaaaacataaagcaagtcatcactgcattatctagatgagctaaggaaacaaaagggtccttaaattgtgccaacctgttacaaatagcctgagaactttgactgaactcaccagtgaatagcatttactacgtatctgttgtgtctcgggcatttaacctagttgtaaggttataaagaagagcaaaaaagggcctctatccttgttggatgtatgatacactgagaaagaaagacaatgtcaagtcaaaataatgtggaaaacggcaaakgaaggactgcaacgtgctgttagcagagcagggtcgattaaatctgccttaggatttagtacttgtggactagttagttattgcttttagtggataataaacactctgtcaacttaaagccaaggagtcatcttttcgaagtgaatgccc

SEQ ID NO: 317242 - DNA, 509 bp, Homo sapiens
gtaacctactaagggaaatttatcaggttaacagtagacattttagaagaaaccctacaggacaggaaagtttggggacatatattcagcatctttaaagmaaagaaattctgaccgggagcagtagcttacacctataatcccagttatttgggaagccaaggtggccaggtcacttgaggccaggagttggagaccagcttggccaacatagtgaaattccatctctaataaaaatacaaaaattatccaggcatggtggcacatacctgtaatcccagttactcggaagggtgagtcataagaatcacttaaacccaggaggtgaaggttgcaatgagccaagattacgctgctacactccagcctgggtgacagagtgaaattctgtctcaaaattacaaaaaagaaaataaatgccaaccaagaatttcatatttagcaaaatgaagcttcaaagattaggagaactaaaatctttttcagacaagcaaatgttaagagaatgc

SEQ ID NO: 317243 - DNA, 580 bp, Homo sapiens
taactccaaaaggggaatgattattatgccacctctagttgttcaggttatttagttcctttaatagaagactgtagcttctaaccatattaataaagttttttcctgttagccctaaaaattttaacttaaagggatcctagaactataattttgacacaattttaatgagatattttacttaacatacaatttattcccttacagggtactacttagtgttttttaaaatatatattcactgagttgtacaaccatcgtggcaaaaaaaatttcacaacgtacttgacaccccaacaagaaactccatattcattagcagttgtttcctcttgcacctgaaatccccagccctgggcaaccaccagtctaacttctgcctgtatgtatttgcctttaatggacgtttcagataaatggaatcatacaatatgtagtcctttgtggctgacttttttcacttagcataatgttttcaagattaatccatgttggakcatacttcaatactttatttcttatattaatgttatcctattgtatgaatatactacattttatttatccattgttaatgaaa

SEQ ID NO: 317244 - DNA, 621 bp, Homo sapiens
atgacccactctggtgacctcattttaatttcattacctctttaaagaccctaatactaaacactgtcaaattctgagatactagtggtttggactttattaatataaattttgaggaacaaaatttattccataacacttgcatatccacatgacttttaggatcaatttgtcatataacaaatccagggttttcacatggattttttgattttggtaatattgccaccttaaaaatactgttttctgattcaaaacttggattgtgtttccatttatttagatcttctttaatttctttcaatatttaattttacttttcagtgtaaaagtatcaagcttgttttgttaaatttatttctaagtattttattcttcatactattacaagtggcattattgtcttaatttcatttttggacttttatggttagtctatagtaatttttaatatayattataattccatatacaaataaaaataattttaatgcttcttttccaatttaaatggctttttatttcatggttttgcctaatttccatgtttaggacttctaataaaatgttgaacgtaagtggtgagtgatgacatccttgccttattccttattttaaggg

SEQ ID NO: 317245 - DNA, 533 bp, Homo sapiens
aggatcaagtaattgctgaaatatttgtgcttctcctccctatggatagagtcagttgaatgaaaaaatccacttctcatatgtttggcaaaaaaaaaaagtgaataactgggaggtcagtggaaacagtttcagattattctaatttataaataatacacaacatacacatgaaaactaaatcatttcctttcttcactatacctttaatctcaattcacagaagtgacctatgttaatggtattagtttttattgcttctttaacaactattcttctatttcttaacatataaagttttgtcagtaagtactaaacccygtctcataaaggatgattaagttagcatctgggtcttgcttttgaatcttttattaattttttttatacagacatactgtattagtccgttttcatgctgctatgaagaaatacttgagaataggtaatttgaaaaggaaaaaggtttaattgactcacagttctgcattattgggaaagcctcaggaaacttccaatcatgacagaaggga

SEQ ID NO: 317246 - DNA, 623 bp, Homo sapiens
cccttccacctacgagcctgtaaaatcaatagcaaacttagttatttcttagatacaatggaggtcaggcatggagtaaatacacccattccaaatgggagaaattggccaaaacacagaggctacaagtcccatgcaagtccaaaatccagtagggcagtcattaaacattaaagttccaaaataatctcctttgactccatgattccagcattacatatccaggtaacgctgatgcaagaggtgggctcccatggccttggacagctctgcccctgtggctttgcaggttacagctcccctcctggctgcttttccaggctggcattgagttcctgtggcttttccagttgcatggtgttaagcygtcagtggatctaccattttagggtctggaagacaatggccctcttctcacagctcctgtaggcagtgccccagtggggacactatgtgggggttccaaccccacatttcccttctgcactgccctagcagaaagtctccatgagggctccacccctgcagcaaccttctgcctggacatccaggcatttccatacatcctctgaaatgtaggtggtgttttcaaacctcaattcttgacttcaatgcatccacag

SEQ ID NO: 317247 - DNA, 500 bp, Homo sapiens
gaaaaatattgtgtgttttcattcatatgtgggagctgcaacaacaacaacttaaactcatggagaaagagaaaagaataattgttagcagaggctagcaaaggtaacaaggaagggggaatgggggattaagtaggaacagttaatgggtatgaaaatacagttagacagaatgaataggattcagtatttggtgtcacaatagattgacaacagccaaaaataatgtatcagatatttacaaataactaaaggaggagaattggaatgtgttcctagcacaaagaattgataaaggtttgaagtgayagataccacaattattctgatttgattattacacattgtatgcctgtatcaaaataccccatatgcaacaagtataaactcatttatgtaaagtacaaaacaggaaaaagtaatctgtggtgctaggaagtcaggatattgcttagcacgagattgaatagggacaggaaaggagacgtagataataaagt

SEQ ID NO: 317248 - DNA, 512 bp, Homo sapiens
ccaaggcaccaagtccctagtgtgcacacagcagggggcccctgagcctggcccacaaacccattttttgttcctaggccccaacgrtaaatggaacctcagggcatggtgtcctgtttcccagctacttaactccagccatggccaaaaggggtctacgtatagtttggggccattgcttcagcgggtgcaagccccaagccttggtggcttacacatggtgttgggcatgtgggtacatagaagttgagaattgaggttggggaacgtctgcttagatttcagaggatgtaaggaaacacctgcatgtccaggcagcagtttgctgcagaggtggagccctcatggagaacctcttctagggcagtgcagaagaaaaatatgcagtcagagcccccacacagagtccacactggggcactgcctagtggagctgtgagtagaggtccaccatcctccagacttcaaaatggcagatccactgacagcttgcactgtgctcctgaaaaagc

SEQ ID NO: 317249 - DNA, 539 bp, Homo sapiens
atattcagaatctgtaatattgtattttatagcacatatcatattttctatacaaaaaatcatgaagcctgttgtaatcatgccttacgtttgtrgaagttgccacaattttgttgtttttaactcagttcaactgagtttttagctcagattattgttgaagcctttcttttatttaatataaacaaaaccggtggaataaatcaaaatggaatacatttgcacaactatccatccatctatatgtttatcatctataaatcatggtagtgattcttttcagtgaagatcccattgtgaggtttaattttgaataaactgttgtcaaagtcactttgttctaggttatatataaggatacatagtttcaaggtcagagagcaggcagtgcagtgtccaatgttgcataatcaaactctttaccctactcctttaccctacaacgccctcaggtaaagcactcgagcttgactgtggcgcttgtttaatatgacatgatgtagatgcctgatactcacaggtatgcagcttttccttct

SEQ ID NO: 317250 - DNA, 539 bp, Homo sapiens
atattcagaatctgtaatattgtattttatagcacatatcatattttctatacaaaaaatcatgaagcctgttgtaatcatgccttacgtttgtagaagttgccacaattttgttgtttttaactcagttcaactgagtttttagctcagattattgttgaagcctttcttttatttaatataaacaaaaccggtggaataaatcaaaatggaatacatttgcayaactatccatccatctatatgtttatcatctataaatcatggtagtgattcttttcagtgaagatcccattgtgaggtttaattttgaataaactgttgtcaaagtcactttgttctaggttatatataaggatacatagtttcaaggtcagagagcaggcagtgcagtgtccaatgttgcataatcaaactctttaccctactcctttaccctacaacgccctcaggtaaagcactcgagcttgactgtggcgcttgtttaatatgacatgatgtagatgcctgatactcacaggtatgcagcttttccttct

SEQ ID NO: 317251 - DNA, 571 bp, Homo sapiens
taataaaattaacataactctttagaaatattatacttcaagtccatatttacttagggagcattataaattcccttatataatttcatccattgaattacaaaagacacgacaaaggagctaatggatatgatatttataktaacaagggcatactggtaatagttaacattatggcaaaattttgcgttatggaagacacattctgagataatacatagttttaaagaaaaatgcattgcactactttaaaaaccaattaacatttctgagatttatacaacgcttcttgttgtgttatgttaggcaagcagtctaccaagattacctattccttataaacctggatattatattaaattgatgaattaaatgtttgttttgtggcattttccatagaattcccttgaatatacaaagagtaaaatgtagttcaaagagtcaatgtgtagcagaatgtagaaagaatcaatcaaagcagatactagactaggtgagcaaaatagtgttcaaaaataatttttttaaaattaaatgctcacggctttaaaaatggtggggatattgagaa

SEQ ID NO: 317252 - DNA, 578 bp, Homo sapiens
gtagttcaaagagtcaatgtgtagcagaatgtagaaagaatcaatcaaagcagatactagactaggtgagcaaaatagtgttcaaaaataatttttttaaaattaaatgctcacggctttaaaaatggtggggatattgagaataaactgtattcataatggttcttccagtataaaaccaaacagcatcytttacatttcttaacagaagccacttgtcacgaaataaaatagtactcttcaacattatggagttgtgaagagagatgtcttatattaacaaaacttcctatcttctacagggaagaccttacatgttaatcacaaacttacttaccaaatagtttaaatgagttaagattcatgtttggactttgatagacttctctcagttaaactacatagataattagaaatatatgtataaatgttttctttatatatttgtgggtggtaagaaaaaaattattccaaaatatttatctttatatatttgaaagaacatgactttcagatcgcatttgcatgtgttgtaattacaggtagaaaaaaaggaaaatgaaaattttgatttacgc

SEQ ID NO: 317253 - DNA, 590 bp, Homo sapiens
ccacacaccatataagaatgagaactccttggataatgtttggattgaaaaggtgaagaattaaatagactcagccccttatatatgattagttgttgaattaaaattacataattaaagtctattggtatattttaaaaatagaaactaaataagataaaatactatgaaattgtataatatatacgtttatatttatgtataactattctctatatatttatttggaatggaattttaagtagccccccatggccgccctgctttttaaaatatctacacaatccctcttatagttttagctatccttttagaacaatcttgtgtaaaaagtgaaccactaaaatagaagtttattatgcttgtatagaaatgttgatgagaacttgtcaaattcttgttatcctttaawgtaactgattttaacataagaaaaagaaagaaactgagctgtgcttattttgaaaaaaattggctaaaaacaaattcatacataacagctcttttgtgataaatatcacaaagtactaaaaattttaaaaataaatattttaaaatatccttttaataaatgtggtacaactgtaaac

SEQ ID NO: 317254 - DNA, 217 bp, Homo sapiens
aaaaattatttttacactataaaagctaattaaataatttttatattacttatagtattattccaaaatttcaacttactatttgtgtttcatacctttgcagtggataagcacagaatgttaatcaatttctgcaactttattcatttggtscccaaaacaaaagaaatgaccaaaggaactggagaaaaatcactttacgtgtttatatttcctt

SEQ ID NO: 317255 - DNA, 563 bp, Homo sapiens
ttttaattaaaatttatttttctagcaaagctacattaagatttatccaaaatgcaaartaaatattccacttcattttgaaaaacttcaagtttttccactttaattatctcagtttatggcaaggtagttgtaataatgatggtttgatttctctgtaactgttttctggcctatgttaagataaattcctttggctgtgtagaaattcatgatttattttatattttaaaaaattaacccagttttgcttggatgtcctaataatttttgtgtcatctgaatttctacttgtcattttcactgtattttattaatacttttgaaaagtcaggtttgtacaatcaattttgaatagtgttccatgaaaggccaaaggagtctagaaacaaaagaacaagacagacatatttagtttgtctctaaaggatagttcatctgggaacttacagacagcgaaacatggtcttgggtggtagcaagacaggtataactccacactgatactcgccagtaccaagggctatataccatagaggaaagatataagtggtctgagcaac

SEQ ID NO: 317256 - DNA, 610 bp, Homo sapiens
ggtttgatttctctgtaactgttttctggcctatgttaagataaattcctttggctgtgtagaaattcatgatttattttatattttaaaaaattaacccagttttgcttggatgtcctaataatttttgtgtcatctgaatttctacttgtcattttcactgtattttattaatacttttgaaaagtcaggtttgtrcaatcaattttgaatagtgttccatgaaaggccaaaggagtctagaaacaaaagaacaagacagacatatttagtttgtctctaaaggatagttcatctgggaacttacagacagcgaaacatggtcttgggtggtagcaagacaggtataactccacactgatactcgccagtaccaagggctatataccatagaggaaagatataagtggtctgagcaacacaattaaagacaaccctccagactaggtaacaatgctacatgcctctaccctacatttatgtgataacatcaagtttgccttattcttacactaaggacagtgaaaaaataaaatagaaatcaggaagtattcacaggagtagggctaatcagaagtcaacatggcagattagcatccaagttggagtc

SEQ ID NO: 317257 - DNA, 596 bp, Homo sapiens
gtgtggaatctggggaccctgcatgggattgctgagcactatgacccgttcctgaccctaagcagctcataggtattaggtgagtaacataggcatggagaggccaaaaartgaactttttagatcctagatgtgggagaccccacaacccccactagcttatagaaagaagttcccagagagttggaagagactgaatttcagcctatgtggagcccaggtttggcatgggaacagctatagtggagaatatccatgagtatacatctctgaatgcttgctatgttgctttaggtgcctttagcctttgttagatgctagacctggacaaagcaggggtgttgtgctggtaggatggggtagtctaatcttagtgtcccccctccctgctgacctctctaagggctcctgcctggctgcatatgcttgcaacacagccatagtctgccagtggccactgccatagctttttcactggcatactcctactcatcaaagtgcttttccagatggaatcccacaggcatgcaccagctgcagccttctggagcctgtgagcactcaccattgacctcccccagctgccttgctggtgt

SEQ ID NO: 317258 - DNA, 576 bp, Homo sapiens
tggcagtaaccactccatgattcaattacttcccacccagtccctcccacaacatgtgggaattataagtactacaaatcaagatgagatttgggtggggacccagccaaactacatcagaagccaatcaattaaacctaacttatactacagtcaaaccttcaagggcaccaaacaatataaaagcaaaagccccacccaaatgwcagcaatttcaaagatcaaaggaacatccagagacatagtcaagaaagaatcagcacaagaactctggcaactacaaatatcaatgtctttttgcctccaaatggctgtaatagttctccaggaatgattctcagccagtctgatatggctgaaatggcagacatagaattcagaatgtggatagcaaggaagcacatggcgatatgggagaagcttcaaatccaatctgagtaacgctgcaaaaggattcaataattgaaaggcaacatgaccattttaagatagaaaccaaattgaacttctgcaaatgaaaaactcactacagaaatttcagaatgctactggaagcattaataacagaacagacca

SEQ ID NO: 317259 - DNA, 505 bp, Homo sapiens
catagaattcagaatgtggatagcaaggaagcacatggcgatatgggagaagcttcaaatccaatctgagtaacgctgcaaaaggattcaataattgaaaggcaacatgaccattttaagatagaaaccaaattgaacttctgcaaatgaaaaactcactacagaaatttcagaatgctactggaagcattaataacagaacagaccaagcttaagaaagaatctcagagcacaaagactgctcctccagttcaaagaaagcagaaaaaataaaaaagaaagattttgaaaattgaacaaacttctaagaaatatgagactgtataaagaggccaaacctatgactcattagcattcctgaaagagaaagagagaggtgaaacaacttaaaaaaagtatgtgacratattgtctatgaaaatttccaaaatactgctatagaagttgacatgcaaattcaggaaattcagagaaacactgcaagatactatacaagacaacaatc

SEQ ID NO: 317260 - DNA, 591 bp, Homo sapiens
ccaattcatcaataacattttacatttttttcctattcctgaactggttctcacagacgtttctgcttacaggtttctgctctgataagttgtgattttctgcatctgcctctctgcctcttcaattttcaggacggtagtttgcactaacaccacatttttcttatgaatctaagaattgttgatttcagtttgtttagcttttggtttgttaggagagagtggcaacttttaatctctttgcatgctgggctgaaaaccgggagtattgttttggtttgttttgtcactgttattcagaaaatacaaytgatatttcatacatatttcttcagtttttgtatcaaatcttactttctcttataacaaagccttttacacagtccattccctctgcctgaagaaccatcttccacacaccccaccagacacacacgagctagttaattcctactcttccttatgctttagttcttcacaacttgcttacataaatatgagtaggtaaattatttattttacataacatttataaaaattatttatcatttgatttttttaaattaaaatgtggttcctgccagaataaaa

SEQ ID NO: 317261 - DNA, 562 bp, Homo sapiens
aaactgtagatgtggttctttggggagtaattgcaagggtaggatgccttttgttccttttgttttctaaaacttgtgtttttgtcatttctacttccattcgatacatggacatacggtatgcttctgtgtggctccctcaaaatcctgagatcttawcaactgtagagttatttactgaacaattcataattggagtgacataattttagatttgtaaagaaagtttaaaattacatggcccatggtctatttttataggcaaggaatacaaaaactctaaaattgccgtcttcttcagttataaatgataaaatttaataagaagatttcaaacacctaaacccaacagttaattctagctaagtgtggtcattatacagtactttacacgggtttaagctgtcattgtttatagtgtcttatcagtattagttcatggtcatacccagggtgaatgtccataatatattggattttaattatggtattacaggtagtaaattaaattttccactgaattaattctatcgaaattactttattcaatgaaatgagaatt

SEQ ID NO: 317262 - DNA, 562 bp, Homo sapiens
aaactgtagatgtggttctttggggagtaattgcaagggtaggatgccttttgttccttttgttttctaaaacttgtgtttttgtcatttctacttccattcgatacatggacatacggtatgcttctgtgtggctccctcaaaatcctgagatcttaacaactgtagagttatttactgaacaattcataattggagtgacataattttagatttgtaaagaaagtttaaaattacatggcccatggtctatttttataggcaaggaatacaaaaactctaaaattgmcgtcttcttcagttataaatgataaaatttaataagaagatttcaaacacctaaacccaacagttaattctagctaagtgtggtcattatacagtactttacacgggtttaagctgtcattgtttatagtgtcttatcagtattagttcatggtcatacccagggtgaatgtccataatatattggattttaattatggtattacaggtagtaaattaaattttccactgaattaattctatcgaaattactttattcaatgaaatgagaatt

SEQ ID NO: 317263 - DNA, 551 bp, Homo sapiens
aggtactttaaaaatttcacttcataagtaaatctagattatttacaaagctcacacaagttattattggcttgttgcttaaaatagtttatcttgcaaagatattgattgtctttcaatgaatctgcaaaattaatgcactcccaatacaaattgtaacatttttaaaatttgtaattgcaaatttttttatggataaataatttaaattttttaaatggatatgtgagtcaagactagcaaaacgatcttgaagaacaacaaacttrgagaacttattctatcagttagaaaacaaccatggcaaagatttagtggttaataaagtctggcattggtgaaaggatagagaaagtgaaaagtggaatagaataagaagaacagaaacaggcctatttgaattctgtcatctgagatgtcacaaccatggcactgctattcatgagaaaagaatgacattttcaattactaaaattactagtgctattttctaaacataatttaaaaaatactaactgaaaagtgtgtggagtcctaactcaggtatattg

SEQ ID NO: 317264 - DNA, 570 bp, Homo sapiens
tacactcacctagtgaatgacccaggaccagaactcagttttgctgaatctgcatccgccttattcattcatattgtcttcattatgaatgaagtatggaggataaggtctgcatccacctcattcattcgtgttgtcttcattaggaatgaagtatgggggataaggtatcatttcgtttcttttgtatttctttttctacttttattttagatttgggggtacatgtgcagkcttgttacatgggtaaagtgcatgttgctggggtttggtgtataagtgatttcatcaccgagttagtaacacagtaccggatagatagtttttacactctcctcggtgtctactattcctcttttggtgtctatgagtactccacctttacctcccacatataagtgaaaaaatacagtacttggtattctgttcctgctttaatttaatttagcataaagcctccagctacatccatgtttctgcaaagggcatgatttcattcttattacggctctgtagtattttatgatgtgtatgtaccacattttatttacacagtccgctgtcaatgag

SEQ ID NO: 317265 - DNA, 504 bp, Homo sapiens
tgttctgtgtatggtacatattttgtgtatggctcaatttcaatcttctgcatatggctagccagtcatcctagtaccatttattaagaagtccttttctcaatacttgtttattttgtcaaaagtcagatggttgtagacgtggggctttatttctgggtccyctgacttgtccattggtctatgtctctgtttttgtactagtaccatgctgttttggtttctgtagccttgtgatatagtttgaggtaaggtagtgtcatgtctttggctttgttctttttgcttaggattcctttagctatttgggctcctttttggttttatatgaatttgaaaatagttttttttccagtactgtaaataatgtaattgggagtttgataggaataactttgaatgtgtaaattgctttggactcaatggtcatattaacaatattatttcttcctattcatgagcataaaatgtttttccttttttgtgtgtcatatctgatttctt

SEQ ID NO: 317266 - DNA, 525 bp, Homo sapiens
gataggaataactttgaatgtgtaaattgctttggactcaatggtcatattaacaatattatttcttcctattcatgagcataaaatgtttttccttttttgtgtgtcatatctgatttcttgcagcagtgcaccataattttcattgtagagatctttcacctacttgcttagatgtaytcctcagtattttattatttctgttactatagtgaatgggtttgcattcttgatttgactttcagcttggatattactggtgtatagaaatggtaataatttttgcatattgattttatatcctggaaatttactgaagttgtttattagttctaggattctttgggcagactatggggttttccaggtataaaattatcattagtaagcaggaagttcaactttctcttttcctatttggatgccttttatttatttaccttgactaattactctggctaggaatttaatacttattgattagaagtgttgacagtgagcatttgtctttttttccaattttta

SEQ ID NO: 317267 - DNA, 635 bp, Homo sapiens
gagttattgtgtaaaccagacataacttccttttgattttcatcaagatattgttatatcccctagctgagtttctgctttctttagcaaaagcatttaaagaaagtggcaactataaaattctggtggctccatcagatgaatttktgaagatgtaatattttgaaatctataattgcatccaaaattaacaagggtcaaataacaagggttgacatgacccagatatttctagtaacctttatttccttgtgccttttcatattcttccttagtgtcttattgaatccaggtctggtagagtatgtaaatgagaagaaactcagagtgaaaatacaagttatgagtaggcttcaaactagaattaaaacaacttgatttgatttgaaattgtagaataaactatttttgctgtagtttcaactttgtcacacttgtttgacatgactaaatcacctgacattggaagccaatctgcatattaaattccatgattctattaaatactatagaaataatctatgtagagtacttctacttgagacacatacagaatatatgcattttagcatcattaacatcattcttggtttttggatattaaaaagatttaactttctattttgagaatgtgt

SEQ ID NO: 317268 - DNA, 635 bp, Homo sapiens
gagttattgtgtaaaccagacataacttccttttgattttcatcaagatattgttatatcccctagctgagtttctgctttctttagcaaaagcatttaaagaaagtggcaactataaaattctggtggctccatcagatgaatttgtgaagatgtaatattttgaaatctataattgcatccaaaattaacaagggtcaaataacaagggttgacatgacccagatatttctagtaacctttatttccttgtgccttttcatattcttccttagtgtcttattgaatccaggtctggtagagtatgtaaatgagaagaaactcagagtgaaaatacaagttatgagtaggcttcaaactagaattaaaacaacttgatttgatttgaaattgtagaataaactatttttgctgtaktttcaactttgtcacacttgtttgacatgactaaatcacctgacattggaagccaatctgcatattaaattccatgattctattaaatactatagaaataatctatgtagagtacttctacttgagacacatacagaatatatgcattttagcatcattaacatcattcttggtttttggatattaaaaagatttaactttctattttgagaatgtgt

SEQ ID NO: 317269 - DNA, 523 bp, Homo sapiens
ttagtacatagatttttacatgtttccatgagtttttcaccattttatttctaatttgatgatagctatgggatcataactatcacttagtgttggcatattaaatacatttccttaactaaaataattggtagcttaaaatcaattgtgaggaagtactatagggactagcatttgtaagtcttaattgaacttcttaagtaagttggagtccaygaggttgtacactatctcaatggccataggataagaaaggtaagtttgaaaagggcattaaaataataaataagtaaaatcaagctttggttcttaagaaaacattttccagttaataatgtttatgtatgtacatggaaatttatttaaagccattatagtttaagttttgaagtatttttaaacaatgaatacttatggacattaaagagtagcaagcattttagtaatttttctttgctgtaagttaagaggatgagttttattcttctttgtatagatagactatgtgttgtctgaatgaaca

SEQ ID NO: 317270 - DNA, 438 bp, Homo sapiens
gtccttgccatacaccccttccttcccatatatgtgtgtgtatacacaatttataacttataaaaatacatgctacatgtatatatgtgcatattcatactgaatatgctatacatagcatttacaattatatgttgtgtgtgtttgtgtgtgtatatatatacatacatttaayatatcatctcaaattacttttgggttgactttttaagcttttttgttctatgtaggtctatatatataacacatatataatacattataatacatatatataatacacatatataatgcacatatatatatatatacacaatttttaaaaatttatatgaaacagctacagtgtttgcttatacatctcccagtgattatgcatctaaggcttaaaatcactgtgtttctttttggatttaaagctgtgtaaaaaactgacac

SEQ ID NO: 317271 - DNA, 598 bp, Homo sapiens
taacttcacatttaattgtaattttgaggtaaacacacagacatatcttaataagttttagaagtagtaacaagaaaattatggggataattaattttataagaacttgggaaacaagctcattctggttaatgactgtctcttatgctcagtgcttcaggtgtaaagtttagagtaacaaggtrattatatagggctgaaaagtaaatgaaacccatgtacacacacccatatgcattgtgtggcaaccgggaggctcaattttctaactaacctaaattaagttcttgatattaaatcagcatttatgaagttgcatggaattctaatttccaattatatgttgaaaaaatattgcttcataaaagaatacttacattcaaaatgatataaaagttaatagatgaagacattgtgaaacccacactagataactagagccatatgtaaaattactcaagttaatttcttccttatatttggacacggtaaaaactattacatctaaggtaggacagttacagataaatagcagcttattggaaaggagattgctaaagatggaatacaccaattgataggtgatatttctggatta

SEQ ID NO: 317272 - DNA, 598 bp, Homo sapiens
taacttcacatttaattgtaattttgaggtaaacacacagacatatcttaataagttttagaagtagtaacaagaaaattatggggataattaattttataagaacttgggaaacaagctcattctggttaatgactgtctcttatgctcagtgcttcaggtgtaaagtttagagtaacaaggtaattatatagggctgaaaagtaaatgaaacccatgtacacacacccatatgcattgtgtggcaaccgggaggctcaattttctaactaacctaaattaagttcttgatattaaatcagyatttatgaagttgcatggaattctaatttccaattatatgttgaaaaaatattgcttcataaaagaatacttacattcaaaatgatataaaagttaatagatgaagacattgtgaaacccacactagataactagagccatatgtaaaattactcaagttaatttcttccttatatttggacacggtaaaaactattacatctaaggtaggacagttacagataaatagcagcttattggaaaggagattgctaaagatggaatacaccaattgataggtgatatttctggatta

SEQ ID NO: 317273 - DNA, 525 bp, Homo sapiens
aaatgattatggaaatgaatgagtcattaagttttccctatttaaaattttacactaaataaaggacatcctaagatgggaatggggttaagggagaatatacttgtattataaaccataaaaagttttgcctcaatgacataaattatattaaaattgaaacatttaaaagataattatgctgcttagcctttccagatttgcaattctaaaacatctaaatgacgttttattctttagctatattctggcttcagttacttatattcaaatggatattgcttgtagattattagacagttcaccaataaaatcaaatacctgatctctcctcatgccttatgtgtcaccttgctgtcacacagccatagtggtatcaaacccagtgacaggcttttattccattgaggaactaaatgaccatactaatagtttccataataattattctgcagggktgctcaatggcaaaccaagtatattatctctgttgccagcagagagctcatctggaaatgtttcagc

SEQ ID NO: 317274 - DNA, 565 bp, Homo sapiens
accaaataaagatttcttgccttggggagcatatgttctagtggaggagatgcacaataaccagtacacctacaaataattacattatgtggcacgtttaaatgcgcaagctactgaaaatggaaaaaatagagtgtaataaggaaagatcagcagcatgatggtgtcactggagtacctgctatagcactaaatttggtggtttaggtagatccctgtgagaaagtcagatatgagaaaaaaacctgaaggaggtgagggactagctaagcacrtatctttggaaaaagtgttccaagcaaaatggatatctagaacaagagttctaagatattctcctgcatttgtgatcagtagattagtagaagataaagacagataattggcaggaggtcttatggccattgtatggagcttattgtttatttgctgctctgatgaaatagaaattgattgtaagttttagtgcagaaaagggatatgatctgacttaaatatttgaagaattgatggtaattttcaaaataaaatagaccatttaaggggaggatagaaagagggagac

SEQ ID NO: 317275 - DNA, 598 bp, Homo sapiens
tgaaccagagaaatgcgatttgccaagtataagcacggatatagcggatccttgaatcttttccttgctttgacattagtcaacaacttctactcgccagtaaaacagcccgttccttttactctcactgtacatgatrtcggtctcttggcaaagcatactttcctcaccctccaccatccccaattctgggttatcctattttggacatttttctaactggtaaaacgtcggtagcagttttgtgaaattcaggaactgagaggagtcctgagaagacacttgttcaagaaaccagaaggaattgtgggctgcaccgtgtttctctgtgcttggagcacagtggggttaacacaggccccaaaagcaggcctgcccccggactattaccccaaggtttaagaaaaataattaatgtacatgacaactaagtatttttccatttcttgaccataatggactctgcatgctcattcagatgttttcatggcaggcctgcttcgtgggcaaccagatccgtgaatgggataaaaggaagttctgccacagggtggaagatctcttctgtagtaatgatcttctttttttttttttaata

SEQ ID NO: 317276 - DNA, 543 bp, Homo sapiens
tcacctctgttgtaattctctatgccaaagaattgtacactgctattgccttcttcggttaactctaaaagaagttcagtctgttaactaaatccaacagtgattcaggggtagaacttgctagaaatttagatgagactagggagcaaaggtttacagtttaggaattagataygatttcattctgtgagcatatccagaagaataatagaagcaaataaatttctgtaattgacatgttggccagctggacataaatttactcattgtatttatgtgtaggtcatgtgaaatattagtgtatcatattgaattgatttcatccatgtcaggccaagtaaagaagcctttcccaaaatcatttcttggaaacgatttaaaattacaaagatgggcatggtagttcatgcctgtaattctaacactttgggaggccaaagtggaggattgcttgagaccaggagttaagaccagcctgggaaacatagtgagacccccatctctacaaaaatatatacatatatattagtccagtgtggtagt

SEQ ID NO: 317277 - DNA, 495 bp, Homo sapiens
tatagtcccagctactcgggagaccgaggcaggagaatcacttgaaccgggaggcagagggcagatcatgccactgtattccagcctgggcaacagagtaagactctgtctcaaaaatgaatgaatgaatgaatgaacgaatgaatgtactatgagctgatactgggatttcaggtaccgcagtttgtgctgaatgatatgtttggggtaaatcagtttttttcttayagaatttcggcgtttttgctgcaactgccactaattttgcatttaaaagaacaaaagaggaatgtatttttcaaaggagtgaatgaggttaaaatcaagattttgaatggtataaatatgcaactaattcagttgtaggatattattaaattttttattgctaaatatgtttctttcatacgttgcagtgcttacagttccaacagctttccaagaaaacatttccatatttgtgttatttgtaaagtatacataaataatgtaaaa

SEQ ID NO: 317278 - DNA, 508 bp, Homo sapiens
tctttggaaccttgggcagcttctgagactcagtgttcttatctgtgaaatggggataataatacctagttcacagagttccaaaatatccctgcaaatagaggatacttaataaaaactagctaccatttattatgctatcattttcacagtgcattcaaactattatttgagttttaaaaatactgactttacagaaacatctgtattacataaagtgaggccaatctggaagagtgagttgcataaattgatcacttggaagcatcttcttttccatcagctcccctgaacacctctaggtaatcccatcagtccccaattccctttcccctgaaagtgtctttgggactggtgccctgccaaggttctggggtgggggyggtggaggaatccaggtcccttggcatagtgtgtgactcttttctttttgctttctgtttcaacaggagggagtctgcaccagtgttagtaggttgggtaagaaagtagtgagaagagggaaaaa

SEQ ID NO: 317279 - DNA, 508 bp, Homo sapiens
tctttggaaccttgggcagcttctgagactcagtgttcttatctgtgaaatggggataataatacctagttcacagagttccaaaatatccctgcaaatagaggatacttaataaaaactagctaccatttattatgctatcattttcacagtgcattcaaactattatttgagttttaaaaatactgactttacagaaacatctgtattacataaagtgaggccaatctggaagagtgagttgcataaattgatcacttggaagcatcttcttttccatcagctcccctgaacacctctaggtaatcccatcagtccccaattccctttcccctgaaagtgtctttgggactggtgccctgccaaggttctggggtgggggcggtggaggaatccaggtcccttggcatagtgtgtgactcttttctttttgctttctgtttcaacrggagggagtctgcaccagtgttagtaggttgggtaagaaagtagtgagaagagggaaaaa

SEQ ID NO: 317280 - DNA, 537 bp, Homo sapiens
atggctcctacttggctgagggcaattctccagtgaagggagcagttatcaggtgtcatcagctaacacagaagctgggagtaagtacccaggtccaggaaagggcatctggattgggcaccaaaagcaaccactataatccacttcttgtgtcaattcaaatctacttgcttctcatgtgaattttccccatgccttcacaggatccctggttggtcacaattctggaaaacacagggaagggtgagtgggagaaatcgcagcactcatttctgcagttgtttcccctggcatcacagatactcatcacctttttcctccaacactatattaggtttcccacccctctgactggcacatctgctggtctgagcgtctctcctggtgggtgtgakttcctggttaccatgccatcgtcaggccatggttgctgtttctattcgcagctataccagggcatgggcacacacaagatgccatggagcacctgagtgccaggcatgtttcttcctgctcctgtgatgtagcagcagtcct

SEQ ID NO: 317281 - DNA, 549 bp, Homo sapiens
agggtctcttaaatgctgccaaatgggctgctgactcttagactttgctttaagttgttgtccaacgtgtccatcattttttctcttcaacaaatcagcagtgcttagcaagccactgagttccacactctttgttcacagtacccctgcctctgacctctcaaatgccagagaggccgtatcagctcttgtaccccttccaatgttacctgaccctgttcaccagaagtgaaagtcttagccccccacgcactgtggcacaccagkgactctcagtagtgccaccaatgatgggtgcttactgccatcttgtcagagaaggacctaaccacagagtttgcttctcagtcactcctggtactgattcatcttgggttggttttcctgaaagcagagcctaagatggggatttttgttaaagtgggtttttttgttttttgttttttgtttttgaaaaaacaaggggaatgaaggaaacaagataaagctggtgaaaagctaagcttttcagaatgtggcctcagtgggaatctggttttagcctggttt

SEQ ID NO: 317282 - DNA, 549 bp, Homo sapiens
agggtctcttaaatgctgccaaatgggctgctgactcttagactttgctttaagttgttgtccaacgtgtccatcattttttctcttcaacaaatcagcagtgcttagcaagccactgagttccacactctttgttcacagtacccctgcctctgacctctcaaatgccagagaggccgtatcagctcttgtaccccttccaatgttacctgaccctgttcaccagaagtgaaagtcttagccccccacgcactgtggcacaccaggsactctcagtagtgccaccaatgatgggtgcttactgccatcttgtcagagaaggacctaaccacagagtttgcttctcagtcactcctggtactgattcatcttgggttggttttcctgaaagcagagcctaagatggggatttttgttaaagtgggtttttttgttttttgttttttgtttttgaaaaaacaaggggaatgaaggaaacaagataaagctggtgaaaagctaagcttttcagaatgtggcctcagtgggaatctggttttagcctggttt

SEQ ID NO: 317283 - DNA, 625 bp, Homo sapiens
tggtgggggtgcagtcctctgccagctgcaacctcgagcttccctgcggggataaacatccagagctgtggcaatgttagctgcacattagaatcacctggggagcttttaaatcctctgatgcctgagttccatgcccaggtattctgatttaattggtctagcatgggcttgagcatcagtagcttgaaaaaaatctgctcaggtgattcctctaatcagctgatrgtgaggaccattgctttagagcagtgattcttaactgggggcacttgtgctccctcagtgacatttggcaaggtctgaagacatttctggttgtcaatactggggtaagtattactggcatctagtgggtagaggccacagatgttgttaaacatcctataatgtctatgacagcctcccaacaacgaataattaaccccaatgtccatagttccgaagttgagaaatccttatctagaggctggtttcaggagtttataggaatccatcccacagagagatggtgttctttcagcttttcagagaaggtctcctactttcccaagggtaatgctctttcattctgcaagatctcccactttccctttgcagactggcttctggtcctaagcagaca

SEQ ID NO: 317284 - DNA, 641 bp, Homo sapiens
ttctgttgactattctcttgactgtcatatttttctggctgtttgtatgctatattatgccattcttgcatttctataaagaaatatctgagactgggtaatttataaagaaaagagatttaattggctcatggttctgcaggctgtacaatcatggtgccagcatctgcttggcttctggtagggtggggctcaggaatcttaacaattgtggcagaaagtgaagggggaacaggtgtctcatactgcaagagtgggagcaagagagagtgygggggaggtgccacacattcttaacaagatctctcaaaaacttactcactattgtgaggacagcacgaagccatgagggatccacccccatgactcaaacacctcccaccaggccccaactccaacactggggattacatttcaacatgtgatttggatgggacaaatattgaaaccatatcatatgccaagtaattaaaaagaaattgagccaagggctcactatattgtccaggctggtcttgaactcctgggctcaaacaatcctcctgccttaggttccccagtagctgggattacagacatgtgccattgtgtctggcttatactatatgtttattctatgtaacacactctagagtctctgg

SEQ ID NO: 317285 - DNA, 572 bp, Homo sapiens
tattttagttttttgagacagggttttgctctctggcccaggctggagtgcagtggtgtgatcatggctcactgcagccttgaactcctgggctgacatgatcctcccaagtagctgggactacaggtgggcatcaccatgcccagctaatttttaattgtcttatagagacaggggctcaccatgttgcccaggctggtcttgaactcctgggttcatgcagtcctcccgcctcggcctttcaagatgctgggattttaggtatgagccaccatggatggcctaaatttttaatttcaaatgaaaatagcattttgggtccaatgaagaaagtttcaggccaggtgcagtgattaacacttgtaatcccagcattttgggaggcggaggccgtggatcacttgagcccaggagtttgagaccagcctgagcaatatggcgaaaccctgtctctacaaaaaattagctgggcatgctggcgcacacctacagtcccagcyactctggaggctgaggtgggaggattgattgagctaaggaagtggaggttgcagtgagctgagatcatgcca

SEQ ID NO: 317286 - DNA, 659 bp, Homo sapiens
aataaaaaacacttttatggagatgttaaacacagttaccaaaaatatgtcctcaagacactatattcagttagctatttacaatgttcaaatcattccttcctttttcaaatattcctcctggcaatggagagaatacagtacttactaaagtaaaaggcagactaatcctaaaataactcttgaaagtcatgtttagggtgactgcctaaaaagttattaacttagtctcaaactaccaatatgtgraaataagaacaggaaaggaaacaaacatttattcttaaatgcctgatatgtgctattgtgcatagtgcttttaaaatatatataactatttataaacctggaagtagatattgtcctcattttttcagatgaggaaactgaggctgagaagctaaataacttgtccagtgtcatacaattagtaagtagtgagaatgggataaaatgtttaagtccagaattcatgctgtctgccaattatacatgtgaattggtccttttacacaacttcatgcatagaaagagaaatgtagccaattactctatcaagataagacactaaatgtttactccaaatggaacactgattgcataattttgtaaggagctatagggaagaccaatgatttgatcagcaacagggcataaaa

SEQ ID NO: 317287 - DNA, 659 bp, Homo sapiens
aataaaaaacacttttatggagatgttaaacacagttaccaaaaatatgtcctcaagacactatattcagttagctatttacaatgttcaaatcattccttcctttttcaaatattcctcctggcaatggagagaatacagtacttactaaagtaaaaggcagactaatcctaaaataactcttgaaagtcatgtttagggtgactgcctaaaaagttattaacttagtctcaaactaccaatatgtgaaaataagaacaggaaaggaaacaaacatttattcttaaatgcctgatatgtgctattgtgcayagtgcttttaaaatatatataactatttataaacctggaagtagatattgtcctcattttttcagatgaggaaactgaggctgagaagctaaataacttgtccagtgtcatacaattagtaagtagtgagaatgggataaaatgtttaagtccagaattcatgctgtctgccaattatacatgtgaattggtccttttacacaacttcatgcatagaaagagaaatgtagccaattactctatcaagataagacactaaatgtttactccaaatggaacactgattgcataattttgtaaggagctatagggaagaccaatgatttgatcagcaacagggcataaaa

SEQ ID NO: 317288 - DNA, 659 bp, Homo sapiens
aataaaaaacacttttatggagatgttaaacacagttaccaaaaatatgtcctcaagacactatattcagttagctatttacaatgttcaaatcattccttcctttttcaaatattcctcctggcaatggagagaatacagtacttactaaagtaaaaggcagactaatcctaaaataactcttgaaagtcatgtttagggtgactgcctaaaaagttattaacttagtctcaaactaccaatatgtgaaaataagaacaggaaaggaaacaaacatttattcttaaatgcctgatatgtgctattgtgcatagtgcttttaaaatatatataactatttataaacctggaagtagatattgtcctcattttttcagatgaggaaactgaggctgagaagctaaataacttgtccagtgtcatamaattagtaagtagtgagaatgggataaaatgtttaagtccagaattcatgctgtctgccaattatacatgtgaattggtccttttacacaacttcatgcatagaaagagaaatgtagccaattactctatcaagataagacactaaatgtttactccaaatggaacactgattgcataattttgtaaggagctatagggaagaccaatgatttgatcagcaacagggcataaaa

SEQ ID NO: 317289 - DNA, 659 bp, Homo sapiens
aataaaaaacacttttatggagatgttaaacacagttaccaaaaatatgtcctcaagacactatattcagttagctatttacaatgttcaaatcattccttcctttttcaaatattcctcctggcaatggagagaatacagtacttactaaagtaaaaggcagactaatcctaaaataactcttgaaagtcatgtttagggtgactgcctaaaaagttattaacttagtctcaaactaccaatatgtgaaaataagaacaggaaaggaaacaaacatttattcttaaatgcctgatatgtgctattgtgcatagtgcttttaaaatatatataactatttataaacctggaagtagatattgtcctcattttttcagatgaggaaactgaggctgagaagctaaataacttgtccagtgtcatacaattagtaagtagtgagaatgggataaaatgtttaagtccagaattcatgctstctgccaattatacatgtgaattggtccttttacacaacttcatgcatagaaagagaaatgtagccaattactctatcaagataagacactaaatgtttactccaaatggaacactgattgcataattttgtaaggagctatagggaagaccaatgatttgatcagcaacagggcataaaa

SEQ ID NO: 317290 - DNA, 573 bp, Homo sapiens
catgtgaattggtccttttacacaacttcatgcatagaaagagaaatgtagccaattactctatcaagataagacactaaatgtttactccaaatggaacactgattgcataattttgtaaggagctatagggaagaccaatgatttgatcagcaacagggcataaaacaaattcttacaagtcacctcaatcatttgaaatctgacaaagaaatacatttaattaatccattattaaatgcaaataaaaatacaacttaaatatgtattctattgttgtataagagcaaaaacaatttagacaaaaaagtgagcttttttgagttyatatactttcttttttataacataaaaaattataattattatttagtaatcatctgctaaatacagatgcatggcaaaacagtaatcccattctgtgttttacaaatcaagtcacgaaaaaacgtagaggaatggtgactttttagttgaccattttaaaggccctacttatatcaagatttaaagcatgggaagtctaacaaatcaaagatagggcatgactataaagtaattaaccaatcatac

SEQ ID NO: 317291 - DNA, 573 bp, Homo sapiens
catgtgaattggtccttttacacaacttcatgcatagaaagagaaatgtagccaattactctatcaagataagacactaaatgtttactccaaatggaacactgattgcataattttgtaaggagctatagggaagaccaatgatttgatcagcaacagggcataaaacaaattcttacaagtcacctcaatcatttgaaatctgacaaagaaatacatttaattaatccattattaaatgcaaataaaaatacaacttaaatatgtattctattgttgtataagagcaaaaacaatttagacaaaaaagtgagcttttttgagttcatatactttcttttttataacataaaaaattataattattatttagtaatcatctgctaaatacagatgcatggcaaaacagtaatcccattctgtgttttacaaatcaagtcacgaaaaaacgtagaggaatggtgactttttagttgaccattttaaaggccctacktatatcaagatttaaagcatgggaagtctaacaaatcaaagatagggcatgactataaagtaattaaccaatcatac

SEQ ID NO: 317292 - DNA, 621 bp, Homo sapiens
aataataataataataataataataataataataattcaatattgtcacacctgcaagataatttttctgttctaatatttatatcagttgttatattagctcaaaattgttatattggccaaaaatatcaaaaattatgttaaatcatactatackaatggtcataaccttctctaacttgtttgttattatttgaaatagcttcaccatttagcatgtctgctgtaaacagaccttatcaagaatgatacatctcttatatactaataataaatggcctccaatatttacagttaaggggaaaagaagaaaggtgcagaacattatgtatggcatggtgatttctgtgttcttaaaaagtatatacataaatgcttacaaaagcagggtatagttttgaaaggaaaatttcatttcattctgttgaggaatggagctgagaaagaagacggtagactggcaaacaaaatttcattgcatagcatttgaatttcaaattatgtaaatgtactatgtttttgaaatatttaatttgaaaaataaagatagcacaatgtggtggttaaaagtgcagacttttcagttaaactgcttgggtttaaatcccagctatgttactt

SEQ ID NO: 317293 - DNA, 621 bp, Homo sapiens
aataataataataataataataataataataataattcaatattgtcacacctgcaagataatttttctgttctaatatttatatcagttgttatattagctcaaaattgttatattggccaaaaatatcaaaaattatgttaaatcatactatacgaatggtcataaccttctctaacttgtttgttattatttgaaatagcttcaccatttagcatgtctgctgtaaacagaccttatcaagaatgatacatctcttatatactartaataaatggcctccaatatttacagttaaggggaaaagaagaaaggtgcagaacattatgtatggcatggtgatttctgtgttcttaaaaagtatatacataaatgcttacaaaagcagggtatagttttgaaaggaaaatttcatttcattctgttgaggaatggagctgagaaagaagacggtagactggcaaacaaaatttcattgcatagcatttgaatttcaaattatgtaaatgtactatgtttttgaaatatttaatttgaaaaataaagatagcacaatgtggtggttaaaagtgcagacttttcagttaaactgcttgggtttaaatcccagctatgttactt

SEQ ID NO: 317294 - DNA, 621 bp, Homo sapiens
aataataataataataataataataataataataattcaatattgtcacacctgcaagataatttttctgttctaatatttatatcagttgttatattagctcaaaattgttatattggccaaaaatatcaaaaattatgttaaatcatactatacgaatggtcataaccttctctaacttgtttgttattatttgaaatagcttcaccatttagcatgtctgctgtaaacagaccttatcaagaatgatacatctcttatatactaataataaatggcctccaatatttacagttaaggggaaaagaagaaaggtgcagaacattatgtatggcatggtgatttctgtgttcttaaaaagtatatayataaatgcttacaaaagcagggtatagttttgaaaggaaaatttcatttcattctgttgaggaatggagctgagaaagaagacggtagactggcaaacaaaatttcattgcatagcatttgaatttcaaattatgtaaatgtactatgtttttgaaatatttaatttgaaaaataaagatagcacaatgtggtggttaaaagtgcagacttttcagttaaactgcttgggtttaaatcccagctatgttactt

SEQ ID NO: 317295 - DNA, 472 bp, Homo sapiens
tttatgacttttccttgggatatattcctattagcagaattgctgggtcaaaggacatgaacatatttaggctcttgatatactgccagaatgctttwcaaaaaaattacatggatttatacttcccccagcgatatcaaggcagccatatcattgggaatttttaaaatcagctcacatgagaagcaaaaatttctcattactaggaggctcaatatcttttcacatgtttattagtcatttacattttcttccttttgaattatctgttccttttcatttgttcattcatcaaagtcttagtacttcaccaattgatttgtatataatttcttccacatacactaagctcagaaagtctatttctttgtgcttttatacctaacaatagtaacatatcaacctatctttctttctgtgccctcaataacacaatacctatttgatctctggttgtatatcaaaatcatct

SEQ ID NO: 317296 - DNA, 472 bp, Homo sapiens
tttatgacttttccttgggatatattcctattagcagaattgctgggtcaaaggacatgaacatatttaggctcttgatatactgccagaatgcttttcaaaaaaattacatggatttatactycccccagcgatatcaaggcagccatatcattgggaatttttaaaatcagctcacatgagaagcaaaaatttctcattactaggaggctcaatatcttttcacatgtttattagtcatttacattttcttccttttgaattatctgttccttttcatttgttcattcatcaaagtcttagtacttcaccaattgatttgtatataatttcttccacatacactaagctcagaaagtctatttctttgtgcttttatacctaacaatagtaacatatcaacctatctttctttctgtgccctcaataacacaatacctatttgatctctggttgtatatcaaaatcatct

SEQ ID NO: 317297 - DNA, 472 bp, Homo sapiens
tttatgacttttccttgggatatattcctattagcagaattgctgggtcaaaggacatgaacatatttaggctcttgatatactgccagaatgcttttcaaaaaaattacatggatttatacttcccccagcgatatcaaggcagccatatcattgggaatttttaaaatcagctcacatgagaagcaaaaatttctcattactaggaggctcaatatcttttcacatgtttattagtcatttacattttcttccttttgaattatctgttccttttcatttgttcattcatcaaagtcttagtacttcaccaattgattkgtatataatttcttccacatacactaagctcagaaagtctatttctttgtgcttttatacctaacaatagtaacatatcaacctatctttctttctgtgccctcaataacacaatacctatttgatctctggttgtatatcaaaatcatct

SEQ ID NO: 317298 - DNA, 539 bp, Homo sapiens
cacttatttaaaaagttgaccaataatgggataatctatgtaaagtctctgttttagcacttagtgcytcatatgtagtcatcacttaatagatggttaagacatacacatacacacacacaggttaaattgtgctctcatatcatctaacagcattcacctaacagtttataaagcttctgatcagaatgatatgaagtttaaaaactatgtattgtattatatggcactttggatatcagcacatgtgtactaccccaagaaggtaatttaaaatatctgtttggacataagtgtatgtgctgactacaacgcagtataacactgctcattgtgatgctgctcttccaaacagtagtgctgacctgatggtgtagtacatgatttcccacctttgacaccttcatgttagtaaatattagctgtgtgttccactatcaaaaaaacaggtaataattcaaagaaatttcagcattaaaatcttcagtttcccagtttaaaacacaagtgaaacaaggttggcatataaaagtgcactg

SEQ ID NO: 317299 - DNA, 539 bp, Homo sapiens
cacttatttaaaaagttgaccaataatgggataatctatgtaaagtctctgttttagcacttagtgcttcatatgtagtcatcacttaatagatggttaagacatacacatacacacacacaggttaaattgtgctctcatatcatctaacagcattcacctaacagtttataaagcttctgatcagaatgatatgaagtttaaaaactatgtattgtattatatggcactttggatatcagcacatgtgtactaccccaagaaggtaatttaaaatatctgtttggacataagtgtatgtgctgactacaacgcagtataacactgctcattgtgatgctgctcttccaaacagtagtgctgacctgatggtgtagtacatgatttcycacctttgacaccttcatgttagtaaatattagctgtgtgttccactatcaaaaaaacaggtaataattcaaagaaatttcagcattaaaatcttcagtttcccagtttaaaacacaagtgaaacaaggttggcatataaaagtgcactg

SEQ ID NO: 317300 - DNA, 539 bp, Homo sapiens
cacttatttaaaaagttgaccaataatgggataatctatgtaaagtctctgttttagcacttagtgcttcatatgtagtcatcacttaatagatggttaagacatacacatacacacacacaggttaaattgtgctctcatatcatctaacagcattcacctaacagtttataaagcttctgatcagaatgatatgaagtttaaaaactatgtattgtattatatggcactttggatatcagcacatgtgtactaccccaagaaggtaatttaaaatatctgtttggacataagtgtatgtgctgactacaacgcagtataacactgctcattgtgatgctgctcttccaaacagtagtgctgacctgatggtgtagtacatgatttcccacctttgacaccttcatrttagtaaatattagctgtgtgttccactatcaaaaaaacaggtaataattcaaagaaatttcagcattaaaatcttcagtttcccagtttaaaacacaagtgaaacaaggttggcatataaaagtgcactg

SEQ ID NO: 317301 - DNA, 501 bp, Homo sapiens
caaattaccacttaggcaaaaagaaccttggtatttacaggggtaaaaagttcaaataaataataaacttcatttattattatatataagccaagagaatttattatatgcaagggaatcactgttcagacaatgagctgaggggccagaatttgtgagacagaaggggtccttttcacacaatatttacttgaagtttcacaataatcaaaggtatctgcttttagcccagttattcatgtatacacatcaacaagatttaaattmaccaaaatgttaaatgtttattaagcagccaccatataatgtaggttttggaactagtatttaaatggaagagtatatcttcagagtaaagttccattgagaaatagaaaagtctgtaaaaccaggtcttgtcttataacaagaaactgatactgacttctgtaacaaagctaaatagtctcttgatgtgtagttggcacaattccagaaatctaaactactagcaaatttgct

SEQ ID NO: 317302 - DNA, 501 bp, Homo sapiens
caaattaccacttaggcaaaaagaaccttggtatttacaggggtaaaaagttcaaataaataataaacttcatttattattatatataagccaagagaatttattatatgcaagggaatcactgttcagacaatgagctgaggggccagaatttgtgagacagaaggggtccttttcacacaatatttacttgaagtttcacaataatcaaaggtatctgcttttagcccagttattcatgtatacacatcaacaagatttaaattcaccaaaatgttaaatgtttattaagcagccaccatataatgtaggttttggaactagtatttaaatggaagagtatatcttcagagtaaagttccattgagaaatagaaaagtctgtaaaaccaggtctygtcttataacaagaaactgatactgacttctgtaacaaagctaaatagtctcttgatgtgtagttggcacaattccagaaatctaaactactagcaaatttgct

SEQ ID NO: 317303 - DNA, 623 bp, Homo sapiens
ctcaaatactcaagtatcagatacactgaaacacatatatccttctgatgcctactgccttttatttaataatgcgtactctatgccttctattcttgctcttaagttttgtaacagcctcccatttccactcccaaacacacctgcacatcactcatctaagagaccagagtagtcaacttcaaataattgaattctcattctttttggtcattaaaaaaaaatgacaagccagaaackatttgggaacttaatccaaataaagtgagactttttttcatgcaaaactcttatgatttcaccataaaagaatgaaatatttaaagtttttttttaccttatccccaatgtagtcatgcagcattcggatgacagatgcacctttgctatatgatatagcatcaaatatctcatcaacctcagatggatggcccacactgacctggcagacagtgtgattcagggttatgacaggaagcagatagcctgtaatactgaattacataaaacgctttctaggaaaacccttctaacttacatttttctgcctttaactcactcataatgtataacgatggtcctcaaaaaaatgtagtaactaataataataaagttgaatagaa

SEQ ID NO: 317304 - DNA, 527 bp, Homo sapiens
gattgtcattctactaatctaaaacactcacatgtcccttccactatattcccaaactcacaatttaatgacctaaaattcagttcaaaacatttggcaaagaactcacatttctgaaaaagagagaagactaaaagagatgtcaagaaaggccaactggtgatatgagaattatatctgagggtcattttcttttcctttcttttcttttttttttttttgagacaaagtcttgttttgtcaccaggctggagtgttcaccagtagctgggattacagacatgtatcactatgcctgcctaatttttgtatttttagtagagagggggttttgccatgttggccaggctggtctggaacttctgaactcaagtgatccacctgcctcggcctcccaaagtgctaagattacaggtgtgagccaccatgcctgggctaaaggatattttcaaaacattgtaaataacttctcccgcaaacccagacagggtctyattctgttgcccaggctggagtggcaggggcac

SEQ ID NO: 317305 - DNA, 558 bp, Homo sapiens
gtttgttattcatcaggttacttttcagctgtgaatcagattaacaaataagattcaagaaactacagttagcctggaatctcactgcatgattcattcatctacacctaagaggaatgtttttctctcacccaaattagtatcttgacttttcccacttgcagacaaatttyagaacagtttaggaagtgtctgttgaataaagactgtccatatgcccttgttcaatgcagagattctgataagccttttcaaagtggaccttttaaaataatacttttctatcactcaattattttttggcacagtgttgcagccaaacttgaaatactatgtagccaaaataatgtggagtaggatgaagataaatatatttgagcacttaaaaatattaaataccatagtaacaagatttccaaaccattgatgggcgagttcatgtcccacaaccagagcaacccactggcgggatgaagaacaggaattttttggatcaataagcaatgcagtctccctgtgtttaaaaaaaaaaaaaagaaacaaatttaaacaataaaa

SEQ ID NO: 317306 - DNA, 553 bp, Homo sapiens
gcagggtaacacatcattaacatacctataagtaacaaggccccagttctccatggcaccttcacaaaataaatataaacatttattgatatatatatatatatatatactcttgcatcaaaagtcacaaaattttaaaaagttattacaattcagcaataaaatgaaatttactttaccagctgcaaagtctgcaatagcaatgagatcaattttaggtagaggataaggaacattgaagtagtccttataaaaaggcaaggttttagcagcaacctataaaagtataaacaaaataaccatctaataaatatgttattataattcatattgaaacccacaaaggaatcctgttgcaagccaatgtatcttaaattactagaaatgaatcccraggagccctaccctccgaagactgccttagctccaaactttgaatacaatggccaaactttaatccatttataacttgatatgaaaaatataactacatattttccaacccattccctagagaaattccactcttatattctcttaattattattttgt

SEQ ID NO: 317307 - DNA, 553 bp, Homo sapiens
gcagggtaacacatcattaacatacctataagtaacaaggccccagttctccatggcaccttcacaaaataaatataaacatttattgatatatatatatatatatatactcttgcatcaaaagtcacaaaattttaaaaagttattacaattcagcaataaaatgaaatttactttaccagctgcaaagtctgcaatagcaatgagatcaattttaggtagaggataaggaacattgaagtagtccttataaaaaggcaaggttttagcagcaacctataaaagtataaacaaaataaccatctaataaatatgttattataattcatattgaaacccacaaaggaatcctgttgcaagccaatgtatcttaaattactagaaatgaatcccgrggagccctaccctccgaagactgccttagctccaaactttgaatacaatggccaaactttaatccatttataacttgatatgaaaaatataactacatattttccaacccattccctagagaaattccactcttatattctcttaattattattttgt

SEQ ID NO: 317308 - DNA, 489 bp, Homo sapiens
ctttggagagaattgggggagacagtggagaggagagcacacagtgactctggaaacacaagccctacacagaggtatgggagctggatgcttctgctatcaacagtgagtatcgtgagacaacagccgctatgaatggttggtcctgctgacaacatagagggstagacctcaggggatcggcaggacttggaaaagcagagaggaggagagagaacattccaggcaggtgtgctgggggagggaggcagcatctggaagcaaggcccagaggagggaatagaggttcaagaggcataagtcaaactgcctcaactacgtgcaaaactcctactgtgacaccaaccattctttcccctcaacccaccagggagacataccatcagtgtcctgcacctgcctccatggaaacccacccagcatatcctcctatctcaaccctcaaacccagatcccaagggagcacatttaaaaaaaaaaagaaaaaaa

SEQ ID NO: 317309 - DNA, 562 bp, Homo sapiens
gaattctgtttcatagaatgcagcatatgctttggaccagaaacccatatatggtgcagcctctctcacagctacaatatgtgggtccagaattcaaagggtgaaagtgagggtggctcctctcgctaataaacaatgcacagaatatttcattcctgtctcagcaactttaagcccactggtttggagatcttggtccccaagggaggaaatggggattcttccaccaggctataaagcagtggttccaccgaatttaaacacgggatgagcacctggacactttggtcccattatgycaccaaaccaacaggcaggaaagggtgggttaatctactgtctgttgtgattgcttatgattagcacagggcaaccgggttgcttctacccaatctaggcaaagaggccaggtctggaacccgggtgatcctctggtgcatctcttattatttccatggcttctagtaaaggttaatagagaattacagcaaccaaaaccaggcaggagaactgaagatttgaacccctgaggaaggaaggtttgggtccctctaccaggtga

SEQ ID NO: 317310 - DNA, 541 bp, Homo sapiens
atctattcctatcttctttagagttctacttcttactagccaatccttcattactccaattccactatggttaataatttcttatattgaactttagttattcaaattactacgtgatttctgtctcctggttacagatacagattgatagagcaagtgtgagatccaacagcacagctatcacaaaaagcagaaactgcccgaaaccttgtatcratacaatataaggaagaagtgtcagaaagtgacagttctcaatccaagcagaagctgggtatttctgcaggagcgtttagtgggacaagaagacatttccattgttaggttgagtctcagtgaggaaattcacagtgacctcaaaaacaccttacactcacagcatgtattatggtttccaaagagttctcacatcctttttaaaatatttgaatccatacacacacacacacacacacagatggccgtgccaattatataaataaggaatatgaagcagatgctgagggctggagtgtctcatcccaagtcacagagtcagatg

SEQ ID NO: 317311 - DNA, 541 bp, Homo sapiens
actaaataaaaatttaagatgctataaagacatggattaaaaataaaaaatggatgaactgtactaatccacacaagttggactttagtataaggaacatttccagaaatagggacatttcagaaatagacattttattctcataaaaaggtcaattcactgagaagacacaatgatcctaaatgtgttggcacctaaatacagcttgagagtacatgaagcaaaagttgttaaaattaagtggagaaattgataaatctagaaacatagatgaaaatttgtatcattccttctcaataattactaggttaaaaacagcaaatatagataatatctagattatatttagattggttaataamttcagccaacttgacctaattgatatttataaaatactgtgttcaataattgcggaatacacattcttttcagagcacgtggaacattcaccgacatagaccatatcttggccatgaaagtctcattacctctcgattgaaattttacaaagtatctttgttctaatggcagtagattt

SEQ ID NO: 317312 - DNA, 538 bp, Homo sapiens
aggaagaaaggtttaaactcagtagttctacatttccatctactaatctagaaaaagaagaccaaataagtccaaggtaagtagaaaaaagaataacagaagtaaataaaatagaaaacacaaattataaagttatttrgaaagcgtaataaaaattgataaatctctaacaaaactaatcaaaaaaggaaaaagagcaaattaccagttttataaatgaaagaggagataccacagatattacagacattaaaataataagagaataaacttggtaacttaggagaaacaggcaaattccttgaaatacacagcctaccaagaaataaattgggagagtcctatatttgcctttttaaatggaattcagaatcgcaaacagaatcgcaaacagaatcttctctcaatcttctctcaaagaaaattagaagcctagatgaggtcaaaagtgaattatgtcagccgatttagaaaaaaattataccatccctagaaattctttcaggtagtaaagttggagggagcatttcccaactca

SEQ ID NO: 317313 - DNA, 564 bp, Homo sapiens
cagatccagcctcgagcttattctggcagtgtaaccaggcccttcacacagcaaactgtagtgacatgtcagtagcacatgccctgcggttgctggtgccttcaaaagtgttcattttaggtggttctgccaccctcccaagccagacttcatgtgcacatcttccttattttttcttgaaaaactggaatctgacaagtctagcagagtgtgtttatgaagtgacttcttaagtagcagtatttgaaacctgtcatgaagatatgtgatgatattggtttggctcatgtgattaagtgatctgtttcgttcagagagagtgatggcagaaaagagagcccatggttttgaagaatacctctttttttttttttkggggggagatggagtcttgctcttggagtacaatggcgcgatctcagctcactgcaacttccgcctcctgggttcaagagattctcctgcctcagcctcccaagtagttgggattacaggtgcacaccactacgcctggctaatttttgtatttttagtagaaatggggtttccctatgttggccaggc

SEQ ID NO: 317314 - DNA, 564 bp, Homo sapiens
cagatccagcctcgagcttattctggcagtgtaaccaggcccttcacacagcaaactgtagtgacatgtcagtagcacatgccctgcggttgctggtgccttcaaaagtgttcattttaggtggttctgccaccctcccaagccagacttcatgtgcacatcttccttattttttcttgaaaaactggaatctgacaagtctagcagagtgtgtttatgaagtgacttcttaagtagcagtatttgaaacctgtcatgaagatatgtgatgatattggtttggctcatgtgattaagtgatctgtttcgttcagagagagtgatggcagaaaagagagcccatggttttgaagaatacctctttttttttttttgkgggggagatggagtcttgctcttggagtacaatggcgcgatctcagctcactgcaacttccgcctcctgggttcaagagattctcctgcctcagcctcccaagtagttgggattacaggtgcacaccactacgcctggctaatttttgtatttttagtagaaatggggtttccctatgttggccaggc

SEQ ID NO: 317315 - DNA, 496 bp, Homo sapiens
ctgagacatcctggcacccctcgcctctggaccagagccgggcactctacaggatctcaggaaatactggccaaatcaggaacaaagctgcgaggctgtgctttgcagacatggttctgcctttacccaaaccagccctaccggaggccttctgggggagtagagaggaggtcatgtgcagcctctaggggtttgagcacagcccgcactgacagttaaaaatcgcagagaagtctcgggttttcttttataatttcrtgtgtcatttccagtctcctccatcagggatctaagttttgttttgatgaaaaaatattttttaaaaaaattatttccccccaaaatatatttcagtaaactggttgttccatgaaggagtgtaccttttttatcctccagctttgggtacctcccacggagttgcaggtttaatccccatttgtgatagtgggaagcccccccgcccatctttttctcttttctttttttaagcacc

SEQ ID NO: 317316 - DNA, 481 bp, Homo sapiens
aatgggtctgagtctgaggatttcagactcagcaagaccctgtcttcctaagacctccatggcagcaaaagttttaaatgtaggaaataatcgtctctctctctctctctctcttttttttggagacgaagtcttgctctgtcacccagactggagttgcaacctccacctcccaggttcaagtgattcccccacctcagtctccygagtagctgggactacaggcgcacaccgccacacccaactaatttttgtatttttggtagagatggggtttcatcatgttggccaggctggtctcgaactcctgacctcaagtgatccatctgcctcggcctcccaaagtgctgggattacaggcgtgagctacctcacaagggcagaagtaatcatttctcatgtgcctgtctctcaagaccacatttcagcttcaggacacgtctaccttaatgttacataataccaacatcatacttaacaa

SEQ ID NO: 317317 - DNA, 431 bp, Homo sapiens
cagctttgctacaggccttaatgtcgtttgaacagaaaggcctgtgaggttttatcttgactccatgacaggttatgtggataaatcactgtgaattaaaccttaatcaagtgtttagtcaagttcaatccaactatagctctataaagccagtcttgcttttactccaatttttcaatatggtaagcaatttattgaactctggaaaattctagatgagtttcctaatttctcatatgctataacaagaagaacaataattaaatgctgcctaattttacataaaattttaattatttaacaatttgcattttgaggtatttawacttaaaagcctttgaaaaaagtgactgaataactattttttttttagatgaaaaaacaaattttccttttactaaaaaaaaaaaaaaaaaaaaaaaaatcacatt

SEQ ID NO: 317318 - DNA, 431 bp, Homo sapiens
cagctttgctacaggccttaatgtcgtttgaacagaaaggcctgtgaggttttatcttgactccatgacaggttatgtggataaatcactgtgaattaaaccttaatcaagtgtttagtcaagttcaatccaactatagctctataaagccagtcttgcttttactccaatttttcaatatggtaagcaatttattgaactctggaaaattctagatgagtttcctaatttctcatatgctataacaagaagaacaataattaaatgctgcctaattttacataaaattttaattatttaacaatttgcattttgaggtatttaaacttaaaagcctttgaaaaaagtgactgaataactattttytttttagatgaaaaaacaaattttccttttactaaaaaaaaaaaaaaaaaaaaaaaaatcacatt

SEQ ID NO: 317319 - DNA, 413 bp, Homo sapiens
gagccctctcttaagagacccaggggaagacccaaaggcagcaaaaacaagagtccctctaaagcagctcaaaaggtgagatttctcaagtcaagctctcctaacttcatcaatgactgactacaggagcctgcctgtaactttcccattctaactccgcagccaggaatttgtcccaactgggtaacacaagactcatttcttacatttaacattagttagatgcgagttaaccttttttgtaagcagatgctcagcataaaaagtttatgaagatacttaacagtgttgtttttaaacaaacagccaccaaataatttgaaccttaaaacgggtagaagtgaggaaggaaggggttgsggggggggcgggatgaaaatgacacaattaatatttgcaccagttgtaaatag

SEQ ID NO: 317320 - DNA, 587 bp, Homo sapiens
ttgtggcttattttatctctcatctacctgtctgtctatctgcctatccatctatcygtttgtcaactatcatgtaaagctatttgtttttaccaggcagattgaagagaaaaagaggaaagtttcatttggcagtgtagacagtcaatatcactgtaccaagtacccccaccggctgctaactcagataacaaaagtaaaatgtggaacaaggtatcctggttcaagttacctgtatttgtgtgttaatatagccatggatgattcttatacatgaaacaatatgtactaagttttctttatcctaaaaagcaggaacacgtttttatagatgtatgtgatatgtgtgtgtattggtgtgttgttgtgtatgaagattggactagggctgacaaaaacggaaaaactaattgctttataaataatgttaacaactgtgatatcagaaaaatcttctgtgaagtaaagcaatgaaataaactctcaagatagaaatgtattcatgttaagtgtgggattatggttaataaagtacatttttaattaatcattatttctaggcacatatagttttaatcactgggaca

SEQ ID NO: 317321 - DNA, 487 bp, Homo sapiens
aaatgtcttttgctgaggtcgttactgctattataagcttaaaatggaaaaacataataggcatatgagttatttttatgggttgatgcagtttccaatggtgtgtactaatttgagaaaatgaatgtgtatacatacaagagtaagtcagattgttagactcatccctcagtattccatatgttttgtgactgattttacagttctctctacctttctcatttacaaaaaaaaaaaagaaaagaaaatttgattcagcaattcctaaaagtattgtattcagtgacatctttggaaacaccagtttctgttatcaacttcaaataatagtcaagttttatgtatgatctaaagggaaaacaagtttgtttttcaatcctgtgataatttttcttttagaatgargtgttgcaagaaatgaaaaattaaaaaacccactctgtaacaattttgctgtgcttctttgatttttctctgtttttgttta

SEQ ID NO: 317322 - DNA, 605 bp, Homo sapiens
cttactgtaacttttttactttataamctttaaatttttttaacttttttactctttgtaataaaacttcacttaaaacacaaacacattatgtagctgtacagaaatatttttctttatatctttataagcttttctctattttgaaaattttaattttttttaattttcaaactttttggctaacaactaagacatagcacacacatttgcctaggcacacatagggtgtggatgatcaaaatgtcagtaggcaataggaatttttcaactccattataatcttctgggaccaccaccatatatgcagttcattgttgagtgaaacgtcattatgtggtgcatggctgtatttatatccgtataaagattacacatatataaaggatgcaaagacaaagagtacatatatatttatatatgtagtgtactgtatatatgcatgtatgtatgtatgtatgtatgtatcttactttgggatttccttttttctaaccttcttaccattttaagaattggtctatgcacagcaaacttttagaatcgcaattaaaatattcagagaagtggccaagtttttgtataggtgtttggatactgtgcag

SEQ ID NO: 317323 - DNA, 570 bp, Homo sapiens
tttttaagcttcttaaaatggttctctgcaacaacgtttcttgtagaatgaggatgcataaacttgttataacatacttgactttccaagtggtccctgtaaacaagggatgcttgaagaactgccaagctaggtagccagagattgggattgaagagctgacattgttctaacactgaatgcaaatggaaatgacctaatacatgtgtaatagtaaagctaataaacgtgtaactgtatagcaattgcaggattaaaataagaagcaaattttggaaagcgcacactttttcttttgggtcatctaccttgctatgaagtratattttgaataacatttaaatatctaaatatgtgtattgccattaatattgacatcaaagtttcaacacatatctgttttaaaaaatctacaagcccagtttccccagtttctttataactctgatgagcctgctagttctgcctttgcttttttcccaacttggaatctactctggtttccagaattaggtttattgacagtgtttcactgctctctgctggagaagcccaaagccaagccaggca

SEQ ID NO: 317324 - DNA, 538 bp, Homo sapiens
catacttttggtcaaccactgtaaaataaacagtccttctcaaatgtttttgttttctttgacagcacagcaataattcacttggaatgctgcagaatagaatagcactttaatgctgttgtaaggatggcttttatgatttctattcatcgagttgtttttaagttaaaagataccagactgaaaagaacataaatccctgtggagatatgttatgcttagatctttgcaccctgttcccacccaaggatatatacatagaatatatgtataaacacacatccacatatgcataaatatatgtgtacatatacgctcaatatagacatttaacacaacattcacctaaagtgttkactgtttttgtttttgtacttttgttttaaatttgagaagtatagcatctagattatagtagagttttgtgttcatgcaaatgaagatgtaaattaatgtttattcctacctagaaaagtttcaggaaaaaaatgtcataacacacttttgcttacttggtacatactcttgttctcttttt

SEQ ID NO: 317325 - DNA, 541 bp, Homo sapiens
cattgcctcagttctccctttcctgtttcacaagcagacacagcaaagcccggagagtaatctgactcctccacgatcgtagtggactgcatccgggatgatatttagttttccttctctgtgggctctgtaaaaccacctactgcttaaagaagctctttgacatgttctgaactctaagaacaaatgaaaatggcattttgggaaaaaaaaaatgaagccagaacaaagaagtcagaaacgtgatactgcaagatcaggcacttatctgcactgcaaatgaaaaaagtttcagactcaaagaattaacaatttaaccactagtttccccytgagatgttactgtcacaagagatccttacatttccagtggcattcaacagattctcctctttagtgaggacagctgcagaaagttactgaatatttgctccctctcagatgcataaagattattttgtaagcaatgttggagaaagaaagagctcaaaaggagggtgaacatcagaagaaaaaagggacagatctacaaggtgcttgt

SEQ ID NO: 317326 - DNA, 224 bp, Homo sapiens
gaagcttcaggtatttattaaacaccctagtggaaagatagagtaggaagtcagataaatgggtctggacttcaggtcaagtttggagatatacatttgacagtaatcaccataaagatggtattcaaagctatgtgagtagrtgagtatgggggatgaataaatggaaatgaaaatggttcaatgactgagtttagaaggactcccaaattctaagtttggag

SEQ ID NO: 317327 - DNA, 559 bp, Homo sapiens
gtattctaaataaacaactacatgtaccacaaggctgctcatgcaacctgaaaacaaccatacttataaatatatacatawaattatataaccataaaataatgcacaattcagtttttgattaacatggaaagattttcaaatggcaagaccaggttatagaataatatatgtaatatgaccatttttgtgcatagaggataaaagtatgggaaagaaccctaactatgaacaatgatcctggttgagtttgggcgggtggggaaaggattgggaggtgagcagcttacattaagtcttttaaaaacatggatttaaacaatattttcttgacacattaaactagtaaatttctactttctaatataaagaaaaagctaatcattcaaaaagctttattaaatgatgtaaatagctttgtttcaatgtaacttttaatcactataagcaaaatgaagtatctcaagaatactaatgattacattcatgtttcctctggatagtaaatcctttgctgccatcttctggaacttgattattaacgtatactctgggcttc

SEQ ID NO: 317328 - DNA, 559 bp, Homo sapiens
gtattctaaataaacaactacatgtaccacaaggctgctcatgcaacctgaaaacaaccatacttataaatatatacataaaattatataaccataaaataatgcacaattcagtttttgattaacatggaaagattttcaaatggcaagaccaggttatagaataatatatgtaatatgaccatttttgtgcatagaggataaaartatgggaaagaaccctaactatgaacaatgatcctggttgagtttgggcgggtggggaaaggattgggaggtgagcagcttacattaagtcttttaaaaacatggatttaaacaatattttcttgacacattaaactagtaaatttctactttctaatataaagaaaaagctaatcattcaaaaagctttattaaatgatgtaaatagctttgtttcaatgtaacttttaatcactataagcaaaatgaagtatctcaagaatactaatgattacattcatgtttcctctggatagtaaatcctttgctgccatcttctggaacttgattattaacgtatactctgggcttc

SEQ ID NO: 317329 - DNA, 559 bp, Homo sapiens
gtattctaaataaacaactacatgtaccacaaggctgctcatgcaacctgaaaacaaccatacttataaatatatacataaaattatataaccataaaataatgcacaattcagtttttgattaacatggaaagattttcaaatggcaagaccaggttatagaataatatatgtaatatgaccatttttgtgcatagaggataaaagtatgggaaagaaccctaactatgaacaatgatcctggttgagtttgggcgggtrgggaaaggattgggaggtgagcagcttacattaagtcttttaaaaacatggatttaaacaatattttcttgacacattaaactagtaaatttctactttctaatataaagaaaaagctaatcattcaaaaagctttattaaatgatgtaaatagctttgtttcaatgtaacttttaatcactataagcaaaatgaagtatctcaagaatactaatgattacattcatgtttcctctggatagtaaatcctttgctgccatcttctggaacttgattattaacgtatactctgggcttc

SEQ ID NO: 317330 - DNA, 641 bp, Homo sapiens
aaaatgttagccattggggaacmtagttgtagggtttattgtagggtgtatgggagttctgtgtcctatttttgcaacttttaaaaagtaaaaattcaccttcagtgacacactacttttaggttaaaccagtttatctgggattcataaacgctactttattttcatgttataacacttaacaccgtaccttgtatatgataggtgctctatcaatgtttgtttgcttttattaatgatttgtaatgtgtctcaataactctttgttctactatggtgcttcttactttttgttttgtccttttgtctttcttctcattttctgtgagctcttccatagcagacactgtcattttattcacaaaaccttattaaattaaacccacacatatttagagttactaataatttgggtatgatatgcctgtgtcttactgaatgcagatgatgatgctgttaccagggaaccacttctattcttcctgtcatagtcttaatatttccatttgtcactgacagaaagggtctgttattttgctgcctttccctctctactgttcctgtgactgtcaggtggagttttgagagacacattgagtagttaatatatagaaatactgtaagagtatattctaacagta

SEQ ID NO: 317331 - DNA, 641 bp, Homo sapiens
aaaatgttagccattggggaacctagttgtagggtttattgtagggtgtatgggagttctgtgtcctatttttgcaacttttaaaaagtmaaaattcaccttcagtgacacactacttttaggttaaaccagtttatctgggattcataaacgctactttattttcatgttataacacttaacaccgtaccttgtatatgataggtgctctatcaatgtttgtttgcttttattaatgatttgtaatgtgtctcaataactctttgttctactatggtgcttcttactttttgttttgtccttttgtctttcttctcattttctgtgagctcttccatagcagacactgtcattttattcacaaaaccttattaaattaaacccacacatatttagagttactaataatttgggtatgatatgcctgtgtcttactgaatgcagatgatgatgctgttaccagggaaccacttctattcttcctgtcatagtcttaatatttccatttgtcactgacagaaagggtctgttattttgctgcctttccctctctactgttcctgtgactgtcaggtggagttttgagagacacattgagtagttaatatatagaaatactgtaagagtatattctaacagta

SEQ ID NO: 317332 - DNA, 641 bp, Homo sapiens
aaaatgttagccattggggaacctagttgtagggtttattgtagggtgtatgggagttctgtgtcctatttttgcaacttttaaaaagtaaaaattcaccttcagtgacacactacttttaggttaaaccagtttatctgggattcataaacgctactttattttcatgttataacacttaacaccgtaccttgtatatgataggtgctctatcaatgtttgtttgcttttattaatgatttgtaatgtgtctcaataactctttgttctactatggtgcttcttactttytgttttgtccttttgtctttcttctcattttctgtgagctcttccatagcagacactgtcattttattcacaaaaccttattaaattaaacccacacatatttagagttactaataatttgggtatgatatgcctgtgtcttactgaatgcagatgatgatgctgttaccagggaaccacttctattcttcctgtcatagtcttaatatttccatttgtcactgacagaaagggtctgttattttgctgcctttccctctctactgttcctgtgactgtcaggtggagttttgagagacacattgagtagttaatatatagaaatactgtaagagtatattctaacagta

SEQ ID NO: 317333 - DNA, 584 bp, Homo sapiens
gcttttggggttttgataactattttactggccagcttcacaactggtaaggcctggggacatatagaactaaccatactcataattaagaaggcaaaccttggctgcacttagcacacaattaaagcaacttaccaagttttaccttaaaattaaaaattgctgggaattatcattacaacatgtaattgagactactggaaatagatttacatggagggtgtgtaagaacagtaaaatatggttttttttgtttttgtttttgtaaaagattataagaaagcatggaaatgtaaatttttgcctagggttaaaagactgtttcaaattaggaaaaagctgaaggttcaaaaagaagtggtggaagaattgtggaacttaatcttacagaagaggttctctatgtgaacataccgactaaattcaaaggatattatatagtttttctgtaaactcagcattgaaataaaagcataacaaggttttcttcaggtgctaatttgtttttyggcaaaatttgtaaagggttatagtaggtttttacttctttaaaattggtgaatcatcattttggcaaaataaat

SEQ ID NO: 317334 - DNA, 542 bp, Homo sapiens
agttctgactgccgttttcccaaaacagtgccccctgtcagcaggaatcagttaagattggtcttcgtccttatctttattgyaatggcagttagatgtacttctttagaggggggaatgagacaaccggtggtagggggtccccggcaaaattccaaccagcctgtgcactggggtggagcctcaggaagtttgcaccatttccagcagggaggaacctggcccctcctttttggtgggggaactgggattcgaactgagaggtgggaagcactctagcaagagctctggcttagtgagagtccctgtttcccccttttattccttttcacccaataaaaccctgtcttactcaccattcgaattgtctgtgagactgaatttttgttcccacgggacaaagaaccccgtctttagctgaactaaggaagagtcctgcaacacaaatatactaatgctccctttctctaacttcttaattctaataattttgaccctatcactttttctatgcttccatgtatctcacctctaagcttctc

SEQ ID NO: 317335 - DNA, 591 bp, Homo sapiens
gcaaataaaacagtgaaatcagtcagactcagatatgatgttgtaaccatcattacaactgtcataacttcaaaataattttattgatgtgttaacagattgttaattttaattgtgattgtatcaaaargatgaaattatcagaaatcaatgtaacaaattatgtgcaatccaaggacaataacagaaactatataaaatataaataaatggagagatattccttgtacatgaattgcaaaacagtattattaagatcttaattctctccaaattaagaatttgtaaaatcccaatcaaaattttagcatttatttttataaatattgtctatcataataaaatatgtaaatatgaattaatttattatagtcatgtttttaaaaaaggacatacctggagacattttcctgatttcaagacttactgtaatgctacagtcattaaaactattgtaatggtgcaatatgggttgatttgtgtcacgccctcttacaaagaaagatatgattgcatccccaacaatttagaatgtgatcttctttgaaaaaagagtgctcacataggtaatcaatttaaagtgaggtcatt

SEQ ID NO: 317336 - DNA, 590 bp, Homo sapiens
ctaaaaaccgatacattaaacatagctagccatcatttaaaaatagttatttctttgttaacctttatttgtttatttatttttcatagccagtgaacattagcgaacatagaaaaacccttaaagttagctacatgggcattttcaccagtaactctgaagattcagctgttttcattaaaccagcaacattacatcagtcttacttatccaaaaaaattacacaaagatcattttgtttggctgggttcatagttttataaccttttatgccaaactctgacacttcaaaatatctagcagagataaaaattaacccagaaaaaaaaatgcatgctagcaattctgaagaatttctgkttttattttaccaacaattttaaaaccagcttatttattaaaagtttacttaagtcctgtgaatttgagaaatactttgggcttaatttatgaatgcttttttatttttaaaccaatttggtaggcacgacatataacataataaatgtacatacataagcacatccagacatgtatacatatgcataagcaaagatccaatagatttacctcagagctctagccataag

SEQ ID NO: 317337 - DNA, 590 bp, Homo sapiens
ctaaaaaccgatacattaaacatagctagccatcatttaaaaatagttatttctttgttaacctttatttgtttatttatttttcatagccagtgaacattagcgaacatagaaaaacccttaaagttagctacatgggcattttcaccagtaactctgaagattcagctgttttcattaaaccagcaacattacatcagtcttacttatccaaaaaaattacacaaagatcattttgtttggctgggttcatagttttataaccttttatgccaaactctgacacttcaaaatatctagcagagataaaaattaacccagaaaaaaaaatgcatgctagcaattctgaagaatttctgtttttattttaccaacaattttaaaaccagcttatttattaaaagtttacttaagtcctgtgaatttgagaaatactttgggcttaatttatgaatgcttttttatttttaaaccaatttggtaggcacgacatataacataataaatrtacatacataagcacatccagacatgtatacatatgcataagcaaagatccaatagatttacctcagagctctagccataag

SEQ ID NO: 317338 - DNA, 461 bp, Homo sapiens
ggtcggtttccattgctggctatctgcctactccaacatacctacaaagtaactctacattttgtttttaacagagcagaccaaatttaggctggttccacagttacagccacattaaagtagtgcagctgctttggagccagccacatgatcaytgcttaataaagggttgctgagtgagtgaagaaatagagcaagcatgtgttatcaagttatcagtgtctgtagcatttaatgaaaaaatatattccaactgctgtggacaagaaatgacaaacctcaccaataagctgtgaggctaaagaaaaggagcaagttttagaaagaaattaatctctgtcgtgaaatcaacaatttcttattgacacaactgtgctagacatagcttttaagcaaaaactcccaatgagacatatctgtcttaactgcagtaaagttctgtttctgcctgtaactagaat

SEQ ID NO: 317339 - DNA, 453 bp, Homo sapiens
caagactgtgaaacatacaaacgtataaaccaaaaaaccaaccaaatgtgctttctactttttaatgctctaaaataaatttataaaaagtatttgaaaacatgatcatgggtaacgttcaaatttcaaaaccacagtgaataatgcactatttccctgatattttaaaaaataaatgttccccaacagtagagaaggcatattttgaaaaaaatctcacttgtcattttccatacaagttgagaaacatgatgagcaattagtggatgmaataatgcagtgcaatcttcagaaacctcttgagggtatcagaaaaatatcctatttgaatattgggaagtgaggaagtcaatccagtctgatctatgcaatttggcctttgaatatctaagttgctgtcaatcatcctttctgaattagtttagcacagcaggaattactaacttatgcaaa

SEQ ID NO: 317340 - DNA, 614 bp, Homo sapiens
aaatccacctaacccattatatttttctttttgaaatcagttggcaaatttacccaaagtaataaaatctacttttcatttggattatcttattttggacaaaataatcacatgcatgtaaaagaggcagaatgagttataaattcaacatttttgtttgtgagagtagttttaaagaatgccagaacatttttatttttactgtatttaaggataaaacaaaatcaaacaactgctcatttgagtcaagataaatgttcacaatatttttgtaaggaaaataaaagggtaaattaaaatacctttttgtttacttactttttataaagtagcacataaatctgattggataacatacccagcccgygagtttatataatagatataattaatgtctatactttgctgctgcagagtgaccagacatgggcacagaaagatgagttccaaggactcctgagtgatgtctttcttgccttctccattcaaacactagctagatgtctgaggcttccaggagccaagtttgaacataagtatcttaaagccaagcttttttgctcttagctcttagttttccaaatggagatgttacatttaatgaaaatgaaaac

SEQ ID NO: 317341 - DNA, 592 bp, Homo sapiens
gaccccaaacttgcttcatttgcaaacataagtgaaataactgaagctatttattgtaaatgccyatataatttaacttaaaaacataacatgctcaaccaatcagaagaaaccaacaaacttataattagattactaaatattttccaaaggatagaccaaacaaatctgtataactgtgcaactgtcagtgatcaaatatttgtctgtcttctctgttagtcccacaaaagccaatatcttatatttcctaagggaagcttctaaacaacttctggtttagagctgtccaaatcatgactattgtttgctcaaattaactcttcaaatttttagtgtggctcagtttattttttaacagagaaaaatctgcctgggacctcaagttttagatggaatgtttaccgtagaatctacatgtcctgccatctcttttagctcagaaagggagtgattgtgagaaaagttttgaaggcctgaaattctgtcctacgtttccatacctacctcattgagattacgtcttttttcaatttcttagtgctttaatctgtttgtcattttattttttcttttcatatggcatttccat

SEQ ID NO: 317342 - DNA, 512 bp, Homo sapiens
aatctacgtaactgatatatgtctctaaatgttaggttgtctaaaattattgtaataaatgttttgtatttatgagtatactggttttcgtacattgtgttaaatrtatcctaaactattttgtcatttaatgctattttaaatgacattttaatttcattttctgattttttttgtttgttaatgtatgaaaatgcaaacaattattctagtagatcttttaggtttctttttatattccaccaactataaagtcttgctttctctgaaagaatacatttttacctagttctttgtaatgagcatactttgaactccttgttcccttggctaggaccttcagaaaaatgttaaactgtaacggtgcaagtaagtatccttgccttcttaatcttggagggaaaatagtcattcattcattattaactacaaagtaacaagtaggtttttcaaggatacctattatgataacagaaatttttcctttgaatcctagttttatgatagacatc

SEQ ID NO: 317343 - DNA, 512 bp, Homo sapiens
aatctacgtaactgatatatgtctctaaatgttaggttgtctaaaattattgtaataaatgttttgtatttatgagtatactggttttcgtacattgtgttaaatgtatcytaaactattttgtcatttaatgctattttaaatgacattttaatttcattttctgattttttttgtttgttaatgtatgaaaatgcaaacaattattctagtagatcttttaggtttctttttatattccaccaactataaagtcttgctttctctgaaagaatacatttttacctagttctttgtaatgagcatactttgaactccttgttcccttggctaggaccttcagaaaaatgttaaactgtaacggtgcaagtaagtatccttgccttcttaatcttggagggaaaatagtcattcattcattattaactacaaagtaacaagtaggtttttcaaggatacctattatgataacagaaatttttcctttgaatcctagttttatgatagacatc

SEQ ID NO: 317344 - DNA, 512 bp, Homo sapiens
aatctacgtaactgatatatgtctctaaatgttaggttgtctaaaattattgtaataaatgttttgtatttatgagtatactggttttcgtacattgtgttaaatgtatcctaaactattttgtcatttaatgctattttaaatgacattttaatttcattttctgattttttttgtttgttaatgtatgaaaatgcaaacaattattctagtagatcttttaggtttctttttatattccaccaactataaagtcttgctttctctgaaagaatacatttttacctagttctttgtaatgagcatactttgaactccttgttcccttggctaggaccttcagaaaaatgttaaactgtaacggtgcaagtaagtatccttgccttcttaatcttggagggaaaatagtcattcattcattattaactacaaagtaacaagtaggtttttcaaggatacctattatgataacagaaawttttcctttgaatcctagttttatgatagacatc

SEQ ID NO: 317345 - DNA, 369 bp, Homo sapiens
agatttgacacaatcttaatatttttccaaytaactatgttggacattttaaaattcaggttctaccatgaatcatttataattgtgttacaatgaacatttcacagtctttcaaattttcataagttaatttttttaattttccagaatcaattaattttacagccagctatgtataaatatatattttgttcagctggttgagacacagattgaatcaagtcaaatactttgctcttaaaaaaactaactggttttaagctgtgttaatcaccaaagagtctggttaaaacaagttgaatgaatccatgaaaatccatcaccatgctgggaagccatacagaatactttatttatagatgttgtgtc

SEQ ID NO: 317346 - DNA, 605 bp, Homo sapiens
aagccatcttgcagaaagaatgaagtatgttacacttggacagacttttgtcacaaaccattttctgctttgtgggcccaacagacgtggttccaggccactgtgtgttctccaagcccattgaatccccttaaaaataataatatctcctttaaaatcatccatatttccccatctccctttctcctatgraaaaaaaagaagtatataagcatctacaattaagttattgagtaattattgagttattgaataatttttctgctgcaattggcatgtgctatgcacattaaaataaatttcctattccttttttcctgttaaacttttgtcagttgattttcagtgaaacttcagagggcaaaggggcagctttcccttcacctctacactattttcctccatgttaaggcacagcaagaagacagccattggtgaaacaggaagaagaccttcatcagaacccaatctttgtggcaccctaatcttggacttcccaacctccagagttatgagaaataaatttatgttgtttaagccattctagtctataatattctgttacagctacccagactaactgagacaactagaaatctcagaat

SEQ ID NO: 317347 - DNA, 605 bp, Homo sapiens
aagccatcttgcagaaagaatgaagtatgttacacttggacagacttttgtcacaaaccattttctgctttgtgggcccaacagacgtggttccaggccactgtgtgttctccaagcccattgaatccccttaaaaataataatatctcctttaaaatcatccatatttccccatctccctttctcctatggaaaaaaaagaagtatataagcatctacaattaagttattgagtaattattgagttattgaataatttttctgctgcaattggcatgtgctatgcacattaaaataaatttcctattccttttttcctgttaaacttttgtcagttgattttyagtgaaacttcagagggcaaaggggcagctttcccttcacctctacactattttcctccatgttaaggcacagcaagaagacagccattggtgaaacaggaagaagaccttcatcagaacccaatctttgtggcaccctaatcttggacttcccaacctccagagttatgagaaataaatttatgttgtttaagccattctagtctataatattctgttacagctacccagactaactgagacaactagaaatctcagaat

SEQ ID NO: 317348 - DNA, 571 bp, Homo sapiens
agtaagtaagatagagtaggatttattaagtgaaaggaaagctctcagctgtgagaggggaccctgaaagtaggttgcttccagggtatctgtggttggggaccttcatgtggaagaaataaggaagtcttctgtgggttttgccttaatgggaggggtaaaattccctcctagggttattgcatctgcgcttgcctggggttggccatagtgactccatcttagttgttacctatgagtggctaagcaaaacccatgggtggggggactaaaaccacaatgctaatgtcatgttaatgawgttataatgagctgggttaagttaacgacatttagattgatttattgtgccttcacctaggttaggacagtccttctaagcagacatcctggcataggaggaagctcttaaccacatttcttttgctagctgcagaggcagtgttggtgctgtcccgcaggtgttcctgtgactattgcctctctcccgagacctccctctctgtctaaccagtctctaactgcctcctctctcactagcatgttctgcttctgatttggctttgtaatt

SEQ ID NO: 317349 - DNA, 636 bp, Homo sapiens
cacacacacacacacacacacacacacacacacacacacggtgaatgccatataaacatgaaagcggagatgagggtgatgtttctccaggcccaggagtcccaaagattgcccgcaaacctccagaagccatgggagagatctggacttcagaagtaaccacgcctgtccgtacctcgaggtcagatgtctaacatccagaactgagacaataatttctgttgttgaagccccactgtctgtggaacttccttatagcagctgtagcaaatatacaaatcatgccaagctaaaaagagaaaatacagatgaactaattatattgttgattttcctttaacataactatttgttcccaccaagaatttagtttcttatctctaaatgattcaagtcaaaaattaatcaatgacttgggtcactttagctgttacttagaattaccttccatactgactttgggggrtaggggcctggggcaatccctctctggcctctggttgacacacgcgctaactggagctgttgatgattaatgctacacatcaggtcagctccttcctgctcatgtatcataaaggtctcccgcagctcccagcagtatcatactaattcagtgccctagcaaaattagca

SEQ ID NO: 317350 - DNA, 621 bp, Homo sapiens
gcctgaaatcacaagatggtagcctgggagtctctgggaaatataagtgctatctgttgcttaaaattcacatttatccccatcttcactataccatgccccaacacctacgggctcatgactgactttaagatcgagataagtctgtaaataaaaactgaaaagggtgtttttgttaaatttccattatatgtctagagaaaaattagcattgttttgaaactcatctagcatagtgaaactgcaaaatgtaagagaaacatcactatccctgtattggcatagaacacaatactgtattcaggaaaactctgtaactcattctaaaggtccagggtccagcattcttgttccaaaggcacggggtgccacagcatagcactgcctcatataatgataatgaaagcagatgctaaaagctggtgtcattaaacggttgagtttgttttgtagaaacagctcaggaacaaatactgatgacagtttgcaggcaytttcagggaagagtagctttaataaatgagtatgataaaaaatgatttgcattgtaaaacaagtatttttcctttaaaaatttaatttaggatttctacattctattctataattttctgttttgct

SEQ ID NO: 317351 - DNA, 463 bp, Homo sapiens
ctcagtttaccataacagcttttcttcttgccatatttccctgtctcttctatgctaggaacactagactactggctaattccagcagatgtttaaatttcaccatcaccatgtctttactaccagggtcctaatattgaaatgtttttctttcttcctcaccctctgaccctcttagtctgttgagattttgggtagaatcaayggatcaaccaattttccccagagaatctttcccttattttgtaataagaattaattttcatcgctttgtactctttgtggcatagtatttagcctaatctacctgaattagtactaccatcagcattactttctccactaatgtatgggcatttgtcaccagagaagatctcaaattcaattttgtttcttcctccttagtacctggaagagttttcgttgagtataatatcaatgagcacgtagtgaaagaagaagg

SEQ ID NO: 317352 - DNA, 625 bp, Homo sapiens
cattaattatttcaagacactgtacattgcgctttcacacattttactttcagatggttcttgaattattttcttaactatataaattttctacatagcagaagtcaagtgaagttttattgtttctatatttattgcagtatatgttaaagggagtacaaacaaggaagaaatttaataaatgcttattaatctccaaaatttggctaaccattgcaaatttgtgcatgagatttaaatgtattgcttgatttatttgtgattctgactttatttttaaaatcattataaaatcagttaattttttaagttatgttattaacaacaatgtcttatgaaatataatgatwtcttttttatctttagtgaagtaattcccacttaacctgaaaagagccagtggtaactccagttaataagaatccctgaaacaaatgtactagcttagaaatggctgaattgaacagcttatagttctcacattaattggaaatgtttcttcttttattattgtcaagttagttacatatgctagtaaaattttaatatgttttttaaaatttaaaaagtagtattgacacatgatattacaacagaatattttgaccagaaatattgtgctgct

SEQ ID NO: 317353 - DNA, 565 bp, Homo sapiens
tggctggggaggcctcgcaatcatggtgtaaggcaaagaggaacaagtcacgagttacatggaggggagcaggcaaaaagagagagcttgtgcagggaaactcccattttagaaaccatcagatcttgtgagactcattcagtatcatgagaacagcatgagaaagacacacccccataattcaatcacctccactaggttccttccatgataaatgagaattgtgggaattacaattcaagatgagatgtgggtggtgatgcagacaaaccatatcagcctgggttaaaataaaaatggcratggtttagtctggagtctttgttttgtctaatttgcttctgtctcatgtccgtccctctagcctggagttcctgcttcctacttcaggacttttattatgaattatttcaatagagaggcctcatgatcacaatagttaagttttgaatccctgcagttgcaaggttgcaaaaataatacaatatttttgcaattttaaaagcatttagtactgaaatatcaactattaaattacttcctatttacatattcacttttccct

SEQ ID NO: 317354 - DNA, 565 bp, Homo sapiens
tggctggggaggcctcgcaatcatggtgtaaggcaaagaggaacaagtcacgagttacatggaggggagcaggcaaaaagagagagcttgtgcagggaaactcccattttagaaaccatcagatcttgtgagactcattcagtatcatgagaacagcatgagaaagacacacccccataattcaatcacctccactaggttccttccatgataaatgagaattgtgggaattacaattcaagatgagatgtgggtggtgatgcagacaaaccatatcagcctgggttaaaataaaaatggcaatggtttagtctggagtctttgttttgtctaatttgcttctgtctcatgtccgtccctctagcctggagttcctgcttcctacttcaggacttttattatgaattatttcaatagagaggcctcatgatcacaatarttaagttttgaatccctgcagttgcaaggttgcaaaaataatacaatatttttgcaattttaaaagcatttagtactgaaatatcaactattaaattacttcctatttacatattcacttttccct

SEQ ID NO: 317355 - DNA, 577 bp, Homo sapiens
tttagtcaaattattttaacaagacatataaaacccgatttctataagtctcagatgattaaacatactttttctcctatttagtccagagaaaccagaaaaactgctgatattttcatctgactgtccagcatgtaagcttaggttaaaagttccgttttcccttgatacctattcatattgaattttgaatagccttcttcaatagcggttttttgatagatgtcaatgtctttacccttggctctgatgtttcagaattgcttcagttagtctgagtcctcatgatctcccactctgtgggccactttgtatacactagactctagaccaaagcagaagcatttttactgctttgattcagtagaatcaagaaagactatatttcttttccttttctttcctaacctttagcttgaaaaccaggggacttttacacagcactttacaattgtttgagtttcatgaattctcaaccagtggatgaaactggattgagcactgatttgattgattattgccctggaaatgcttgagtmcttatgattgttcatcaggagaaaaatgttaaaaacaa

SEQ ID NO: 317356 - DNA, 612 bp, Homo sapiens
cactggtcctattatttaattaattcttagattgtattgccataatgtaaagaatattttcaagttataacaaatgtgaatgccaaataatagcacaggtgttgtaaaatttttctggaaaattccaatgtatgcaaatgaacattgtaacttagaagaagtgctgaaaaaatggaggaaaatggatatttctgtttaacagctaaagtgatactgatacagggagaggccaaggaagtgctgggtagaaaagggtgggatctctgacaagggttccaccctcaggcttgtgcccatgaacctaagtgagaacaggcactcctgtttctgcgcccaaatgttgcattttctaagaccattctggcccacaatgccccccatcctatgcccmtaaaaacctgagaccctagcaggcacagccacaagcagctggatgtcaagagaagccgaagagcacaccaacagacaccagcagatactagcaggccattggggtgggacaatgtgaaatttggttgggggcagtcagaagagaggccaccaggctgcccaactccaggagaagaccaccttcccacttcatcccccttctggctccccatccacctctct

SEQ ID NO: 317357 - DNA, 566 bp, Homo sapiens
gatagttttctttgttagtgaaggatcctacagagatgagcacacagtttctttatccaacaatgaattatcwgtcccgtttaagggcacaggtttctatgcctcatagcctaacattgagtcaacttcatagcttagctcaaattccacctccaagaatcctgtctcatccacacaccacatggctaggaaagagacatatcaggaaataattgagaacttggataatagactgcccccatataaaggcaacaggatggagagtagctgcactagtcacctacaaaaggcaagcaaggtgttaagctgatgaacgttagcatggggagggagaccaaagtgtcacaaaaattagcctttcctatttagattgcccacaaagctgatgacattgagaaactacccaggactcctgaataattcacatgcatttctcaccagctgattttactcatttaaaggtttcttttttctgtgacccagaaatatacagacatacaccggagcatgttatcagtctaaacctcatgaacagagacatgcactagctactgtgtggaattatg

SEQ ID NO: 317358 - DNA, 555 bp, Homo sapiens
caccagctgattttactcatttaaaggtttcttttttctgtgacccagaaatatacagacatacaccggagcatgttatcagtctaaacctcatgaacagagacatgcactagctactgtgtggaattatgcaaaaagcagactttacttcttttaagtttcaaatgcatcagcgtccagaagataccacatcaaagggtattgtggccaagggaagccaactaccttccatactccacaatggaacccatctaaaagggttgcttgatggcaatacttaaatcctttcttctaaagctcagctgggagaagttacactgatgtacccacaaggtaggtgagtctcccagttgatttcaccagtagtttgttgaaactttctcaaaaaacattaagtctaaattcttatttgctttrgcttataaatgagttcaatatttatggcaaagtgttttttgaggattttgaaactctctctactattttctctagtcatttataaaataaaaataaaaaatttatggatatgtttcccaccaaagggatctgtgggat

SEQ ID NO: 317359 - DNA, 568 bp, Homo sapiens
gaaaaaaactgcatgataattctccagatcttccagtttggtccctagaatctgaagggcttttgaaaattgaagttggctatagtttcttccccagctttggtgattacaattttaaaaaaaatactcatcatgatttatctratattcattttaatattgcatatttactaatgtttactgatgggctatgtacttgggataatagtgacaaatttaaggtgtcctaagctgtggtgatttatcactgaaacttgaacaattactttttgtctggaaataagtctgcacaagctgacaatagctatcactaaagcaactttgttctggatttaaaatgaatatataatatactactaataggtttatgtttggcatctatcatgcaacaaagcaaattttttgactagaatattttttacttctattggaataaaaatatctcatggaaactgattgctgatttgttagaggttttaccactgcttgctcagatgttagtaattcattctgctgacagagttgcaaaagccactggtaaaacattgcagattccaaacttagaagc

SEQ ID NO: 317360 - DNA, 591 bp, Homo sapiens
atcaaactcttaaaaaattcattagctaagattctgaaacctggtataccaagatggcctagagctttaccactagccttgtttgaaattagagtgatctctataagcaagcacagaatctctccctttgaatttatctttggaaggcctgtgaatttaggtctaggatcatgttttgcactttatttaactgaatcctttaaaagtcatgttcaatacttaaaaggacttttccctaggaaccgtgagacttaaagtggcaaggacrtggaagaatctgctggaagaagtcagccacctacgttaaccaggagattttatttacataaaagtctcccccagtaaagataattgcattggaacagactttttgaaatgttgatgatcacccacaggactatctatgtgaaaataataatgaccttaaaccaacaacaacttgaaaacttgatttgtgtttcttataagaagccaactccttagagtgactggactgaggattccacaaggaatttggacttgaaattttcagaagttattgatattggtactgaactcaactgaagaggtattcttgcaaacatattacta

SEQ ID NO: 317361 - DNA, 550 bp, Homo sapiens
ccatctcttccagaaacagccttacaaacatgctcagaaataatgtttaagcagctgtttcggcatatcctggaccactgaagtagatacataaagttaaccatcacactagttaagaatctgatgtaaccattatctatttatatgataaattcaaagcttattcctacaaccaatagtgtagagacttttaaaaatgtacttgttttgttgttttatcagatttctggcaattgcattgtgttgtatgttactgtcgactttcgggttatttagagggctgcaacttgtccagagaaagatgaaaatagcaatgaagtcagaaatttgtagtgtcactattttatactaacaaggagtgtattgtctgggtaaatacaaattggaaaagaaacaattctctttgttgaaaatacrggaagagacatccatcccctccctttcttagggcatttactttagaaaacttgcagatggaaatttttgtttgtgtctttaaaaatgtgtgtaaatctttttaaatgtcaaataagcctcttgcctggtgaaa

SEQ ID NO: 317362 - DNA, 571 bp, Homo sapiens
tatttatcaccaacatatagtgtcatattttcatttgcctcaactaatcatgaatacctgaaaggcaaagtccrtattttgcttatattttttatactcatgcctcgtactcaatagatattcaattaagataggtttaatcctgttgtgttcaggagatatatcaaatgtatgtatgatgagaaacatttgaaatactgtagaatagaaaagagcttctagaccttcaaaaacagctatatgttatctccaatctactctcataccagcttttctttctctcctcacatataccattttcctcaagaatttctgaaatatttatttgtaattgctaaaatcttcatttttcatggctctgtacatttatatgtatgcctgcttcccttccccctatctcaggaatgcctctccacaaacagttcctgggcctgacacactgattgctgtgtttgtatctagagaagagaaaggatgactaagggaagtgagtaaggggtagatttacttttgaaatgtacttgcgtatcttttaaattttgttcatgtatgcattcactacttaaaaaca

SEQ ID NO: 317363 - DNA, 571 bp, Homo sapiens
tatttatcaccaacatatagtgtcatattttcatttgcctcaactaatcatgaatacctgaaaggcaaagtccatattttgcttatattttttatactcatgcctcgtactcaatagatattcaattaagataggtttaatcctgttgtgttcaggagatatatcaaatgtatgtatgatgagaaacatttgaaatactgtagaatagaaaagagcttctagaccttcaaaaacagctatatgttatctccaatctactctcataccagcttttctttctctcctcacatataccattttcctcaagaatttctgaaatatttatttgtaattgctaaaatcttcatttttcatggctctgtacatttatatgtatgcctgcttcccttccccctatctcaggaatgcctctccacaaacagttcctggrcctgacacactgattgctgtgtttgtatctagagaagagaaaggatgactaagggaagtgagtaaggggtagatttacttttgaaatgtacttgcgtatcttttaaattttgttcatgtatgcattcactacttaaaaaca

SEQ ID NO: 317364 - DNA, 566 bp, Homo sapiens
ttttgtacttcgaatatttttctacttagcagagttctcacaaatctattatggctcaaataagggctgttgcatgctccagtatgataggaaaatgtgaaatggaaaaggcaaaagacattttgttctttaaaactaatgttgraaaacaaactttatgatgaaagctctggacctcactaatgtatgaaaaacaacttctaaaagatgtctgattttgacagataaattataattgagttctaaaaactgaaattttgatatattattagagaaatgatattaatattttcagtgcgtgatgatgattataatagatcctttttctactctagagagccatctaaataaagtcctagtttcaaaagattataaagtttatttcacaatgagaaccattcaatataaaaacagacaaatagatgcatggaagagaatagagaactcagaaataaagctgaagacctacaaccatcttatctttgacaaactcagcaaaaataaatattggggaaaggactctttttttttagaaagtggtgctaggataactggctacccatgca

SEQ ID NO: 317365 - DNA, 566 bp, Homo sapiens
ttttgtacttcgaatatttttctacttagcagagttctcacaaatctattatggctcaaataagggctgttgcatgctccagtatgataggaaaatgtgaaatggaaaaggcaaaagacattttgttctttaaaactaatgttggaaaacaaactttatgatgaaagctctggacctcactaatgtatgaaaaacaacttctaaaagatgtctgattttgacagataaattataattgagttctaaaaactgaaattttgatmtattattagagaaatgatattaatattttcagtgcgtgatgatgattataatagatcctttttctactctagagagccatctaaataaagtcctagtttcaaaagattataaagtttatttcacaatgagaaccattcaatataaaaacagacaaatagatgcatggaagagaatagagaactcagaaataaagctgaagacctacaaccatcttatctttgacaaactcagcaaaaataaatattggggaaaggactctttttttttagaaagtggtgctaggataactggctacccatgca

SEQ ID NO: 317366 - DNA, 606 bp, Homo sapiens
gactgttctcaattcaacagtgtattgaaaacctgtggaatgttaaaaaaaaaaaaaaaaaaaaaaaagggagagagagagcaagatggaaagaaacctcataaaggaaaccaacatgcacatttatgaagttaaaatattatccttctagcacattaggaatctattaatgtgacttaattagtgtggttaggtttagaaacattcacgtaatattcttttactttttttaatctatcaaatataagtgaagaagtatgtgtcacggttatatgattttttgcaagattataattaagaaattttcaagacatttgcagttgcaatacattaagatagtctatttgatatgatgatataaacctgacacaaaatacttgttacacattgcatttagtttcaataatattttaagaaagatttgtgaatttgataaatatcccttaaaataattcaacattttcttgagtgtcaaaaagtaaaataaagttggaattttagggcacgtgtaagctatgataggtagraactgaaagataccttagagataacgtacttcctgtctctcatcttatatacaatatacaagcaaaggaattaatttga

SEQ ID NO: 317367 - DNA, 584 bp, Homo sapiens
agtgtgtgcagttttaggtgttttcttgctattatacactagtagtgaatcatgttgatgaagtgatgcagtgtaatccccaccttgttaattgtgtgataatgcagtcctttgacatgattcttatcctttcaaaagttgtcacattcaaaacaagcacttttttaaaacaaataaaaactcttagttttgataaggcaatagaaaacacaaagaatgagagaaaaatagtgaatcaggcctttaagacatttaaactagagtaatttgtattccgggcttggttccaaaattaagatcttgatgtgtgtgctttctgactttgatttgaaacacaaattgtagaaattggaaagggaaagggtgcctcacataatttcgatgcctgctttctgagcaaagccactctgagagagcctgagygctttgaacaacctagctttaatgtttccacccctgaatccttaatcaaatagattgcctcatcagaaagattttttggaacactagcttaaactttaattttcctttaacaaagcaaactcccacatttttccaaaatatgtatcatgctctgcatgata

SEQ ID NO: 317368 - DNA, 595 bp, Homo sapiens
tgttcttctcttggcatatttttactgtccgagccttcttcctgctgtgtgttgcccttgagatatccacagggcttactgtcttaccctgtgctcaaatgtcatttccttaatgagtctttcctggtctatgctatttaaaaattttcaacatgcctctccttctgaagtagcctgcctcattccccttatcctgctctactttctctttccgcctccacctcccacaaaacttaatcatcattaaatataatctaatttacaaattgctatttaaatacatttcttggctctccctccccatgagaacataaggtccatgacaccaagaatttatgcattttttcccactgatatawcacaagtgccaagcacaaaagtaggcttttgataatatgtatagagtaagctaatgcaagtgttttcatgaaagaagttgtcttgccttattttatctcttctttatgtattgttggtttttagtgaaatatatatagttaacagattactaattcgttttgaaatctaaaagagaaatttaagaagaatctaaaatgtaccattcgtttcttattcatctgacagatatttagat

SEQ ID NO: 317369 - DNA, 590 bp, Homo sapiens
catattatgccattgagttcatctgtatgatcaaaaattcataaaaattaatctaatatttaaaaaatcttcttattcttttaaatagatttacatttgggttaaaagatgactaaaattaatcaacaaatactctttcctattgttattcacttttgaataaatragtatcagtaatttaaagtgaaagcagtttcataagctgagtagaaaaagtttgccacaaatagaaatgtttcagttcaataaaactgacaatctaaaagatatttaaaaagtgtcaaaattgaagtctttatccagagaagtaaaaatgagaaaagtgggtatcatttttctattagattattagaaatttaggttatgtgttataaaattaagctgcccctttcttaaagttttttttttttggaacatatctgaatgattacaacatcaatatttttatttttatgtatatatcctgatttactaaacttattgacttcagatgattaaatgtcctaaaagctttatagtatacttttgttattttactgtcagtatctatggtaatgtgaaagtttaaaaaatataagcaaaatttaccc

SEQ ID NO: 317370 - DNA, 582 bp, Homo sapiens
acttggaaacctgtcttaggtagacaaatgtgaaacaataattttctttgtttctagtaaacatgctcttgtttctgttcaagctaaaaggaagaaacctaggaaatggttggagaaaaaaattactaaaagcaaaaattcatgtaccagttaataggacacacaatgagctaccaagcgatgaatgacagctgttaaattaggagccatataaacatgagtagaaaatagatgtgcagattctccttgactgatgatgcggtcacatcctgataaacccatcacaagttgaaaatataaattgaaaatacatttgaagctggcaacacagcagacaacctcaaacttattactattcaacatatgtttttatgactttacaatggtgcaaaagtactattcttttggtagaaagtctaacctcataataagacataaggagctcctcgacttaacatggggtcactttcctgatacattcattgtagagtcaaaaaatatgggttaaaccatcataagccgaggattgtatgtacasgaaaaagagaataagaaatgctaattagataatctcaagcaaat

SEQ ID NO: 317371 - DNA, 570 bp, Homo sapiens
gcatatgtcatgggcctagggatacatccattgcagggaaatgggagtagggcattcccagttttagctataattgaaaattattcttagggacgaaaatgccattgaataattctgccttttctcctccttgttctctctctctctctctctctgtctctctcatatctatcttctttctttctttctttctttctttctttctttctttctttctttctytctctctctctctctctctctctttactaagtctggaaacccttagagtttctcttgaatatatcaagctaattatttttatttttattcactacctttcatgcatttcctacttccaataatccttttttattaagtctcccaatccaagtccaccctcactcaaaagtgaccttcccagagtagggtgtacaatgcggagtccacataagcatctctatacttctaagttttatgccaagagcatgcttattttaataagcaaaaaacaagtaacaatgaagaaaataatcataaagtaaaaatccaaaaaaatagaataacagaaggttttcctcagaattaaaa

SEQ ID NO: 317372 - DNA, 546 bp, Homo sapiens
tttcttactttaagtcatttcactaacaagcctaccgaatgcatttggaaacgatctttcattgatcattttctattattaattatggataagcagagattttttcaaaagcccctgaacctgcttagcttgtacaaagatgccacmaatcagagcccacgggttacaggaattattgatccttctataaaacggtcatgcaatctccttcctgaatccagtaaaatactgaataataggctgaaaagacatcaccatagtattaatccaagtactgaattgaacaatcagtgggcaatctttagttttctccttatgttaatggtagttcaaacaataactttgtattatgtatttttctattttatgtttttcttgcaattataacatgtttcagaaagtttttctagcatctcaccatccataaaaattctctcaggaggaggaagaattttccttgtgacaatttcagagacattcttatttttagatagaatttttaataaactctaacaatttcctgactgaacttcagctggtacccct

SEQ ID NO: 317373 - DNA, 546 bp, Homo sapiens
tttcttactttaagtcatttcactaacaagcctaccgaatgcatttggaaacgatctttcattgatcattttctattattaattatggataagcagagattttttcaaaagcccctgaacctgcttagcttgtacaaagatgccacaaatcagagcccacgggttacaggaattattgatccttctataaaacgrtcatgcaatctccttcctgaatccagtaaaatactgaataataggctgaaaagacatcaccatagtattaatccaagtactgaattgaacaatcagtgggcaatctttagttttctccttatgttaatggtagttcaaacaataactttgtattatgtatttttctattttatgtttttcttgcaattataacatgtttcagaaagtttttctagcatctcaccatccataaaaattctctcaggaggaggaagaattttccttgtgacaatttcagagacattcttatttttagatagaatttttaataaactctaacaatttcctgactgaacttcagctggtacccct

SEQ ID NO: 317374 - DNA, 546 bp, Homo sapiens
tttcttactttaagtcatttcactaacaagcctaccgaatgcatttggaaacgatctttcattgatcattttctattattaattatggataagcagagattttttcaaaagcccctgaacctgcttagcttgtacaaagatgccacaaatcagagcccacgggttacaggaattattgatccttctataaaacggtcatgcaatctccttcctgaatccagtaaaatactgaataataggctgaaaagacatcacyatagtattaatccaagtactgaattgaacaatcagtgggcaatctttagttttctccttatgttaatggtagttcaaacaataactttgtattatgtatttttctattttatgtttttcttgcaattataacatgtttcagaaagtttttctagcatctcaccatccataaaaattctctcaggaggaggaagaattttccttgtgacaatttcagagacattcttatttttagatagaatttttaataaactctaacaatttcctgactgaacttcagctggtacccct

SEQ ID NO: 317375 - DNA, 563 bp, Homo sapiens
tgctttaatgggaagtattgggtggctcatcccagtaggattaggcatttctgagggcagttgtaaagagacagggtagtgcctggagagaacagtggcacccaaagatgggaaaggtataaagaaaagactggtcasttattcgaggaaaatggtagttaaaacatgtgcccatttcaaacttttcctcaagcataacttagaaacagtttcccacgtgccagcaaatgacaaaaggaaggaaaagtcactttaacatctaaaacagctctgcagagggtttttacaactcctttgcattaccagtgcagagagcaattgtttcacaaagtgtatcgtaacacttgaccaaatttatatcatgtttatattcttcttaaaacaaacagaaaatacaaatatctgtctgaaacagatctgtgaaactgtaataacagaaacaagaaatgagtttattgttcccattaggcctgctgttctatctgtttgacctatgctaatttttgccctcagtgttcatggataaggaggaaggcaaaatgagtccaccctccaatataatg

SEQ ID NO: 317376 - DNA, 629 bp, Homo sapiens
tgaagcttataatttctgcattctagaggaaaaagaaagtttgtcatccatggaggaaagtcagttagatgtcccttcaaaaagagactattgcaagcatctgccaaatgagccgctatagcctttggttgttcccagccaatgactgaactgagagtgggtactagagatgggtcacttcagcctacaggggggctcccttaataattaatctctgctttttgggtctccccacagggcacctggccaataatttctcgaagctacattgtagtctgaggctctttttacctaattcttcttcccaccttcttaccttattcagatgtcagccttgtagtatggtctgaaggctgtccatatccactttactcaccccctgtttattctagaggtgtttccccctctaaagtctcttgcacttctaattccatcttagggtcttgttgaaggcactgcactgatacagaaggtagcaaattttgtttcactttaatacwttaaatatgaaatcgacttctagacttatatgactggccatcatatgcttactactgctccaccctactctaaggtttcaggaaatccacaaagtgaaagaaaaatcattccaattataatgcaaataa

SEQ ID NO: 317377 - DNA, 549 bp, Homo sapiens
aaaaatgtctttgtcctaatcctcagaacttgtgaatatattacctttcaaggcaaaaaagacgtctgtatagatgtgattaagaatcttgatatagggagagtgttctagcttatcagaatgggtacaatgtgatcattaaagtttttataagtggaagagggagacagcagtgtcagagagagatctgaaattgctaccctgctgactgaagrtggacgaagaggtcatgaaccaaggaaggcaggtggcctccagaagctggaaaaaggataaattttccctaaaagctttcagcagaaacatggccaactccttaattatagctcggtgaagacttctgacctccagcactgtaagataaggagtgtgtgtgtgtgtgtgtgtgtgtgtgtgtgtgtgtgtgtgtgtgtttcagtgctgtgttacagtgttgtaacacttagtttgtggcaacagcaataagaaggcaatatatcatctcatacattccagagaaagcaaaaatagatggcattaactctatataaccctttacctaaaacataa

SEQ ID NO: 317378 - DNA, 571 bp, Homo sapiens
cagttataagtgagtgcaagtgaccactcttttcctttaccccagtgtgtggtacaaatattagctttttttttcttggaaaattttgtggaaaaggttaggaagcactgatatatttagttcaacaaaaaatttgcagactaccttttacaatattttttacacacttacaaagattctttgcttgaccaaagtttagtccagcttcttaaccttctcctgggcccatctatgcacttcttgtaaaatccaattttagcaaagagccctgctaagttaagtcagtttagcaaaaactcacagccctcygtatcttatcacacataatatcagattaagtctctggttctccaccatcctccaggtgatgcctggtcaccttgcctgtcttcagcaagaatccctttaggttgatttagccagaatttctcttactcctaatgttttcttttagtaattttccatccactgacctccaccctgctgcttagctatacatttccacttgttcatgctatattgagagttgagcccaatctctctcccccattgcaagactgttgcagtggtc

SEQ ID NO: 317379 - DNA, 589 bp, Homo sapiens
attatcaaccccattttccagatgggaacatagttctgctgagaggttgagcaatttgctacaaacagaatgtggcagagccaggactcaaacatatgcagtctggctccaggatctaggctcccarctaccacccaatgtttctgaagagtggcggaaggtccaggccaccttttccagtggcttgccacccaaaacatacattttccttctctttcaaaatgttctgttcttttgtcttgatatgtatgaaaaagcattttcatctccattttattaaagatggaaaattaggattcatgcttttggcatataatttatatgaatacaaaaaatgtgttttatttggcttttaacaaacccctgttacagttgtgtgtacatacatgcatacagaattgtagtgtgtgctccaggatttttgattctattattccagtctggctcctacctatctatctttggaattttttcagcttgtccacttttacttccacctacaacatcatacacataaaaaaaaaaactcagtgattaggcacaggaaatgtaaatggtccttgacttttggttgactgtccttgcattg

SEQ ID NO: 317380 - DNA, 589 bp, Homo sapiens
attatcaaccccattttccagatgggaacatagttctgctgagaggttgagcaatttgctacaaacagaatgtggcagagccaggactcaaacatatgcagtctggctccaggatctaggctcccaactaccacccaatgtttctgaagagtggcggaaggtccaggccaccttttccagtggcttgccacccaaaacatacattttccttctctttcaaaatgttctgttcttttgtcttgatrtgtatgaaaaagcattttcatctccattttattaaagatggaaaattaggattcatgcttttggcatataatttatatgaatacaaaaaatgtgttttatttggcttttaacaaacccctgttacagttgtgtgtacatacatgcatacagaattgtagtgtgtgctccaggatttttgattctattattccagtctggctcctacctatctatctttggaattttttcagcttgtccacttttacttccacctacaacatcatacacataaaaaaaaaaactcagtgattaggcacaggaaatgtaaatggtccttgacttttggttgactgtccttgcattg

SEQ ID NO: 317381 - DNA, 573 bp, Homo sapiens
aattcttggctctagacttgttaattggcttttcctcaagctgatargttgtttttttaaccactaatagagaaaaatgcacagaaaggccccacagacaccctacccactgtggctcacaaacttatgccccttgcttttccacagtgcccagctttccaacacctgtgctctgctgggaaggaggggcaaaaagaaggaggagctggacatgaatgctaggaaacccgagcaggtgctggccagctgaatggagactgaaaggtaaattgtgggggcccccagagtgacagaccagtagctacctgggttttagaatagaaactatattaattgtgatgagatttgcatttatttcaagggaaaaagcagtccagtctacataggacagcctgcctaggagcaaacccttaactaaaagtgtttttagctagactgacatacgtgggaagagtggcacccaggtcaaatctggagatgtcgataagttaattattcattgcattaacagacatttattgagcaaacactagggcctgcattgtgctggctttaaggaaacaaaggtgaata

SEQ ID NO: 317382 - DNA, 559 bp, Homo sapiens
ttatttcaagggaaaaagcagtccagtctacataggacagcctgcctaggagcaaacccttaactaaaagtgtttttagctagactgacatacgtgggaagagtggcacccaggtcamatctggagatgtcgataagttaattattcattgcattaacagacatttattgagcaaacactagggcctgcattgtgctggctttaaggaaacaaaggtgaataaggagatttcctgaccaatacatacatacacatgtattatatacatatatgttttttcctttaatttttagtgatatgtaataactgcacatatttatgaggtacagaatgatatttcaatccatgtgtacagtatgtaatgatcaaatcagggtagcaagtgtattcatcacttctaactttgatcatttctttatgttgtgagcattcttctagctttttaaaaattgctatattgttaaccatattcaccctaccatgctagagaacactaaaacttactccttctatattactgtaacttcatattcattaatgaatctcttatcctccccac

SEQ ID NO: 317383 - DNA, 559 bp, Homo sapiens
ttatttcaagggaaaaagcagtccagtctacataggacagcctgcctaggagcaaacccttaactaaaagtgtttttagctagactgacatacgtgggaagagtggcacccaggtcaaatctggagatgtcgataagttaattattcattgcattaacagacatttattgagcaaacactagggcctgcattgtgctggctttaaggaaacaaaggtgaataaggagatttcctgaccaatacatacatacacatgtattatatacatatatgttttttcctttaatttttagtgatatgtaataactgcacatatttatgaggtacagaatgatatttcaatccatgtgtacagtatgtaatgatcaaatcagggtagcaagygtattcatcacttctaactttgatcatttctttatgttgtgagcattcttctagctttttaaaaattgctatattgttaaccatattcaccctaccatgctagagaacactaaaacttactccttctatattactgtaacttcatattcattaatgaatctcttatcctccccac

SEQ ID NO: 317384 - DNA, 559 bp, Homo sapiens
ttatttcaagggaaaaagcagtccagtctacataggacagcctgcctaggagcaaacccttaactaaaagtgtttttagctagactgacatacgtgggaagagtggcacccaggtcaaatctggagatgtcgataagttaattattcattgcattaacagacatttattgagcaaacactagggcctgcattgtgctggctttaaggaaacaaaggtgaataaggagatttcctgaccaatacatacatacacatgtattatatacatatatgttttttcctttaatttttagtgatatgtaataactgcacatatttatgaggtacagaatgatatttcaatccatgtgtacagtatgtaatgatcaaatcagggtagcaagtgtattcatcacttctaactttgatcatttctttatgttgtgagcattcttctagctttttaaaaattgctatattgttaaccatattcaccctaccatgctagagaacactaaaacttactccttctatattactgtaacttcakattcattaatgaatctcttatcctccccac

SEQ ID NO: 317385 - DNA, 554 bp, Homo sapiens
tgagccttcaactgagccaacccaaaattctattagactggctacttctaagtgataaagtacttggtaagtcagtgaattttatggtcatgatctcgttgccatactttgttgatgtaaaattggtcccctgttcagacaatgtttcctaaaataatgtgatgataagtaaggtattgtaaaatctatcactggcaaagaaagcaaacctgagcccaacatacatattattctgagaaagccaaatttcagcctcttctgtggtagtcagacaggtggctggcttgtaatttctagaaatggcatcatgtcagtcaatagtttttgttggtttctgctgctggcatgttgggcactcaggagaggcagtatccagcttaacctaattgaaaaagaacgattatactgagactcatgtgcagtctgcatctctactttaatggccgctctggtctagttatgractgactggggaaacactgaagtggttagagacacaggatagctaatatccacaggataggtcatctggtccaattatgttagatgttctc

SEQ ID NO: 317386 - DNA, 567 bp, Homo sapiens
agtggaatattactgaagcttttgaggagttttccttaacataacctggcttctcttttaatcacaggctgcaggtctgtgaactgactttgactcagaaactatgtgaacaatcagttttctaatagtgatatcaatatcacccaccacccactgccttctcttcctcctcctcctcatatttccttttcttcttcaacagctttattgagatataattcatataccatgaacatccccctttagggtgtacaattcaatgcttttaagtgtattcacaracttgtgcaactatcacaatcacaagaaaccccatccccattagcagttatatccccattcctgtccctctccaggcaaccattaatctattctctgtccttatcaatatgactcttctggacacttcatataagtggagttatacagtatatggtcttttataactggtttctttcacggtggcataatattttcaagggttatccatgtggaagcaagtagatcagtatttgattatttttaataccaaataacattccattgtatgtatataacacatttgtt

SEQ ID NO: 317387 - DNA, 509 bp, Homo sapiens
tgtctccagaatgcatcccacggccctgcttctttacattcccacgttctcagtcaaagactgagaaaacctatttgtgggtgcacaaataggcagaactcaaggagagattaaggagtaagtatctggcattatatgcttgtatattaggatggctttctgtcatacagtgaaagatcaatcaaatgtagaaagagaattcagaggctgggaagccagaaaaactagcaatctatcatttgttcactataatctcagaatattgggaatatttctttatgaaggcagaagttaaaatctttccttataactttttctatttcatagttatttaaatggagagactacrgtaatattaaccttttccatcccttttgttcagggtttatgcttccttttgttttgaggaccacatagtttttaatccaatatgatttttttgttcattttacctctccagaattattataaacactattaaaattagacttacttctgcaccttagttc

SEQ ID NO: 317388 - DNA, 607 bp, Homo sapiens
taaacactattaaaattagacttacttctgcaccttagttcatattttccacttatcatacttatttaacttctactttccctttctttttccactggagatttttcctctatgggtttgtattttatacatgctatgttagtccattcttccactactataaagaaatacccgaggctgggccattcataaagaaaagaagtttaattggctcatgatagtgcaggctgcacaagcatagctccagcatctgcttctggtgaggacctcaggaagcttccaatcayggagaaagggaaaagagcaagcatgtcacacagagagagcaggagcaagagagagcaggaagagatcccagacttttaaacaaccagctctcacatgaactaacagagcaagaactcacttattaccttggggaagacaccaagccattcatgagagttccatccccatgatccaatacttcccactaggccccacctataatattggagatgacatttcaacatgagatttggaagcaacaatcatacaaccatatcacatgctcttccatttctggttacttattaaatcctgtgcctatatttctattcacttacca

SEQ ID NO: 317389 - DNA, 580 bp, Homo sapiens
actcgttggagatcaacgtttttatatcagattcaaagaaagatcaacaatttattatttttagctcagaagttcctggaaaagcttacctttatcttctctttgctatgacaggctttgtcattttcctagctggcacatcaaaccatgagctctacccttgactgaaataaaacaggaaactcatggattaggtcacttcaatacaatacacagtctcactgtttattcagtggtattgacccactattctagaagatttgaaaagactgaaagaaaagaagaattgtgtttagagagaaccattgtaaccggtctattcctagaaaccttactatgcaggtttatcccataattaaattacttcactctaggtggttggtctattgttcatattgtgtctgctcttttccttaagtgatctcttatttcagtattttttcaaaattaaacataaaccctgagtcaatctttcattttataaaaatcagggatgttaaacatgtggtacttgagcagaactgcaatccctgattaattaamcatgaagagtactcataaaaggctacatgagttggca

SEQ ID NO: 317390 - DNA, 549 bp, Homo sapiens
tctggagatggttgttgatggttgcacaacaatgtgaaagcacttagtgccacagaaatgtacacttaagaatgattacaatggtaaatttcactttgtgcacattttactaccaaaaaattaagagattgtctctgccttcaaagaactcttaatctagttagcatgacatgtaaacagctttggcagtttacgaataaggcataagatctttggctgtttatggatcaggcttactatcctggtgagagtatgaggtggtcactgtggtcagttctacctggyaaatgttgtgctgattggagcccacagtcttgactcaaaagtgaagatatccactgaatgaggcatctcaattcagctaagtatacctttacaaaatgactcagaaaaatgtgcttggaagtcagttcttctatgttcagcaagatgggaatgctgagctttgcccagtaagtcattctcatcactttggtagaatgctgacaaagtttgaaattggcctcttgctgttttagatgacctggacttcctccctgtgttttctag

SEQ ID NO: 317391 - DNA, 293 bp, Homo sapiens
tgggctcctgtgccgcccgagcctcctccacgagcgccaccccctgctccacggcgcccagtcccatcgaccacccaagggctgaggagtgcaggcacacggcgcaggactgccaggcagctccacctgcagcccgggagcgggatccactaggtgaagccarctgggctcctcagtctgctgggcatgagcagagtctttaggtctagctcagggattgtaaacacaccaatcagcaccctgtcaaaacagaccactcggctctaccaatcagcaggatgtgggtggggcca

SEQ ID NO: 317392 - DNA, 293 bp, Homo sapiens
tgggctcctgtgccgcccgagcctcctccacgagcgccaccccctgctccacggcgcccagtcccatcgaccacccaagggctgaggagtgcaggcacacggcgcaggactgccaggcagctccacctgcagcccgggagcgggatccactaggtgaagccagctgggctcctcagtctgctgggcatgagcagagtctttaggtctagctcagggattgtaaacacaccaatcagcaccctgtcaaaacagaccactcggctctaccaaycagcaggatgtgggtggggcca

SEQ ID NO: 317393 - DNA, 658 bp, Homo sapiens
tggtggtgcacacctgtggacccaattgctcaggaggctgaggtgggaggattgctcaagcccaaggaggtcaagactgcaatgagtagtaattgtgctactgcaattcatgcaatccaacttgggtgacagagtgagaccatgtctcaaaaaaaaaaaaaaaaaaagctttcagaagtttcatatttgatagtgttcaacagagcagtttattatccatctgtgtgggacaaagatctgtaaaccaatttctaggttaagagagatgacttcaattttcttgctaagaaagctgtctggatgtgggatttgatcatgagttcatctgaggattagataaatcagatggatagctggcatgtcctccattctgggccagaagctgagtgagtcgagcatgaggctggggcaaggaaagatccagccaagttgtagagcaggacaggctttgagttgcaggggcagtacatgggggaggctctggtcagagggtcaacttaacaaatggcctttctraatgttcatttctttatctgcaaaaccatgctacctgtgagtgcccaatcctgcctgcttaagccacatagttgttggaaaataataaatagcaaatgagggaaggtccaaacaaataaataagtagatagagacatttgtg

SEQ ID NO: 317394 - DNA, 658 bp, Homo sapiens
tggtggtgcacacctgtggacccaattgctcaggaggctgaggtgggaggattgctcaagcccaaggaggtcaagactgcaatgagtagtaattgtgctactgcaattcatgcaatccaacttgggtgacagagtgagaccatgtctcaaaaaaaaaaaaaaaaaaagctttcagaagtttcatatttgatagtgttcaacagagcagtttattatccatctgtgtgggacaaagatctgtaaaccaatttctaggttaagagagatgacttcaattttcttgctaagaaagctgtctggatgtgggatttgatcatgagttcatctgaggattagataaatcagatggatagctggcatgtcctccattctgggccagaagctgagtgagtcgagcatgaggctggggcaaggaaagatccagccaagttgtagagcaggacaggctttgagttgcaggggcagtacatgggggaggctctggtcagagggtcaacttaacaaatggcctttctgaatgttcatttctttatctgcaaaaccatgctacctgtgagtgcccaatcctgcctgcytaagccacatagttgttggaaaataataaatagcaaatgagggaaggtccaaacaaataaataagtagatagagacatttgtg

SEQ ID NO: 317395 - DNA, 596 bp, Homo sapiens
ggtgaggtatatgaggaatatcaattctctyatcctcaggcctgtctcagcctagtctgtgcaaatattgtctcagaaaactaggttgccataaaacatatacaattactttgtaaatcatagaggcaatagcaggtgagctggtgcccagatacatgactactgggtttaatgcagtgtgctatactctggaatcactgatgggtttaaatccagaaaattaaagtgcaatactaaatgccagaggtcagcatcctggcactggcacccctatctgcagcagacactgttggctgcctactcaacggtcatcttcctcttcttcctaagaaaatctgattttgttcaaggacgacaacctccccacacagccacaggctcctgctttagggatgggcatatcatgcgatgctggcccagagatgtaaggagaagtctgctggagacttcctgggagagataaaaaagagacatgggaagaggtgatcttcctttttcaagtgaatgtagccaggtttggatgtgatgtatggaactactgcagccaacttggagatgaaagcaatgtgcaaacaaggccagagccaaaagatatg

SEQ ID NO: 317396 - DNA, 556 bp, Homo sapiens
tccatgccctccatgtagcaggcactcaagtgctggttcttggggaggttagaggcagcggggcataagcttttcagaaaggtactctccgtkacacagggagatggctctggcacctctctcaatatggaatatttagtatttagtatttattttcctcaactttaaggcattgacagcaattctagacaacacagaaagccacgtttatcaatattctttcacacaagcttccccctctctggtatatcttctgcatttcagagacagaaaccacattcaataatgccatctgattatctttgagcagctccccatcactaagaggacaatgcttaaattccttaataggaactactgtaagggaagggggcgaggagctaacatttgctgtaagtctacagtgtgccaaccactttacatgggttattttatttgaagttataaccctcttgagaggtaagtcttattattccaagtttttaattaaagtaaatcagtcacaggaagattaagtagttacctacagcacatagctataagcatagatgtggga

SEQ ID NO: 317397 - DNA, 600 bp, Homo sapiens
ttctgaacacgtaatggtctctaattaactcacaggtaattagagcaattaccagaggccagcgcacttcttaaagctgtgtgcccaggttttttttcccacttgggaacatatacccaaatggagttaaaattcctcttcagcaaagattctatttttccatacattrtcattgaaccaactttgattgtataaatatggtcataaatgttcctatttatagctttttctgtgagtcattgccagtaggaccttagctttgccctcacctcagtaatgagtggggccagcctgtcaaggtgtgtgtaacagtaagcatggtggcctgaggagttctatgtggtctgtgagctgcttgcttcctctttgcttctccactgacttccaccttgtgtcttgatttcttcttggtgtcctgatgagtcaaagtccagttcccagtcttctcacttcatccaagagttgtggcttattcctagcttcttgggagaagagagggaaaggagaaggaagagatggcctcctctcactggccggttctgagcagagagtgggttgccgggatgtaagctcctcagggtggatcttataaatatggtc

SEQ ID NO: 317398 - DNA, 551 bp, Homo sapiens
tgcaccacacatgtggttgtagcaatatccaaagaaagaacccccagcaaccttttctggagtctcattggctccagctggaccaatcctgaggacataggaaaaccttatgttgaaaaatatcatcctrgggtctcgatctattcattggtaaggaggatgggagcaccacgactgacttagaccaatcaggatgcacctctaagctgttacacattgggggaggggtggagccaaccaaaatgtctgctccctggctctgagtcctgacctctcatctcagagcacttagggctctatctggggtccagtgattgatccagctttgctagagcactaatgatggaacagttagtataatatgactccttcagtataagagaagtatatgcaaaagggccttgcagagaggtatgggttgttccaaggtagtgaccaaacagggtaaacgtggggcactgtgtcagtaggtcagtgtctctaacaagaccccatggtggtgactacatgggatgaatctcagagactacttgtgcgagcttttgcaaata

SEQ ID NO: 317399 - DNA, 577 bp, Homo sapiens
ccagtcacaatttacttttcatttgctttgtatataatcccaaggttacttcatagaagcactgcttgaaataaggcagtgtttttattaccagtagattgttttactttatctctctctcattcttcctttttaaagcaaataactcatttatatggaaagagagcattctacaaaattttgcatggcctaaaagtgttttcaaagttttaatttttttctagaattaattctttgctacactagaaactaagttsattgacaggtatgtataatgaacttgcttccaaattccagatgttgtttcccactcttgaggaacatttcaaagtatacggttgccatttcagattcaacttgtccccatctaaacattctctttctctggttccctttttccaaaatcccaattagttactaaatcctgcagtctgcctctataatatctcttctgttattctcctttccattaccactatcagcatgctttcattccccgctgattcatttggatattcatgcatgcaccagctcacttattcaacaattctttgagcacctaacgtgagtggtctct

SEQ ID NO: 317400 - DNA, 506 bp, Homo sapiens
tgtgccttgggagagtgggtgggtcaggtggggtggcacacactgaacaagcagagaagattccacaggaatcctctcaaaggtgaaaactgttacatatgcattaccttgtttagttttatagtaattgtcccctttgtttatagaatattctagtagaactttgccattatggtgatcactccatagctataatgcatacatagagcagatatgagttatgtcccataattctcttgtctgttcagtgtgctaggtattgatatttttatatctgaatgaaactgaatctcagagaggttcagcaaattgcccaaagtcattacagttagtaagcagcaaarccaagatccaaacccagaactttatgactgcaaagtccatgctccttccacacagtgtcagcctgcctcatttggtaaggttgattgtgaaacaaagatgtgatttattttaagcagtgaaagatatacagtttggaaggaaagtggaaggaatttggtcgt

SEQ ID NO: 317401 - DNA, 605 bp, Homo sapiens
ctaacacatgcggtgcatgcagcacattgtgcagacgcagtattcataactagatgtttaatttccatctttttttacgtcaggaacattattatttgggttaatacatcatggagctaatttccagtattttagctttgcagaattcaactttacctagtttgagccaaataggccattcattctacttgaaatctcaagtatacgccctaagatttacatgctactttgttagcactgcagggttctattactctcatatttctagaaagggaatatttcaacatcatatatttttgtttggttccatgaaatagcatgtacattaaccttgcctcaaagttcaaagaactaagaattactgaaatggtcccgcctaatatcagttcctcattaaggcttgcttcatgctatctgccaaaagatatcatcaatcccaagaggtaaagttatgagctcagtgttaaggcattttttatttagtacttaggactgttttctgtagcayaatgcatcttcactgtcactttattagcctccacaggactcacagactagaacaatttctaattcttgccaatagactcttagtgagcaagagacgc

SEQ ID NO: 317402 - DNA, 605 bp, Homo sapiens
tgatttctgcacttccaacccagctcatctcactgggactggttagacagtggttgcagccctgagagggcaagcagaagtggggagggatgtcccctcacccgggaagtgcaaaggatcagggaactccctcccctagccaagggaagccgtgagggaatttgccatgaggaacggtgcactccggcccagatactatgcttttcccatcatctttgcaaccccagaccaggagattccctcrgctgcctacaccaccaaggccctgggattcaagcacaaaactgagtggccacttgggcagacaccgagctagctgcaggagtatttttttcataccccagtggcgcctggaacaccagcgagacaaaatggttcactctcttggaaagggggctgaagctagggagccaagtggtctatagtggatcccacccccacggagcccagcaagctaagatccactggcttgaaattctcactgccagcacagcagtatgaagtcaacctggaatgctcgagcttggtggtgggaggggtgtcagccattactgaggtttgagtaggcagttttcccctcacagtgtaaacaaagccacctggaa

SEQ ID NO: 317403 - DNA, 588 bp, Homo sapiens
ccctcagctgcctacaccaccaaggccctgggattcaagcacaaaactgagtggccacttgggcagacaccgagctagctgcaggagtatttttttcataccccagtggcgcctggaacaccagcgagacaaaatggttcactctcttggaaagggggctgaagctagggagccaagtggtctatagtggatcccacccccacggagcccagcaagctaagatccactggcttgaaattctcactgccagcacagcagtatgaagtcaacctggaatgctcgagcttggtggtgggaggggtgtcagccattactgaggtttgagtagrcagttttcccctcacagtgtaaacaaagccacctggaaattcaaactgggtggaacccccgcagctcagcaaagccattgtagccagactgcctctttagattcctcctctctgagcagggaatctctgaaagaaaggcagcagccccagtcagtggcttatagataaaattcccatctccctgaagcagaggctttgggcgcagcttcagcagacttcaatgtacttgcctgccagccctaaagagagcagtgtatct

SEQ ID NO: 317404 - DNA, 588 bp, Homo sapiens
ccctcagctgcctacaccaccaaggccctgggattcaagcacaaaactgagtggccacttgggcagacaccgagctagctgcaggagtatttttttcataccccagtggcgcctggaacaccagcgagacaaaatggttcactctcttggaaagggggctgaagctagggagccaagtggtctatagtggatcccacccccacggagcccagcaagctaagatccactggcttgaaattctcactgccagcacagcagtatgaagtcaacctggaatgctcgagcttggtggtgggaggggtgtcagccattactgaggtttgagtaggcagttttcccctcacagtgtaaacaaagccacctggaaattcaaactgggtggaacccccgcagctcagcaaagccattgtagccagactgcctmtttagattcctcctctctgagcagggaatctctgaaagaaaggcagcagccccagtcagtggcttatagataaaattcccatctccctgaagcagaggctttgggcgcagcttcagcagacttcaatgtacttgcctgccagccctaaagagagcagtgtatct

SEQ ID NO: 317405 - DNA, 550 bp, Homo sapiens
gttttgcactgccaattatgttgcagtgtcattttgaaaccaaacattcataggttaatgtaaaaaataattaaatatcttattcatagctggattgaagtctttaacagcctgaatcatgtgttacagcttttcaaattaagacacagagaagctgctgaaacatcctgcaacatttatatcatattgcatttgctgtagaagaacatacaatagctgkagtttaataaaaccttagactattgatattactcaatgtctattgatgaaaaattagtaaaagcattcacagcagtgccaatttctaatgttgtagtatcttattgaattaaatattatgttgcaaacatgaagagtaagataatatcttgtttgcagaactggactttttaccttacaaatggataaatctgcagatgtggctagtctagctcatttgcttctattcatttgatttcagcactgactaagcagccacaaagatcttgttttatgttgttttatgtgaatgtttggtagcaaatacaaggggcactgaaatattcaaagt

SEQ ID NO: 317406 - DNA, 634 bp, Homo sapiens
accaaatttatcacccagatgaataatgtagatttggattgattcatagtttattttgaaagaaaaataaaatttgcagctttttgaaaattaatatgcccaactttttgcctgttatgtttggaagacttattaatgtaatgttataatatgaaaaattaatgttgcatcattttctcmatcaatacattgctagaagaaaattttagagaaaagtagaaaaagattttagagaaaactagaatagcatttctagttttctctaaaataattgtatctctaacatctgaaacatttgaaaagttttatgggcctctgaacaagctgtttgtccctgggtgagttatttgacctctttaaaccatatttcctcaaattggggaaggaagtagtaacatcttttgtagagttcatgtattaagtcataaaattattgtaagaaaacaacaatagtttctggtatttactaaaagctcagtgaaattagctagtgctatatggacctctgaaaaggtgatgatcatgtctatctcaagtttgagccaaactcagatgtatgtatctgttagttatgtacagatttcctatgtgctaaaatgctattaaggactttccatgagtaaatattaatata

SEQ ID NO: 317407 - DNA, 634 bp, Homo sapiens
accaaatttatcacccagatgaataatgtagatttggattgattcatagtttattttgaaagaaaaataaaatttgcagctttttgaaaattaatatgcccaactttttgcctgttatgtttggaagacttattaatgtaatgttataatatgaaaaattaatgttgcatcattttctcaatcaatacattgctagaagaaaattttagagaaaagtagaaaaagattttagagaaaactagaatagcatttctasttttctctaaaataattgtatctctaacatctgaaacatttgaaaagttttatgggcctctgaacaagctgtttgtccctgggtgagttatttgacctctttaaaccatatttcctcaaattggggaaggaagtagtaacatcttttgtagagttcatgtattaagtcataaaattattgtaagaaaacaacaatagtttctggtatttactaaaagctcagtgaaattagctagtgctatatggacctctgaaaaggtgatgatcatgtctatctcaagtttgagccaaactcagatgtatgtatctgttagttatgtacagatttcctatgtgctaaaatgctattaaggactttccatgagtaaatattaatata

SEQ ID NO: 317408 - DNA, 349 bp, Homo sapiens
ttctttttgtttcttgttcttgtgcttcattgggattgttaaatctatgaagttttagactttttcaaattgcaaattkaatattgaaaaacttttgcccattagttttgaatgtgtgttttgtcttagatgtttcttcttccaggactaaaagtataagcacatgaagccacttgaatttttcacaaagcttattgttgctgtcttcgtttctctggttttcatttcagatagttcctatggctgttctttcaagtttactatctttacttctgcaatatctaatttcatccagtgcattttttcatcttatacattgcagttttcatttctagaaatttagtttttg

SEQ ID NO: 317409 - DNA, 540 bp, Homo sapiens
ccaactttcctatcttctatttatattttattctgttctcaagttcgtagatgactgtacttgttcccaatttgaaatattttagcwcttccacttttcttctcaaaaatctcacttagattggttgacttctctgtgatatttaggacgaatgtcccatatgtgtataaaatatgactgtgtgaagaagcagtgccaaccagtacttagaaggcataatctggaatcaagctgttcaagctcagatttcacattttcatttacaggctgtgtcatcacggacaacttaatcaatccctctgtgtcttgttttccttattcgtaaaattggataacagtatctgtctaaaaaaattgcactaaataacacctataatatgtttaaatgagtgtctggcttacagtaggtattcaacatatattagctactattactttgcagctttgggagagggacacaaaaggaacacagcagttaatatttcctctttggtttctgatgttttcaaattatcctcctctcttttagtgtacagccag

SEQ ID NO: 317410 - DNA, 552 bp, Homo sapiens
tgttttcatggaaactacacattttcataaaacctgaaaataaatttaatattttaaaagatgtcaattaattcattccagtgaattacaggtttttagatcccacgccaaaggttttgcttgacaattgaaactggtttatggagtattattgtaggccagctaaatctaatgacctttcctccctccaagtttcaagccacagatttcaggaacagagaccaatgaaatgtgtatcttacattccagccagcaaaagtagcaaggagcttttcctgtggctagtaaagaacatgtttcttaatacgaaaatgacggttttagcacggtaacacataaagtcatttcctggcttgtgttttacatgtggctttctattattayctgatacactgaatttgcatccttgatacttctgaccttcaccctcacccatattttaaatcttttcttaacctttcctccaataatggatttagctctttgcttctcaattctgaccaaagtgaatgttgaaagaaaatggaagatgtgggtcatgggagaaaatct

SEQ ID NO: 317411 - DNA, 552 bp, Homo sapiens
tgttttcatggaaactacacattttcataaaacctgaaaataaatttaatattttaaaagatgtcaattaattcattccagtgaattacaggtttttagatcccacgccaaaggttttgcttgacaattgaaactggtttatggagtattattgtaggccagctaaatctaatgacctttcctccctccaagtttcaagccacagatttcaggaacagagaccaatgaaatgtgtatcttacattccagccagcaaaagtagcaaggagcttttcctgtggctagtaaagaacatgtttcttaatacgaaaatgacggttttagcacggtaacacataaagtcatttcctggcttgtgttttacatgtggctttctattattatctgatacactgaatttgcatccttgatacttctgaccttcaccytcacccatattttaaatcttttcttaacctttcctccaataatggatttagctctttgcttctcaattctgaccaaagtgaatgttgaaagaaaatggaagatgtgggtcatgggagaaaatct

SEQ ID NO: 317412 - DNA, 564 bp, Homo sapiens
tcttttatgacaaataagttaggttctcattccaaagacagcttcaaatatactgttagttcctctattttgtaagtagtcttctaactccatgtgaaaaattgtcagttacattcaaacttctatttttggcttacctagctgagataattttgaatcataattctgttgttcgaattcatacatatagctttccatctgattaaaatgtgaaataaaatcaagtctgttttggctaaaattatcctgattcacaagacactattgataataaatgggatgcaaaattttagaacctgccaaacattcacccaaaaactctaaaattctrcaaaggtattattataattaactgttaaagtgccttgcttgaaagttattttccttaataacagactactctctttttgtcttttcttaacattatagactcttccccttcattgttcatcttcttgcttaagaaatgtctacaaatacttttatattgctcctattactcttcacaagtctcaatttgttctgagctttattctatggatgccattcttagaggtacatggt

SEQ ID NO: 317413 - DNA, 564 bp, Homo sapiens
tcttttatgacaaataagttaggttctcattccaaagacagcttcaaatatactgttagttcctctattttgtaagtagtcttctaactccatgtgaaaaattgtcagttacattcaaacttctatttttggcttacctagctgagataattttgaatcataattctgttgttcgaattcatacatatagctttccatctgattaaaatgtgaaataaaatcaagtctgttttggctaaaattatcctgattcacaagacactattgataataaatgggatgcaaaattttagaacctgccaaacattcacccaaaaactctaaaattctacaaaggtattattataattaactgttaaagtgccttgcttgaaagttattttccttaataayagactactctctttttgtcttttcttaacattatagactcttccccttcattgttcatcttcttgcttaagaaatgtctacaaatacttttatattgctcctattactcttcacaagtctcaatttgttctgagctttattctatggatgccattcttagaggtacatggt

SEQ ID NO: 317414 - DNA, 586 bp, Homo sapiens
tgtatatatatatatatatatatatatatatatatatatacacaccacaatttctttattcaattgttgattgttgggcatttgggctcgttccatatttttgaatttgtgaattgtgctgctataaacatgagtgtgtaagtatctttttttgtgtaattacttcttttcctctgggtagacaaccagcagagggattgccggatcaaatggtagttctacttttagtgctttgaggaatgtctacacygttttccacagtggttgtaatagtttagattcccaccagcagtgtaaaagtgttcccttttcaccacatccacaccaacatctattattttttttatttttggatcatggccattcttgcaagagtaaagtggtattgcattgtggttttgatttgcattaccctgatcattagtcatgtggagcatttttcatatgttttttggccatgtgtatatcttaagaactgactattcatgtccttagcacactgtttgatgggattgtttgtttttctattactgagttgcttgagtttcttgtagattctggatattagttctttgccagatgtata

SEQ ID NO: 317415 - DNA, 575 bp, Homo sapiens
tatatatatatatatatatatatatatatacacaccacaatttctttattcaattgttgattgttgggcatttgggctcgttccatatttttgaatttgtgaattgtgctgctataaacatgagtgtgtaagtatctttttttgtgtaattacttcttttcctctgggtagacaaccagcagagggattgccggatcaaatggtagttctacttttagtgctttgaggaatgtctacaccgttttccacagtggttgtaatagtttagattcccaccagcagtgtaaaagtgttcccttttcaccacatccacaccaacatctattattttttttatttttggatcatggccattcttgcaagagtaaagtggtattgcattgtggttttgatttgcattaccctgatcattagtcatgtggagcatttttcatatgtttkttggccatgtgtatatcttaagaactgactattcatgtccttagcacactgtttgatgggattgtttgtttttctattactgagttgcttgagtttcttgtagattctggatattagttctttgccagatgtat

SEQ ID NO: 317416 - DNA, 503 bp, Homo sapiens
catatcatcagcaaaaagcaacagttcgaattctactttactgatttggatgccttttatttctttttcttgtctgattgctctggctaggacttccagtactatgatgaatagaagtggtgagagtgggcatctttgtctttttctagttcctagggwaaatgctttcaactttccctccttcagtattatgttggctgttggtttgttatagatggcttttattactttgaggtatgttccttttatgccgattttgctgagggctttaatcataaaatgatgctggattttgtaatgcttttctgcatctattgagatgatcatgtgatttttgtttttaattctgtttatgtggtgtatcatatgttaaacttgcatatgttaaaccatccctgcatccctggtatgaaacctacttcatcatggtggattatcttcttgatatgctgttggattcagttagttaggattttaggatttctttgatgattttttcacta

SEQ ID NO: 317417 - DNA, 635 bp, Homo sapiens
cattgtgctattttttgcctgaataccttgttttttwaaaaatattgtgtttttgttgcatatgttttgtgagatttatgtgttaaggaggttctattttggtatattttaaggatttgttttaagatttagagctccttttagcagttcttgtagtgctgccttggtagtggtaaattctctcagcatttgtttgtctgaaaaaggctgtatctttccttcattaatgaagctttctttcactgattacaaaattcttggctgataattgttttgtttaagtaggctaaagatagggacccaatcctatctagcttgtagggtttctgctgagaaatgggctgttaatctgatagatcttcctttataggttacctcatgcttttgccttacagctcttgaggttctttcctttgtcttaactttagataacctgatgactatgtgcctaggtgatgatcttcttgtgacaaatttcccaggtgttctttgagctttttgtatttgaatgtctagatctctaacaaggcagggaaagttttcttcaattattccctcaaatatgttttctgaacatttagatttttcttcttccacaggaacaacaattattcttaggtttgtttgtttaacat

SEQ ID NO: 317418 - DNA, 657 bp, Homo sapiens
cttttataatttatgcaaagactgcttagctatcaaatagtctcttttaacatggctcctgggcacagaaaaaaaatccttgtaatgtttcttctctctcccatttatttagttctttccagcagaaactctagcactattttcctgggcttactgtatgttttcctttcaccctgctatttctcttctctatccaagtctctccagcctcccagctcctactcattttactrtgcacattaaactattattttatttatccacatatcagcatttatttactcaaacacagcaatgtaccacagactgtcaggtagaatttcaataacccattataactggactccatgtcattatctaaagaaaattacttttcctttccttgaagaaccctaattgtctaaccttttcttcctaaaaaaaaaagaaaattatttttactcagtcttggaaaaatattcccttttcataagaatgagcaaaattattctgtaaaatgctaaaagaaaaaggcaacactgaatttaacagccatattctgttatagtacaactaaattatatctttgttgagaagacttgcagaaagcggaaaggttttgagttaccaaatcatgctaactctacttctcaatttccctattttcagagaaattaa

SEQ ID NO: 317419 - DNA, 657 bp, Homo sapiens
cttttataatttatgcaaagactgcttagctatcaaatagtctcttttaacatggctcctgggcacagaaaaaaaatccttgtaatgtttcttctctctcccatttatttagttctttccagcagaaactctagcactattttcctgggcttactgtatgttttcctttcaccctgctatttctcttctctatccaagtctctccagcctcccagctcctactcattttactgtgcacattaaactattattttatttatccacatatcagcatttatttactcaaacacagcaatgtaccacagactgtcaggtagaatttcaataacccattataactggactccatgtcattatctaaagaaaattacttttcctttccttgaagaaccctaattgtctaaccttttcttcctaaaaaaaaaagaaaattatttttactcagtcttggaaaaatattcccttttcataagaatgagcaaaattattctgtaaaatgctaaaagaaaaaggcaacaytgaatttaacagccatattctgttatagtacaactaaattatatctttgttgagaagacttgcagaaagcggaaaggttttgagttaccaaatcatgctaactctacttctcaatttccctattttcagagaaattaa

SEQ ID NO: 317420 - DNA, 657 bp, Homo sapiens
cttttataatttatgcaaagactgcttagctatcaaatagtctcttttaacatggctcctgggcacagaaaaaaaatccttgtaatgtttcttctctctcccatttatttagttctttccagcagaaactctagcactattttcctgggcttactgtatgttttcctttcaccctgctatttctcttctctatccaagtctctccagcctcccagctcctactcattttactgtgcacattaaactattattttatttatccacatatcagcatttatttactcaaacacagcaatgtaccacagactgtcaggtagaatttcaataacccattataactggactccatgtcattatctaaagaaaattacttttcctttccttgaagaaccctaattgtctaaccttttcttcctaaaaaaaaaagaaaattatttttactcagtcttggaaaaatattcccttttcataagaatgagcaaaattattctgtaaaatgctaaaagaaaaaggcaacactgaatttaacagycatattctgttatagtacaactaaattatatctttgttgagaagacttgcagaaagcggaaaggttttgagttaccaaatcatgctaactctacttctcaatttccctattttcagagaaattaa

SEQ ID NO: 317421 - DNA, 538 bp, Homo sapiens
acctcagcctcccacctagttgcgactatgggtttgggccatcacacccagctagtttttcaatattttgtagagatgaggtcttgctatgttacccagtctggtcttgaactcctggtctcaagccttggtctcccaaagtgctgggattacaggcatgagacgttgcrcctagccctaataagatttttgaggaagagctttccttaaactattttcctttgaggaaagttagattgttcagtcagaaattgaaaatggccacctatccaaacctctcaaattagtgtgttttataaatatctgaaggaaactttaatgccaagagaaaagaagaatgttctatagttaaaaagcttcaaaaaagggagaaaaatcaatgtctccagaccatttgacatagtctcagtgtttggttgtaatttaagaaagattgaatgcttaagttcagaaggttcagacaagaagattttctacctgccacattttcaagctgttgacctagtttccacaggtgtactgggatgcttcatcactg

SEQ ID NO: 317422 - DNA, 609 bp, Homo sapiens
ttccttgtgcccaggatattagaagatatccaggtacagtgagcacttgaagtccctacaacatcggggtaccacttaaagatgggattttcaagatctaattgggcaaagtctaaaggtaatgagcarattcaaagtgaccatagagcgtactttttggcaataaaaatgctatctatttgactgtctgcctatagctcaaatctgaaccagtgaaatccgtggggcaaggaactgtcctcaccagagtcttctttagaggaagtttctcacatcttctcactttacaaagtttttgatttatttgattttagtgaaatcacttacataatcccttcattttgcgtggtatcataaagaatacaaagagtacaaaaatatccatctcttaagaagtttaaaatattgcaggtagagtttatattctatgacaatttgatatcaatgcaatgtaaaatgctgtgtaaaaatgatgcaaaaagcattaaaaacaaacaaaagatgattagagatctgggcttcagagaaacagggaggttttctgagagagataacacttgagtagggccttgaaattggatgagcagtgggaaagataaatgatatttt

SEQ ID NO: 317423 - DNA, 609 bp, Homo sapiens
ttccttgtgcccaggatattagaagatatccaggtacagtgagcacttgaagtccctacaacatcggggtaccacttaaagatgggattttcaagatctaattgggcaaagtctaaaggtaatgagcaaattcaaagtgaccatagagcgtactttttggcaataaaaatgctatctatttgactgtctgcctatagctcaaatctgaaccagtgaaatccgtggggcaaggaactgtcctcaccagagtcttctttagaggaagtttctcacatcttctcactttacaaagtttttgatttatttgattttagtgaaatcacttacataatcccttcattttgcgtggtatcataaagaatacaaagagtacaaaaatatccatctcttaagaagtttaaaatattgcaggtagagtttatattctatracaatttgatatcaatgcaatgtaaaatgctgtgtaaaaatgatgcaaaaagcattaaaaacaaacaaaagatgattagagatctgggcttcagagaaacagggaggttttctgagagagataacacttgagtagggccttgaaattggatgagcagtgggaaagataaatgatatttt

SEQ ID NO: 317424 - DNA, 609 bp, Homo sapiens
ttccttgtgcccaggatattagaagatatccaggtacagtgagcacttgaagtccctacaacatcggggtaccacttaaagatgggattttcaagatctaattgggcaaagtctaaaggtaatgagcaaattcaaagtgaccatagagcgtactttttggcaataaaaatgctatctatttgactgtctgcctatagctcaaatctgaaccagtgaaatccgtggggcaaggaactgtcctcaccagagtcttctttagaggaagtttctcacatcttctcactttacaaagtttttgatttatttgattttagtgaaatcacttacataatcccttcattttgcgtggtatcataaagaatacaaagagtacaaaaatatccatctcttaagaagtttaaaatattgcaggtagagtttatattctatgacaattkgatatcaatgcaatgtaaaatgctgtgtaaaaatgatgcaaaaagcattaaaaacaaacaaaagatgattagagatctgggcttcagagaaacagggaggttttctgagagagataacacttgagtagggccttgaaattggatgagcagtgggaaagataaatgatatttt

SEQ ID NO: 317425 - DNA, 591 bp, Homo sapiens
tgtgtctcactctttctataaatrtgtcagggaaaaaatagataaaaaaggaaaattggcaagcattttccctgtcaataataaaaacaagaccagaaagatagtcccttggtgaataaaatcttgaatataaagcatgttacatctgaaaaaaaaatctcaaatttcaacagcatgatggcatatgtgtctctataatgtatcctcagctgatggtatcaggggaacatgagacatttgagaaaatagtaacataaaaacgaacattggggcatgtcatccagagtggctactgagagaatactacttgtgagcaagaagctccctctcccccttttcactccgtttttaactcagcattgaattaaaatgaaagaaagggaaatatatatattttttccttttagcagaaaatgtcatggaaatgtcagagttctaggtgattacatctctcttaaaagtcgatagctgcaaatcatggaatcccttactacattggaaaatattaattttgagtaaaagcatcattttcctgagatgtgggcaggctctgaagctttggaaaggtgcttcagaatggagtgtaaccca

SEQ ID NO: 317426 - DNA, 591 bp, Homo sapiens
tgtgtctcactctttctataaatgtgtcagggaaaaaatagataaaaaaggaaaattggcaagcattttccctgtcaataataaaaacaagaccagaaagatagtcccttggtgaataaaatcttgaatataaagcatgttacatctgaaaaaaaaatctcaaatttcaacagcatgatggcataygtgtctctataatgtatcctcagctgatggtatcaggggaacatgagacatttgagaaaatagtaacataaaaacgaacattggggcatgtcatccagagtggctactgagagaatactacttgtgagcaagaagctccctctcccccttttcactccgtttttaactcagcattgaattaaaatgaaagaaagggaaatatatatattttttccttttagcagaaaatgtcatggaaatgtcagagttctaggtgattacatctctcttaaaagtcgatagctgcaaatcatggaatcccttactacattggaaaatattaattttgagtaaaagcatcattttcctgagatgtgggcaggctctgaagctttggaaaggtgcttcagaatggagtgtaaccca

SEQ ID NO: 317427 - DNA, 591 bp, Homo sapiens
tgtgtctcactctttctataaatgtgtcagggaaaaaatagataaaaaaggaaaattggcaagcattttccctgtcaataataaaaacaagaccagaaagatagtcccttggtgaataaaatcttgaatataaagcatgttacatctgaaaaaaaaatctcaaatttcaacagcatgatggcatatgtgtctctataatgtatcctcagctgatggtatcaggggaacatgagacatttgagaaaatagtaacataaaaacgaacattggggcatgtcatccagagtggctactgagagaatactacttgtgagcaagaagctccctctcccccttttcactccrtttttaactcagcattgaattaaaatgaaagaaagggaaatatatatattttttccttttagcagaaaatgtcatggaaatgtcagagttctaggtgattacatctctcttaaaagtcgatagctgcaaatcatggaatcccttactacattggaaaatattaattttgagtaaaagcatcattttcctgagatgtgggcaggctctgaagctttggaaaggtgcttcagaatggagtgtaaccca

SEQ ID NO: 317428 - DNA, 625 bp, Homo sapiens
taaagcgtcaaaaataggtacagtagctcatagaagatactttaaaagcgtttgttgaatgataagtgaatttataattcattcattgaatttataattcattcattatagatctgtcatacgatttgatgcctagattttgaagtttaatgttcatctccataccagacattttatgtctgtatgttcaaattcattatgttaacaaagaatgtaggtcacctgggcaatctgtggatagagaggatgccccattagctgactgctaaattttaggatgctgacagcattgtagaaacatgttgattaggccacaatggaaatcacgtctgatcccagcagcagatgagactctgtgttattcagaaatgtatagaggtcataaagtgaggttgatttctaaacaatgataataagaatacaaagtggataattctattaaaaaaaagaactcaytgaacctttgaactctagaaacaaagattaggctcaagtagttaagcacagccagatatttctgggtcagtccctatagcacttagataacagctgtgggttgacaattgtcctctagcttttctcaaaagaggaatctcacagaccaaggcttgaaaatggtatttat

SEQ ID NO: 317429 - DNA, 566 bp, Homo sapiens
ggaattttgtacctattttgcaagtgtaactaggtttctcttattgctttgtagctatttgtgaacattgtttcctttgacattttaagtttctgggaggctatttctgaatcctgttcatttatcttctcccatttccaagttccattctaatcttcacctcaaagcagagcatttgttaccaagaacaattcaggaggctaccagctcagttcaagcattgcccgaaaatgctttttacttttgtacacggattcgtttgtttactcatctattctgcacccaccacgaccaagcatggtaccaggtgctatgctatgtactggaaagggagagatgaaacatgataggcactgcctcgaaggtgctcacactctactacttcacccactgtaaacaaactctaaaacatggtgagagttgtgctatgataagagcaaggtgtcctgagcccaaggtgtctcctttctgagtatrgggcaagggagatgatcagagagggtcccagggagaggcaatatctaagctgaaatataaaagagagggagagttaaccaggagagaaa

SEQ ID NO: 317430 - DNA, 592 bp, Homo sapiens
ttccttcctctcaaaataattcagttttctctgatttgttcatgcctaagattaagttctctttcttttctttaagaagttttgttagcagcaaagtattacatgtccatagtaaatgtcaaattaaacctccaggccataatgataaagcaactatctgctgacacagctctacttagataaaattattgcttttagaagtgaccactctcaactcatatgaattcttctcttatttctaaataatgttcttattttgtgatgtttccactttaacattgttaaatgactttctactatggaaagtgagaatgtagttttctgtctccagtccataatgataaagcaagtatctcctgacacagctctacttagataaaattattgcttttaggagtgaccactctcaactcayatcaattcttctcttatttctaaatagtgttcttattttgtgatgtttccactttaacattgttaaatgactttctactatggaaagcgagaatgtagttttctgtctctattcaaaacatacttcttcttttactttctgtcaatatagatgtagcatttatatataatatatatt

SEQ ID NO: 317431 - DNA, 331 bp, Homo sapiens
taaaaatttggctatttgatcatttattttaaaaaataaaccaatgacttttatgatttggatgttttgagaattaatcagaaatcaaatcaaaatgctaggaatgaaatttgtcatgttttctacctatcagagaggtcttgcagttggctgaacatataactggtgtctcaactggattaacactccccacctcacccataaatatgttttgtgacattaaaaattactcagctttcccttcatttgtgatagataatccaaaatcaaactaatcgtgtcataaacataggaagtsaatggtgagcgagtttgcactcctccttataaa

SEQ ID NO: 317432 - DNA, 621 bp, Homo sapiens
tgtaagtagaatgcaatctattcacatatatttatcaattgtcttagtccatttgggttataacaagataccatagactgagtggcttataaacaacaaaaatttatttcctacagtttggaagctgggaagtccaagttcaaggtggtggcggattgaatgtctggtgagggcccattttccagttcatagatagtcatgtattcattgtgatgtcacatggctggagaagtgagggaggtctctgaggtctctgctataagggcacgaatcatattcatgaagactgtgcccacagtgaactaatcatatctcaaaggtcccatctcctaacaccatcactttgggggttaggatttcgacatatgaattttggtggaacacaaacatttagaccatagcatcaatacacactatatatatacatatatatgttatatatatgtatatatatatacacacacacacatatatayacacatatatatacacatatatacatatatatacacacatatatacatatatatacacacatatatatatacgcacatatatatatacacacacacacacacacacacacacacacatatatatttaatggagagggcaggcggg

SEQ ID NO: 317433 - DNA, 621 bp, Homo sapiens
tgtaagtagaatgcaatctattcacatatatttatcaattgtcttagtccatttgggttataacaagataccatagactgagtggcttataaacaacaaaaatttatttcctacagtttggaagctgggaagtccaagttcaaggtggtggcggattgaatgtctggtgagggcccattttccagttcatagatagtcatgtattcattgtgatgtcacatggctggagaagtgagggaggtctctgaggtctctgctataagggcacgaatcatattcatgaagactgtgcccacagtgaactaatcatatctcaaaggtcccatctcctaacaccatcactttgggggttaggatttcgacatatgaattttggtggaacacaaacatttagaccatagcatcaatacacactatatatatacatatatatgttatatatatgtatatatatatacacacacacacatatatatacacatatatatacacatatatacatatatatacacacatatatacatatatatacacacayatatatatacgcacatatatatatacacacacacacacacacacacacacacacatatatatttaatggagagggcaggcggg

SEQ ID NO: 317434 - DNA, 556 bp, Homo sapiens
actgtttaaaggtgaaggtgattaatgggttaatgtaaaaaggtgcagtttcaaccatccactttggtacattcacctttggaaacacttcagttccacaattcagcatgggcaaatttatttttgtagtaatgcacagaggatttaaagctgggtggtttatgcttatagcaacagtagataaacaataaaagcagttgagtgaagcaggtagaagagagaggtccttaattttgaagaaacatggagcattttcaagttattgaaggaactatcatgcctggakttcaagcttggggtctcctgcaactcagtttccaaatttaaccctacagggaagagggggtatgttaaagctttagttgtatatccccccaccaaaatccatatactgaagtcctaacccccagtacctaggatataaggtctttaaagttgtgattaaggttaaagcaaagcccttaacttttttgggtgagccttaatccaatctttccagtgtctttagaagaagagaaaatttggacacacagatatgaacacacaaaaaggccct

SEQ ID NO: 317435 - DNA, 541 bp, Homo sapiens
gaaggtgattaatgggttaatgtaaaaaggtgcagtttcaaccatccactttggtacattcacctttggaaacacttcagttccacaattcagcatgggcaaatttatttttgtagtaatgcacagaggatttaaagctgggtggtttatgcttatagcaacagtagataaacaataaaagcagttgagtgaagcaggtagaagagagaggtccttaattttgaagaaacatggagcattttcaagttattgaaggaactatcatgcctggatttcaagcttggggtctcctgcaactcagtttccaaatttaaccctacagggaagagggggtatgttaaagcyttagttgtatatccccccaccaaaatccatatactgaagtcctaacccccagtacctaggatataaggtctttaaagttgtgattaaggttaaagcaaagcccttaacttttttgggtgagccttaatccaatctttccagtgtctttagaagaagagaaaatttggacacacagatatgaacacacaaaaaggcc

SEQ ID NO: 317436 - DNA, 523 bp, Homo sapiens
atttgtttttattgtcttatctttgctttcttaccgttctcttacttttttttaaatatcactactgaaaaatatgagtaaaatgttttttagaacattttagaaaagaaaaaaatacaaaagtaatgctatagtttatcagtgaagcatgaagagaagcttattttgcttactatttgaggcagttctggccataggatttaatggacttcattttgaaaagctgcctgccagatcaagtaacttctcattcatttgagccatgtctatatagcctaaggcctggctcaaaggtatgacagaaacctaatatgagaaatataattttattacagtgaatccatgcagggtattggacaaggaattatacagaaatcatttcaattgctatgttaaattagaaggttgtacaaatattttacattagagaccccttagtcattaaagccrcaagcttgctattactatatatttgtgagcaaatatcatcacagacctgactcacattagaagggaaattctc

SEQ ID NO: 317437 - DNA, 514 bp, Homo sapiens
ccttagtcattaaagccacaagcttgctattactatatatttgtgagcaaatatcatcacagacctgactcacrttagaagggaaattctcatcacctctgtcatcctttagaatggaaaaaaaaacttattcataaactcataaaaatcccaacagaagaaagtttaaaaaccatggaatatgacctcctggcaaatcaacaaatttgtttttaaaaaaaacaaatcatggtgactgccttaataattatgcagaataaactatttgtttctatataatcccctccatggttgaagactgtcatctttagcagcctctttatcgtatttaaccaaaaaatgtctctctctaacttcgacccattggtccctagctgtctctgggatctgtacagataaatgtaataactatccctaaaactactcatcaaatattataaaagtgcttttattcacttactgggtcatttttgcaaaccaaacaccatttcctccaacattactcaaatgacat

SEQ ID NO: 317438 - DNA, 491 bp, Homo sapiens
ggatgcagttgttcaagttataaatccaactaattgtacttatattttaccaatattaggctataaaatcagacattgtcaaagacctttcaagattcaagatttatgtccttattatgtgtaaaatgaatgagccatcattttctgtcatattcagagtttcctaatctaatattctrtaaaattttaaccttacctagaataaagaatccacgtcaagaaagcaagaaatggcacatggataaattttccctacgcaaaatccagccccagtcaccctctctctgataaattgagtccattggaaaaggcaaccacctctcagtgataagcaccagtcataaattaatatctaggacttgattattaaaattactacgtactgtgctggaaggaaagattctagaaacttgatggcttagattaaattgtcactacccactagacttgaagaagccattggaaaggccattgaggccccctcgtaattt

SEQ ID NO: 317439 - DNA, 458 bp, Homo sapiens
tctacaccaccaaaaaatcacactagttcaccagcaatggatccaaaccaagaagaaattcctgattgacagagaattcaagaggttagttattaagctaatcagggagggactagagaaagrcaaagccaaatgcaaggaaatccaaaatatgataccagaagtgaagggagaaatattcaaggaaatagatagcctaaagaaaaaaaaataaagaatttaggaaactttggaggcgcttttggaaatgtgaaatgctctggaaagtctcagcaatagaattgtacaagtagaacaaagaaattcagagctcaaagacacgatcttcgaattagcccaatccaacaaaggcaaagaaaaaagagtaagaaaatatgaacaaagcctccaagacgtctgggattacgtgaaacaacccaaactaagaataatctgtgttcctgaggaagaagagaatt

SEQ ID NO: 317440 - DNA, 569 bp, Homo sapiens
aagaaaaaaaaataaagaatttaggaaactttggaggcgcttttggaaatgtgaaatgctctggaaagtctcagcaatagaattgtacaagtagaacaaagaaattcagagctcaaagwcacgatcttcgaattagcccaatccaacaaaggcaaagaaaaaagagtaagaaaatatgaacaaagcctccaagacgtctgggattacgtgaaacaacccaaactaagaataatctgtgttcctgaggaagaagagaattctaaaagcttggaaaacatatttgggggaataatagaggaaaacttccccagccttgctagaaacctagacatttaaatacaagaagcacaaagaacacccgagaaattcatagcaaaaagatctttgcctaggcacattgtcattgggttatccaaagttaagatgaaggaaagaatcttaagagctgtgagacagaagcaccaggtaacctataaaggaaaacctatcatattaacagcagatttctcagcagaaaccctacaagctggaagggattggggccctatcttcagcctcctcaaacaaaa

SEQ ID NO: 317441 - DNA, 579 bp, Homo sapiens
gatctaaatacagcttagcccagtacttctccctcatggtctctcctgaggctgctgtcaagctgtyagtctgggctacagtcatttgaaggcttgactgagcttgtggatcttcttctcaacttcagctgactgactgaatgaatatgtcacatttatctttaatacactttccactcagggcttttgttcttcttctagtcaaaatagattcgacttcacttctgttgaagtgtgctcaggagtgcaaatgcaaacaaatcactagcatttatgtgagtctgcagctaagagaaagtaacttttctactatccaatcatggcccattatctcctcacctccattattatgcatacataagtgattgaaggaaattttaccccaaattaagagtcttttcagcaacatgagaccagtaatattaacaactatgctcactgaaatcagatagctatttatttctatattttctaatttgcattttctatttcctactacatcaaatccagattcatctgcctttatatactgaggagctaccctgtatttattaagctcctataccatgctaggcactg

SEQ ID NO: 317442 - DNA, 579 bp, Homo sapiens
gatctaaatacagcttagcccagtacttctccctcatggtctctcctgaggctgctgtcaagctgtcrgtctgggctacagtcatttgaaggcttgactgagcttgtggatcttcttctcaacttcagctgactgactgaatgaatatgtcacatttatctttaatacactttccactcagggcttttgttcttcttctagtcaaaatagattcgacttcacttctgttgaagtgtgctcaggagtgcaaatgcaaacaaatcactagcatttatgtgagtctgcagctaagagaaagtaacttttctactatccaatcatggcccattatctcctcacctccattattatgcatacataagtgattgaaggaaattttaccccaaattaagagtcttttcagcaacatgagaccagtaatattaacaactatgctcactgaaatcagatagctatttatttctatattttctaatttgcattttctatttcctactacatcaaatccagattcatctgcctttatatactgaggagctaccctgtatttattaagctcctataccatgctaggcactg

SEQ ID NO: 317443 - DNA, 579 bp, Homo sapiens
gatctaaatacagcttagcccagtacttctccctcatggtctctcctgaggctgctgtcaagctgtcagtctgggctacagtcatttgaaggcttgactgagcttgtggatcttcttctcaacttcagctgactgactgaatgaatatgtcacrtttatctttaatacactttccactcagggcttttgttcttcttctagtcaaaatagattcgacttcacttctgttgaagtgtgctcaggagtgcaaatgcaaacaaatcactagcatttatgtgagtctgcagctaagagaaagtaacttttctactatccaatcatggcccattatctcctcacctccattattatgcatacataagtgattgaaggaaattttaccccaaattaagagtcttttcagcaacatgagaccagtaatattaacaactatgctcactgaaatcagatagctatttatttctatattttctaatttgcattttctatttcctactacatcaaatccagattcatctgcctttatatactgaggagctaccctgtatttattaagctcctataccatgctaggcactg

SEQ ID NO: 317444 - DNA, 562 bp, Homo sapiens
tttacttcaatgtccttgaccaaaattctgtgcatttgaagctaatctaataagrctactttctgaattaatattctaggtgcctaaagctgagcctaatttgaattaaaacttacataaattattttaataaaaataaatgcacaatgccttaatcttttctgtacttaggatttactgggtaatattaataagttactgttgcttagtgtggaagcttagcaatgggaatgttaaatatccatatctttttataactacaaaaaagagctactgttatttgcagcattctttatgttttatttttatattttaaataacttttaattgtatatacttaaggtataacatgtgatggtataaaatacataaaaatagtaaaaatattactatagtgaagcaaatgaagatctccatcatttcatacagttaccctttttttgtttattttagtgacaagggcagctaaaacctactcatttagcattaatctcatatatagggcactgttattacctatagtcctcatgttgtgcatcagatgcctagacttgcttatcct

SEQ ID NO: 317445 - DNA, 562 bp, Homo sapiens
tttacttcaatgtccttgaccaaaattctgtgcatttgaagctaatctaataaggctactttctgaattaatattctaggtgcctaaagctgagcctaatttgaattaaaacttacataaattattttaataaaaataaatgcacaatgccttaatcttttctgtacttaggatttactgggtaatattaataagttactgttgcttagtgtggaagcttagcaatgggaatgttaaatatccatatctttttataactacaaaaaagagctactgttatttgcagcattctttatgttttatttttatattttaaataactttwaattgtatatacttaaggtataacatgtgatggtataaaatacataaaaatagtaaaaatattactatagtgaagcaaatgaagatctccatcatttcatacagttaccctttttttgtttattttagtgacaagggcagctaaaacctactcatttagcattaatctcatatatagggcactgttattacctatagtcctcatgttgtgcatcagatgcctagacttgcttatcct

SEQ ID NO: 317446 - DNA, 586 bp, Homo sapiens
aaaataattctgcttgctaacagcccacaatattgagaaatagtctgagtatacatttttaaattgtatgtatatacgttaactacatttatttgcaaaagtatctacacactttaaaaatagttagctacactttgggagcactttgggaggccaaggtgggcggatcacctgaggtcaggagattgagacyggcctggccaacatggtgaaaccttgtctttactaaaaatacaaaaattagctgggcatggtggcaggtgcctgtaataccagctactcaggaggctgaggcaggagaattgcttgaacctgggaagtggaggttgcagtgagctgagaccacaccatcacactccagcctgggggacaagagcaagacttactctcaaaaaaaaaaaaaaaaaaggaaaaagaaaaagttagctaacgactagcctagcctttaaaaaatatttagctaatgttccaaaagagtgattcaagatgtatccatattgtttgggcaaatcagactaaattgaagtctttgctacactcaatttttggaataggtttgagcagtatattcatttaaagagtaaag

SEQ ID NO: 317447 - DNA, 574 bp, Homo sapiens
tcagccctggatactagttgatttatctccaaccctcttaaatccaccccatgtaagctcatggcattcttagggtgatatgcaaaggagctcatggatcatgctcaattgatttgtgctcctcaagaaacttttgcacagttcacaagaaatagaaattgtccataataatttgtggatctaatggggttctgaatcttatggatggtgatgggatcttaatttggtgtttctgggttttggacactgttttgggaagtgtgggctgacaaagtaggggtaacattacctcaattccaaaaaccacaggtggactaatcaaatactgccagatactgttgtgtttctttggtaaacaaagggaaattgagcagtgcccccaaactaggaaaatcctttcgaagctcagacttgatatgctataagggcttagccagtcatgtagagttctgttggaacagaggtaggctggcctaaaagggattctggtgagctatgtgaaaatgccctattacktgtagccacaatgatatgtggccagttggctgaataacctaacaggagtaagtgttaa

SEQ ID NO: 317448 - DNA, 480 bp, Homo sapiens
caaaatttcaacatgagttttgatggggacaaaccatatccaaaacatagcagggctcaatatgactgtcattccacccactgcaacccatgcctcactcttgtgttgacattgtcctttaaagagaaatgatcaataaatcaaattaacaggccagagtaaaattatgaattgtaaatatttaccagagaccaagaaagccctccaatgtattctaagaaggaaacaaaatgggaaaggcaaagaaaaaaatttaagcataagataagctactatcttaatgctacctgcatagtttattatttaattcttagaagacatgaacatgttcaattctattgtgttggaacatacagacaatattattccttaattgaactaatttgaataagtaagtgtgtggaacaaaatctgtctttggaacataagaatcaaaatkgcatctgcatagtggtaaaaaaaataggaattggaagcaca

SEQ ID NO: 317449 - DNA, 470 bp, Homo sapiens
ttttcttcactacatttatcactacctgacatattttatatttgtctgcttcgtgttaattatctgccttcctaggacatcactggctttgttcacttctttatcccagaatagcacctcatagcagatgcttggygtttagtgaaataaggaatgtatgacttccctgtaatgctctgcatgatctagttcctgcccgcctctccagcctcatctcacaagcatttggtggctcttggttctccaggcccactattcttcttcacgttcctggaatgtgacaggtttccttccttcccattgttcctaagcctggaatgcattttcctccaaatccttctctaagtattgcttgtttctcccactagagtgcatgttttatcccagcaggatatttttctcgttgttgctctgcccactttgtatcagtagtacctggtctgtagagtaaaggcactgggatgtaaggt

SEQ ID NO: 317450 - DNA, 470 bp, Homo sapiens
ttttcttcactacatttatcactacctgacatattttatatttgtctgcttcgtgttaattatctgccttcctaggacatcactggctttgttcacttctttatcccagaatagcacctcatagcagatgcttggcgtttagtgaaataaggaatgtatgacttccctgtaatgctctgcatgatctagttcctgcccgcctctycagcctcatctcacaagcatttggtggctcttggttctccaggcccactattcttcttcacgttcctggaatgtgacaggtttccttccttcccattgttcctaagcctggaatgcattttcctccaaatccttctctaagtattgcttgtttctcccactagagtgcatgttttatcccagcaggatatttttctcgttgttgctctgcccactttgtatcagtagtacctggtctgtagagtaaaggcactgggatgtaaggt

SEQ ID NO: 317451 - DNA, 470 bp, Homo sapiens
ttttcttcactacatttatcactacctgacatattttatatttgtctgcttcgtgttaattatctgccttcctaggacatcactggctttgttcacttctttatcccagaatagcacctcatagcagatgcttggcgtttagtgaaataaggaatgtatgacttccctgtaatgctctgcatgatctagttcctgcccgcctctccagcytcatctcacaagcatttggtggctcttggttctccaggcccactattcttcttcacgttcctggaatgtgacaggtttccttccttcccattgttcctaagcctggaatgcattttcctccaaatccttctctaagtattgcttgtttctcccactagagtgcatgttttatcccagcaggatatttttctcgttgttgctctgcccactttgtatcagtagtacctggtctgtagagtaaaggcactgggatgtaaggt

SEQ ID NO: 317452 - DNA, 590 bp, Homo sapiens
attgccctctctatttatgtagttaataatggcaagtttggtgtggctttcacaaagctaaatgcttttagtgcaaattatgtgaccagattctcaaagcttctagaataaaccacattgaaaacatttattaaccctctagatttaggtgagataaaattgggcttgtaatatttaagttattataattgcagcattttttttagaagggaagaactctatttagaaactgtaaaagtcaatcttcatgttggaagctacacaaaagtggcacttctccctgctttctgttacgaatggcacagagggtctcctcacattgtctgygctcgtgttagtgaacaagcagactgaaaagaagacttgattctaattcaatccagtactacattctctactagtgaactagcagtaagcccctctcctaccagtgggtccatctgtggcagttccaaaaccaagtcagaattagcagcagctcctttgatatttaatatacgttgacaaaaggaactaatcagaaatgctccctacttcagagtaaacaaaggataatttctccccaaaccaaccaattaatcaataaaaac

SEQ ID NO: 317453 - DNA, 569 bp, Homo sapiens
ctttgtttttattgaattgcttttgggttcttggttatgaaatccttgcctaagctaatgtctagaaggggttttccaatgttgtcttatagaatttttagtttcaggtcttaggtttaagttcttaatccatcttgagttgatttttatgtaaggtgagagatgaggatccagttttattctcctacatgtggctagccaattatcccagcaccatttgttgaaaagggcgtcccttccccacttcatgtttttgtttgctttgtcaaagatcagttggctgtaagtatttggktcaatttctggcttttctattctgttccattggtctatgtgcctatttttatgccagtaccatgctgttttggtgactatggccttattgtatagtttgaaatcaggtagtgtgatgtctccagttttgttctttttgtttagtgttgctttggctatgtgggctcttttttggttccatatgaattttagaattgttttttctaattctatgaagaatgatggtggtattttgatggggattatattgaatttgtagattccttttggcagta

SEQ ID NO: 317454 - DNA, 617 bp, Homo sapiens
cttttgtggttctttaagatttttgcggcatgaggtttaaaaagatcagttaatcatcttcatggcaggcaaattttgaggaaaagagaaaagataccggaaaaagaaatcaagtttcctttgctagacgccattacagaatgttcctacagagaagaaatggcaagtgcatagatgtccgcaatccaacaacaaagtgtgaaactgggaatggctctgtactagagttagctatcttccagtctagcaatttccgtagccctgctataattgactagcgggattaaggacaaatgaagctgcctggacttttatttttttatcgtgactaagagtatatatgtagaataattwtaaagagggcacctcggcggtccattctgatcagaaactggaatgttgccagctctcagaacttagtgtttgcttcctccaacctcatgttttactacctctggttcattcctaaagaaaataatgtagtttccgccgggcacagtggctcacgcctgtaatcccagcagtttgggaggccgaggcgtgtggatcacgaggtcaggagatcgagaccatcctggctaacatagtgaaaccccatctttacgaaaaatacaaaa

SEQ ID NO: 317455 - DNA, 554 bp, Homo sapiens
tctcaccattgcccttcagcctgggcaagagagacacatctctggtttagaattgcttggtgacaatttttttttcaagctcctatttccttctcctatgtgaatacaaatgctattttatcctcctactgaaattctttccacattttgctgttatcttcaaaactcctgttgtsgtttccgggtcaaggtcagaggccatctttgttgttagcctttcatggtctgttcagtatgaaactcttctgatttattccttgtgagcttttctagcctttcagtgataattataatatgacccctgtgtggtgataatttatatgtgcatcccactctttgggccataatcactttgaattcagaaatcatatctcatacagaaaaagtgatcaataaaatttggtggaatgaaaaaaaactacaaaaaagtctttttgcagaatttgaaaagggatatttgggagtccttcgaggtctatggtgaaaaacgaaacatcttcacataaaaactagacagaaatattcttagaacatcttttgttatgtgtgtattc

SEQ ID NO: 317456 - DNA, 554 bp, Homo sapiens
tctcaccattgcccttcagcctgggcaagagagacacatctctggtttagaattgcttggtgacaatttttttttcaagctcctatttccttctcctatgtgaatacaaatgctattttatcctcctactgaaattctttccacattttgctgttatcttcaaaactcctgttgtggtttccgggtcaaggtcagaggccatctttgttgttagcctttcatggtctgttcagtatgaaactcttctgatttattccttgtgagcttttctagcctttcagtgataattataatatgacccctgtgtggtgataatttatatrtgcatcccactctttgggccataatcactttgaattcagaaatcatatctcatacagaaaaagtgatcaataaaatttggtggaatgaaaaaaaactacaaaaaagtctttttgcagaatttgaaaagggatatttgggagtccttcgaggtctatggtgaaaaacgaaacatcttcacataaaaactagacagaaatattcttagaacatcttttgttatgtgtgtattc

SEQ ID NO: 317457 - DNA, 588 bp, Homo sapiens
gtcataagtgatcatttgaagcagatttctgcaaaatcttttaccagtctctctgtggccctccatgttagcttggggctgaagctggattttagacttaacatgtagcttttcatattgcaattaaactgaacttctttttgtttgatgttttacttgtattcacaaaatgatttctttttatttttacccattaactaattttcttggaaatacataatatatatccatttaaaaaattaaaaaaccccaagaatctccagcgaactatattccccaaaagaacagttcttarctgttcaaatgaatacaccaaagaaatgtaaaattttgtatttaacattaaataactcaccttcattctgagcattgttccatttgctccttttttagatttgctacactactccttttttcccattacattactcagtacatatgaggccataatgtatttgtttttcactatctttcaatcttaatgctataaatctgactatacagacacagatacaaaagggttgcatgattatattgttctcttatgcttataaagtagtaaaatatttgataaaggatgaaatatta

SEQ ID NO: 317458 - DNA, 564 bp, Homo sapiens
ctcagttgctgctgcttcatttgacaactcacacggtaatcttaaagttgaagattgtctttaatttgtgcctatgcagtttttcaaaagaacacggaacagagcaacagaaacctcaacagctacaataccaaagatgaggatttctcacaccttttgtttcagttcattatctcctcttgcctggctaaaatactaatagcgccattgawctctataaaggtaatcaattatgtttctctgagcaacaaaaggaaagggccatttatttgattttattgtttcatttcaattttgtcttatggttttttgccccaacatggaatctctcaaaagtttccatggactccaagtttaagatgttgggatattgaacagttctctctgctcagcagagggtagggaataacattatcacttgaatgttctttgcttaacccttagacttggttccttctatgttcagagtctcatcatcaggggaaggaaagggagtgagggtcagggataggggtcttggtgatgcatcctctcccgagccacagaaccaaagagtttatagag

SEQ ID NO: 317459 - DNA, 564 bp, Homo sapiens
ctcagttgctgctgcttcatttgacaactcacacggtaatcttaaagttgaagattgtctttaatttgtgcctatgcagtttttcaaaagaacacggaacagagcaacagaaacctcaacagctacaataccaaagatgaggatttctcacaccttttgtttcagttcattatctcctcttgcctggctaaaatactaatagcgccattgatctstataaaggtaatcaattatgtttctctgagcaacaaaaggaaagggccatttatttgattttattgtttcatttcaattttgtcttatggttttttgccccaacatggaatctctcaaaagtttccatggactccaagtttaagatgttgggatattgaacagttctctctgctcagcagagggtagggaataacattatcacttgaatgttctttgcttaacccttagacttggttccttctatgttcagagtctcatcatcaggggaaggaaagggagtgagggtcagggataggggtcttggtgatgcatcctctcccgagccacagaaccaaagagtttatagag

SEQ ID NO: 317460 - DNA, 611 bp, Homo sapiens
ttggcagataagtgtgcctaaggtttatacagtctgtccgcttggatgtatacaaatttagatacatattttaacatgtgttctcatagatgactttataacaacacacattacctataggtgtctagactgtgtacatacaagtgtgtacagacaagcttcatacgtatatactgtaatccgttacaacaaataaattttaaatcatcgtttaacatgtatgtggtacttctacagtgtacattgttttcattatttattgtaacattgaaaaccacagtgcagggaaaacaaaagtatcccagcatcttcatcctgtacacttggaattaatttcatttgggcatatccaagataaactcaactttcaagaaatcttgtatattatttaatcatctgtgttaggatgacacctatgmttgatgacttcggttgaatagctttattctggatttttcataactaaagctaaatccaaagacctgaaaaaggacaaaaagaaaaaaaaaaaaagaaaaaacaaagaaaaagaagaaaaaataataaagtcaagcgcaaaccgatggggagacagtgggctctggtttccaggattgagacaatggtactgc

SEQ ID NO: 317461 - DNA, 611 bp, Homo sapiens
ttggcagataagtgtgcctaaggtttatacagtctgtccgcttggatgtatacaaatttagatacatattttaacatgtgttctcatagatgactttataacaacacacattacctataggtgtctagactgtgtacatacaagtgtgtacagacaagcttcatacgtatatactgtaatccgttacaacaaataaattttaaatcatcgtttaacatgtatgtggtacttctacagtgtacattgttttcattatttattgtaacattgaaaaccacagtgcagggaaaacaaaagtatcccagcatcttcatcctgtacacttggaattaatttcatttgggcatatccaagataaactcaactttcaagaaatcttgtatattatttaatcatctgtgttaggatgacacctatgcttgatgacttcggttgaatagctttattctggatttttcataactaaagctaaatccaaagacctgaaaaaggacaaaaagaaaaaaaaaaaaagaaaaaacaaagaaaaagaagaaaaaataataaagtcaagcgcaaacygatggggagacagtgggctctggtttccaggattgagacaatggtactgc

SEQ ID NO: 317462 - DNA, 534 bp, Homo sapiens
gggtatattgggaacgtgctctcgtgaataataaaaagcaacatatttttatttggccttataaattrggttgtggtaatgtaaactttgatatatagtctttttatttttctcttattaatctgccaaagatgggaacagatacaagaatttttcaaattggcttttgtaagacagttgatgattgtaatagtgtttaatcttccagaaagctttatatgttgttccacaataaaattgatatttgtttcagcaaagttttcctgacactcacaaacccacaaactgttcctcttaatgcagatattgtagaatctacaaagttcaaatccatttttgatccaaagaaagtagaggagtatttgagacatgagtgtacccagccctttttttaatcagaggcaatgcatgggtctggctggttacactttgccaagaagacttgtcttatgaaacccaaggtatattttgttatgccattttatgtccttttcttttaacattgtggaaagtggtatgttgaatcaagtgtaa

SEQ ID NO: 317463 - DNA, 591 bp, Homo sapiens
aatcagtatgctgtagagatgtctgtactcccatgctcactgcagcattattcacaatagctaagatttggaaacaaccttagtgttcatcaatgggtgaatggattttaaaatgtagtatatatatgaaatgcaatactattctcctatttcaaaaaaatagaaaatcctgtcatttgaggcaacacagatgaacctagaggataatatgttaaatgaaataggccaggcacagagggacaaatactatataatctcattcatctgtggaaactaaaaaagttgaactcataagagtagagagcacaatattattctttttaatgtccaattcagcaaatcctgggattcaaccaaagagatcatctatttcaacctgctgcctaattcagctgattcctactaatagcatcctagcyaggtagtcactaagcctttgctaaacagtcacatgagtgaagaattcactccttcatggggcaagctgctgtcctctagacaactttaatcactggaatcaaaatcagcccctctgtcacttttaccctttggtcctaactctgacttagaacaggaaaaactaacctctct

SEQ ID NO: 317464 - DNA, 605 bp, Homo sapiens
actaaaatgtaaggtccatgagaacagggaccacatctaacttattcatggttctcttgcgagcacttatgtggtgacatatttttgggtgctttttatttatttgtttttgtttttactgaccactattcaaacactctattttgaggtgactccctaaagtgtgcagtacaggtgaaatgcagtgctcctttctcagtccctggcggccaggactctagtatatgctctaggagaggtcacaccctaattggctcttgtagaagtgacaygaaaacataggacagtgtggacgttactcttggctgcggcagcagcagcagagacaagtgggtcagcagaggcttcctaaaccagtctattgcagggcatgatcttggctttgttcctattcctagtctcccttggaactaggaattggttcctgcttcactctcctgccttcctatcacttcttcctcatttattcttcctgaattatttggtttcttcctcagacgttctttcctacttttttgtctaaggcagcttctgttgcttgcaaccaaaaattctaataggcacatagtaggcactcaaataagtcttaaatgaaaataaaatta

SEQ ID NO: 317465 - DNA, 661 bp, Homo sapiens
gcaacccgtgccagtacggaacagacgatatgtttgcctgctagctgcttggatgaataattgaaaagttcgctgcagtctgtgcttcgtcaagtcccgggtgccgggagaacaccttcccaacacgcatcagggtgggcgggagcgggcagaggaggcgggacccgagggaggagagtgaacccgagcaggagaagcagcccaggcagccaggcgccctcgatgcgagaggctgggcatttatttttattccaggctttccactgtgtggttatgtcactttctcaaacaaatgtgtatatggagggagatcgatgctgataatgtttagaagattaaaagagcattaatgctggcaacaataacgtaaacgtgtggacccagatttcattgatctggaacttgatccggcgcgtttccagtaagcccgacggcgcgctcttcccagcagagcgctcrccagcgccacggccccgcggttttccagcggtgccgcttcgccagctctgcgcgggttctcccgtctgaccgcagctcctcccccgcgaggccccagcccgccttacttccccgaggttttctcctcctctcgcggggctctctgccctctgcaccccctcccccgacctctgcaccacccgcccctgtgcgcacacaccgc

SEQ ID NO: 317466 - DNA, 535 bp, Homo sapiens
atattaaacaatattctcacattatagcagcagtaatgtcacaaggagaaccaactgtggagcatcaccaccttcgataaatctagaaactggatttgatttcttgagagtctagtgatgaggctctttttaatraaaaccttgccactgcttctgtccctgaccccctacgaagggccagagatgttgagtgacttcctccaggccacacagtggagtcatatggcactggccagggtgagaactgacagtaggcactgacccctgactctggcctttttcaatcagttgctttgctttatttctggttttattccagagaaaagagataggagagtccttttggtcaatgattgagcacaactcacatctctttgggtttcgagtaaaatggtccttgacttcccaaagctaattaaaatgtaaaactcttgctttatttcaaataactttagttcagacctaatttattgctaaggtggttctcagggaggtagagcattggaatagacaagtgtgtctcctttaaaagtca

SEQ ID NO: 317467 - DNA, 616 bp, Homo sapiens
ggaattgctggactatatggtcattctgtttttaattttgtgaggaatacccattttttaaataatggctgtactaatttacctttccaccaacagtatagaagtattcccttttcttcacatccttgtcaaattttgtctcttgtctctttgataatagcmatcctaataagtgtgaggtgatgaattaaacaccaattctgtgaagtctcttcaagaatgagagaacaactctcaattcattgtatgaagctagtattattctgatatcaaatacagacaatgacaatataaaaaaggaaaactacagaccaatgtcctcatgaatttagatgcaaaaatcctagcatcaaaatatgagcaaatggaattcagcagtatatgaaaataattagacatcatgaccaagtggggtttattccagggataccagcccagtccaatactagaaaagcaagcaatgtaacccaccatattaacaggctaaagaagaaaaattacactattatatcaatcaatgtataaaaagtatttgacaaaattcaacctccattcatggtaaaactcttacaaaaataggaatataagagaacttcctcaacttgataaagagaat

SEQ ID NO: 317468 - DNA, 616 bp, Homo sapiens
ggaattgctggactatatggtcattctgtttttaattttgtgaggaatacccattttttaaataatggctgtactaatttacctttccaccaacagtatagaagtattcccttttcttcacatccttgtcaaattttgtctcttgtctctttgataatagccatcctaataagtgtgaggtgatgaattaaacaccaattctgtgaagtctcttcaagaatgagagaacaactctcaattcattgtatgaagctagtattattctgatatcaaatacagacaatgacaatataaaaaaggaaaactacagaccaatgtcctcatgaatttagatgcaaaaatcctagcaycaaaatatgagcaaatggaattcagcagtatatgaaaataattagacatcatgaccaagtggggtttattccagggataccagcccagtccaatactagaaaagcaagcaatgtaacccaccatattaacaggctaaagaagaaaaattacactattatatcaatcaatgtataaaaagtatttgacaaaattcaacctccattcatggtaaaactcttacaaaaataggaatataagagaacttcctcaacttgataaagagaat

SEQ ID NO: 317469 - DNA, 616 bp, Homo sapiens
ggaattgctggactatatggtcattctgtttttaattttgtgaggaatacccattttttaaataatggctgtactaatttacctttccaccaacagtatagaagtattcccttttcttcacatccttgtcaaattttgtctcttgtctctttgataatagccatcctaataagtgtgaggtgatgaattaaacaccaattctgtgaagtctcttcaagaatgagagaacaactctcaattcattgtatgaagctagtattattctgatatcaaatacagacaatgacaatataaaaaaggaaaactacagaccaatgtcctcatgaatttagatgcaaaaatcctagcatcaaaatatgagcaaatggaattcagcagtatatgaaaataattagacaycatgaccaagtggggtttattccagggataccagcccagtccaatactagaaaagcaagcaatgtaacccaccatattaacaggctaaagaagaaaaattacactattatatcaatcaatgtataaaaagtatttgacaaaattcaacctccattcatggtaaaactcttacaaaaataggaatataagagaacttcctcaacttgataaagagaat

SEQ ID NO: 317470 - DNA, 591 bp, Homo sapiens
ttttttcatcagccactccagtgctgggatggtgcctgatcacatttagtagcagtgattgcacgaatgaagcctatgcatggccccagcttaccaaagctacttgctgctgctgctgctgctgcttgccactgtcatcaccaaatgtccaccctgccagcaacagagaccagtgctgagcccccagtggtggtaccgtccctcaaagagatcaaccaggcatttagtgtcaagtcaattacattggacctcttctaytctgaaaagggcagcaatctatcttggctgagatagacacctgttgcagctatgtgttttccttttctgctactgctatccaatgatttgcaaggttttaatgtgccaacatgggattccacaaaacactacctcaagaccaagtgacccattttacagcagaggtagtatgacaaagggatacgtgaccatggaatccactggttctatcacatactgcactactgagaagacactggcctgaaagaccagtggcatgccctcttaatgatacagcaaaggggccattttggatattataccctggaaggatggtgcactatcatccaggac

SEQ ID NO: 317471 - DNA, 591 bp, Homo sapiens
ggcagtgaatgaaaaagaccaagtccttgcttctgcagaatgatgttctaatgggggaaatagacgtcaacaaacaaataaacaaatacgcaggcagacttcgctacagtgcgcctcacagacattgtgtattttacaaattgaaggtttgtggcaaccctgcatggatcacgtctgtctgggacatctttctgacagcatgtgctcacttcatgattctgtgtcaccttttggtaattctcgtaatactttgagctttttcattattattattgtgtctgttacagtgatctgtgatcagtgatctttgctgttactattataattgtttttgggtaccaccaacagcacccatacaagatggcaaacttaacagatgaatgttatgtgttctgactgtttggactccctatgccctgagacacacaaatattgaaattaggccaatgaatagccctacaatgggctctaagtgttcaagtgaaagtaaaagtcacacaactctcactttaaatcaaaagctgtaagtaattaaasagtgaggaagacacagtgaaagccaagacaggctgaaagcaaagcttcttgtgc

SEQ ID NO: 317472 - DNA, 570 bp, Homo sapiens
aatagacagtaaatgctgtgctgtctggacttttctcaacaggaaagctttggaagtgggcatttttgatagtctctactgcaaatcattgaatgcagtcattggaattcaactgcagtgccagcacatttgaaagaggcctgataaaaatgcaaagtctatgttgtctccaatgacttcagccaagtaaaataagcytagaggggaaaataaacctttttctaaaacttcacacagggaaaaagttgcctaagtttttgagaaatgactagtatttccaaaatggagttggattgggaatgtgagaagccaaaggtaaccactatgaaaaataacggggcaattgggaagcacaggttaccttaatcaggcttggaaagggagtgatagaaatgtaaatctaaagctgcctctagatcccctggctaaatagaaactcctagaagcagaatcaatttttcactgttcaatgatgactgcgttttctataggctgaaagcacagaagtaggaaagtttcaaagttctcaagaaataacaggtgaatgaattaaaaatcattgcttttgcc

SEQ ID NO: 317473 - DNA, 570 bp, Homo sapiens
aatagacagtaaatgctgtgctgtctggacttttctcaacaggaaagctttggaagtgggcatttttgatagtctctactgcaaatcattgaatgcagtcattggaattcaactgcagtgccagcacatttgaaagaggcctgataaaaatgcaaagtctatgttgtctccaatgacttcagccaagtaaaataagcttagaggggaaaataaacctttttctaaaacttcacacagggaaaaagttgcctaagtttttgagaaatgactagtatttccaaaatggagttggattgggaatgtgagaagccaaaggtaaccactatgaaaaataacggggcaattgggaagcacaggttaccttaatcaggcttggaaagggagtgatagaaatgtaaatctaaagctgcctctagatcccctggctaaatagaaactcctagaagcagaatcaatttttcactgttcaatgatractgcgttttctataggctgaaagcacagaagtaggaaagtttcaaagttctcaagaaataacaggtgaatgaattaaaaatcattgcttttgcc

SEQ ID NO: 317474 - DNA, 570 bp, Homo sapiens
aatagacagtaaatgctgtgctgtctggacttttctcaacaggaaagctttggaagtgggcatttttgatagtctctactgcaaatcattgaatgcagtcattggaattcaactgcagtgccagcacatttgaaagaggcctgataaaaatgcaaagtctatgttgtctccaatgacttcagccaagtaaaataagcttagaggggaaaataaacctttttctaaaacttcacacagggaaaaagttgcctaagtttttgagaaatgactagtatttccaaaatggagttggattgggaatgtgagaagccaaaggtaaccactatgaaaaataacggggcaattgggaagcacaggttaccttaatcaggcttggaaagggagtgatagaaatgtaaatctaaagctgcctctagatcccctggctaaatagaaactcctagaagcagaatcaatttttcactgttcaatgatgactgcgttttctataggytgaaagcacagaagtaggaaagtttcaaagttctcaagaaataacaggtgaatgaattaaaaatcattgcttttgcc

SEQ ID NO: 317475 - DNA, 641 bp, Homo sapiens
atccaataatgattttaagacagaccctccccatccatcaaggcctggctcctcccaggtgggtgatcagtgcttctggcaccagctggccctgartggccagtggagctgcttagagcctgagccccaagtcttgtgtgttaggccccctgctcccagggtctctgtggcaatgtgctggcacctaattatttgctgaccctgagaagcatgcattgctgagatttaccagcatttatggcttactgaatatcaaatatttattagcagagtgtacagttattctattttctttcttccttgtttgaattcaaggaatcttattatttttactttaaaggctcttgatcatgcagattagttccaaaggaagggttctctactggacaccatcacctctcccatagtcttgtcattctatcagtactgaagggccaccagttcagagcagggaagtgaaggggggttatttccattcttcttacctcaaacacctgtaggtttctcagggaacaagcccagaggtacaaatgtgaacctacttttgtaattgatttttccaacataaccccaattgactgccttagttaatctttccaacagaactgcaggccctatgtcctcccgggagagtgccctcc

SEQ ID NO: 317476 - DNA, 258 bp, Homo sapiens
gatttggggaaggacttccaacccaacagatgttccaaacgaaagagaactctttctttggaccagcttgtatgaaagcagacraatggacaacatgacctcctgcaaggaggccctgcttccatcctttcgaggctggggctagatggataccccaaaagaaatgtcttagtcgtgacaatagcagctcccacaatgcaccagggcatatgcaaagtcaccattctgtgaaatataaaagctcatataaagcatctc

SEQ ID NO: 317477 - DNA, 615 bp, Homo sapiens
ttaaatatgattcccttgaaaactctcacagataaattaaattttaatttcatataaaataattttttagtataagtatttcccatataatatttkggatatgtttacacaaaaaatatattcattgtttatctggtcattgtttaatatcattgttcttcattaatatatcgttaaacaatatatcattaaacaaaatcattaaacaatatacattgtttatctgaaattcaaatgtaactgggtgtctgtatttttgtttgctaaagctgacaaccttagtcttgtcccaggtcacatagcttgtaagcaatggagctaagcctccgtctcaggctttcagcccaaagtcaaagagcatcctgctgtttcacaggcctgaccataagcggattccctgagctacatggcagtcctagactcaatccagttgagacttcaaaaacaaatgcgatttaagccttggacacacctcaaaaatatcaaaagtgataaaagtgatcatgaaaatacaatttaaaaacaatatgcaaataaatgcttatatatattatatatgtatatatataaagcatgtcaaatcaagatggagtatgaaatgagagaagaaactac

SEQ ID NO: 317478 - DNA, 549 bp, Homo sapiens
ttcaggtcccagctgtgtcgtgttagtgaaccccagagtggttgaacccctctggcctgtagtttcctcatctgtaaaatatgcacagggttgtgatagggctaaatgagatatgaartgtattaagaggttctggctcattgttaagcactcaataaaaggtagctgctgttattatttttattataatccaaagatttggctatttggaagctaatttttcaggagtcttgtgtagggctgctgaggaggtataggacaggagaacgggagtctagctgccacagggaagctgtatttttagtccttcctagaaatggtgttgggataggcactctcagagcccttgagaagtgggtgagcaaggggacatggcagcagcctgtgctgagggtccttggacctcatgctaggattaccagcccagagggacgcttcataccgctacacctgggatcggagtctgtttctgatctaccgacgcaaggagctgcagagaatcatggaagagctggatttcagccagcaggttggtatggcctccatgcc

SEQ ID NO: 317479 - DNA, 549 bp, Homo sapiens
ttcaggtcccagctgtgtcgtgttagtgaaccccagagtggttgaacccctctggcctgtagtttcctcatctgtaaaatatgcacagggttgtgatagggctaaatgagatatgaaatgtattaagaggttctggctcattgttaagcactcaataaaaggtagctgctgttattatttttattataatccaaagatttggctatttggaagctaattttkcaggagtcttgtgtagggctgctgaggaggtataggacaggagaacgggagtctagctgccacagggaagctgtatttttagtccttcctagaaatggtgttgggataggcactctcagagcccttgagaagtgggtgagcaaggggacatggcagcagcctgtgctgagggtccttggacctcatgctaggattaccagcccagagggacgcttcataccgctacacctgggatcggagtctgtttctgatctaccgacgcaaggagctgcagagaatcatggaagagctggatttcagccagcaggttggtatggcctccatgcc

SEQ ID NO: 317480 - DNA, 560 bp, Homo sapiens
gggacctaatcctggagaagtctacaaaccaaggtatrcccacttcttcaaacaaggaaagcactggaggcagttgttaaagtaaaaaatccaaactagagaacagagcttgactgtgcatggaaaggcagaggtggcagatctgctttgtaagcaaaagccagtcagacagaagcagtcatgagtttgctcatctgggctgtgaacttgagtacctgttttctcttaaaaactgtattaccatgcctgcaatcccagcactttgggaagccaaggtgggtggatcacaaggtcaggagttcgagaccagcctccccaatatggtgaaaccccatctctactaaaaatacaaaaattagccaggcatggtggcatgcgccctgtagtcccagctatttggggaggcttaggtgaaagaattgctggaacccaggaggcagaggttgcagtgagccgagatcatgccactgcactccagcctggtgacagagcgagattctgtctcaaaaaacaaacaaaaaaaaaaacccaaaaaaactgtatttacaatgaacaccata

SEQ ID NO: 317481 - DNA, 615 bp, Homo sapiens
atgtttgtttattcttgagataatcagctaatgattttgatttgaaaatgtgtatacaaataagtatatayatcacagggaaaggaacacaaggtgtgtttgaaatttttattttaataattactaaacaaaggtagaataaaacatatcccttctccctagtgtgctgataagcaagttcgtactcctttacagttgggaacaaataggatgctatggaattttaaaactttaaataagaaaatacagaaaactgctcatgaaattagtaaatgttgtttatataaactcactgataaggagtcaaatgaaatcagcaggctcacatcttgctagcacaactgtaaaccggtgtaccttttcaagaggacagtttggcagtatagcttaggacccttaaaactgtacactgcagccaggtaaacgctattcaggaaatattctagataaataatcctaaatatggggaaagattcccatattggggcttatcacagtatttactataacagtggaatattggaaataattggtcaatcatagagagatcagtgaataaatgttggcatcttaaatggatgttacacctccattcaaattgtgtttataaaaagt

SEQ ID NO: 317482 - DNA, 581 bp, Homo sapiens
atggatgttacacctccattcaaattgtgtttataaaaagttttgcactaatatggaaaaagcaattataatagcatgacaatggaagcaacaaaatgtaatattgcttttactttgaagatatgtagaataaatctcaagatagatgcaaagccatgaagaattttaatcagcaattaaaaaacactcaattcaaggtttgaattagcagagtaggatgactatattttaaaaaagtatattgtacttaggtgatgaaaaccctgaataccctgatttgatcactacacattatatacatgtaacaaattttctcttataccccacaaatttacacaaattgtttaaagaagaaaatttgggcaaagaacagtgttttgttctctatttttccattgactgaactattgaaatatcattttgtatataatccttattaaatgtctttaaatcccaatatttgtaaattaartttatattttacaaagcactcttaattcctaaaacagatgatgctattgttatttcatggaatttatttattattattattattattattattattattattattattt

SEQ ID NO: 317483 - DNA, 593 bp, Homo sapiens
ctcaattataattttaatccagattcttcctccccttcctcttctttttctgycttcccccttctttaaatttctccccttcttcctcctccctcatcttccttttctttgtcttgggttctcatatggaatcgtaatatctcactcagatgagtaatttcttatatcagggactacgtcctcattccaaaggactctcctacccatcatcacgtgtctcccttccctcttgcagtctgttctttagcatgtcaatctcactacatgttatgggttgagttgtgtcccaccaatattcatatgttgaagtcctagtcccttatatctcaggatggaagtttatttggaaacagagtcattgcagatgtaatcagttaagatgaggacaaactggatagggtgggccctaatccaatatcaccagcatccttatagaaacaggaaatttggacacagaccacacacagggaggaaggcagagattgaagtgatgcatctacaagcccagaaatgccaaagattgccagcaaaccaccaagagctagtaaagagataatggaacagtgtcttcctcacagccctcagaaggaacc

SEQ ID NO: 317484 - DNA, 571 bp, Homo sapiens
actctgttttgtttaacatagtattctcaatacatagtgcaatatctggcatatagtaggtacataatacatttttattgattgcttgtctagggaaataaatttaatcatgtggcaaaacagaaatcgtgggcaaaacagaaggcagatgccgttgctcaagtgagaaaaatattaaactgacttcgttaggtctgaagagatgtattatcagtttctacctgtccaattgggggatcatttactaaacattcctcagatgtgtagctcaatgtagactccacagagagtgcaaagaaataatgtttcatactctttggcttcaaggggtttatgatccagttggggaaattagacattgaatggagataagcagcaataatacaataaaatgctcagacctatcycactgatgataatgctgtgggaggtcccaggaagaggcatgggtgtggccatagagattcacacagaatgtagaatgaagtctctctgaggcagtgtctttcagctgtgcatccccagggtaccaaagagcttggtcttcaaaaagagtttgttgaataaacaa

SEQ ID NO: 317485 - DNA, 607 bp, Homo sapiens
tgctttgttgacctttacctttattattcctgttctccttgtttttttaaggtgttgaagaatagtctgtcattaacacacagccaatgaggtcatcagactctttcatacatggacaggttttgagatgtgccccttgtggaagaaaaccacagatgttttagagcactgaattgtaagcatgcttagagatgatttattccattaagggcaaatatttaatgtgctcaatttgaatgcatggttcacgttcatttccccccgcactgaggtcagatgcatcctggtattcccaatactgttagagacggcactgcaggtgaggattctttgccatccatagttccccctacttaaagtgtggcccacrttgcaatcacctgggagttttttttagagatgcagaatattgggccctaggccaggcctactaaatcagaatctatattttaacatcttcagatgaatcattaggcattgaagtttgagaaacacttggtctaacaccattattttgcaggtgagaaaactaagagcctcagaggtaaggtaatctacccaagactatgtagaagaaggaggttttcatagcaaaattaagcagggg

SEQ ID NO: 317486 - DNA, 476 bp, Homo sapiens
agcttgtttacttttcatgtaactgtatggttttgaatgattttcttagtcttgagttttatttattttttatttttttgcactgtgatcttagagagtggttggtatgatttcaattttttgtttttggggttttttttgcatttgctgaggattattttatgtctaattgtgtggttgattttagagtatgcaccatgtggcaatgagaagaatgtatattctttagtttgggggtggagggttctgcagatacgtgtcgcgtccatttggtacagtgttgagttctttgttaattttctccctcgattatctatctaatactgtcagtgggaygttgaagtctcctgctattattgtgtgggaatctaagtctcttggaaggtctctaagaacttgctgtatgaatctgggtgctcctgcattgggtacacatatgtttaggataattaggtattcctatgaaattgaacccc

SEQ ID NO: 317487 - DNA, 530 bp, Homo sapiens
  misc_feature (1)...(530): n = A,T,C or G
tttgagaatttggtttatttgatagcttggataaatatttatgtactacatcatgcatttgaatttaatatanaatcagtttaaaatattcccaattgcaacatagctaacaagctgaatactgaataggattactgttgtaagtcagagtgttctcctggttttmcttaggtgaaacgatattctcatatgcatgcccctaacatcaaatatatcaacttgttatcaaaaggccagtttggaagacttccattttcaattactcccttatctagtcaaatagaattacaatgaataaaaaaattacagccaatgtaattccaaacattagagggtagacaagaaacagtctcttgctctcaaagaataatgccttacctgaatatgacgctttgttatttttaactttctttaacacaaacaatcccatttttgtttcctttaataaatactccattttataaataaggaaactggatcagctacctaaaattacacaagtaggatgaggtgggcctacggctaacatt

SEQ ID NO: 317488 - DNA, 554 bp, Homo sapiens
taatatttgtaaagtgtttgatacataataagcagtaaagtttttttttaataaataaaaatagaaatcaggaaaggccaagtcacacagctaatgatggtggaacagcaataggaaattagtctgtataagtgtagaaccaaggacctaatgactaagctttaatataaaaattctagtctcatgttgtgaaatccaggctgcagtttgacttgattatttgttgggcagtgggattaagttgatcatatatatgtttggtagatactattgcagatggattgsggggaggaagaactgaagagtattaagtcatgaaattgttcaggtgaggcataatgaaggtttgaactcaggctagatagaacaaagcaaataatgagtaaaaaactgagggtgcaatttgttgacattctttattattggattcagcctatgtgaaggaccccaaatgcctttctgtctttaatagcctcacggcaatataaacataagaaactgttatttaagtccatgctgtagagaaggtagctcaggccctgacagattaattt

SEQ ID NO: 317489 - DNA, 623 bp, Homo sapiens
tatgttgttcccctctgggtgtccatgtgttctcatcagttagcttctacttataagtgagcacatgtggtatttgattttctgttcctgtgttagtttgctaaggataatggccttcagctccatccatgtccctacaaatgacatgatcttgttcttctttacagttgcttagtattccatggtgtatatgtaccacactttctttagcctatcactgatgggcatgtagattgatttacctatgtaacaaatctgaacttgtatccctgaacgtaaaagttttaaaaaagtgccttgattaccaaggatggcccacaggaccagactgcattctaaagcaggagccccctsttctggacatctgctacatgaggtaggtggataacttttttaggactatttctacttagagttctgggctctcatttcatccagtccagtcctcacaagtccttcaatattatgctctgctccacatctttgtacagccttctattccctccatgcctgtttgctgaggatcttatggcagaggaaactttaacaattgcacactttttatttctactggaattcacccctaccaggcaagtaggatagaatcctttaaacacttttgg

SEQ ID NO: 317490 - DNA, 588 bp, Homo sapiens
taggaagtaactaactttcttttgatctaactggctcatataggcagaagggacttttcttgtctcagatgagactttgaactgaaatgagtcatgactttgggggactgtggggaaggcaatattgattttgaagtgtgaggacataagatttgggcggggccaggggcagaatgatatggtttggctgtgtctctacccaaatctcatttttaattgtaactcccagaattcccacgtattgtgggaggaacctggtgggaagtaattgaatcatgggggcgatctttcccatgctgttctcatgacagtgaataagtctcaagatctgacggttttaaaaatgggagtttccctgcgcaagctctcttctcttgtctgccacwgtgtgagacgtgtctctcaccttccaccatgattgtggggcctttccagccacgtggaactgtaagtccattaaaccttttccttttgtgaattgcccagtcttcggtatgtcttcatcagtagcatgaaaacaaactaatacaatgccctttttccatttataatctacctaatccttcctcctcttgtaaaactaccaac

SEQ ID NO: 317491 - DNA, 588 bp, Homo sapiens
taggaagtaactaactttcttttgatctaactggctcatataggcagaagggacttttcttgtctcagatgagactttgaactgaaatgagtcatgactttgggggactgtggggaaggcaatattgattttgaagtgtgaggacataagatttgggcggggccaggggcagaatgatatggtttggctgtgtctctacccaaatctcatttttaattgtaactcccagaattcccacgtattgtgggaggaacctggtgggaagtaattgaatcatgggggcgatctttcccatgctgttctcatgacagtgaataagtctcaagatctgacggttttaaaaatgggagtttccctgcgcaagctctcttctcttgtctgccactgtgtgagacgtgtctctcaccttccaccatgattgtggggcctttccagccacrtggaactgtaagtccattaaaccttttccttttgtgaattgcccagtcttcggtatgtcttcatcagtagcatgaaaacaaactaatacaatgccctttttccatttataatctacctaatccttcctcctcttgtaaaactaccaac

SEQ ID NO: 317492 - DNA, 623 bp, Homo sapiens
tgactcttcttgtatcattattctgtggcagaccagtccctcacccctttcattgatagactctttctttgtaatcactcatatattcagttagataactttgaatatgaatgccctgaatcattatatattggctgttacagaaacttcttgccttcttggagagcaatcttattttcataacttcaagttctttattttcattaaaatgataaatgattatagttacatgtttttcttttctttttttttgagacggagtctcactctgtcacccaggctggagtgcagtggtgcaatctcagctcactgcaagctccttctcccaggttcacgccattctcctgcctcagcctcctgagtaactgggactacaggcccctgccaccatgcccggctaattttgttttgtacttttagtagagatggggtttcaccatgttagccaggatggtcttgatctcctgacctcgtgatctgcccgcctcagcctcccaragtgttgggattacaggtgtgagccaccgcgcccggccagttatatgttttttgaagaagaacttatatcatatattttttgtgtttctcatctcccagactctagagcagagtctaatcacaat

SEQ ID NO: 317493 - DNA, 623 bp, Homo sapiens
tgactcttcttgtatcattattctgtggcagaccagtccctcacccctttcattgatagactctttctttgtaatcactcatatattcagttagataactttgaatatgaatgccctgaatcattatatattggctgttacagaaacttcttgccttcttggagagcaatcttattttcataacttcaagttctttattttcattaaaatgataaatgattatagttacatgtttttcttttctttttttttgagacggagtctcactctgtcacccaggctggagtgcagtggtgcaatctcagctcactgcaagctccttctcccaggttcacgccattctcctgcctcagcctcctgagtaactgggactacaggcccctgccaccatgcccggctaattttgttttgtacttttagtagagatggggtttcaccatgttagccaggatggtcttgatctcctgacctcgtgatctgcccgcctcagcctcccagagtgttgggattacaggtgtgagccaccgcgcccggccagttatatgttttttraagaagaacttatatcatatattttttgtgtttctcatctcccagactctagagcagagtctaatcacaat

SEQ ID NO: 317494 - DNA, 622 bp, Homo sapiens
cttgcttgtaagatttatgctgagaaatctgcttttagccaaacagggattacttaacatgtgacttgacacttctgctgtctttaaacttctttaactataatgtgcctcagaggggacctttgtgggttgaaactatttggaaacttttgggttcctgggatctaaatgttcatgttttcagagatgagataaattttcagttactattttattaaataaattttctatgatttttctttatatattctttttctgaaattcccataatgtgagtatgyattcacatttttgtctcacaagtctcttaagttttcttctttttttaatttctttttttctctcactaagctatttcaaaagacctgtcttaaagtttagaaattctttcttctgtttaaacctgtctgtttttggtgttcttgcttttattttttatttcaatcattgaattattcaactccacattttctgttaggttctttttgttaggttccataataattatctctttgttgaatttctcattctgatagtgaattgtatttttgattttgttgaattatccatctgatttctcttgtatcttactaaactttcctcataatcattattttgaatt

SEQ ID NO: 317495 - DNA, 622 bp, Homo sapiens
cttgcttgtaagatttatgctgagaaatctgcttttagccaaacagggattacttaacatgtgacttgacacttctgctgtctttaaacttctttaactataatgtgcctcagaggggacctttgtgggttgaaactatttggaaacttttgggttcctgggatctaaatgttcatgttttcagagatgagataaattttcagttactattttattaaataaattttctatgatttttctttatatattctttttctgaaattcccataatgtgagtatgcrttcacatttttgtctcacaagtctcttaagttttcttctttttttaatttctttttttctctcactaagctatttcaaaagacctgtcttaaagtttagaaattctttcttctgtttaaacctgtctgtttttggtgttcttgcttttattttttatttcaatcattgaattattcaactccacattttctgttaggttctttttgttaggttccataataattatctctttgttgaatttctcattctgatagtgaattgtatttttgattttgttgaattatccatctgatttctcttgtatcttactaaactttcctcataatcattattttgaatt

SEQ ID NO: 317496 - DNA, 578 bp, Homo sapiens
tttttcagcatttcttcatcttttttcagcaaatattttttgagaacctaccatgtgccataggttatgagctctctaccataaaaaactgcctgtaatattgtatatgataataactaatgtttacagagtagctactatgtgttatattctgttttgagtactttatacatatcaactaactaataatcccatagagtaaattgtattattatttctatttcacagataaaatgtaggtacagaaacctcaagcagctcatccaaggtcaaccctttaatgacccagtgcttaatgacattttactgtctttcaatgastagtttctaaataatgataaatatttgcttctcctcaccttttctttgttcttgttaatggtttatgtttcacagtaaggctactttccctagcattaagatccatgttcttaagaaatgatcctccttaaaaattcagtcttaatcctggtcaggtagggaatctccttttcactttttcatctgttcctactgtttccccagcctgaaataccttccattccctctgtgtcagtctaaacacaaagttggaagca

SEQ ID NO: 317497 - DNA, 573 bp, Homo sapiens
ttaatgtatttccaagctagaattagaatataggttatcaggttatcactgtagccacaaggagtaggctagtggaagaacgaaaattttagaaaataggagagaacaagagagacaagaaggtggatttttctaagagtttctattcacaggctgagattcacctgtcacacttcaaagaatcctgcttcctcttccttggagtaagagctgccattttctttattgaattcctaaaagaaatgacaataaccacattcatcaaaatattaaaaatcgctttatcaaaattataccccctttaattagtctatttcacaccaagttaaaaccctattttctggggaggtcttcctcgacattgctctccttccacccctccmagggttacacgcgcttgttctgcttccatggcaccctgtatttccctaatagtccatttaagacattttcttgtttccccatctcaacagccttcaatgaaggcagagaccgtctgtaacttttcatcagagcccagcaagaaaacgggtgaagcacagtcctctgccattttcctagctgatgagcccg

SEQ ID NO: 317498 - DNA, 573 bp, Homo sapiens
ttaatgtatttccaagctagaattagaatataggttatcaggttatcactgtagccacaaggagtaggctagtggaagaacgaaaattttagaaaataggagagaacaagagagacaagaaggtggatttttctaagagtttctattcacaggctgagattcacctgtcacacttcaaagaatcctgcttcctcttccttggagtaagagctgccattttctttattgaattcctaaaagaaatgacaataaccacattcatcaaaatattaaaaatcgctttatcaaaattataccccctttaattagtctatttcacaccaagttaaaaccctattttctggggaggtcttcctcgacattgctctccttccacccctccaagggttacacgcgcttgttctgcttccatggcaccctrtatttccctaatagtccatttaagacattttcttgtttccccatctcaacagccttcaatgaaggcagagaccgtctgtaacttttcatcagagcccagcaagaaaacgggtgaagcacagtcctctgccattttcctagctgatgagcccg

SEQ ID NO: 317499 - DNA, 594 bp, Homo sapiens
ccacggctcagcgcttccaggggctggctcggtgattggtggagcaccagcccttgccccgcccaccctggtggctgtttccaagattctcgcgccctggtgaggtgaaaaatctctgagggaaaccacgccacccacaatcccctgcagcaacgccggactccgttcccggggccttgtttaggtgcattctgggaattgtagttctcggtccagttgaagttgagatacattctggggtcacggggtaagaaatttttgtaaaatggcctctccagcctggcgacagagcaagactccgtctcaaaaataaataaataaataaataaataaaggcctctccaagattctcgatgcacttatttttcacrtttgaagcttcattgtcagtttcactttttttattagtaactttaggtttctatttatttttcaaattaaaatataaaacttaacacctgctatgtgccaggcattcttagatgctttacatgttttgtttcatttacttcttaccacaatctgtaaggcattaatatctattgccattcccattttacaaataatacaacggagaacccaaaacaattgcta

SEQ ID NO: 317500 - DNA, 608 bp, Homo sapiens
gaaaccacgccacccacaatcccctgcagcaacgccggactccgttcccggggccttgtttaggtgcattctgggaattgtagttctcggtccagttgaagttgagatacattctggggtcacggggtaagaaatttttgtaaaatggcctctccagcctggcgacagagcaagactccgtctcaaaaataaataaataaataaataaataaaggcctctccaagattctcgatgcacttatttttcacatttgaagcttcattgtyagtttcactttttttattagtaactttaggtttctatttatttttcaaattaaaatataaaacttaacacctgctatgtgccaggcattcttagatgctttacatgttttgtttcatttacttcttaccacaatctgtaaggcattaatatctattgccattcccattttacaaataatacaacggagaacccaaaacaattgctatttacagaacagagctaaattcttactttggaaaaccagaaagttcctaaaacggttattgttagctattgttactatctttgtgtcaccagctcctggtacagtgtttctggcacatttttagtttcaaataag

SEQ ID NO: 317501 - DNA, 583 bp, Homo sapiens
acggccggcgttatgacgcgccccgacgtccgccggaagtgcacggaggagttccgggggccaggcggccgccgcgagtctggtatcctgagcttcgtgagttgagcgctgctgctccgcggtggagtcaccgcaccgctcccgggatcatggtgttctacttcaccagcagcagcggtgagtgggcgccacgtcctcctggaccctgctggacagcgggctccgaagccgggacccgcagtccgccgctgcgcctgaccctcgctctaaaatgccttctggatgcgagtgcctcttcccgcggcctctcggtcccccagcacatccgtccctcccacggctgcaggatttcccccggcgtcccctcgtcatggcgtggggggcgcggaggggcgatgccactgctatgtttgtatcggggagttctcgtcccctaatcggaaagacgtcccgtcactccctgggattrggcagagcctgtgggctcctccacacaccttatcccaagtcttcttcccaccttccatctgcggcctttgttctggctgaacccttgtaattatcccctgtgagaaaggagaca

SEQ ID NO: 317502 - DNA, 587 bp, Homo sapiens
cctcctggaccctgctggacagcgggctccgaagccgggacccgcagtccgccgctgcgcctgaccctcgctctaaaatgccttctggatgcgagtgcctcttcccgcggcctctcggtcccccagcacatccgtccctcccacggctgcaggatttcccccggcgtcccctcgtcatggcgtggggggcgcggaggggcgatgccactgctatgtttgtatcggggagttctcgtcccctaatcggaaagacgtcccgtcactccctgggattgggcagagcctgtgggctcctccacacaccttatcccaagtcttcttcccaccttccatctgcggcctttgttctggctgaacccttgtaattatcccctgtgagaaaggagacacctgctaacaactttttcttaagggaagygcgacttaccctttcaggaaggggttgtagggtctgggatgcaacagaaaacaataaaaagaccctgggatgtccacccagccactctccgggcagttgatgtcccagatctcagaagtgacctatggtaatgcttctgacttatctttgacagataaggaaagggtgc

SEQ ID NO: 317503 - DNA, 587 bp, Homo sapiens
gttctcattataaaatcatacctactctatctttcacccaaaataatagaagttaaaactattatgtatatttgtgatcaaagcccaattgtgagcagaacttactaagttttataartgacactgaaattaagcatcaagaaccatggatttttgtctaggtttactaataattagctgtatgatctaggaagatatctctaaagagttaaagttaatttttaaattcctgtcaattctgaaatcctattcctaatttatgctgtcagtgttcaattaaatagcttactaaactatgaatacataaagcttttttttatgattctgagatatgatgttaataactagtatttactgagtgctgaatataaggcagtgctaaatatttagtatacgttatgtttttcatagattgtgctcaaagcactgatacaatagaaaatataacaaaaaggcatctacttaaaatagttataaatttttcttttaaaatatattttagtacattgtctaagtcaatttaaagaaaaatagtgaataaaaataatacaaatggtataaggatatgggagaaatcataaaagtaa

SEQ ID NO: 317504 - DNA, 587 bp, Homo sapiens
gttctcattataaaatcatacctactctatctttcacccaaaataatagaagttaaaactattatgtatatttgtgatcaaagcccaattgtgagcagaacttactaagttttataagtgacactgaaattaagcatcaagaaccatggatttttgtctaggtttactaataattagctgtatgatctaggaagatatctctaaagagttaaagttaatttttaaattcctgtcaattctgaaatcctattcctaatttatgctgtcagtgttcaattaaatagcttactaaactatgaatacataaagcttttttttatgattctgagatrtgatgttaataactagtatttactgagtgctgaatataaggcagtgctaaatatttagtatacgttatgtttttcatagattgtgctcaaagcactgatacaatagaaaatataacaaaaaggcatctacttaaaatagttataaatttttcttttaaaatatattttagtacattgtctaagtcaatttaaagaaaaatagtgaataaaaataatacaaatggtataaggatatgggagaaatcataaaagtaa

SEQ ID NO: 317505 - DNA, 593 bp, Homo sapiens
ttttaaagtccaagccttgtaaattatacagttcctgtgggtctctttttcagtctcatgctacttaatttggggagtttttttttcttcctcactaaggggaataggagaataatattgagaatagggtgatgaaatcagtccctcatagaaacatcataagaacttaagagttgagagatggaaaagatctttatatacttgagtaataataattgctaacattattatataataccttacccataataagtagttttatatctattatcttaattttcacaacaacttagaagttagatactattattctgttttcagcctaagaaactgtgagtaatttagccacagttgccacacctattatgtgctctgaccacgactataatccatatctgaaccaaatgcccattaggtgatattgccttccctgggtgatagtatagtagctacaatttaataagcatttacaacttcatggatgtaggtaccattattaccccatkttgtagatgagaaagctggctggaggagtaagtaacttgcagcagcttaatgtgatcataaagtatagctgaagctaccactaccca

SEQ ID NO: 317506 - DNA, 622 bp, Homo sapiens
ctctttgttttctctagaattagtaaactatgaagagattaagaagaaagcagctgggccaagaataaggcctccaaagctcttttaacaaagacatgtctgctagccagcagcamtggaagggataaggacatgtgaaggaagttggaacacagaaggaaagaatataatgattgtttcaattcttcttgttatttcagtaactgaagatcttagctgaaaatcttagaaaattctgttctcctcatacaatggaatgtcccaaaatgtattacaatttgttaacttatagagttgaaaatcagtggctctgtaaagcaacagttctaccttctttggctaggtgctgacgcatcattcaggcagcctaagtgaaggtgtgggaagcgcagtcggggaaaggggaatgctgcgctgctcttgtcctgtaattgccaactcctggtacctgttatcagctgtgggtccgccccatgtttatcttcttcccaaaccatgattgctttccaaccctctggagcatcccttcactccatctcaagccacaataacctctacccgatctagacctgtgttctacaccctaaaatcggatctactggctcattattagcagagcacc

SEQ ID NO: 317507 - DNA, 622 bp, Homo sapiens
ctctttgttttctctagaattagtaaactatgaagagattaagaagaaagcagctgggccaagaataaggcctccaaagctcttttaacaaagacatgtctgctagccagcagcaatggaagggataaggacatgtgaaggaagttggaacacagaaggaaagaatataatgattgtttcaattcttcttgttatttcagtaactgaagatcttagctgaaaatcttagaaaattctgttctcctcatamaatggaatgtcccaaaatgtattacaatttgttaacttatagagttgaaaatcagtggctctgtaaagcaacagttctaccttctttggctaggtgctgacgcatcattcaggcagcctaagtgaaggtgtgggaagcgcagtcggggaaaggggaatgctgcgctgctcttgtcctgtaattgccaactcctggtacctgttatcagctgtgggtccgccccatgtttatcttcttcccaaaccatgattgctttccaaccctctggagcatcccttcactccatctcaagccacaataacctctacccgatctagacctgtgttctacaccctaaaatcggatctactggctcattattagcagagcacc

SEQ ID NO: 317508 - DNA, 641 bp, Homo sapiens
cccacaaccagctacattttctttattttctgtagtgacagggtctccctatgatgcccaggctggtcttgaactcctgggctcaagtgatcctccttgctcagcctccccagatgctagcatggaaaacaatgttttgattggaaatggtttaaggcaaaaagacaacctgtagcaaaggatgacaatcagagccatccccatgagctcatgtttagcttaatataaatacagatggaaagatacagaaatgattacagatatgtgcatatacatgggttagtacacatacatgtatctccttctctgtcagctcagagggccgaaaagtgatgacactccagtagtaacaggcgcacccagagcccagatctttttaaattttttcacatcagacatgacaaggttcaagggtggcacatctcatacatgcacatgaacagccaatcatcacactcataaactacagaaggatcggtctagatcttgatttcgaaacaccattaccactgaaaagaaccagggttccttggagaaatgccccattctagagctgggacagggaaaatacaagacgagcctggagctctctgtagtgccrgaaagcaaggatgtgctcaaagaacaaaaggatgggagca

SEQ ID NO: 317509 - DNA, 606 bp, Homo sapiens
aattttgaagctgtccacagtacagatactccagtgtctgcccttccagaaaagagctggacctaaggggtcctcctgtctcacgtgcagactcccagggcgggattaaaaatgcaaaaatcccatgtttccttgcaaatccatgtgaatctgtggctgatattattatgccactctatgtgatgtaatgaagcataatttattttggttctataatgtatttatttatcaaggcatttgtattctattttattgttgatcaatttcctgtaatttaaaattctaatgaccacctctccaataaaccaaaggccaatgtcttccatgttgttatacaaatgatattctttgtataatgctttagagtttataaaacactatttcactttttaaaaaatcttcataacacaagatacattgaatacctccatttatgatgatgatgatgctgcagcccaaggtttatccagtaggttgtaraactaagacttgaatccaggtctcctaattctatattccataaatctttctattttactaaatggcctccactaattataataaagtttccactcaatgaatgacatcaaggtgtagttacccact

SEQ ID NO: 317510 - DNA, 561 bp, Homo sapiens
aaacggaagatgtgaagaatactataaaccaactagccctgactgatatctgtggaattctccatttagcaacacaacatactcctaaataaccaatggattaaaggaatcaaaatggaaattagaaaatactttgagatgagtgaagattaccaaaacttatgctacaacagtgcttaaggaaaaatttacacctataaatgcctgtattaaaaaagaataggctgggcgcagtgtctcacacctgtaatacaagcaagcactttgggagacccaggtgggtggatcacttgagcccaggagtttgaaaccagcttggacaacatgacgaaaccccatctctacaaagaatacaaaaattagccaagtgtggtggtgtgtgcctgtggatccagctacttggaaggctgagaygggaaaatagcttgagcctttggggtcaagcctgtagcgagctgagatttcaccacgacactccagcctgggtgacagagtaagagcctgtcacaaaaaataaaaataaaaaatgaagatctcacatagttaactttaccttaagat

SEQ ID NO: 317511 - DNA, 561 bp, Homo sapiens
aaacggaagatgtgaagaatactataaaccaactagccctgactgatatctgtggaattctccatttagcaacacaacatactcctaaataaccaatggattaaaggaatcaaaatggaaattagaaaatactttgagatgagtgaagattaccaaaacttatgctacaacagtgcttaaggaaaaatttacacctataaatgcctgtattaaaaaagaataggctgggcgcagtgtctcacacctgtaatacaagcaagcactttgggagacccaggtgggtggatcacttgagcccaggagtttgaaaccagcttggacaacatgacgaaaccccatctctacaaagaatacaaaaattagccaagtgtggtggtgtgtgcctgtggatccagctacttggaaggctgagacgggaaaatagcttgagcctttggggtcaagcctgtagcgagctgagatttcaccackacactccagcctgggtgacagagtaagagcctgtcacaaaaaataaaaataaaaaatgaagatctcacatagttaactttaccttaagat

SEQ ID NO: 317512 - DNA, 585 bp, Homo sapiens
taataagttctgaatagaaatgacataaactgcctaatcaatgtcttccagaactggcaagtgacacctctttgttttttgcaaataaaaaccttcttcccatcacaatataaaccattatctctgcaggcaaggtatatttagaaatgtacaaaatgtacatttcctgccagcctctagatcagtaggtggagatctaaagtcatgcaaatattacagtaaatgcaggcaaccaatttctaattattccatatcagcagatttgtgaggaatataatttattaaaaaagaacagtttatgatcagcagaccttggttatgactgtttargaattcagtgcattttgatctaatcacaaaatcaaaatattcatgaaacacaatgatatctccccaaagcagccgggcagccattaattttgaaattcgggtaatttattaacacttatctgaagctgtaaaagcttacctctgtgtttgtaatacggagaaaagtgaaagcagttttaaaactgattcctaatgatttataatggtttgctgtaatttgagccagaaattcaattaaaatgtatgtctagtttt

SEQ ID NO: 317513 - DNA, 577 bp, Homo sapiens
tggtcttcctagtgtgtttatatagttgacttcctttctagaataaatctttcagwattctctacttcccagggccaggcctgggaagccctgcacttttgagagtgtgaatcctggtactagatcaattatccaattatatttctgattaggggaaagtttttggctcctcgttaaaaaataactcccgttacaaaacatgcttgtcccatcctgggcatgagaacatttgatagggaagctccgagagagagaatcatttctcattatagaaatctgatcaagtagaggtggctattgacattctgatgtcaagtccagatgaacctctatccatgttctaaatggaaagttaactgagtaggagcatagctacagtgccctctccgggttccctgatgtggccttgccaagaatgcaaataggcagaaatagagtccatggagattaggaagaaagatgactgtggaagaattaaaacaaaagcaagatttaggaacgaatacggcaacataaagggcttctgaagccaccctgattttccatttctttctctccttcattgcctgagaattta

SEQ ID NO: 317514 - DNA, 577 bp, Homo sapiens
tggtcttcctagtgtgtttatatagttgacttcctttctagaataaatctttcagaattctctacttcccagggccaggcctgggaagccctgcacttttgagagtgtgaatcctggtactagatcaattatccaattatatttctgattaggggaaagtttttggctcctcgttaaaaaataactcccgttacaaaacatgcttgtcccatcctgggcatgagaacawttgatagggaagctccgagagagagaatcatttctcattatagaaatctgatcaagtagaggtggctattgacattctgatgtcaagtccagatgaacctctatccatgttctaaatggaaagttaactgagtaggagcatagctacagtgccctctccgggttccctgatgtggccttgccaagaatgcaaataggcagaaatagagtccatggagattaggaagaaagatgactgtggaagaattaaaacaaaagcaagatttaggaacgaatacggcaacataaagggcttctgaagccaccctgattttccatttctttctctccttcattgcctgagaattta

SEQ ID NO: 317515 - DNA, 562 bp, Homo sapiens
ttctggcacatagtaggtgctcagtgaagctctgatgaaggactacatcaatatattcattatctactttaaaaataaaatatctatttctrtagacaactgagtatgtattatcatggctttgtagcaaactaataaaggtatctattaaggccatttgcactgttgcttttcctactaaaaaagagcggtgattttcaactctgaatgaacattaaaatcatctcaattcctgggtttaacctcaaagatgccaggtgaggcttgggcagtgtgttttttaatagttttccaggtaattctaatgtgtggccagggttgagaactgcgaagaatcactgaaaagtgagatcacaaagtatattgctctcttccagctttatggggctgagtcactctggcatcacattatagaaaatatagccaacacgtgcatgagaattagcttgtagatccactcgtttcataagcatttttgaaataacccaatacttcctcctgtactttacatcccttataattatattataatccagttagtagtccaacagtcacacgagtt

SEQ ID NO: 317516 - DNA, 562 bp, Homo sapiens
ttctggcacatagtaggtgctcagtgaagctctgatgaaggactacatcaatatattcattatctactttaaaaataaaatatctatttctatagacaactgagtatgtattatcatggctttgtagcaaactaataaaggtatctattaaggccatttgcactgttgcttttcctactaaaaaagagcggtgattttcaactctgaatgaacattaaaatcatctcaattcctgggtttaacctcaaagatgccaggtgaggcttgggcagtgtgttttttaatagttttccaggtaattctaatgtgtggccagggttgagaactgcgaagaatcactgaaaagtgagatcacaaagtatattgctctcttccagctttatggggctgagtcactctggcatcacattatagaaaatatagccaayacgtgcatgagaattagcttgtagatccactcgtttcataagcatttttgaaataacccaatacttcctcctgtactttacatcccttataattatattataatccagttagtagtccaacagtcacacgagtt

SEQ ID NO: 317517 - DNA, 579 bp, Homo sapiens
tgagctggtggaagaatcgccatagcaacatggcactgagtcctgcccccaaaggtctcagccatgcttggctttgcttggctttggtcttagcyatgcttggctttggtcttagcccaagtgaagcaatatgagggtctttctcacctctcactttgcatggcccaatcaattgtgactttgagctacctttcaaacccagatagactcatacccccggcctctgcatgcctttgtgagctggcttttcttttttctccatcagtgccaatttatttacatgtttcagataacgagccagtgttccccagtgttgagttggcagccacttactgttgtgattcaggactcctgggaagagcttcctctgaataaacatttcactcagaagaggaagggatgcttggagggcaaaagtggcaatcttagggtaatgaagcaagtgctggtgtttcagttaggagattggggttcaaatctatttcctgtaaacatcatagagctggactctgtgtgtgtgtgtgtgtgtgtgtgtgtgtgtatgtgtgcatgtgtgtgttttctaaccaataattgaac

SEQ ID NO: 317518 - DNA, 576 bp, Homo sapiens
ctctggatgctttttcactgtctatgcccagatattacataaagcccatttccagaagaactgtgaccagaacttcaaccttcaattttgtctcttcaaatttcttacagcacagaatctcagcacacttctagttgtttttcactccttaaattggataaaggacaattttgtcctttgtgtttcctttgccattttcaactacatttattcctgaattgttctatccatttttctttaaaagagttatcttatttttgttccttaagagttygctgttttcttgagaggcagagcacaacgtcgcagctaaatagcccaggtcacagagatcactagatccattttatttctctagtcagctccgccaaacctttacaatatgactctggctccagttgatttatttttactcttcacactaaaaattggaaagttttttacataaaattgttcttcttaccactcccctccaaccatgcattcatgaaaataatcaatatatcctttaaaaagggaggttacagagaactattggggcatttctgccatagtaattccattttgttatttttc

SEQ ID NO: 317519 - DNA, 576 bp, Homo sapiens
ctctggatgctttttcactgtctatgcccagatattacataaagcccatttccagaagaactgtgaccagaacttcaaccttcaattttgtctcttcaaatttcttacagcacagaatctcagcacacttctagttgtttttcactccttaaattggataaaggacaattttgtcctttgtgtttcctttgccattttcaactacatttattcctgaattgttctatccatttttctttaaaagagttatcttatttttgttccttaagagtttgctgttttcttgagaggcagagcacaacgtcgcagctaaatagcccaggtcacagagatcactagatccattttatttctctagtcagctccgccaaacmtttacaatatgactctggctccagttgatttatttttactcttcacactaaaaattggaaagttttttacataaaattgttcttcttaccactcccctccaaccatgcattcatgaaaataatcaatatatcctttaaaaagggaggttacagagaactattggggcatttctgccatagtaattccattttgttatttttc

SEQ ID NO: 317520 - DNA, 576 bp, Homo sapiens
ctctggatgctttttcactgtctatgcccagatattacataaagcccatttccagaagaactgtgaccagaacttcaaccttcaattttgtctcttcaaatttcttacagcacagaatctcagcacacttctagttgtttttcactccttaaattggataaaggacaattttgtcctttgtgtttcctttgccattttcaactacatttattcctgaattgttctatccatttttctttaaaagagttatcttatttttgttccttaagagtttgctgttttcttgagaggcagagcacaacgtcgcagctaaatagcccaggtcacagagatcactagatccattttatttctctagtcagctccgccaaacctttwcaatatgactctggctccagttgatttatttttactcttcacactaaaaattggaaagttttttacataaaattgttcttcttaccactcccctccaaccatgcattcatgaaaataatcaatatatcctttaaaaagggaggttacagagaactattggggcatttctgccatagtaattccattttgttatttttc

SEQ ID NO: 317521 - DNA, 623 bp, Homo sapiens
tcttaccactcccctccaaccatgcattcatgaaaataatcaatatatcctttaaaaagggaggttacagagaactattggggcatttctgccatagtaattccattttgttatttttctataaactcaaattccttattcccattacttttaacacaatagtaaataaatttcttaacactgaatgctatgaactaacaggagttgagtaatttaatctaagaccawcctatcattataacatgttgatactaggaaatacgtagattgtcctgaatacccttaccagaaatttgggtagtggttatactagaagatccattttttaaaatatgttttaatttcttttattctgacctacctctgcaggaaaaatatatatgagctaatctaacctctcggagaacataatatattgtgaaatctattataatcaatcactgaaactccagtggacttccctattataggacagtcctaactgatcttgctgaagagaatttaaatcatcccccatcactgcaacatcaacatgagcatttattaatcacccagtcttttcaaaattgtttggtaagccctttggatacgtgtttggtttaacatttaaaaaccatgagact

SEQ ID NO: 317522 - DNA, 615 bp, Homo sapiens
atccagaataggtccaagactccaggctcttagcccattgatttcctatttcatattcatcattgcttccttcagagcagaatattaggaaacacttttatggctgaggccacaggtaccatcccaagtctctctactcagagcaaaagccgtaagaacctccctgtgtcaccttgggcatattacttagtgccctagaacaatctcccctcttctcttgcccaaaagagcactcctttggggtttaagcaatgcaagtgggacattatctgcaaattccccttgaaacacccatattttacctcaaaaatcaacaaggcttcagctgtctcytctgttcttctaatggcacagatcacttatgctgaagatagaatagccattccaatgagaagaaggaaccagccctaaccatccatcatcacagaacaggatgaagcatggactctcaaaacagaatttgccaactatcacaatcatgttttcctcactcagtatgggtgataattccaatttaaatcaaaataaccaatcctgaaaaggccaagaatatctaaagatggccaatgagagcaaaccctgtcagtacctccactcaggactccatctcatctt

SEQ ID NO: 317523 - DNA, 546 bp, Homo sapiens
atatgtcttctaactataaatatgtaaactaaaaatgttgagaattttcatttaaacagacctttaggtaaacactcccttataacttcagtcctcgaataggctaacttcagctgtaatgaaatgcaaataactatgttaatgcaaatgttaaggctacaaattcaaacataaaaaagtcaagaaatgcaaaagttaaggttcttctakaaacattaactcactcaaattgtacatatagaatatttccaattacacggaagacagcaaaatgtgatcccttaatgtactgtatgtgcaacgtgggtaagttaatgctgttatgagaatgttaaattttacaacctctgactttgttttaaaagttactgcatgaatattgcattattcctatcctcataatgctattttcttaaaatagaaagaaaacagaagagacacaaatgtcactgtatttttcatcaatacaggattctacatttataaaatattttggttaatgaatgagaccaaaatttggggatttctaaaaattaattagttgaa

SEQ ID NO: 317524 - DNA, 546 bp, Homo sapiens
atatgtcttctaactataaatatgtaaactaaaaatgttgagaattttcatttaaacagacctttaggtaaacactcccttataacttcagtcctcgaataggctaacttcagctgtaatgaaatgcaaataactatgttaatgcaaatgttaaggctacaaattcaaacataaaaaagtcaagaaatgcaaaagttaaggttcttctagaaacattaactcactcaaattgtacatatagaatatttccaattacacggaagacagcaaaatgtgatcccttaatrtactgtatgtgcaacgtgggtaagttaatgctgttatgagaatgttaaattttacaacctctgactttgttttaaaagttactgcatgaatattgcattattcctatcctcataatgctattttcttaaaatagaaagaaaacagaagagacacaaatgtcactgtatttttcatcaatacaggattctacatttataaaatattttggttaatgaatgagaccaaaatttggggatttctaaaaattaattagttgaa

SEQ ID NO: 317525 - DNA, 548 bp, Homo sapiens
aaagtccttatccaccaccacaacatttctactcattcctttcatcaaaaaagggcaattttgcaagagtttcaatggagagccattaggcatccaccttacagtcttgattgggctttttctgacttctttttgttctctaatcttaaaaagtctgtaaagtgcacccatttttctttagttgatcatatacaaatgactgcattgacacagttaaattccaagcaccctcagttctttagggatggactaaatggcagatctcattgcttacaaaagtgtcttgaccttgatggagtttatgttgagaaataaggtttatgtttttcatttttatcttttaattctccatgaatttttgaagtcccctaatgtaatcttctggagtayttattaaacattcagcattataaacacatcctaaacctaaagaaccagaatttctaaagaaagttcctgaggatctgtaatgtttagccttggcacaggcaagtttgagaaacactacagcacaccctgcccagaatgcctagtatagatgagtttag

SEQ ID NO: 317526 - DNA, 585 bp, Homo sapiens
caacatgttaataactttcaaaagccatttgcacaatttcatcaaatatggatatgttggtttcagattatctttataatttttgaagaatctttagaagttagacatacaattttaggatgaaattctaatgggatatattttgaatgagttttcccttgcctattgctcttctccctgcccattctgctctagggacaccatctttcttgatgttttcaaagaaatcaagaacaattctgccttaaaatttgaccattccctctgcctagaacagtattccccagataatacataactcacacctcacttccttcacttctctgctgaaatgtcattataaaggtcaccttgaccatcctattaaaattgcaacctgccactccagacgacaccccaatcctcctttccatagcacatgtcatattctaatgcattttataatttgcttactcattatctttactgtttgagtcccaatgcaagaaagtgagaaccacaggatgaacatctttcatttaccgtcttatctgaagcgtctgaaatagtayttatcacagagtagatgctcaaaaattatttgtt

SEQ ID NO: 317527 - DNA, 595 bp, Homo sapiens
ctttgtttgtttgaatcaatcttcgctgagaattatttctttatcactctctctgtctctctctttccccctctgccagtccttcctgwagctgatactgtagatgctcacccaaatgttctttagtgagctggtgcatctttcccctactagctgggagtgttggctgggtaaattcacagctgctgcttcctccagagagtcattctttgctaaaggaaacaacaccaaacagagatgcctgggaccttaagccccacttcaaggtgtgtcctgcagccaatgactgactcatttgtgggtacaaaaagctgacctctggcctcaagctaggatcatggtgtggtgtgatttatgctctacaactctgcgcaggttcaggctgaaactagactacagtggagactccttctttgattagctccttcccttctcttatcctattctccctgcttcctcccttctttctcttgagatgcctccctcaaatatcacttgcacaagaatcagctctgcctctagggaagtggacctaaggatcccctctttctctcttttccttttctttctctttctcactttcatcatggcaaat

SEQ ID NO: 317528 - DNA, 512 bp, Homo sapiens
tagcactatttctgggtttggtgtcaagaaacacctgggaggtttattaaaatgcagattcttgagcctcatttcagaattgctgactctctggggtaagaccctggaatctgtattttgtcacatctcccaggtgctgctttgtacaggtacataaggatttaaaaacccttgagacatgacatgattatactgctgccaaagttgtgagtttgatccattgaaggccacttagctaagcaagaaacttcatatacctgcacacacacacacacacacacacgcacacacacacatataaatacatacatacatatatacatacacttttccaggtcactgaattttactctaatctttccaagctactgaaaacatgtattactcaaatggactcacatgtatatagtacattgttcaagctcagtgtcatctcaacttkggggggaaaaagcacatcaaagggcctgtggtgcagcctcttcaaataccaggattcttgcacttaacac

SEQ ID NO: 317529 - DNA, 579 bp, Homo sapiens
ccctcagccatatagccacaaaggaatgaattttgccaataaccttactgagcttcttcagttaagccaccagatgagaacaaagcctggatattgcctttatttattgtcctgagatcctgagtagaggaacctgctaagccatgcccagactcctgacttacagaaactgtgggataataaatacatattgatttagccactaagttcatggcaagtgttatgcagcaatagacacatgaaatagtaacaaatagtgaatgagatacctarccttaattcaaaggcatccttatgcaaaaattgttttttttgttgttgctttttatttattttactttaagttccaggatacatgcacagaatgtgcaggtttgttacaggtatatgtgtgccatggtggtttgctgcacctattgacccatcctctaagttccctcccctcgtccctcacccctgacaggccctggtatgtgttgttcccctccctgtgtccatgtgttctcattgttcaactccaacttctgagaacatgtggtgtttggttttctgttcctgtgttagtttgctgagaatgat

SEQ ID NO: 317530 - DNA, 614 bp, Homo sapiens
tcatgctatgctgtgtttttcagctccatcaggtcatttatgttcctctgtaaactggttattctagttagtagctcctctaactgtttatcaaggttcttatcttcttcgcattgggttagaatatgtttctttagctcagcgaagttttttattatccatcttctgaagcccacttctgtcaattcatccatttcatcttccgtccagttctgcacccttgctggagaggcgttgtgatcatctggaggagaagaggcactctgaccttttggcctgtttcattgaatctttctcatcttcrtgagtttgtctagtttcaatctttgaggctgttgacccttagataggttttttgtggggacattttctttgttgtcaatgctgttgttgttgctttctgtttgttgatttttctttcaatggtcaggtccctcttctgtggggctgctgcaatttgctggggattcattttaggccctattcagctggtttgctcccacacctggagatgtcactcagggaggccagagaacagcaaagatgggtgcctgctccttcttctgggatctctgaccttgaggggcaccaacctgatgccagcagtattgttc

SEQ ID NO: 317531 - DNA, 614 bp, Homo sapiens
tcatgctatgctgtgtttttcagctccatcaggtcatttatgttcctctgtaaactggttattctagttagtagctcctctaactgtttatcaaggttcttatcttcttcgcattgggttagaatatgtttctttagctcagcgaagttttttattatccatcttctgaagcccacttctgtcaattcatccatttcatcttccgtccagttctgcacccttgctggagaggcgttgtgatcatctggaggagaagaggcactctgaccttttggcctgtttcattgaatctttctcatcttcgtgagtttgtctagtttcaatctttgaggctgttgacccttagataggttttttgtggggacattttctttgttgtcaaygctgttgttgttgctttctgtttgttgatttttctttcaatggtcaggtccctcttctgtggggctgctgcaatttgctggggattcattttaggccctattcagctggtttgctcccacacctggagatgtcactcagggaggccagagaacagcaaagatgggtgcctgctccttcttctgggatctctgaccttgaggggcaccaacctgatgccagcagtattgttc

SEQ ID NO: 317532 - DNA, 162 bp, Homo sapiens
atcttgttactcactgccgacgtggttttggatttgaacaaggaataggatctggaagacaagaaggggttacctgcttcattattgatgagaacttggccagcccaacgcrcacacacacacacacacgcgcactcacacgcacacccacccacccacaca

SEQ ID NO: 317533 - DNA, 633 bp, Homo sapiens
tatgaagtataatagacatagatggttaaggaatttgtcagggtgtgtctgctaactgccacacaagaagtaatgagcaaatctagcttgatgttgagtcatggccccctactttatttctcctggataagaataaggttagccttacagtctggggtataggtgagcctgtacctgatgaataagtggccccagttctatgatggtcatgaccaatttttatcattagccacccttatttccatcctagccccttgaatgctgtgaaactttggcaatgcccttccaacatcgagccaccctttatgttttgtcctgaatcttcatcagccacactttttcacagctcacattctgccacctcatcctcctgaggtccaaggttctgttccctttcgtggtggcttcccggagacagtcatagagctctagagcgctgatagtgtggtattgcatgatcatactgctgaaggaaatttttggactgatctatatgctaatatgtatttgagaaaattataggaaatttaatgttktctttaaattaccttcagaagaaacctcaacacaaaatgttccctcccggacgtccatcaaattttcagtcttgtcttctgttctatcaagtctgca

SEQ ID NO: 317534 - DNA, 609 bp, Homo sapiens
aataagaaaaaacaatgctacttatgaatgtggcagaataatcattataatcatagtgcctagaatattgcttgctatatggtaggttatcagtaagtatttgtttaatgaatattaatcagactttcctttcttctcccctccctcctcaaccatggccattatttttttcttctcttaggcatagatttatcattagccccaggggataacattagcactgaagcttgaaaacagtaggaaaagatcagcattttttgcttttaagttcaaagrtgtgatgattaattttatgtgtcaacttttctgatccatggtgcccagatatttggtcaaacattgttctgggtgtttttctgagggtattttggaacaagattaacatctgaaccagtggactgagtaaagtagattgcccttcatgatgtgagtgggcctcatccaataaaatgttttagaaagcagtaagaataatccaagtcagatatattctctgtccactctgttcccctccaaattcattacaaccctctgaattttgggggaggggagagaatagaacaaaaagctactctctccagagcatgagggaattctccagcagactgc

SEQ ID NO: 317535 - DNA, 589 bp, Homo sapiens
agcctggggcgctgagaggataaaatcatcatgaactaaaattgtgaagttagttagaagatggaactggggctaagagaaagatgatgagttgtttgagaatttgttagctcatttattcattcagaaacctcccctaagcacctcttagacagataccctttaaataattatttaaaatgtgtcaggaaagggtatgtaaaaatggtattttttgcagctctaatggactgctaaaacttttttaaaaattgtgtttagtaaatttggggaactttgttataagattatggtctgctttctcttttggtgttarggtgttgttatattaagtgacaatgatacaaccaggtatctttaacatattttttaattaaaaattatttttaattatcataagttcataacaattgaatatatttctggggtacatatcatgttttgatacaggcctacaatgtgtaatgatcaaatctgggtaattggtgtatctatccatccccttaagcatttatctttctttgtattaggaacattctaattccactcttttagttattttaaaatatacaatacattattaactata

SEQ ID NO: 317536 - DNA, 589 bp, Homo sapiens
atatgagcaagaacatacgatatttgtttttctgtgcctggcttatttcacttaacataatggcctccagttccatccatgttgttgcaaatgacaggatctcattttttttatagctgaatagtgttccattgtgtatatacaccacattttctttatccattcatgcattgttggacacaggttgattctatatcttagctattgtgaataatgctacaataaacatataagtgcagctatctccttgatatgctaatttccttgcttttggatatatactcagcagtgggattgttggaacatatggaagttttatatttagttttttgaggaacttctacactgttctctatagttctgtactaattcacaaatccagaagtgtacaaatgttctcctttccccatatcttcaccagcactcrttatttcctgtcttttggataagagccattttaaatggattgagatggcaccttattgtagctttgatttgcggttctcttctaattagttatgttgagcattttttcatgtatctgtttgccattgtatgtctttttttgagaaatgtctattcatattat

SEQ ID NO: 317537 - DNA, 526 bp, Homo sapiens
gcttatttgtatttccttccctaagaattaaaattgttcctttcctaggcctaattaccagtatgacgtgggtgtttcaaccattggtgggcatttattagattctattctattattagatcctactaatcaaaggatgcagcatcagatagacaatagtacttatctagactcacttcaaatcacttattatgctccagccactctggtctctctccacttctcgaaaaccccaagctaytctcttccttcaggaattcgtatgttgtcctctctccagttgaattatctccctatattcacttctcgtgggcagagctcactcatcattcaagccacagataaaatctctcttccttagcaaagcttttccccaccacccactttccacctgctgccgccccaagactcccagaaccttctgcttttcttccactgcactttccaccattgtcctcaggtgagcaggcaaagagtggattcctacctttctcccccactggattgtaaactctatgaacaggaa

SEQ ID NO: 317538 - DNA, 594 bp, Homo sapiens
taggcctgtcaccagattctttccttccatagtctgtcttagccataacaaatttcttttatcagtactrttgaaactgagcttcataaaaccttcatctctcagaccacattttccaaatgaaagttccaaagatggaaaagtatattggatggatactagtttaacctattataacatggcattcaaaaatgtgtttttgttactacatgtaactttttggtagtagtatttttataaattctttgaatgagataaaataccacttgcttggtgctcacaagttgagttccttttcattggttttctgacttttatgatgtagaaaaaatgaccaattgcatagatgattgttcatgttgattctgtgtgaaatttttgaatgcaaaattttactgagatgtaaaaattgggtatgatgaatgaatgaaaaatatctgtattctttcacgagtagttttcctggagcacatcacaataaacttcctgtacactaatcgatatccccaaatctgtttcatggggaaccctatttaaatcattagtaattccgtctttatcatctaattctagaaaattgtcagtatcttaagg

SEQ ID NO: 317539 - DNA, 574 bp, Homo sapiens
atgactttagtttttatgttactttagttaaaccaatcctttcttctcagcaaaagaatggcacagatcaaattatagcttccaaaaacgtcaagtaattattcaaattctagttagaacaatgcataggatataactttgaatggaaaaggcagtattcaaaactgtttttactgtctgaaccttttgtgtcattccagatctcaatctgttaatagtaaaaagactgagaagaaatacaccaaaatgtcaactgtggttatctctgagctgtgaattgctgtgttgtcttcttctttatgtttttatgtatttctygtggttttttatgactatcatgtaatatttctaaaatcaaagaaataagttatttaaactgataaacaatgcctagcacatagtgtatacacaataaccacttggcccttcacaactctccctttcccttcacaggtaccaagtacatgttctcaaagcacaatatcatacaagtcctgatagtttccaatccctttcttgcatgaaaaggacatgggttttggtgggatccgacagtggttttaattataggtct

SEQ ID NO: 317540 - DNA, 574 bp, Homo sapiens
atgactttagtttttatgttactttagttaaaccaatcctttcttctcagcaaaagaatggcacagatcaaattatagcttccaaaaacgtcaagtaattattcaaattctagttagaacaatgcataggatataactttgaatggaaaaggcagtattcaaaactgtttttactgtctgaaccttttgtgtcattccagatctcaatctgttaatagtaaaaagactgagaagaaatacaccaaaatgtcaactgtggttatctctgagctgtgaattgctgtgttgtcttcttctttatgtttttatgtatttctcgtggttttttatgactatcatgtaatatttctaaaatcaaagaaataagttatttaaactgataaacaatgcctagcacatagtgtatacacaataaccacttggcccttcacaactctccctttcccttcacaggtaccaagtacatgttctcaaagcacaatatcatacaagtcctgatagtttccaatccctttcttgcatgaaaaggacatgggytttggtgggatccgacagtggttttaattataggtct

SEQ ID NO: 317541 - DNA, 548 bp, Homo sapiens
aaaataagttttcaagctgacagattggctatgggagtgggtaagaaagaaaagagtcagaggctggccaagatggccaactagaagcagctagcatgcaccactctcacagagaaaaatagaaggggcaagtaaatacagcaccttcaacagaaacgtccaggtacatgcattgagattcatcaagaaaacaactcaacccacagagagtggagaaaagcaaggcaatgtgaccacccatccaggagcaacacggagycaggggaacctccgtagcccagggaagcagtgagtacatgagtgaccccagggacccacacttctcccacagctctttgcaaccctcaggtcaggagatcccctcatgaacccactccaccagagcctgcagtctgacatgcagagctacgtggagtctcagtacaacagctgctcagacacacacagaggtccaggagctttagatatccaggcttccaggcagaagtggctgcaattccagtaaagtgggatgttagacccccatgcatatccctaggaaaggggct

SEQ ID NO: 317542 - DNA, 556 bp, Homo sapiens
gaccaatgggacagaaaagaacacccaggaaaaaaaagtctgcacatctgcaatcatctgatctttgacacagctgacaaaccaaacaaaggggaaaggagtccctattcaataaatgatgctgggataactggctagccatatgcagaaaattaaaactggaccccttccttacaccacatataaaaatcaactcaaaacagattaaagacttaaatgtaaaacccagwactataaaaacccttaaaataaccttggccatccctttgtggacatagggactggcaaatatttcatgataaagacaccaaaagcaattgcaacaatagcaaaaattgacaaatgggatgtgattaaacttaagagcttatacacagcaaaagaaactatcaaaagaggaaacagacaatctgcagaatgggagaaagacaaacagaatgacaaaggttaagatccagcatctaaaaggaacttaaacaaatttacaaggaaaaaaaaaaacgctattaaaaagtgggcaaaggacacgaacagacatttcaaaaagaaaacatac

SEQ ID NO: 317543 - DNA, 556 bp, Homo sapiens
gaccaatgggacagaaaagaacacccaggaaaaaaaagtctgcacatctgcaatcatctgatctttgacacagctgacaaaccaaacaaaggggaaaggagtccctattcaataaatgatgctgggataactggctagccatatgcagaaaattaaaactggaccccttccttacaccacatataaaaatcaactcaaaacagattaaagacttaaatgtaaaacccagtactataaaaacccttaaaataaccttggccatccctttgtggacataggractggcaaatatttcatgataaagacaccaaaagcaattgcaacaatagcaaaaattgacaaatgggatgtgattaaacttaagagcttatacacagcaaaagaaactatcaaaagaggaaacagacaatctgcagaatgggagaaagacaaacagaatgacaaaggttaagatccagcatctaaaaggaacttaaacaaatttacaaggaaaaaaaaaaacgctattaaaaagtgggcaaaggacacgaacagacatttcaaaaagaaaacatac

SEQ ID NO: 317544 - DNA, 527 bp, Homo sapiens
atggcttcccaaatctcagggaccacgggaaaaaggggatctctactcttccttaggaagatacagtggaaaaggtcatttttcatgtaaaatgctaaaagaaatagtattcacckcatggagtcactgtgataattaaataagtcacatacaggtaacactcagtgttgtaagcacacaaaaaatgtttactatttttataactattctcatgagaagttatgaagagcagagcccccaattccctgcatatctgcactctttttaaaaaacaattttgttttcagagtctatttacatttgaaacaggatctaataatgtgcataatgactgatactacaatttcaattatcatttgactgtctctttccttactcacacatttatgagaaaaatgtagcctctaatgtctctgttcttcaccatgattttcctgcatccaaaactgcaatcatgcgtaaccttttttatgtgttacttccctaaggataaaggtcaactcatttataaatatatgatgcatcag

SEQ ID NO: 317545 - DNA, 444 bp, Homo sapiens
tttttcatgtaaaatgctaaaagaaatagtattcacctcatggagtcactgtgataattaaataagtcacatacaggtaacactcagtgttgtaagcacacaaaaaatgtttactatttttataactattctcatgagaagttatgaagagcagagcccccaattccctgcatatctgcactctttttaaaaaacaattttgttttcagagtctatttacatttgaaacaggatctaataatgtgcataatgactgatactacaatttcaattatmatttgactgtctctttccttactcacacatttatgagaaaaatgtagcctctaatgtctctgttcttcaccatgattttcctgcatccaaaactgcaatcatgcgtaaccttttttatgtgttacttccctaaggataaaggtcaactcatttataaatatatgatgc

SEQ ID NO: 317546 - DNA, 531 bp, Homo sapiens
gcttcatctcttatacaaaaagtaagacaagaatattcctgagggatgagcaatgagaagaccaacctgatgatcagcaagtgggttccttatctacaatgttttctggatgttttcttttaaaacaaaatggacagaaaggagttgcactcatgattcccgtctcaggaaatggctrctgaaatttaggacccctcttggcagttgttaatgaaggtaaggtgagcagagttgagcccatctgatgctacagctgatggagaagcaggtctcataaagaataatctggagatgacaaagaaacaaaaagccaaacaatagcatctctaccccctacatagcctgttttattttcttctagaactgttttacctattcaaatccttaaatttgactctcataatagtatttttattgaatgcttattctgtgtctcacactgggctaaatgttttacattcatttgttaaaattactaatcttccacaatatctcagtaaataaattactctttcagtgttgccacaaaag

SEQ ID NO: 317547 - DNA, 633 bp, Homo sapiens
tatgaaaaagaatcccactgaaattggttacatgtgattggagtatagagtagaagagataacgagagtgtgagtcctgttgtaattcttttatatatattgtttttacttttgaaagcataacatacatatttaaaaattacattaaataagaatggaagcagaaaaaaaaacataaaacagaaagcaagcaaggtaaaatgcatgaaggtaaattgtattccaaatgartatcataactgaaaaggaagaaaggaagggagggagggatgaaaagagagaaagagggagggagattgagaggaaagaaaggaattaatcaagtttcctgtgaactcattatttgtctgtattccgtcagtctggagcagggttggatgttagggacagggacaatgttctaacatatccagaacttgttttaggttttacagtggtacagtggaagtaattctgaaacagttttagatgtcaatataggactaagcaaatgaataaatgttttatagttattggcagccagggatctggctgtataagaagagacaaatagggaatgagaaaaggcaagaaagttcatctggtgatggattagaattggaggtatgagagtgaactcatgatttcttaaat

SEQ ID NO: 317548 - DNA, 633 bp, Homo sapiens
tatgaaaaagaatcccactgaaattggttacatgtgattggagtatagagtagaagagataacgagagtgtgagtcctgttgtaattcttttatatatattgtttttacttttgaaagcataacatacatatttaaaaattacattaaataagaatggaagcagaaaaaaaaacataaaacagaaagcaagcaaggtaaaatgcatgaaggtaaattgtattccaaatgaatatcataactgaaaaggaagaaaggaagggagggagggatgaaragagagaaagagggagggagattgagaggaaagaaaggaattaatcaagtttcctgtgaactcattatttgtctgtattccgtcagtctggagcagggttggatgttagggacagggacaatgttctaacatatccagaacttgttttaggttttacagtggtacagtggaagtaattctgaaacagttttagatgtcaatataggactaagcaaatgaataaatgttttatagttattggcagccagggatctggctgtataagaagagacaaatagggaatgagaaaaggcaagaaagttcatctggtgatggattagaattggaggtatgagagtgaactcatgatttcttaaat

SEQ ID NO: 317549 - DNA, 512 bp, Homo sapiens
atatttctaaactaacaatacgttgtaataattataatagatttaaaatagatcttgatatctgatagggcaagaggtctttccttgtcccactttttcaagagcatatcagtaattcttgtccatttgatctaccacataaatgttcagatgagctagtcagttttcatgaaacgtcctggtgagacaataggaattgcattaaatcataaaccaatttgagtaaaactgtcattttaaaaacagtgtcctcctatttacaatatattttttaatttatttgtcttctaatgtttttcaatacaattttattctctcccttgtaaaaaacttgygtttctcccattattctgaggtaccttataatttatgttgctattataacagaatatttcaaagttaagacagtagcaacagactattgatatatacaaatgcacatgaatgccatatttggattttatagtaaaaaattactaaaaatttttctatagatcttttaaaataggaag

SEQ ID NO: 317550 - DNA, 452 bp, Homo sapiens
ctaatcattagctcagcccaaatgtgtccctctgtttgtctggagaatgggataaactggggcagagtactctgactagccacccattataaactagtaaaaaccacagggtgagggggagtaggtcttaaagattatgtggggggtgaggtgagttggaggtgggactgttctgatgtcacccacaaaatggraggaaggctgggcagaagaaaacaacaacaagctcctggcaaggagaaactatagtttttcaatgtctttctctccccccatccctcatatctcctctgaacagagagagtggtttctgaggtaaactgatcacaggaaatatctatgggctgaatttatgaatcaaagctatgcagttttaaaacatattcagaagaaattttgctttgcaactatgtatggatcaaaagaatgatttttttaaacattggtgagat

SEQ ID NO: 317551 - DNA, 452 bp, Homo sapiens
ctaatcattagctcagcccaaatgtgtccctctgtttgtctggagaatgggataaactggggcagagtactctgactagccacccattataaactagtaaaaaccacagggtgagggggagtaggtcttaaagattatgtggggggtgaggtgagttggaggtgggactgttctgatgtcacccacaaaatgggaggaaggctgggcagaagaaaacaacarcaagctcctggcaaggagaaactatagtttttcaatgtctttctctccccccatccctcatatctcctctgaacagagagagtggtttctgaggtaaactgatcacaggaaatatctatgggctgaatttatgaatcaaagctatgcagttttaaaacatattcagaagaaattttgctttgcaactatgtatggatcaaaagaatgatttttttaaacattggtgagat

SEQ ID NO: 317552 - DNA, 612 bp, Homo sapiens
taccaggccgcacagcagtaggtgagcggcaggcaagtgagagaagcttcatctgtatttacagccactccccatcactggcattatcccctgagctcggcctcctggcagatcagcagcagcattagattttcacaggagaacaaaccctatcgtgaactgcacatgcaaggggtctagattgcctatggtctttaggagaatctaatgcctaatgatctgagggagagctgaggcagtgatgctagcactggggagcagwtgcgaatacagattaacattagcagagaggtttgactgcacagagaccataataaatcaattgcttgcagactcatatcaaaaccttatcagtgagtgggcaagtgacaattaagctgcatctggcaggctttttagtggcaagtgagttgatgtacttcaattttaaagctgcatctggtggctttaaaagtatgtttgagacagcttcaaatctctatacattctggattaaagtcaaggtagagtatcctgagattaccacaaaaacactgaaaagcctgcttctatttccaatatcctatccttgtgaagcagggttttctgcagtcacagcaaccaaaatgagat

SEQ ID NO: 317553 - DNA, 530 bp, Homo sapiens
agggttttctgcagtcacagcaaccaaaatgagattatggagtagactggacataagcaacaacacactttgggtgtcactatctcccatcacccccagatgagaccatctagttgcaggaaaacaagctcagggttcccactgattcaacattatggtgaattgtgtaattatttcattatatgttacaatgtaataataatataaataaaatgyataataaatgtaatgtgcttgaatcatccccaaaccatcttcctgaaccctcagttgtggaaaaattgtcttccacgaaaccagtccctggtgccaaaaaggttgggaaccactactgtacagcatgttactgtatgtacttaatactgtaggcaattgtaacacaatgataactatttgtgtatccaaacatatctaaccatagagaaggtagagtaaaagactcatacatattataatcttatgggattagcatcatatttgcagtctgttgttgaccaaaacatcattaagtggcatgtaactgtaattgt

SEQ ID NO: 317554 - DNA, 530 bp, Homo sapiens
agggttttctgcagtcacagcaaccaaaatgagattatggagtagactggacataagcaacaacacactttgggtgtcactatctcccatcacccccagatgagaccatctagttgcaggaaaacaagctcagggttcccactgattcaacattatggtgaattgtgtaattatttcattatatgttacaatgtaataataatataaataaaatgtataataaatgtaatgtgcttgaatcatccccaaaccatcttcctgaaccctcagttgtggaaaaattgtcttccacgaaaccagtccctggtgccaaaaaggttgggaaccactactgtacagcatgttactgtatgtacttaatactgtaggcaattgtaacacaatgataactatttgtgtatccaaacatatctaaccatagagaaggtagagtaaaagacycatacatattataatcttatgggattagcatcatatttgcagtctgttgttgaccaaaacatcattaagtggcatgtaactgtaattgt

SEQ ID NO: 317555 - DNA, 602 bp, Homo sapiens
ttacccacattcaatattgttagaatctggcccagtgttccttccccacttcatctcttgctactattcctactgcaagtctgatctcctctgccccaaatacttttctaattcttctctactcagcaagttctcatcagaagtcattaacacttccctgaaatatctccaggctactcaagctaaatgtaccctttttgcttctgttttccacggtattatactaattataattatctgttatcctaatataatagtgtcaccttatgtttgtcttcaaggtagattatcactgtttgcagtgatacttatatttgtattccaggtaccgtgtagagaccctataacttaattcctgctaaaataatatatattaactttatttggaacctgtaactatgatgtctgmaataagaaaatgcaaaaaaaaaaattctaaaacacagtccataatcttcagtcagccaagagcataagcaaagcacaagacagtgcataagcccacgggaacaaagattcaaaatacttaaaacattaaattgtcagatccaggtgttatcatacttttaaatgatatcctactattaaataatgatactttt

SEQ ID NO: 317556 - DNA, 585 bp, Homo sapiens
ttacaaaccacaaaatcacaactgcaacatgttgttattgcaaacatggtccacatgtttgcaatctagaaatgctcattatcatgtatcagtatctccagccattcagtaaatggatagttagtaacaaatgcggtagattcttttacaagctcagaataagatggtatattcaagtgtatttaattccattcccattttattatatttttaaagaaaaattcccgaactccccaagtcagatgttctgggactggtttatataattcccaacaatgaggaatcaatttttcaacagtagattgacaacattctaaataaatcattattatatagtgttggcaagcatggtacaagaaatatactgtgggtgtttagaaaggctcttggcaatatctatcaaacatctccctggtgccaacaattctcttctcagaataaatattcagcagtacccatgcaaagataatgtacatagatattcatatcattgtttgtaatacttagaaattgaaaaatccaagcgaatattctgagggacaytggctggttacattgggtagacacatttaaaaaaaaatctgt

SEQ ID NO: 317557 - DNA, 537 bp, Homo sapiens
aagtgcttctggacacgtggtagcagggagaagcctgctgaccctagaatgctgatttcatcctgagctcatgaggtccagaaaacggctggaaatatcattaaagggaattaaatggcttcctaggagcagctctgaagccacaccactaggggaagccgccaccgtttcttcaaactgcaccttgggcctctggggttatattctaccatgacgctcctgaccacctagctcagcaagagttctgggaagaggagggggaatggtttyccgttcccatccgtgccagctacctgtggttttagtctttaagtacctctttagatatgtatttgatggaaaacttccctttctccctcccataccctttagctttcgacttgcagaagtgggtctcagacccgtcccagatgcgctgatcttcttggtcaggcatttgttcaccagaaatatagccagagcgccggcttttaaaaacatctcaacaatttaactcgtggtttcaggaatgagtgacttcaggtcaaacaagtaatt

SEQ ID NO: 317558 - DNA, 577 bp, Homo sapiens
ggcttttaaaactgcagggcccacagtctgtgggaaccaccaaaacactgtttccaactgtgtcattgagagcgatggttatagaggccacttttgcttccatctcttrattcctggatccaggtgtcttttctcttgtggacacaggccatgtagaggtgtttgatttaataaatatacccatcctgaaagatggtgccctaccctttcaagtgttttctccaatgtggtacttcaattatacctttgtttttgttttttcttgttttttttgagatggagtctcgctctgttgcacaggctggagtgcagtagcatgaccttggctcactgcaacctctgcttcccgggttcaagtgattcctgtgcctcaccctgccaagtagctgggattacaggcacttgccatcatgcccagttaatttttgtatttttagtagagatgggatttcaccatgttggccagcctggtctcgaactcctgacctcaagtgatctgcttgcctcagtctcccaaagtgctgggattacaggcatgagccaccgcacccagccccagttatacccttggaaggct

SEQ ID NO: 317559 - DNA, 577 bp, Homo sapiens
ttttaaaatagtttttcacwtatctcctttttctttttaacatagatatatagcaaaatattcctctggtaaatttacacgtttattttgcctctatttgcaaaacttcactaataatatccataataattgtctcattttatcatggtcatattaaattataaactagcttttattttattgcttagaaacagctgcattgaaaaatgtctatttttctaaaagacatattcagaatatttgtaaaattttctaaatgagcaataatttctgaaagcattacacaggcaaggcattacataggtcatagcaatatgtgggtaaatctacataggtagatttttttcttgcaattaactttcttcaaacagcatatgatctttgatgttttcgtactttagtgaagtttaacaatgtcaggatatgtttatatattaccacttgtatatgtctttatgttatttttcaaaacatgatctatactttttatatgattatggagcctgacacttgtcagtatatatgtattaatatatgcatattgatcgaaaggtcctatatgcaaacataagtaata

SEQ ID NO: 317560 - DNA, 577 bp, Homo sapiens
ttttaaaatagtttttcacatatytcctttttctttttaacatagatatatagcaaaatattcctctggtaaatttacacgtttattttgcctctatttgcaaaacttcactaataatatccataataattgtctcattttatcatggtcatattaaattataaactagcttttattttattgcttagaaacagctgcattgaaaaatgtctatttttctaaaagacatattcagaatatttgtaaaattttctaaatgagcaataatttctgaaagcattacacaggcaaggcattacataggtcatagcaatatgtgggtaaatctacataggtagatttttttcttgcaattaactttcttcaaacagcatatgatctttgatgttttcgtactttagtgaagtttaacaatgtcaggatatgtttatatattaccacttgtatatgtctttatgttatttttcaaaacatgatctatactttttatatgattatggagcctgacacttgtcagtatatatgtattaatatatgcatattgatcgaaaggtcctatatgcaaacataagtaata

SEQ ID NO: 317561 - DNA, 505 bp, Homo sapiens
aattactgttcattctctactttatagcctgggtatcgggtatatggatatttgtttcattgttattaaactgaacacatattaaatattcttttgcatatatattttataataaaattactaaaattataaataggcaagacttttaaaaaatatttttgaaatacatttaaaaacatgtgaatggcccagcgcaatggctcatgcctataatctcagcactgtggaaggccaaggtgggaggatcactgaaccccaggaagtcaaggctgcagtgagtcatgattgtgtcactgtctccagcttgggcaacagagagagacctggtctcaattaaaaataaatttaaaaataataaaatatgttaaaaataggaagacattcctagatgggaagataaataatcacaattatgcatttgattcaattccaatcagaaaaataattaaaaattaatacccataaatatttcctaaagcctkcaggagatggggatcattatttt

SEQ ID NO: 317562 - DNA, 564 bp, Homo sapiens
aacatgattttgaacgttataagttaaggcagtgattacttttggaggggttagtgacagagtggaaagtgagactttctgagatgctgctaatatattttttttaatttgaagctacttagaatgggtgaataattattgagctggtatgtatgttatactgtaaataaaatgattacttaaaaatatmttttttcagaaaaatattagcacctgttagaatataaaaacaaaacaaaaaaatagcaaaacattacatattctaagttactcgttatcacaagtaggcttagtgtatttagcttggtgatataaacagggtccaatagctaatagactgctacattaaacagacaatgttttaatcaaacaccatttatgcttgaggtagtagtgcagggggaagaatttctttggttctttggatggcttcaattctcagaggctttttttgcaagaagttatttttccataatcatctcctttacacctttttttcctctttacctgaaggagcagttcagggagaagaacatgagaatcttgaaggcaatttcagaaact

SEQ ID NO: 317563 - DNA, 564 bp, Homo sapiens
aacatgattttgaacgttataagttaaggcagtgattacttttggaggggttagtgacagagtggaaagtgagactttctgagatgctgctaatatattttttttaatttgaagctacttagaatgggtgaataattattgagctggtatgtatgttatactgtaaataaaatgattacttaaaaatatattttttcagaaaaatattagcacctgttagaatataaaaacaaaacaaaaaaatagcaaaacattacatattctaagttactcgttatcacaagtaggcttagtgtatttagcttggtgatataaacagggtccaatagctaatagactgctacattaaacagacaatgttttaatcaaacaccatttatgcttgaggtagtagtgcaggrggaagaatttctttggttctttggatggcttcaattctcagaggctttttttgcaagaagttatttttccataatcatctcctttacacctttttttcctctttacctgaaggagcagttcagggagaagaacatgagaatcttgaaggcaatttcagaaact

SEQ ID NO: 317564 - DNA, 389 bp, Homo sapiens
aggaaaagccactgtagttgacagatttacatgaatagagacaggaagtggactgacataaatattagtcctaagaagagaaattggaggatgcartgaatgggttatcttgcttgagtaggaagaaattgcagaaacagccatggagatgatagatccatattggagatctaacatttatatgcttaagtcagaccaaaatgtttaattctcattatattagtgagagagaaaatacaaggtaatgctttgtgcaacactgtgtacaaagaaaacccattgacttatgatggaattgttagctaatatagttaatatttattgatttcctccaatatacttcaaggttgattagaaaaatacaaaatatataggtctttcttttatcc

SEQ ID NO: 317565 - DNA, 599 bp, Homo sapiens
agatttagtgatttaaggtatttaagaaaatttctgtacaatcattagctgaacattgagctaaccagagaccttcatgactgcacacaacaaggaatacaaactttgcatacttagttcaggaaagtcaccaaataaacaaaaaacaacaaaagaaaacaaagctgattaaaaacaataatacaacaaatcctggacaggggatctcatttccagagttgttcatattatattgaaatgtscagttgatagtgacagtaggcagtcaaatgcctaggcagataggggtgggtccctgttgaaaccttacctctaagccaaagacaatttaaagcctgaaagccaagctacaagtcaaatcctgggaccagattgagaaagtttcttcccatttgtcatgctttcctctgattgatccccatccttcacctattttacatatacctaccctttcctaattggttttctacactgccatgcccacctttgagtggtgcctttgcgttagcctttctttgcatactcacaaacaaatcagcatgtgttcccctatactgaacccataaaagcccaagactcagtcaccctgggagagaaac

SEQ ID NO: 317566 - DNA, 568 bp, Homo sapiens
ttacaagtagtgtcatgacatcagaagtcatttccttgcatttttttttctactgatacaaaaggttttattgagcaattgaagatagtacctctagctagccctatttagaatacaatcatctcaattctttcattgagaaggtaatttgctttggaatgatgtactatagtactatcagacatggtagaagaaaaattaaggtcatccaaagcattttagaattccagtaagcagcatctttaaagggtctgtgggactgtaggtataatttgtgcaggaaatggtcctaaatggtaagcaaatccatctcttaatgttacaggagtgctagaatatctaaaatacttcamgataaattatttaactaaacacagagtcattttgatctttaattactttggaattctaggattttagataattttattaaaatactctctataaagatttatgttttctttcaccccctttcctctctctctccctcttatttttaatctttgatgctatcatatacttaagaacattcacttgttggtcacatttttatgaagaaatggaaaaa

SEQ ID NO: 317567 - DNA, 617 bp, Homo sapiens
ggcctaatttcattattgttgcatctcagggaatagggaggcccagggacagaaagagaaatggggaaacatccagttggtaaagcagtcagaacacatacatctatggattaagttcactgtgtcatacaggcaggtgcacggagtgcaaaatagttacaatagtaacatcaaagattgctaatcacagatcaccataaaagaaacagaataataaaaaaatttgaaatattgcaagaattacccaaatgtgacacagagacacaaaatgagcatatgccattagaaaaatggtactgacaaacttcctcaatgcagggttgccacaaacctttaatttgtaaaaaacacaatatctgcaaaatgcaacaaaatgaggtatgcttatgttaagaggtggagtctttaagaggtggttaaaccatgagggctcctccctcataagtagtgtttaagtcccttataaaagaaaccacaaagcattgggktaattttctcttactcttttgccatatgaggaacgagcatttgtcccttttgtccttctgccatttgacagatgacaccagatgctggtgccttgatcttcaacttcccagccttcagaactgtgagaa

SEQ ID NO: 317568 - DNA, 526 bp, Homo sapiens
tgaatgcttggagaaaatgttattatcaatttactttcctgtcatcattttaaactgacatgttttacatractcttttgggcagtggttgattttttattttaactagggttgcatatggttggggaattcccatctcaccttgcaacatacacaataaatatatctgattcatttctatgtaattaaaaaaagtaaacatgaagtcattacttcagcctacagactaggcaaatttcaaaattgagcagtaggagtcttattacaaacatttataggtttgaagaaagaaaaccagaatcagaagataaccacagagtatcttccgagtactaaaaaaaacttatgccaagataataattgcagtattatattattgaatattaaaataactggataataatctgtatacatatttagtttaagcagatattggcaaacagtttttcaaaattgctataccaatttatcctcccacaacaatcatgagagtaccagttgctctatacattcaccaaatctttgg

SEQ ID NO: 317569 - DNA, 621 bp, Homo sapiens
accaatttatcctcccacaacaatcatgagagtaccagttgctctatacattcaccaaatctttggattttcagggattttaaaaaaatcttatacactctagtgtgagtctagtcacattatatttttgtttcaatttacatttcttaactaattatgccaagcaactttttatacctttgctggccatttagaagttcctaccactttcttttgggctatctttctttttccttattactcataggatttacatattctggacttacgcaagtatatttggtcagatacaagtatggcaaatattttctaccttcagtgcattgtttttctattcattcaaggattttttaaatgaaaggttcttcatttttattaaatctaacttctcaacttcctttttttaagtaaatagtactttctatgtcctgtttaggaaatattggctgacccaaaggtcatgaagatatttttccrtgtttacttttagaaattatattatttaactccttatctttatttgtatgacccttctcaacttaattttgtgtgtagtgtgaaataaatattgaggttcgtttctgatatgagtttccattgtatccagcaccattatatgaa

SEQ ID NO: 317570 - DNA, 586 bp, Homo sapiens
tatttcatatgatttaattttctgtcagcacaatcttcagagacagttgtaattattatccccattttatagatgaagaaaataaagccaagaacattggggtaaattgcccagaaatgaatggaattgaaatttggactcaagatgtctgacttcatgctaataatgaataagtttttaaaaaatactttgttgactgaattctttctttaccactaaagcagctataacatgcttcagtagtttcctgacaagttaaagatataatctcatrtggtgtatgtgaatgacagtttaacaaacagagaatcagcatatcttccaggtgataaacccaacacctgggcaacggaaattttctgttagagagatttgaaaacaccaaagaattctaagacaagcacatcatcttgttttacaagcagtcacacaggaagtccataggcttgttccacaaatgtttcgattactcaaaatgtttttggaaacttctttgggaactgcctttaggactagtgtctaagctgcaaaataaaatcatcaacattcttttttctttcctcgtgaatcagaagaacatcacaaa

SEQ ID NO: 317571 - DNA, 520 bp, Homo sapiens
attatctcatagttatgtcttaactactttagtgtgagtaaattttgacatccatctaatgcagagctgaaagactatgaactgagggcttgaggacaagaacgcagtatagaggtttggagaaatatgcttagcctgcttcacaagcatccagagaattatgtggaaatttaacctgtgggttctgcaataattttctctcctttcatgtttcaaaaggcggttcttgggctgatatctgttgcacagtgtgatttatgtcacagaaatctttccagtcaactgatatgtctcatctgaacttaatttccattgatggtcctttcagtcaaagtaacaaaattggacctaggtgcatttagctgctttctaaaaatgcaatattttctacgcagattttgattcctgtatgtactggccccttgcctgtttctgtaagctgcagaccagcaggaatgcatcaccttagggaaacgcagggttggaaaatatgagtgraactgccaaagcaaaacattta

SEQ ID NO: 317572 - DNA, 543 bp, Homo sapiens
gcatttattacaagcctactgcaactaataggagttgatgatggcttttaagaaaaactacagaatgtcaaatggaagctgtctctacttaacaaatacactaggctcaaaaatcaaaagaaaagacacgtaaggcgatgtttattcatctatgctctcagtaacaagtttttaaggtattcacgcatctcattgtttgtctatttttacaaatatgtggtgtcattcaaaaatgacacataggacatcctgtctgtatatatttaatgcaaagagtaaaaaagtaaatgaaatactcatatggttccttttaagttttcaacatgaacaaaaacatttctcataaatttgttgtgagagcttttgaaaaggaatcgtacctcrttgatttttgaaatgtaatgagtttaaaagtaaaaataattctgtgctctacatttttcatttctattatttttaaaatatcaactagagtgtatcgattggggaacaccgttgcatgcaagcttgtgtgttttttatctgtgtactagaaaaaaattc

SEQ ID NO: 317573 - DNA, 539 bp, Homo sapiens
aaggaatcgtacctcgttgatttttgaaatgtaatgagtttaaaagtaaaaataattctgtgctctacatttttcatttctattatttttaaaatatcaactagagtgtatcgattggggaacaccgttgcatgcaagcttgtgtgttttttatctgtgtactagaaaaaaattctagtaaatgttatgctaaaaacaactataattataaaagatagaagtggtaataagagtatatgcaagaaattatttatatgctttcaattacatattattaacagtagtattagtattgttattttgatactgttgtgtgtgtagaatgaaacattctatcatcccctatatatttaagaaccaggctttttggcatggcagaaaggaaatatagatgtaattaaaaagtgattaaattcaaaaaactctacagtgctgaatttgaattataagtagctatatgaacctaygagtcacaaacagacacacacacccacatatcctatctctgcccactaaaaagatttaaaaacaaaaaacaa

SEQ ID NO: 317574 - DNA, 501 bp, Homo sapiens
taataaataataatagctctcatgtattkgtcacttactatgaaacaggccttgttctaagtactatacataaatattatcattaatcttccaaacaaaaagagtacaaggctggagtttggaagttaactaatttgattaaagttatatagcttactctctttgcttactatactgatacaaaaagatgttaaaatgttaaatatcagctatggctcaaagataatccctccacaagaaggattagatgaagtgaaaattttccaacagagattgctttggtctaagtgtgtcctcatcacccccgcaacccccaaaattcttaggttgaaacaatcttcagtacagtggtgttggaaagctggaaggtgttggaaggtggggcctttgcgagggattagtgtcattatgtaagaagtctgaggaagcttgttcacccctctgccatgtgagaaggcagcaagaagttactatctttgaagaaagtgaaccctcaccagg

SEQ ID NO: 317575 - DNA, 599 bp, Homo sapiens
tggtaatgtttcctttctctctttgtctctttagttctaaagagttacagcagcctcgcagctactcatgtcagattactgcactattccttttggttctcctttactcacacagagtgtctttgtaaataactcattcttggtttactataatttaagtgtaccgtttctttccttttgggatcctgactgttacatacacttttgaagcctagaatttttttcttaattgtatgagttatattcgcctgaaagtsaagagccatgacttggtcactaagcatgatactaaatttgttccagatttaattaacatcaagtgacttcttttttgcataataatatacttccaaatttatatttcttatgtcactgtgatgcttcaagtcagtcttattccttacatacttgtatatgtcagaaaaaagatatctttattaagtacatttaaaactctccatttaattaagcatttaaaaaagttgttttaaatgtttctaaaaaattttctaaaactcaatgagcaaacatggtattttattaattttattttttcacaaactttatatgatctttaagaaatgatagacatacattag

SEQ ID NO: 317576 - DNA, 597 bp, Homo sapiens
tacacttttgaagcctagaatttttttcttaattgtatgagttatattcgcctgaaagtgaagagccatgacttggtcactaagcatgatactaaatttgttccagatttaattaacatcaagtgacttcttttttgcataataatatacttccaaatttatatttcttatgtcactgtgatgcttcaagtcagtcttattccttacatacttgtatatgtcagaaaaaagatatctttattaagtacatttaaaactctccatttaattaagcatttwaaaaagttgttttaaatgtttctaaaaaattttctaaaactcaatgagcaaacatggtattttattaattttattttttcacaaactttatatgatctttaagaaatgatagacatacattagttatgatacaatacaaggaattagaagtaatgtggaagcccagattgtatcctctctgagttgctggcttagtgtgtatttcctgacaatcaaaacattatacttaagttccttaaggggcccatttttaaagtaagtgaatggttactttggagacttccacttaggggcacccatgcttgtggcagacaatgc

SEQ ID NO: 317577 - DNA, 583 bp, Homo sapiens
ggatttttttacaccgcagtggagcccaaatggcaaaacactattgaaatcactcttgtaaccagctttaaccttagcaatatatactaaagtttatcatgtgtacactttgacacaccagttccactcctggatatatgtccaaaggaaatatacgtagyagttcatcaaaaaatctttaaaagaatgttcacagctgtattattcataagaggtaaatacaggaagtaacttaacaggataattaaataacttatttaaatacagtatggaatatttttacagtatattattataaaacaataagaataaaagatgttatattgctacacgcaacaacatgattttgaacgttataagttaaggcagtgattacttttggaggggttagtgacagagtggaaagtgagactttctgagatgctgctaatatattttttttaatttgaagctacttagaatgggtgaataattattgagctggtatgtatgttatactgtaaataaaatgattacttaaaaatatattttttcagaaaaatattagcacctgttagaatataaaaacaaaacaaaaaaatag

SEQ ID NO: 317578 - DNA, 625 bp, Homo sapiens
agtcccaggccattacttcagctggattctcttggtcacacagcctaacactcactcattattggaggagcctaaataagagtttgaattcccaagggcaggaatccctggagactgtcttagtctgggacatgacatcagcctttcatgtccccatgcttcagccacagctgtttcctacagatgccttatttgtttctgagttgggggtggaaaatttttaaaaagggactctatcccaccwtccacattaaagaagtatgacaaactagaagaagagagaaaagatcaataaagctggttatcatttattaagcatacattagaacctgaaaccaggtgcaccacccaaagtggacaaccccagaaatgttggaaagttttctatcattcttcaaatgttaatgtcttagttgtccacaaattaccataaatatagctgctgaaacaatacccatttgttatctcaagttctgtagtcgagtttggacaggagactaggctcaaaatcaagagaacagcagggctgcgttcctcactggaggaccttggggcagcttctgcttccgtttcattcaggagttttggtcaaattcagctccttatgattgtagggctgaagtcc

SEQ ID NO: 317579 - DNA, 598 bp, Homo sapiens
aaagacacttggggaagaggtatgtggagagacctctctgagtggtcaaaaactgtgaagatatttgtatctcatgtgaatgctcacctaagggttacctcagcagaggaggattttaataatcaagtggataggatgactcattctgtgaatgccactcagcatctttttccagtcaccccgtcatcacccaatggacccatgaacaaagtggccatggtggcagggatggaggttacgcatgggctcagcaacatggacttccactcaccaaggctgacctggctgtgccactgctgagtgcccaatttgccagcagcagagaccaacactaagcccttcatatggcaccattcctctgggtgattggccagctacttggtggcaggttgattatactggacctcttccatcacagaaagggcagtggtttgtcctcatctgaataaatacttactctggatatgggtttgcctaacctgcacgcaatgcttctgctgagactaccatagatgaactcatgaaatgccttatccaccrtccacacagcattgcctctgaccaagacacgtcgtggctgaaaaagtgtggcagtgcg

SEQ ID NO: 317580 - DNA, 554 bp, Homo sapiens
aatgtaatattttaaccaggcttgaattagaaaaagtaataataatgacattttcttaaaggagaaaagarcatgaagatagtaaggtgaaaaaaaaataactaaatactattttaaattatcaaaagtaggtgcaatctatatggtttgacatttcacagtatcaaaagttttctgtgttttggccccaacagaattcttaccagcccccaaaattgtgtataaagggaaggcagagatcatcacccagaccctagtaccacaaatgtaaacatgttctcaataatacaaagacaggctagtcacatcactcatttaatctcactatttccgttggatactatttacttgcatctgcaaataaaacagaaaacaaacactgaaataattattaagtccatagttttctatggcttccaagtcatcaataccacatagagaagaaatgtctaatggagattttctgtgggacacctttcatcattgggttccagagcagagtaaacattaaaccacatctttatattatctgatgtttaaggatctccaggcgg

SEQ ID NO: 317581 - DNA, 569 bp, Homo sapiens
aacattacaaacaaaaaaggtaatatcattacagaagtaaagaaaaattagcctaagaaaatattatgtaaacctctgaacaaataaatttgaaaatcttgaagaaataactgttttctgatcatcagttttaacccaagaaaaaaatagaaatcctgaatagacaaactagaaggtatcaaaaatattgtcaaagcaccactttcaacaaagacacaaaaacaaattatttaacwttttttttcctttttatcattcaaatagctgatactttttgcaacagttttaaaacacagagcatgaaatcagtggatattggtttctatttattaattctgctttgagattatttctgttccttgttttatttccttagtttcataatattccttttaaattcgattttgttgttttatcttagaagcgtgatctcttgctttattgagtttatgttctcataaaagtatcctatagaaagataagtatttattatagtttgtggaaatttcttctgatcttgaattattagtttcccagactagtttttacttaaatgatgtataatagat

SEQ ID NO: 317582 - DNA, 569 bp, Homo sapiens
aacattacaaacaaaaaaggtaatatcattacagaagtaaagaaaaattagcctaagaaaatattatgtaaacctctgaacaaataaatttgaaaatcttgaagaaataactgttttctgatcatcagttttaacccaagaaaaaaatagaaatcctgaatagacaaactagaaggtatcaaaaatattgtcaaagcaccactttcaacaaagacacaaaaacaaattatttaactttttttttcctttttatcattcaaatagctgatacttyttgcaacagttttaaaacacagagcatgaaatcagtggatattggtttctatttattaattctgctttgagattatttctgttccttgttttatttccttagtttcataatattccttttaaattcgattttgttgttttatcttagaagcgtgatctcttgctttattgagtttatgttctcataaaagtatcctatagaaagataagtatttattatagtttgtggaaatttcttctgatcttgaattattagtttcccagactagtttttacttaaatgatgtataatagat

SEQ ID NO: 317583 - DNA, 553 bp, Homo sapiens
ggattctatttatacaacattctggaaaatgcaaagcaatggggacagaaaacagatccctggctgttggggctgggagcaggaggagctatgactccccaggtgagggtacagaaatgttctagaatgtcctgattgtgctagcggatataggtctatgcatttgttaacactyatacattaatacactaaaaaagtgaattttactctgcaaattatgcttctgtttttgttttgttttgttttgaaaaaagagcagcatcaatctaggatctattactgaactatccttttccttagaaaactcaaaccgccaaattttaaaatattgttttaaaactaacacagatgtacaagcagctgggttttttttctattttcttctcatggtggtgcacaggttgcaaacggaagtccaagtttctaggcaatggattaaagtgttttggaataatattggcctgacccagtgcaaatgttgtccacaaatgcatccctgcctttgaggatcctgaatgtttctttctgctcccaggaagcagttctcatttgc

SEQ ID NO: 317584 - DNA, 553 bp, Homo sapiens
ggattctatttatacaacattctggaaaatgcaaagcaatggggacagaaaacagatccctggctgttggggctgggagcaggaggagctatgactccccaggtgagggtacagaaatgttctagaatgtcctgattgtgctagcggatataggtctatgcatttgttaacacttatacattaatacactaaaaaagtgaattttactctgcaaattatgcttctgtttttgttttgttttgttttgaaaaaagagcagcatcaatctaggatctattactgaactatccttttccttagaaaactcaaaccgccaaattttaaaatattgttttaaaactaacacagatgtacaagcagctgggttttttttctattttcttctcatggtggtgcacaggttgcaaacggaagtcyaagtttctaggcaatggattaaagtgttttggaataatattggcctgacccagtgcaaatgttgtccacaaatgcatccctgcctttgaggatcctgaatgtttctttctgctcccaggaagcagttctcatttgc

SEQ ID NO: 317585 - DNA, 596 bp, Homo sapiens
agacccaccccctgtgcacaggtgactgcacacagmcagtcgtgaagaaatgaattgacccagcaggatatcgtcaggtgccagagactccagcaccaaagacgtgaaacccaagctttttaagagaatattgcacctccagcttttactgtgtgttttcttccattacgtttcagtatcaagcaaaacaacgcttcttgttaattgtctgtgctattatttcatcagaagcagagccagatatgggaaatgcattctgctcctccatttcaccacagaggaagagctgccctgaaaggtgaaagagaagctaccagggtctatgggacttgcaggacatgagaatctgcaggacactgctcccagaagacctgggagggcacaaaggaagatgttctctcaacagttttccaagcaacgatacagagataaaaaggtcagcgtctggcagccccctctagcatatgcacgtctatttatgaagacacttagccaggatttagtaagttcactgcaaagctccaggggcgcctgtctctttaaatccgtctcttcccaagtgaaatttgtggccctgatgaatggcagagcagagt

SEQ ID NO: 317586 - DNA, 596 bp, Homo sapiens
agacccaccccctgtgcacaggtgactgcacacagacagtcgtgaagaaatgaattgacccagcaggatatcrtcaggtgccagagactccagcaccaaagacgtgaaacccaagctttttaagagaatattgcacctccagcttttactgtgtgttttcttccattacgtttcagtatcaagcaaaacaacgcttcttgttaattgtctgtgctattatttcatcagaagcagagccagatatgggaaatgcattctgctcctccatttcaccacagaggaagagctgccctgaaaggtgaaagagaagctaccagggtctatgggacttgcaggacatgagaatctgcaggacactgctcccagaagacctgggagggcacaaaggaagatgttctctcaacagttttccaagcaacgatacagagataaaaaggtcagcgtctggcagccccctctagcatatgcacgtctatttatgaagacacttagccaggatttagtaagttcactgcaaagctccaggggcgcctgtctctttaaatccgtctcttcccaagtgaaatttgtggccctgatgaatggcagagcagagt

SEQ ID NO: 317587 - DNA, 404 bp, Homo sapiens
aggctgaggcaggagaattgcttgaacccgggaggtcgaagttgcaatgagtggagatcacaccactgcactctagcctgggtgacagacggagactgtgtctcaaaaacaaacaaacaaacaagaagaattggctacattgacttaaaacattcccatttatcatgatagtgataaattccccacatgtgaaatacaatatttgacrgcactgggcctatctcaggcgtgcttggaatattctagttctgtagcaagttcccctttctccctttcctgaggagcctctctggataccctcatgttgcccgatagggaagtttaaagtactctctggaaagttccccaagtcagccaagttcattaatacattaggcctaaacatggtaggcacattcactgtt

SEQ ID NO: 317588 - DNA, 583 bp, Homo sapiens
ttgtagaagtgctttacctgagcatgaattacccatgccggcatgggttgtaagtgatgcagctggactccagcctgcgtctcatctcaagcaacttagtgaactcagtctgctatgtgtctctatttgtaataattttaggagtagctaagaatcatcaacttattatagattctattataacgcctactttttctcttatcttttccagttttttctggtccagtagcttctttccatttttcaggtgttgaaggaagtgatactttgctttgctttataatrttaattgtaattatttaataataacaatatttactaggtttgctttgagctctcattttgtttcaggcattaacctgtaaaacttggctctaattcttataatgattctacaaagtaggcaaaattagttttttgtttttttgtttttttccccaaataggaacactgacattcagagaacttagtttctatcttgaaatcacacagctttgtacatggcaacttccacacatgcttttttccatgcccattgttttaaaattcttgaaggaataggctactttttcagtcctatcag

SEQ ID NO: 317589 - DNA, 569 bp, Homo sapiens
tcctgctctgaagaaggaagacagcagaatcataggaagttccaggtatccttcagtgtcacctgtctctaaacataatgagggaataagatacgtgtgtacatgtaaatctaacataaaaattgctcctaaactggaccttgaaaatgtgaatttgaatattttgggtaacaaggaaacgagagcacagatgcaggtacataaaattaaattatgctgagaatcaatactttgttcattttaactgaaatgtgggtgatatgaagggaagttaaaatgaatcaggtcttaaattttagactaagatttttgaattgtattgggtgtgaagycaacaatgtttccaataaaaaatataacataattagttgtatgtgttagaagtttagctatggcagctgtctataaaatgattttgaatgagaagagcctgagttaaaacttaccttttattgagtcctttctggtgctaggcttagcaataggtaccaatttatgttcagtattttacttaaaacgtataataaccttgtaaagtaggtattatccttcctatttttaaccacaaa

SEQ ID NO: 317590 - DNA, 534 bp, Homo sapiens
tggggtttccagcttcagagaggccaaaggtgttttttctcttcctttttttttttgagatggagtcttgctctgttactcaggctggaatgcagtggcgtgatctcagctcactgcaacctccgtctcccagattcaagcgattctcctgcttcagcctcccaagtagctgggattacaggcataggccacaatgcccatctaatttttgtacttttagtagagatggtgtgtcaccatgttggccaggctggtcttaaactcctgacctcaagtgatccatctgcctcagcctcccaaaatgctgggattataggcatgaggcactgtgcctggttggccacagatatttttaagccagtaacakggtttcttacactgttttccttaataattatgtgtatttacatgccatttttgctgaatctattaatcaaccactcgatatttattctgctgtgaagcattacttttcacccctccttttgtcatttcttatcctataaccagaattaatatgttccgtgctcttac

SEQ ID NO: 317591 - DNA, 559 bp, Homo sapiens
attattttggttaaaaaggggcatttgcacttcttttcaaaaaagaaaattatataaattttctatgattattttgtttccttggtcagaagcctttgttgcctggtaaagaaaccaaatgctttttcttggcttttgagtctcttcccagtctaacctcaacctaattatccaayctctctctttgctgcccctcctggctctgtctgtcttctatgatctggccactgaaacctatctctgtatctttgtatatgctattgcctctgggtctgtaaaaactgtatgcagtcttcattgctttctgtaccccctcttctctcctctctctctctgtgtagatctctaatacagtgcttcacactgtcctaaacgtagtttctcattcctcatgtcctataccagactggaagctcccctaagtcaggattcatgtcttcttcaaaaactttgcatacataaaatatctcctggcacatctcagtgaggttacacgaacattttccaaatacagctaagctttccacctcactgactttccaagtatgattactgtagc

SEQ ID NO: 317592 - DNA, 607 bp, Homo sapiens
tagtatttctaacattatatttgtaaaccaagttagaaaaaaaacccatcgaattgaaacaagttatattgaaagcaggcagtttaattcagtcctttccaaaggtcayagtcttgtagttattattatttattcctactttttctggaatacttaactatcctccttcactcattgctctcatccagtccctgggagtttactcttaaaaacagatattgatgataccctagctataattctgacgtgtccaaatgtaaagaaaataagaggtgaagctcacgcattggtttcctatttttcaccagcaggctcagggtacagattcttaaagcaggaagacaaacagagtctgaaactacccagagtaataatgtggaatgccatctcctttgtgggacagaaaactgaacagatagatcatgttgcaattaggaaaatatttcccttacttaatggatatatgctaaagaatctcagaaaatcattggtgcatgtggtgtgcgtgtgtacataagcatgtgtgtttctgcatgctcatgcatgttgtacatgtgtgtatgcacatgcatgtgtgtttgtatgcttgtgtatgcatgttagaacc

SEQ ID NO: 317593 - DNA, 607 bp, Homo sapiens
tagtatttctaacattatatttgtaaaccaagttagaaaaaaaacccatcgaattgaaacaagttatattgaaagcaggcagtttaattcagtcctttccaaaggtcacagtcttgtagttattattatttattccyactttttctggaatacttaactatcctccttcactcattgctctcatccagtccctgggagtttactcttaaaaacagatattgatgataccctagctataattctgacgtgtccaaatgtaaagaaaataagaggtgaagctcacgcattggtttcctatttttcaccagcaggctcagggtacagattcttaaagcaggaagacaaacagagtctgaaactacccagagtaataatgtggaatgccatctcctttgtgggacagaaaactgaacagatagatcatgttgcaattaggaaaatatttcccttacttaatggatatatgctaaagaatctcagaaaatcattggtgcatgtggtgtgcgtgtgtacataagcatgtgtgtttctgcatgctcatgcatgttgtacatgtgtgtatgcacatgcatgtgtgtttgtatgcttgtgtatgcatgttagaacc

SEQ ID NO: 317594 - DNA, 542 bp, Homo sapiens
tcagcaaaggcacgattttaaagggattcacaccatgtgcttaatttaaatgttaaatgagctgagcaccgttctggggagttgatctatatgaaagctgtcttgtgcttgtaggagtgggatatttgtatagtaaaatttgtttattatatgtatttataacttattgtattaaattactatttaaatttatttcttatataatggattttattaaactatttaaattatatatgtgtcagtattaaaattatttaatgatcatataattgtattattatattaattaatgtactrtaattattatataattaattgaggtaattataaaattatatgattaatatcattattatatttagttaacctattttatttatatattatatattaaaatgaagtcattatagtagcaattcttttttaaaaatttaaatttgtatattgctttttaagtttataaaccggagtgatagccacatcaactatgaagcagttcaggaaaatccagaaattaacatgaactgggatccgcaggaccc

SEQ ID NO: 317595 - DNA, 564 bp, Homo sapiens
cgtgatgccactttttgattcttattatttgtcatgttacygatttggctcagtctgtctccccttctcaacgcctttaggaatgtttctttatgttcagtgtttgttctttattccaacattgtgcttagtacacaaagggcctttttcatcttgattgtcgtatacttcagtctgagatttaaaaaaaaattctatgtactttaaaaaaagtcttcctctacttctcattgacctaaaaggatcttttacacattagttggatataagtccttctgcattaattttcgatttttcttatcctctcagattgtccattttcttgagcttttttcctacttctaaagagattaccttgatttatcttacaacctttccatctaatttttatttcagttactaaatttttttatttataagagcttatattcactgattattccctttttaatgtatcatgtctacattttcaccaaagcaatatttttccttttctctctgagactactaattaaattttctttataattttcttcttacactgacttgccactatttccattt

SEQ ID NO: 317596 - DNA, 564 bp, Homo sapiens
cgtgatgccactttttgattcttattatttgtcatgttactgatttggctcagtctgtctccccttctcaacgcctttaggaatgtttctttatgttcagtgtttgttctttattccaacattgtgcttagtacacaaagggcctttttcatcttgattgtcgtatacttcagtctgagatttaaaaaaaaattctatgtactttaaaaaaagtcttcctctacttctcattgacctaaaaggatcttttacacattagttggatataagtccttctgcattaattttcgatttttcttatcctctcagattgtccattttcttgagcttttttcctacttctaaagagattaccttgatttatcttacaacctttccatctaatttttatttcagttactaaatktttttatttataagagcttatattcactgattattccctttttaatgtatcatgtctacattttcaccaaagcaatatttttccttttctctctgagactactaattaaattttctttataattttcttcttacactgacttgccactatttccattt

SEQ ID NO: 317597 - DNA, 564 bp, Homo sapiens
cgtgatgccactttttgattcttattatttgtcatgttactgatttggctcagtctgtctccccttctcaacgcctttaggaatgtttctttatgttcagtgtttgttctttattccaacattgtgcttagtacacaaagggcctttttcatcttgattgtcgtatacttcagtctgagatttaaaaaaaaattctatgtactttaaaaaaagtcttcctctacttctcattgacctaaaaggatcttttacacattagttggatataagtccttctgcattaattttcgatttttcttatcctctcagattgtccattttcttgagcttttttcctacttctaaagagattaccttgatttatcttacaacctttccatctaatttttatttcagttactaaatttttttatttataagagcttatattcactgattattccctttttaatgtatcatgtctacattttcaycaaagcaatatttttccttttctctctgagactactaattaaattttctttataattttcttcttacactgacttgccactatttccattt

SEQ ID NO: 317598 - DNA, 649 bp, Homo sapiens
cttgggaaccatatgaacaccatataatcttactgtttatactataattttatcattctcataaagctaacctaaagacagaccagtagactactcttagccctgtgaaacccatgctcctgaactttaaacctgatctcctaggtgacaattttgtgataataaaaataatttagaatctcagaattggaaggatctttacagttctgtctaaacgtattacctgtatttgcctgaacatctctgctgtcagataactcattatttccctattctatctctgtatttatttctttattagaaagttttccccacactgaactgatgtataccattttatattcttctcatcctatgcctggatttcaacaatccctgtaatgttgtccaagcatgtttccagtccttgtctaaatctactttctttccctcctccagtcaggcttcctccagctgtgccctgggattcttcacctcagctttggctccaaagtytctgctgcctatggctgcctggataatgtccattgctcccccaaagaccggatatgttattacatctggcgaaaaggactttgaggataccaggaagttaaggacctggagatggggaagattattctggactatccaagttgacatcatctga

SEQ ID NO: 317599 - DNA, 450 bp, Homo sapiens
cctggggagagcaaagctccacctgcagggaggggagagagggagggaatcgaggtggcttgtgtccatctttatcaaacttttctcccaattcagttttgatccagtaatagtcaaagtaaagagtcacagacatttaatctggttacatgccagttttggagctgaaaataagaagttcagagattaagagattagtgttcagctaattggggactttttccccctagatataagcactttgcttctctcctaaccatggctcaaatggagtattatggcacttttcccaggggcctgagataacttgcatccacttcacttcctttggttgcctcttccagggggccttgcagtcagtcaacctctgtgtggaggggacaccttcccttatacagtcttccacagtgtatgcagtatgatrgtgtcccacctgctcctgcccttagc

SEQ ID NO: 317600 - DNA, 522 bp, Homo sapiens
gtatcaagaatcagacaaggattgaaacatgtcagccccttagaacaaatacaccttcttgtgaccacaggaaagcacttgtgtttgattctgtgttgcagaggttaaagggtgaataaaaactaacaaaataaaagctcagaagagtaagaaagtgaatatcaatctgattatacagattaggaaaaacccaatgagataaataacatttgggagataagtgaggacattcccagtagaaaaacagagtgaagacaaagacagagagagaggcataaagtaagattgaggaaggaggtcttgcaggatggaggcatagagtgcggagtgcaaccattgtccagattcactactctagtcctcagagacatgaggctgaataaagaagcaacagccatcraagcaggaagatagtcattagtaaactgaccacttataatttagttgccactgtttaaacttaatgctttattcatgtccattgagtcaatagtcaactcactcagtgattgatagagactc

SEQ ID NO: 317601 - DNA, 599 bp, Homo sapiens
aactaagtgataaaacaaattttacttggtttcttaaaataatactgctatttgtttttatatattttgttatttttctaacaactctaaaatgaatgtctgaagtttttagttatggttgatacactggatcaacrgcaccactgatttgtaattgctatttgaaatctagatttatttgtgcaatctatctttttctgtcaagaatatctggttctgcatcttgctggttgggttttagtccttatttcatctttaaatgcgtccctcaaatgtctcccattccaacttagaggactttgcttttctctaataaataccagttctaacaggataaaaactattgaactgttggcttcgggggaagagcttctaaatgagaaacatcctagcttggaaccaatggagtgatcagtccgggaagaattggcatagggccctctttcaggagctggagcaaaaccagagtcatgaaatcaaaacttctaatactgagccttttcatttttaaatgaccttatgcacatccatggttaattcttaaaacaccttgccttttaatcctcttacacgcattctctctctcttccttcccccat

SEQ ID NO: 317602 - DNA, 622 bp, Homo sapiens
cttatcagcaccctcttgaattggaaacatttttgcctattcaccttgatttagattaaggttttctttcctcttttttaccattggccttaaagttcagatcattgttgaattttcatgaggtataattaataaaataactcttctaaaaaacaaggatattgatcagttgtttacctcagttctcaatatctttatctacatatctcactctcaaacagttcagcaattgcttatacgctcagatagtttcctttatccttaaagtcatgcagtagccccatttttctttttacacaagtaactgggccctgttcctgctatttcgcaggctacagggtcacgaggcaagttttaggcatgaatttagacaattgtaagctgcatactcttttgcagcattgccttgtcatccatatgctataattggggttaagagtcatttgttaatcaaggcacttaaagatttttttttkcaatatgatacaaagagactcaaagattataggagaaaatacttcaagaatacaggacttgcaaaggaattacatggaaaacagaagacccaaagtactctaactgtattcccacattgtctgggggtgatagtaacaacggtacc

SEQ ID NO: 317603 - DNA, 622 bp, Homo sapiens
cttatcagcaccctcttgaattggaaacatttttgcctattcaccttgatttagattaaggttttctttcctcttttttaccattggccttaaagttcagatcattgttgaattttcatgaggtataattaataaaataactcttctaaaaaacaaggatattgatcagttgtttacctcagttctcaatatctttatctacatatctcactctcaaacagttcagcaattgcttatacgctcagatagtttcctttatccttaaagtcatgcagtagccccatttttctttttacacaagtaactgggccctgttcctgctatttcgcaggctacagggtcacgaggcaagttttaggcatgaatttagacaattgtaagctgcatactcttttgcagcattgccttgtcatccatatgctataattggggttaagagtcatttgttaatcaaggcacttaaagatttttttttgcaatatgatacaaakagactcaaagattataggagaaaatacttcaagaatacaggacttgcaaaggaattacatggaaaacagaagacccaaagtactctaactgtattcccacattgtctgggggtgatagtaacaacggtacc

SEQ ID NO: 317604 - DNA, 549 bp, Homo sapiens
gggggacacattcaaaccatagcacaagtatactcgtcatactgagacccccaagcactggcctatataataagatatccattaggcttccagcattaatagtcttttctcccatgttttcttttccactgaaaaacttaaggtaactttgtctaaggcmtggattattgttacatatagacagtctcaatattgagaagacagtttataattgacacagcttactgaattaagcactactggctccaaataagtatacatacttacttatgtagaccaaaatatatcatgtatttacatctattttcttagatgttcgtggaccaaacacaatgtgagatgacaaatggagacctcgatgcactagcaggctgttgatcttattttagagtttatttcttagagataagagggagaattcatattaggtgatcttgcattctcaaaactcagagcgtcagttttccttttctcaagtactttacaagtctactgtcctttcttttcacacaccttaaaagtacttcggataatatctaagactacatg

SEQ ID NO: 317605 - DNA, 615 bp, Homo sapiens
cagatagaataacggaaaagaataagcaaaataaaaatgttaaaaatagtagacagaagaaacaatgggcactgtatatctgtcccctaagaaaatgccaaattcaaatcatcctctggagttaagttgcccttttctcctatcctgtctcccacgtgaatgaaatggacacagagtttcattttcagtggamgcgtacatttgcagtatctcaatgggttataaacaagcttcatataaaggtagtaaaatgtattattaacccccaaagatataattgccttgtacataaggcagtgatgatagcatagaaatgaaaatattcaaaaactctcatttcaggctcaggtgatgcaagtaaccatggtaacgtttcctgacagccttaatttaaatagcagattccaaagaaaaaattccaaatggactccagaaaggaaatggattattcaaggtccacataaatctaatttaaataagtgctttacacaaaaatggaaagtctttaagttataatgtctttagctttgtgttcaactttgataatgatttcttttcttttgaatgtatttattcacaatgattcttaggtagcaatcaaaagctttctattgc

SEQ ID NO: 317606 - DNA, 621 bp, Homo sapiens
agttatgcacagcacataacacttgataatgataattaattactctgttactggtttatgtatttactacactatatattttcatcattttagagtgtacttcttctacttatttttttttwaagttcactgtaagcagcctcaggcaggtccttcaggaggtgttccagaagaagacttcattatcataggagatgacagcttcatgcgtattattactcctgaagatcttccagtgggacaagctgtggaggtgggagacaatgatattgatgatcctgaccctgtgtaggcttaggctaatgtgtgtgttttgtgtctttgtttttaagaaaaaaattaaaaactcaaaaaagtaaaaaatttaaaaataggaaaaagtttatagaataaggatataaagaaaaaagtatttttgtacagttgtacaatgtgcattttaataagtgttataaaagaatcaagttaaaaaaattaaaacatttttaaagtaaaaaaagttacagcaagctaaggttgatttattattgaagaaagaaaaatatgtcaaaataaatgtagtgtagcctaagtgtaccatctttatagagtatataaagtctacaatacactaacggccta

SEQ ID NO: 317607 - DNA, 621 bp, Homo sapiens
agttatgcacagcacataacacttgataatgataattaattactctgttactggtttatgtatttactacactatatattttcatcattttagagtgtacttcttctacttatttttttttaaagttcactgtaagcagcctcaggcaggtccttcaggaggtgttccagaagaagacttcattatcataggagatgacagcttcatgcgtattattactcctgaagatcttccagtgggacaagctgtggaggtgggagacaatgatattgatgatcctgaccctgtgtaggcttaggctaatgtgtgtgttttgtgtctttgtttttaagaaaaaaattaaaaactcaaaaaagtaaaaaatttaaaaataggaaaaagtttatagaataaggatataaagaaaaaagtatttttgtacagttgtacaatgtgcattttaataagtgttataaaagaatcaagttaaaaaaattaaaacatttttaaagtaaaaaaagttacagcaagctaaggttgatttattattgaagaaagaaaaatatktcaaaataaatgtagtgtagcctaagtgtaccatctttatagagtatataaagtctacaatacactaacggccta

SEQ ID NO: 317608 - DNA, 629 bp, Homo sapiens
ataacagaatcatttatatgctcattctatatgtttcatcaaattacaaatttgtttagcagattattcaaagagccaagattatggaaaatatatttgctattcataattagaccatttattttttcttattttccattttaaaaaaaatttttatatgttttgggggtacaagtgtgaatttcttacatgagtatattgtgcagtgctgaartctggacttttagtgtacctatcacctgaagagtgaacattgtacccagtagataattttcaaccctcacccctctgttaccctcctacattttgtctatttttccattctctgtctctgtagtttttgactttttgttgctgagttatttcactttcataatagcctcaattccatccatgttgctgaaaaggacataattgcatctcttttgtggctgtattatattccataacatacatatacgagattttctttgtccatttttccattgatgggcacttaggttgattccacagctttgctattgtaaatattgttgaaataaacatatcagtgtgtgtatctttttgatgtattaatttctttccctttgggtatatacccagtagtgtgattgctggatcaatggaac

SEQ ID NO: 317609 - DNA, 600 bp, Homo sapiens
ttgatgggcacttaggttgattccacagctttgctattgtaaatattgttgaaataaacatatcagtgtgtgtatctttttgatgtattaatttctttccctttgggtatatacccagtagtgtgattgctggatcaatggaacttctatttttagttctttgagaaatctccatactgttttccataaagtttttactaatttacatacctatcagcagtgtataggcattcctgtttctccrcatccttcccaatgtttgttgttttttgactttttaataatagccattctgactggtttaatttgcatttttcataattagtaatgttgagcaatttttcatgtttgttggccacttacatgtcctgttttgaaaaatgtctgttcatgcattttggccattttcaaatgtatttttcttcatgtcaaattgtttgaattccttgtacctgctggatattagccctttgggattagaccatttattttctcactgcatttctgatgacatagaagattaatagaaaatagctcttgtacaatcattagtaaacagaaaggcacaaaattctatatgctattggaaacatatttgta

SEQ ID NO: 317610 - DNA, 600 bp, Homo sapiens
ttgatgggcacttaggttgattccacagctttgctattgtaaatattgttgaaataaacatatcagtgtgtgtatctttttgatgtattaatttctttccctttgggtatatacccagtagtgtgattgctggatcaatggaacttctatttttagttctttgagaaatctccatactgttttccataaagtttttactaatttacatacctatcagcagtgtataggcattcctgtttctccgcatccttcccaatgtttgttgttttttgactttttaataatagccattctgactggtttaatttgcatttttcataattagtaatgttgagcaatttttcatgtttkttggccacttacatgtcctgttttgaaaaatgtctgttcatgcattttggccattttcaaatgtatttttcttcatgtcaaattgtttgaattccttgtacctgctggatattagccctttgggattagaccatttattttctcactgcatttctgatgacatagaagattaatagaaaatagctcttgtacaatcattagtaaacagaaaggcacaaaattctatatgctattggaaacatatttgta

SEQ ID NO: 317611 - DNA, 600 bp, Homo sapiens
ttgatgggcacttaggttgattccacagctttgctattgtaaatattgttgaaataaacatatcagtgtgtgtatctttttgatgtattaatttctttccctttgggtatatacccagtagtgtgattgctggatcaatggaacttctatttttagttctttgagaaatctccatactgttttccataaagtttttactaatttacatacctatcagcagtgtataggcattcctgtttctccgcatccttcccaatgtttgttgttttttgactttttaataatagccattctgactggtttaatttgcatttttcataattagtaatgttgagcaatttttcatgtttgttggccacttacatgtcctgttttgaaaaatgtctgttcatgcattttggccattttcaaatgtatttttcttcatgtcaaattgtttgaattccttgtacctgctggataytagccctttgggattagaccatttattttctcactgcatttctgatgacatagaagattaatagaaaatagctcttgtacaatcattagtaaacagaaaggcacaaaattctatatgctattggaaacatatttgta

SEQ ID NO: 317612 - DNA, 576 bp, Homo sapiens
aggataacttaaaacatcttttcaataatattcctgtttttaaaagtttattcatgcagattgtaactaaaatatagtgaattaaatctaaatacattactgtgaaatataaagcttaacttaaagcaaagggatttgcawtatatatttagacaagaagtttgacagcaaaacacaccctctaaaagatagtgggatctaatattaaaatatgcatgtggcagaaaacatactgaatgcaacagatacaaaaataaaatattgtggctctaagaagccaaccatcttaagtttggatgcgtaattagtgggaaaccagacagaaagcttatacatatataaaaactagcttaacataaaatggaaagttcccgctgttcatgagagttatgggcatatagagtgtcaggtattattgctctggtagaaagtctgcttagggaaaacttttcaatagaccaaatatttcatttaaaactgcaagaacagaaaagctttcattttgtatgaaacataagagcacttcgagcatagaaaatgtaggagcctaagcagagatgtgagtgagtggtaagt

SEQ ID NO: 317613 - DNA, 576 bp, Homo sapiens
aggataacttaaaacatcttttcaataatattcctgtttttaaaagtttattcatgcagattgtaactaaaatatagtgaattaaatctaaatacattactgtgaaatataaagcttaacttaaagcaaagggatttgcaatatatatttagacaagaagtttgacagcaaaacacaccctctaaaagatagtgggatctaatattaaaatatgcatgtggcagaaaacatactgaatgcaacagatacaaaaataaaatattgtggctctaagaagccaaccatcttaagtttggatgcgtaattagtgggaaaccagacagaaagcttatacatatataaaaactagcttaacataaaatggaaagttcccgctgttcatgagagttatgggcatatagagtgtcaggtattattgctctggtagaaagtctgcttagggaaaacttttcaatagaccaaatatttcatttaaaactgcaagaacagaaaagctttcattttgtatgaaacataagagcacttcgagcatagaaaatrtaggagcctaagcagagatgtgagtgagtggtaagt

SEQ ID NO: 317614 - DNA, 607 bp, Homo sapiens
tattatgaggaattagtcaatgttctgtttctgactatgaagcagcaaaggtaccattaaaatttcttacccacattggtcctttatcttccttctttcaaggcataagtttgctcatgcataaggcgtaaggttggctgtgaaatcctccacaaataaaatatactccatagctgcactcaagtccccttttacagctctgttgttcatagaggcataagtaaagaaaaaaattaagagaagtaaacgttttctaatagcagagaagtcttaatccgggatcttgagaaagtagactaagtctatgataccactggcatctgggaagaaactttcctggttagctttaccttaaggttttcaatgtgtatgcagttccaagagtctacagggacccttcyggttgtgaaattaggaacccaacgtccaagattccaaaatttggctgcagggtgggtggcaagggcagtctttctctaacgtaatttccagaagacaaaatctctgcgttctagatgatgaaggatttgattgtcctcagtcctttacttcaccaggtacactttggcataaaacattgaagtctttcagaatttagtcatgttag

SEQ ID NO: 317615 - DNA, 581 bp, Homo sapiens
tacttcaccaggtacactttggcataaaacattgaagtctttcagaatttagtcatgttagcatttaggagcagagaatacaaacggttctattattagggactgaggccttccagtgactattttataggtggttaacgtacgttttttcatgggaagaggatctgaatgtcaatttgtaatacgcctgaccaacgatacccagttgattcagttagctttgcttcatgttattgtatctgtaataccttatttaatagttttataacttgtctagtgaaacaatcaccttattactggagatttctccaggaattccccatgagagaaacacattttctaataacctgttagctagaattacagtatctgccttcttkcctgggaaaacttgcaggggaaaagtccaaattttgtaatctcttttggttcaaaatgcatttccataactatattagacttcatgatcatttaaatatttcaattacctctatattaccatctttttgacttttaaattctctctcttctgcttacaagtttagttttatcctgccatctccatcatttctcacaggcat

SEQ ID NO: 317616 - DNA, 570 bp, Homo sapiens
atgaaaataaaatttgtttcatttatatgtcatgtgatatcatatcagctaaatattatataactatgaatactaagttacttttatagaaattaatagctttcttatattgccatattatcttccacagttaaggagactaaaaggtgcagcagaaagaaayaggacagaatttatggaaaaacagactgactaatataattttgccttgaattgaaatataaggatttaaaggtacattcatttttcagaaggaaaaataaatccaatatcacacaaaaaatgcaatacacatttgaaaatacttaaaaattgacctccattttcaacttcatcacgcaaagagcttggaaattttcactcctgtcattaaacaaaaaataaacaaatatggacaaaatgaaaattagtaacttttcttggagccattacaaaattgaggttatgaagcaaactgccaacccaaaatcctgagagagaggcagagtttccaagatttgcttaactgcaacagaaacccttggaatccagacactggtagaaacatttaaacagttattttaacaaatt

SEQ ID NO: 317617 - DNA, 570 bp, Homo sapiens
atgaaaataaaatttgtttcatttatatgtcatgtgatatcatatcagctaaatattatataactatgaatactaagttacttttatagaaattaatagctttcttatattgccatattatcttccacagttaaggagactaaaaggtgcagcagaaagaaacaggacagaatttatggaaaaacagactgactaatataattttgccttgaattgaaatataaggatttaaaggtacattcatttttcagaaggaaaaataaatccaatatcacacaaaaaatgcaatacacatttgaaaatacttaaaaattgacctccattttcaacttcatcacgcaaagagcttggaaattttcactcctgtcattaaacaaaaaataaacaaatatggacaaaatgaaaattagtaacttttcttggagccattacaaaattgaggttatgaagcaaactgccaacccaaaatcctgagagagaggcagagtttccaagatttgcytaactgcaacagaaacccttggaatccagacactggtagaaacatttaaacagttattttaacaaatt

SEQ ID NO: 317618 - DNA, 496 bp, Homo sapiens
tacagcctgcagaaccattagccaattaaacctctttcattataaattacccattctcaagtatttctttatagccatgcaagaatggactaatacagaacctatggaattggaatgtattggagacatagtgagaagaaggagtgtgagaaaatgtttttcaactctggggctcactactaaattgtcacacatgaacttattctaattacataagactttaaaaattgaactaatgggtagaattstgactggtcacagactgagctgtattgggtgctcaaatatgtcacaaatccaaatagcactgcaaagtctttgaacatgcagttgaaattgaacccatagcccacagatgcttaacacaaaactatcaacattctccctgggatatagataggactcagaatctaaaaatgcaataatcaaaattcccaaagcaaactaaagttactcaacatccatataagcatgaaagtctcaaccaagaggaaaa

SEQ ID NO: 317619 - DNA, 499 bp, Homo sapiens
aaacttaaaaaactggaagatggccctcaaacctcccaaagaaacttaattaaagtggcctttaaggtctttaaaaaatagagaaataaggcctggcatggtggctcamgtctgttatcctagcactctgggaggctgaggcaggtagatcacctgaggtcaggagtttgagatcagtctggccaacatagctaccctcctccctataaacacctccaactctgagctctctcactcctgcctggacctctcagactccctctcctttctcttccaacacatttcggaagcccgtttgtgggaaacacccacatgattcattaacggaagctctttttggaaacaactctgatcctcagatgacatagcagtcccaggtgacaccttgatttcagccttatgagactctgagcaatgaacttggttgagcagtactcggacttctaaactacagaaactgtaagacaataaacagctgttgttttaagccaataatttt

SEQ ID NO: 317620 - DNA, 499 bp, Homo sapiens
aaacttaaaaaactggaagatggccctcaaacctcccaaagaaacttaattaaagtggcctttaaggtctttaaaaaatagagaaataaggcctggcatggtggctcacgtctgttatcctagcactctgggaggctgaggcaggtrgatcacctgaggtcaggagtttgagatcagtctggccaacatagctaccctcctccctataaacacctccaactctgagctctctcactcctgcctggacctctcagactccctctcctttctcttccaacacatttcggaagcccgtttgtgggaaacacccacatgattcattaacggaagctctttttggaaacaactctgatcctcagatgacatagcagtcccaggtgacaccttgatttcagccttatgagactctgagcaatgaacttggttgagcagtactcggacttctaaactacagaaactgtaagacaataaacagctgttgttttaagccaataatttt

SEQ ID NO: 317621 - DNA, 584 bp, Homo sapiens
ttttgtagttgatagtttatcccttcccactcagatattgagttacatgagaatattttcctcctaactattaaattcattttccatgactttttagtttcattgtcctgttttttttttctctcttagctgttctgtttaattttatgggaaaaatataaaaaatttcaagaactgtgctgccacaattgctttcttaccaaaatcctaattccaagaagtttttttttaaagtcctccatctctgttcttgatgttcccgtagtacaaaacagcacttacctcagagtcactattttatcttttccatgtctatacattatatattattaatttgttgagtgacacctaaaacccaagtactctttataagtgctagcagaacaaagaagtaaattgtgatacctatmtttgctctcagattgaggaaatatgaggtagatacataaagaaatatttttcatgtgatatgataaatgcacacaggttctttttactttgcctaattaactcctctttcttcaaggcttgtttcagaaaccaattttcctctgaaaatgtctttgcaaccctttcttccagac

SEQ ID NO: 317622 - DNA, 584 bp, Homo sapiens
ttttgtagttgatagtttatcccttcccactcagatattgagttacatgagaatattttcctcctaactattaaattcattttccatgactttttagtttcattgtcctgttttttttttctctcttagctgttctgtttaattttatgggaaaaatataaaaaatttcaagaactgtgctgccacaattgctttcttaccaaaatcctaattccaagaagtttttttttaaagtcctccatctctgttcttgatgttcccgtagtacaaaacagcacttacctcagagtcactattttatcttttccatgtctatacattatatattattaatttgttgagtgacacctaaaacccaagtactctttataagtgctagcagaacaaagaagtaaattgtgatacctatctttgctctcagattgaggaaatatgaggtagatacataaagaaatatttttcatgtgatatgataaatgcacacaggttctttttactttgcctaattaactcctytttcttcaaggcttgtttcagaaaccaattttcctctgaaaatgtctttgcaaccctttcttccagac

SEQ ID NO: 317623 - DNA, 612 bp, Homo sapiens
tattacatatgttctcacttatataagggagctgaaaaagtggatctcatggaggtggagagtggaatggtggttaccagaggctgggaagggtagattacatgtttgctttcagaaatatctatgctgttaggtaccctcaagccttaatataattgtgccattttttaatcattagcaattcctttttaagttaattaagttatgttgttacattattttgagttgttagttaaatgactctaatgccacttggggataatataaaatgctacaggaaggcatttcaagacgaaaactgcttctaagaagtaaaacaagagatcacttttaagctacatttgattgccagctctgaatttgctaagttaaatttcatatagctttataatgtagagtaattagartgtctaaagaaagcaaacacagcaccttcagaattaatgagaacatatcagtatatatcttcatcttaatcttgcaaaggaaggcttttaaaaaagccattaacaatagctgtttgtgagacactgctattttcaatagaataaaaaggcttacaggattaataaggcaattacattatcagtggttatgctgctttctttgagt

SEQ ID NO: 317624 - DNA, 538 bp, Homo sapiens
ataaatttggaatttaatatactccttttaayagcatgagatctattatctactaaaatataaaaaaatgatgagacacatatgagaacatttaaaacagatcatttggaatttactccttaacaattttaagatttatagaataatttctgtaagattatgagatcataggatgtgtgcaagaccttcaatatcaaagagtccattctgcacactgaaattttttctaccacattcccaagctgtcatccagtctgtgactgaaaatcaatagcaagaaatgatgaaagtagcttgttccatatatgtaacagacacaggatatgtccaactgcctgaaagttcattcttttcttttacatcatagaattttctcaaattatggattaatatttttgaggtgaaattatcttattaaaatatttatcctttacacagaaaattgcataaagatgggggcatttttggtttagctcacactttatttgtggtacctagtacagtgtctgatacatagtaggcattcaataaacaacct

SEQ ID NO: 317625 - DNA, 538 bp, Homo sapiens
ataaatttggaatttaatatactccttttaatagcatgagatctattatctactaaaatataaaaaaatgatgagacacatatgagaacatttaaaacagatcatttggaatttactccttaacaattttaagatttatagaataatttctgtaagattatgagatcataggatgtgtgcaagaccttcaatatcaaagagtccattctgcacactgaaattttttctaccacattcccaagctgtcatccagtctgtgactgaaaatcaatagcaagaaatgatgaaagtagcttgttccatatatgtaacagacacaggatatgtccaactgcctgaaagttcattcytttcttttacatcatagaattttctcaaattatggattaatatttttgaggtgaaattatcttattaaaatatttatcctttacacagaaaattgcataaagatgggggcatttttggtttagctcacactttatttgtggtacctagtacagtgtctgatacatagtaggcattcaataaacaacct

SEQ ID NO: 317626 - DNA, 544 bp, Homo sapiens
ttgaatttgtaataaaacgtctctcagcaaagaaaagtccagaatctgatcatttcaatggtgaattaaccaataataccaatcctactcaaactatttcaaaagtacaggagaagggagtacttccatactctttctacaaggccagtaccaaaactaggttcctgatacctgataccaaaactagacaaagacacaacaacaacaaaattataggccaatattcctaatgaacattgatatgaaaatcctcaaaaaaaatactagcaaatcgaattcaaccacacattaaaaagagcaatcatcatgactgagtgggatttaacacatggataaaataatggctcagcatacacaaattaatcaatgtgatacatcacattaacagaataaagaataaaaaccatacgattatttcaattcatggtgaaaaaagtatttgacaaaatttaacatgccttcatagtaaaattactcaaaaarctgagtatagaagaaacataccacagtacaacaaaagttacatatgatagacccacaacta

SEQ ID NO: 317627 - DNA, 625 bp, Homo sapiens
ctgtttgcctttctttcctgcccctcccctgacgtatactatcttcccacatcgtagccatattggacttctctcagttttcaaataagcattgatgtctgtctttggtatgtacatttctctttttttgttccatgaattttcttcttcacaccacaccacagttcacactcttttccactgcttgtctgctaacttctacttgtrtttattgtgtcagtttaagtgtcatgagacttagaggaacttccatacctctacctggtcctggctgtatgagttactcttgaaatgtgctcccacagcccccattgttttctacatcatgaatgcattgctgtgttttgtatatgattgttagactgtcttcctaaactggattctctgggagagagggcttatgttcataatacttatgattttgcccctaggagagtgaaactttgtgaaaacacaggtaaatacatgttgaattaataataaataaatcataaataaaataataaataaaggagaacggagtttcaaaagtagccactttagaaagctaaggccatgtacattaagatggaaattatttttgctcattgaatgtatatgttaggggataattgataaatttggc

SEQ ID NO: 317628 - DNA, 625 bp, Homo sapiens
ctgtttgcctttctttcctgcccctcccctgacgtatactatcttcccacatcgtagccatattggacttctctcagttttcaaataagcattgatgtctgtctttggtatgtacatttctctttttttgttccatgaattttcttcttcacaccacaccacagttcacactcttttccactgcttgtctgctaacttctacttgtatttattgtgtcagtttaagtgtcatgagacttagaggaacttccatacctctacctggtcctggctgtatgagttactcttgaaatgtgctcccacagcccccattgttttctacatcatgaatgcattgctgtgttttgtatatgattgttagactgtcttcctaaactggawtctctgggagagagggcttatgttcataatacttatgattttgcccctaggagagtgaaactttgtgaaaacacaggtaaatacatgttgaattaataataaataaatcataaataaaataataaataaaggagaacggagtttcaaaagtagccactttagaaagctaaggccatgtacattaagatggaaattatttttgctcattgaatgtatatgttaggggataattgataaatttggc

SEQ ID NO: 317629 - DNA, 518 bp, Homo sapiens
ctgcttaatctactctagattcttttccttttaattgtagtatattaaatttttatttttctgtgagttcttatgctttggagctatattcatgrtgtgtaccatggtggaatagctaaagccagttgctagcttgagccttgcttgatgagtttgaagtacagattaacagtatcctagaagagagcatgatagtgcgtacctctgctattatccttacttaaaatcacctagctctcggaggcagcaaatgcgacagcactataatctgaaggactagggaagtttgtctaggttagtcttgcaaattgtacttatattaaccttggatccttctagtactggattggacactagtcttctgcctttgtatggttatagagtattcaggtcaatgtggagaagagaaaatgacacatttttttaaattctcttgtttttgttcccagacctcttttattgtaggttattgtttctctttcagtctggtacttaaaacatcttacagttttcttctc

SEQ ID NO: 317630 - DNA, 602 bp, Homo sapiens
cagggagaggaaccaataaaggaccaaagaaaaaacaagagaatagcatgattaacattatattatcaataagcaccatactgctgcatgaagtaacactcattttcactgcagtataatattacactgaggcattcttttacattccatcaacaagaatatttgcacacattgtcaatttattttaatcaaggagcagtagaaccatttccagttttttcttactgcaagtatgctattgtaaattttcacatccttctatctcctgatactcatgtggaagtatttttcttgggtattaaggcaaggcatagattgctacagcatacrggataaggataaactttacaagaaaatgataaattgtttttcatagggcttatacattcctagaatacagcggtatactcctggagtaaagtattacactcctgtctacattatgagcacgttgtcattcatatttactccaaaatctttcctgcatactttctcacctaaaaggcaccaaacagaattcctacaagtaagtgaattttatcctattttcaagataaaatgataattatccaataaaagccatatagtagtaagtgagaaaa

SEQ ID NO: 317631 - DNA, 602 bp, Homo sapiens
cagggagaggaaccaataaaggaccaaagaaaaaacaagagaatagcatgattaacattatattatcaataagcaccatactgctgcatgaagtaacactcattttcactgcagtataatattacactgaggcattcttttacattccatcaacaagaatatttgcacacattgtcaatttattttaatcaaggagcagtagaaccatttccagttttttcttactgcaagtatgctattgtaaattttcacatccttctatctcctgatactcatgtggaagtatttttcttgggtattaaggcaaggcatagattgctacagcatacgggataaggataaactttacaagaaaatgataaattgtttttcatagggcttatacattcctagaatacagyggtatactcctggagtaaagtattacactcctgtctacattatgagcacgttgtcattcatatttactccaaaatctttcctgcatactttctcacctaaaaggcaccaaacagaattcctacaagtaagtgaattttatcctattttcaagataaaatgataattatccaataaaagccatatagtagtaagtgagaaaa

SEQ ID NO: 317632 - DNA, 602 bp, Homo sapiens
cagggagaggaaccaataaaggaccaaagaaaaaacaagagaatagcatgattaacattatattatcaataagcaccatactgctgcatgaagtaacactcattttcactgcagtataatattacactgaggcattcttttacattccatcaacaagaatatttgcacacattgtcaatttattttaatcaaggagcagtagaaccatttccagttttttcttactgcaagtatgctattgtaaattttcacatccttctatctcctgatactcatgtggaagtatttttcttgggtattaaggcaaggcatagattgctacagcatacgggataaggataaactttacaagaaaatgataaattgtttttcatagggcttatacattcctagaatacagcggtatactcctggagtaaagtattacactcctgtctayattatgagcacgttgtcattcatatttactccaaaatctttcctgcatactttctcacctaaaaggcaccaaacagaattcctacaagtaagtgaattttatcctattttcaagataaaatgataattatccaataaaagccatatagtagtaagtgagaaaa

SEQ ID NO: 317633 - DNA, 609 bp, Homo sapiens
tgctaaatttattaaattaaactgtactgttttaagaaagtttagttatgagcagtttattaccaaagaaaataattaggtaatctttgagaaagaaagctagtcaatagcttgctttctttaggaatcttagtaatcttgataatcttgcattagaatcatcgctcggcaatttaacaagatttaaggctgaccagaagacaacgactttctaacctgtacttgaagtttttgtaatgagactgagactcatctgtcatgggttcttaaacttgaattggagagtgggccaggytactggtttggctcctatattcctctgaaagggatgaaactgactacctaattaatagtctacttaaaggatcacgagcatctcaggtccctgatgagaattagttactattaacctacttgcagataatcaagaattaatattattttagattcaattatgatttcagaaaatatatcacctaacaatatacatccactatattagtaaattattttatttattgagataattgctctttttggtaagataatataaaatagttaaaagaaaattatacttagaaagagctgtagttttaactatgacttttg

SEQ ID NO: 317634 - DNA, 578 bp, Homo sapiens
aagctagtcaatagcttgctttctttaggaatcttagtaatcttgataatcttgcattagaatcatcgctcggcaatttaacaagatttaaggctgaccagaagacaacgactttctaacctgtacttgaagtttttgtaatgagactgagactcatctgtcatgggttcttaaacttgaattggagagtgggccaggctactggtttggctcctatattcctctgaaagggatgaaactgactacctaattaatagtctacttaaaggatcacgagcatctcaggtccctgatgagaattagttactattaacctacttgcagataatcaagaattaatattattttagattcaattatgatttcagaaaatatatcacctaacaatatacatccactatattagtaaattattttatttattgagataattgctctttttggtaagataatataaamtagttaaaagaaaattatacttagaaagagctgtagttttaactatgacttttgaagtacaagttatgaaaactaagaccaaaacagttggccccatgtaagaagtacagaaaagctct

SEQ ID NO: 317635 - DNA, 625 bp, Homo sapiens
acatatagctacttaaaatgatatttaaatataatcatagctctacaaagataataaccagctgacaattatgtagccattaagaaatagatcatggaccttcataccaagcatgaaaaaataaatttcctagaaatggagaaaatatttaagccaaaagtgctgaagattacaaaaaaacaaaaacaaaacaaaaccaaaacgtggtagttttggaggtctgtttaaagaagttcacrtagaagtagggcaatgtcaaactaatttaagagaagtcacatacatttagaaatgaagccatctcaatgactatttatattctctagaacatgagaattttgcaattttatcttctgaatagagttaaggcattgattaaaatatctagaaataaaaaatttaaaacagcggaatttctgtgaacagacttgtgatttcagatttacatctttgtaaaacaaacattagtaatttaacattctaaaaacctatgaaggtgacaaaacatgtaatttagttttgaagatgttaccaatttgtaaccttatcagttaagacatttagacttgtataaaaatcaaactttaaaaataatttgttagagaaaacactttttcttctttat

SEQ ID NO: 317636 - DNA, 613 bp, Homo sapiens
acccattttgttctggaaaatatagtacacgtgtcatggtacctttttaaattctgtgatagtcaattttatttggcaacttttctgggtcatgggaaacctaaatatttagtaaaacattatttttgttgtttctgagatagtgtttttggatgagactaacatttaaattggtgacttttgagtaaagcaaactgtcctacataatgtgagtgggcctcatmtaatcaattaaaggtctgaatagaacaaaaagactagcctcccccaagcaagaaagaattgtctcccatgcaagaaagatgaccaattacagttcaattacacgaccagttctactcgagagctgaggcagacaagaattgcttgaacccgggaggtggaggttgcagtgaaccaagattgagccactgcactccagcttgggtgacagagcgagactctgtttcaaaaaaaagttattcctatataataaaagttcaacagaatgtgatcctgaggccttggtgagcttcctagttgatgaacacatcaatatgcttggcgggtggtgtgttctgggtttataggaagagaacatatcagttctgcattcagaaccctaccagacctt

SEQ ID NO: 317637 - DNA, 606 bp, Homo sapiens
actacagtctcaagctcaagtggttctctgcctcagcttcctgtagttcctgagtagctggaactacaagtgcattccacagtacccagctaaataaatgaatatttaaaaaattatagtattgtaggggatcagagaattaagaaaaaaaattatgtcaactccttgataggttaattggctccttctcttcatagaatgacatgttcttttataaatgaataagaaatcaaagacttctgatatagggaaagtggtcattattatatgcctyataaaagtttgggtttttttaactcaaataatcaagaattgtgtttaatttggtactggtggttaattttcttgaactggtcgtggttactagatctactagcttgaatctcttatgtcctacatttggtaacactcaaaggagatataaggtaaaaactcttgctttggactaaacaagaataatcaagatcattaagacaaattttcctgcataatttgaaaactgtgagctaacaggatgcaaatatacgaagagatttatgataacaaattggcttatgcaattatggaggctgacaaatcccaagatcaacatcagcaagtaggtga

SEQ ID NO: 317638 - DNA, 606 bp, Homo sapiens
actacagtctcaagctcaagtggttctctgcctcagcttcctgtagttcctgagtagctggaactacaagtgcattccacagtacccagctaaataaatgaatatttaaaaaattatagtattgtaggggatcagagaattaagaaaaaaaattatgtcaactccttgataggttaattggctccttctcttcatagaatgacatgttcttttataaatgaataagaaatcaaagacttctgatatagggaaagtggtcattattatatgcctcataaaagtttgggtttttttaactcaaataatcaagaattgtgtttaatttggtactggtggttaattttcttgaactggtcgtggttactagatctactagcttgaatctcttatgtcctacatttggtaacactcraaggagatataaggtaaaaactcttgctttggactaaacaagaataatcaagatcattaagacaaattttcctgcataatttgaaaactgtgagctaacaggatgcaaatatacgaagagatttatgataacaaattggcttatgcaattatggaggctgacaaatcccaagatcaacatcagcaagtaggtga

SEQ ID NO: 317639 - DNA, 606 bp, Homo sapiens
actacagtctcaagctcaagtggttctctgcctcagcttcctgtagttcctgagtagctggaactacaagtgcattccacagtacccagctaaataaatgaatatttaaaaaattatagtattgtaggggatcagagaattaagaaaaaaaattatgtcaactccttgataggttaattggctccttctcttcatagaatgacatgttcttttataaatgaataagaaatcaaagacttctgatatagggaaagtggtcattattatatgcctcataaaagtttgggtttttttaactcaaataatcaagaattgtgtttaatttggtactggtggttaattttcttgaactggtcgtggttactagatctactagcttgaatctcttatgtcctacatttggtaacactcaaaggagatataaggtaaaaactcttgctttggactaaacaagaataatcaagatcattaagacaaattttcctgcataatttgaaaactgtgagctaacaggatgcaaatataygaagagatttatgataacaaattggcttatgcaattatggaggctgacaaatcccaagatcaacatcagcaagtaggtga

SEQ ID NO: 317640 - DNA, 565 bp, Homo sapiens
ttaatgcacataattttggccaaaacaacagtggaaactgattacatgtcagctacattagacagagtgtcggctttataattgctatgctgtattgcaaatcctggaataagattatgtgacagctgttcccttggtttgtccataaaattgagatgtttgtttcataaagcaatccctgtgatcaaagattggttttaatatgcagctaacaaaattattgaaattagygaaatagaaaataataatgatacaaaatagttaacgctcattgctcttcttccatcatttttatagctttacttggtaataactatatttgtaaagagtatatttgtgcctgtgcttgtagaaacaatcttatatcatatttatatgtaaaacatataagatacatatattacatatatatatgattattctgtgatgtaataaaaaaagcagagagaaagaggccgtagggaaaaggacaatacatatctatatggatattttatcagccctctatgagattcagaacgtatatttctctgcaatgcaaaattatactgtatacatattagat

SEQ ID NO: 317641 - DNA, 565 bp, Homo sapiens
ttaatgcacataattttggccaaaacaacagtggaaactgattacatgtcagctacattagacagagtgtcggctttataattgctatgctgtattgcaaatcctggaataagattatgtgacagctgttcccttggtttgtccataaaattgagatgtttgtttcataaagcaatccctgtgatcaaagattggttttaatatgcagctaacaaaattattgaaattagtgaaatagaaaataataatgatacaaaatagttaacgctcattgctcttcttccatcatttttatagctttacttggtaataactatatttgtaaagagtatatttgtgcctgtgcttgtagaaacaatcttatatcatatttatatgtaaaacatataagatacatatattacatatatatatgattattctgtgatgtaataaaaaaagcagagagaaagaggccrtagggaaaaggacaatacatatctatatggatattttatcagccctctatgagattcagaacgtatatttctctgcaatgcaaaattatactgtatacatattagat

SEQ ID NO: 317642 - DNA, 646 bp, Homo sapiens
actgcaaacagtagccactgtgctagagtgagtgcaatgaatatattctgagaattttatgtggcaaaatggaacagactcagaatttgtaatgtgaagatgttttgacaatattttcatattttggaatgttataaatctaaagtaacatacagtttttgaaattaaactgttttgattggcagttgtagttacrttttgttattaatgtgctcagaacattaaaaatgacatgatgtttctctgtaaatatctcaaaattaacttataatgttttctcttgtttgagagattgtagtcttgcattgttataatacacaaacattctaaagagatttatgtaagtggaaatttagataaaatattaacaatcaatttattatttgtctatcataagctaaatttttatggcaaagtttgacagaaatatagaaaaaataactacattaagtcacagttatttagataaaatagaaataattattctgaaggaaaatttcaggagttaaaaataactaagagaagaactctattgtttttcaataacctaactctacaacagcaaccaaaggttggtctgaaaattctgcctctgaaaatttgacaaagataaaaagcagaggaaacctgcttaagatgatgtgtt

SEQ ID NO: 317643 - DNA, 646 bp, Homo sapiens
actgcaaacagtagccactgtgctagagtgagtgcaatgaatatattctgagaattttatgtggcaaaatggaacagactcagaatttgtaatgtgaagatgttttgacaatattttcatattttggaatgttataaatctaaagtaacatacagtttttgaaattaaactgttttgattggcagttgtagttacattttgttattaatgtgctcagaacattaaaaatgacatgatgtttctctgtaaatatctcaaaattaacttataatgttttctcttgtttgagagattgtagtcttgyattgttataatacacaaacattctaaagagatttatgtaagtggaaatttagataaaatattaacaatcaatttattatttgtctatcataagctaaatttttatggcaaagtttgacagaaatatagaaaaaataactacattaagtcacagttatttagataaaatagaaataattattctgaaggaaaatttcaggagttaaaaataactaagagaagaactctattgtttttcaataacctaactctacaacagcaaccaaaggttggtctgaaaattctgcctctgaaaatttgacaaagataaaaagcagaggaaacctgcttaagatgatgtgtt

SEQ ID NO: 317644 - DNA, 552 bp, Homo sapiens
ggcaagcacaataattttcttgattaataacaagcaatatcctgatatgtttttcagagcatcatcttgttagttcaattctacgtgacatgtttgtttgtttttttttctcacattcctcttcctcacccagacactgacctcatcctttgagtagccactgatactgctttttctgggaatgagccagcatcctgcttttatctcttcaccaaataccttgtgattttttgtgccactacaacatattayctgagcctgggtaatttataataagtggacattgtatttctcacagttctggaaactgagcagcccaatgtcaagatgttggcatctggtaagggccttattgctgcatcatcctatggcagaagggcaaaagagcatggggtgtggcgtggggtaaagaaagagagcagaaattattacatttttaaaatcagaaattcactcccaagacaactaacccattcctgtaataacagctttaattatgagtggagagttcttgtgacctaatcaccttttaaaggtaccacctctcaattc

SEQ ID NO: 317645 - DNA, 552 bp, Homo sapiens
ggcaagcacaataattttcttgattaataacaagcaatatcctgatatgtttttcagagcatcatcttgttagttcaattctacgtgacatgtttgtttgtttttttttctcacattcctcttcctcacccagacactgacctcatcctttgagtagccactgatactgctttttctgggaatgagccagcatcctgcttttatctcttcaccaaataccttgtgattttttgtgccactacaacatattacctgagcctgggtaatttataataagtggacattgtatttctcacagttctggaaactgagcagcccaatgtcaagatgttggcatctggtaagggccttattgctgcatcatcctatggcagaagggcaaaagagcatggggtgtggcgtggsgtaaagaaagagagcagaaattattacatttttaaaatcagaaattcactcccaagacaactaacccattcctgtaataacagctttaattatgagtggagagttcttgtgacctaatcaccttttaaaggtaccacctctcaattc

SEQ ID NO: 317646 - DNA, 577 bp, Homo sapiens
gctcagaaaagtggtatattaattatttaaaacttcaagtaataattcattcctctgggcctctgtagatctaatttctatttcaatttcttcactttttagacctaagtaacaacttayggagtaggagaagtggatactgcaaaaagctgaagaattagagttcacctagacctgggtttgaatcctcctctgtcatttactagataaagtttttagcaagtgtttaactgctttgcatcttgttttcctaagactcagagttctgatatcaagacgcaagagacaatacatgtaaaaacctagaatgaaagttagtacataatatatgcttaataaatatgctctcccttctcattctcatcattctcagaaatgcagtgccccacaatgagctctttgggacctgggatcagaaattaattactcaaaggtttaaataattaatatactactttcaggccatgattccttgcttttacttaattggaatggaaataaccttccttgagatgaaaaccattttatatctaaaggaagaaagcagaatttctactaaaatttcctctggttccag

SEQ ID NO: 317647 - DNA, 522 bp, Homo sapiens
tacctccaacactgctacactgtggaccaagcctcaaaatgagttttggcagagccaaattatattcaaactgtagaaccacaaatgtataattaggtcagctatggcataaggtagttgaaagaaataataatccatgtaatttggactaaaagaacttctaaggaaaaaagcatgattaagaatgtccaagcccacagactgtttttattttgaattttgttccactttggcagtgatgctaggtttcyagagatgctactgtcctaaagagggttacctgtggtccctggggctcaactgagacccagaagactgaagaaattaaaaatggagagagaaatggagagacagagagagagagagagagaatgaataaagagagggagagacaacagagagcatttgagtgaaaatgcctcaagtaccaagaacagagagagtgaaaaattcctcatctatgagaatcaaaaactgcacatgagccaaatacatctgttgaatgttccaagtgacaaaatg

SEQ ID NO: 317648 - DNA, 572 bp, Homo sapiens
gattataaaaatttctactagacaacttgctggtatgcttcaaaaagataattattatgaaagaaaaagccagggggaccaaactagacaaatggaagctaaagagacatggtaatcaaattctaaaccctggatctggaaaaawaaaagtcataaataatatttttgtgataactaagaaaatttgaactgtatttaatgatactattatttcaatgctaagcttctttaggatggtgctgtggctttttattttgtattgcatttagtgatactattgtttcaatgccaagtttctttagtatggtgctggagctttgtatttagggatgaaggccatgatgtctaacatttattttccaatagttccacaaaatgtgtctgtaattaacaattactgatttagatgaaaagtatatatttataatatttataatagcaattctacaacttttttgtatattggaaattttccaaatgtaaagttaggggagaaagaaagagataaaaaaggaagaaagaagggtgggagagagggaggtagaaaaagatagaaagagaatatcatatct

SEQ ID NO: 317649 - DNA, 433 bp, Homo sapiens
agctatttattatctatcaacccttagtcaggtatccttaacactgcagttatccccgcaggccaagacagtttgtctcaagtaatcacacactatggtgttcatattttaaaagaagaattaaaaatggatttctagagtagaagaaccaaagtaataaggaggttgagaagtcatcttttcccaggaatatttcgaggtctggcatgtttaattcaaaamgagagattaaagaaggaagatgatagttgtttaaaaacacacgaagagctataaacaagtagtggcttccatgaacaggtggaagatacatggaacttctttttttattaatctggagagcaacatgtcaggaggtaaagttttcagagtggcagatcttggttggtttgatgaaggactaatgatctaattagagcaccatcagagtgat

SEQ ID NO: 317650 - DNA, 583 bp, Homo sapiens
cttaaccactgcattcaaccactttggtgccaaaagctgaacatcccctaagagtatttaagaaaggaacatagacaatcgtgattttgtactcaattatttttttctatcaaaaatagagcttttgagtttatctaatcagcaaarcataacactagtgttaccatagcattacatttttaaaagtttagagcaagatatacaaatctaattttctagatacaagtaatcacctttcccaccaatcctaacaagaaatcttaatcctttccttctgtagtttatactgatttaaaacaagaactttttgttccttttatttcctatttatggtactttttaattctttcattccttagacgtttacttcatgaaacttatagcattacatttctgaaaatcacagaaaagaatttaactcctttatttctactttctatcaataacctcttaaatatggaataccctataaaattttttcttccgcaggaaaaaaataatcagagcacattcaaatgccttgcatattttcattattttcctttcattcagaagaatttcctccattgatcagttgctttac

SEQ ID NO: 317651 - DNA, 548 bp, Homo sapiens
tcagactagctgtggccctggcatggggcagaagggcctcagcttacacaagatggatgggcctggggggtggggcagaaaatgcttttctcttacacccagggacacagacaaaagtgggagtgaagatatctgatgttcaagatgggagtaaagaagcaggggcgaaacctaaaagcaggaatccttgctggtcctttgcagtgcctagaytgggctgtcgcccgcatttacttggaactgtgtgttggtctcctggcagctctctccatctgtccttgctccctccctctcactacccccagagggatcattcttatgtgtgagacagatcacattacagaacccctccacccatcctcggtccctttgggcagcggctcctctgtcattcatgggtgctgaaccagtttctatgctccattcctcaggtggcaggtttttatactttttattttctgcacagtttctgtaaatttggaccctgaatctataataacaagttgaacagggctttcaacttcttataagagctgtttttttgttgt

SEQ ID NO: 317652 - DNA, 548 bp, Homo sapiens
tcagactagctgtggccctggcatggggcagaagggcctcagcttacacaagatggatgggcctggggggtggggcagaaaatgcttttctcttacacccagggacacagacaaaagtgggagtgaagatatctgatgttcaagatgggagtaaagaagcaggggcgaaacctaaaagcaggaatccttgctggtcctttgcagtgcctagactgggctgtcgcccgcatttacttggaactgtgtgttggtctcctggcagctctctccatctgtccttgctccctccctctcactacccccagagggatcattcttrtgtgtgagacagatcacattacagaacccctccacccatcctcggtccctttgggcagcggctcctctgtcattcatgggtgctgaaccagtttctatgctccattcctcaggtggcaggtttttatactttttattttctgcacagtttctgtaaatttggaccctgaatctataataacaagttgaacagggctttcaacttcttataagagctgtttttttgttgt

SEQ ID NO: 317653 - DNA, 529 bp, Homo sapiens
aagcggaaatctttgtcttattccgattcttaggggaaatgctttttaactttttcccattcagtataatgttaactgtgtgtttgtcatatatggcttttattattttgasatatgttcctcctatggttaatttgttgagggtttttatcataaggtgatgatggattttatcaaattcttttcctgtatctgttgagatgatcataatgttttcgggtttttttctgtttatgtagtgaatcacatttattgacttgtgaatgctgaaccattcttgcatccctgggatgaaaaccactttatcatggtgaattttctttttgatgtgctcttggactcagtttgctagtattttattgaagatttttgtttctgtgttcatcaaggatgttggtctgtagttttctttctttttttgttgttgttatatccttttctggctttggtatcagggtgatactggcttcatagaatgagttagggaggattccctccttcttgatcttttgaaatagtttcagtagga

SEQ ID NO: 317654 - DNA, 634 bp, Homo sapiens
tggtctgtagttttctttctttttttgttgttgttatatccttttctggctttggtatcagggtgatactggcttcatagaatgagttagggaggattccctccttcttgatcttttgaaatagtttcagtaggattggtgccaattcttctttgaatgtctggtagaattcatctgtgctactattgctagtatccccgtgaagacttttaaattaattctacaaagagaaacgttttaaatacaaaacaatttactattgatgaaagtcaaattccactggcaaatggaaacttytctaacttaggctgtttgaccatatgtggcatttttctgttatacaaataactgtgtatatgtatatacaaacacatttgaaaatgataaacaaaggcaaatcaacattttcaatgacatttctaccatgttgcatctgtcagaaaaacactgacatattacactagatatctatcttgtcaatgccctaatggcgttagttttgaaacctgagactttactgaatttatttatcaaacctaggagtcttttatttatcaaacctaggagtcttttataaaatcacctcttaacattaacctattgctggtggatattgtcatacattttgtgacaa

SEQ ID NO: 317655 - DNA, 581 bp, Homo sapiens
attacaaagaggagaatgcaacaagagaccatcaaatgcggtcctttaggtgctttagcagtgtataattgtaaaccagaagtaagagtgtacttgccgatttgaagaaacaaaaggtctagaaatgaaaaatatcattgttgaaacaaaaactttcaaagttagattaaataggagataagaactaaaaaaagatgcagttcagagaaacagggagatggaaaacatgtaatagatgttaagaaatatgaattatggaataataaagtctactgtacattttattgggtacccaaagtagagatkagtgaacagaggaaaggcactattttaagaggtagtagttgtaattttttagaaattattattttttaaaccataaactcaaaaacccaagaagcacaaagtatgccaaaaaacaagtacattaaagggaacaaatttctagatataccagagcaaaactgaaaagcagaaaaaaaaagttagaagcaagtaaggaagatcaccacatacacaggaatggaaaaaataaataaataaatgataacaaccttttcaacagcaaatatgaaagccag

SEQ ID NO: 317656 - DNA, 540 bp, Homo sapiens
tgtacattttctcactttcattcacatgatttctagaaactagaaagaaatcaatratttctagttggattccattttagtcagaaaagatacttgaccggattttagtcttttaaaatgtgttaagacctgttttgtaatctaaaatgtgctctatcctggagagggtttcatgtgcacttaagaagtgctgctgctggtgggtggaatattctgtatgtctgttaggtccgtttggtctgtagtgttgttccagtccactgttttttagttgattttctgtctggttgatttgttcattattgaaaatggaatatcgaaatctccaactattactatattgctatctatttctcccttcagttctatcaatatttgctttatatatttacatactttcatattgggtaaatatatatttataattgtaaatgttcctgttgaactgatgattcttcattatataaagtccctctgtatcttttgtgacagtttttgacttagagtctattttggctggtataagtatagccacactgc

SEQ ID NO: 317657 - DNA, 559 bp, Homo sapiens
tatgtgcaaaaatgctaaagaaaatagtagcaaaccagagatctattaagtaaatactatctgatggccagcttgaacttattccagaaacacaaatttacttgattatttaaaatcaatcaacgtaatttcccatattcacagaacaaaggagaaaaccatttgttttaatatktattcatgggaaaaatctttaaaaagtacaaatgaaaaggaaattctttaacctggtaaagaactgaaaaaaatttacactttccttagtttgcaatgccaatagcagaggcaaggactaaagaatggagggcaagtagtgggttttgaagggaacaatggtagaaaagagggaaagggatacagggaaggaactcaataaagagtagatttttgagcagtcttctacagtaggtaattgaagcttaattcaatggagaaatagggaaatgcttcaaaaaacatgactcaagggaaagaagtatttatataccactgtgattcagtaagtagttaaaagctgcttcttgaggtgttaatttcctggtatttctaagcctgccaa

SEQ ID NO: 317658 - DNA, 559 bp, Homo sapiens
tatgtgcaaaaatgctaaagaaaatagtagcaaaccagagatctattaagtaaatactatctgatggccagcttgaacttattccagaaacacaaatttacttgattatttaaaatcaatcaacgtaatttcccatattcacagaacaaaggagaaaaccatttgttttaatatgtattcatgggaaaaatctttaaaaagtacaaatgaaaaggaaattctttaacctggtaaagaactgaaaaaaatttacactttccttagtttgcaatgccaatagcagaggcaaggactaaagaatggagggcaagtagtgggttttgaagggaacaayggtagaaaagagggaaagggatacagggaaggaactcaataaagagtagatttttgagcagtcttctacagtaggtaattgaagcttaattcaatggagaaatagggaaatgcttcaaaaaacatgactcaagggaaagaagtatttatataccactgtgattcagtaagtagttaaaagctgcttcttgaggtgttaatttcctggtatttctaagcctgccaa

SEQ ID NO: 317659 - DNA, 553 bp, Homo sapiens
gaactcaataaagagtagatttttgagcagtcttctacagtaggtaattgaagcttaattcaatggagaaatagggaaatgcttcaaaaaacatgactcaagggaaagaagtatttatatacsactgtgattcagtaagtagttaaaagctgcttcttgaggtgttaatttcctggtatttctaagcctgccaagtggctggacagggcagctttccagaaaaaccctctgcattaatgatgctgatattaaatgttgaaattccagtgaaccaaatttaaaatgtaagaattaaggtgtgagggaagactatttactggtttcttagaaacaatggcaaaccaacaacaaacaaccaaacaaaaaactaaagtttttcttcaaaataactagaaaaaaaccgatcttcattagaggcagttttattcaacactgaactggatgaaatgaagtcattgaataaagcaaaaatagaataaaatacaaagcattctggaaaagattaagtgaaaacattattacttgcagctgacaattctttaattagagaata

SEQ ID NO: 317660 - DNA, 601 bp, Homo sapiens
aaatagaataaaatacaaagcattctggaaaagattaagtgaaaacattattacttgcagctgacaattctttaattagagaatattttagaaatctacatattttaaaaatgaatgtgtaaactttaaaaggttacaaaatacagtgtcaatattcataaattagtcatatttctacagataagcaatagacwgtcaatattttggtgatatcaaacaccaaagaatatatgttttaaaaagttatgaaaggcatctatgaagactgctacagagtattaccaacagaatttagaaacctaaataaataaaattaatccaagtttatggattggagaaattaaatattacaccatattaattactctcaattaatctttggatattaggcaatcacaaacagaaccccagcaacttgtcaatgggtggttctagagtggcaagtttattctgcagttttgtgaaaatgcaatggcctaagaataaccggagactattgaggaagaaaagcacatttggataattaatattcgcagtaatacttagtataagttacatagttaacagcatgaggttttgccaaaaaaaaaatagaaaataa

SEQ ID NO: 317661 - DNA, 601 bp, Homo sapiens
aaatagaataaaatacaaagcattctggaaaagattaagtgaaaacattattacttgcagctgacaattctttaattagagaatattttagaaatctacatattttaaaaatgaatgtgtaaactttaaaaggttacaaaatacagtgtcaatattcataaattagtcatatttctacagataagcaatagactgtcaatattttggtgatatcaaacaccaaagaatatatgttttaaaaagttatgaaaggcatctatgaagactgctacagagtattaccaacagaatttaraaacctaaataaataaaattaatccaagtttatggattggagaaattaaatattacaccatattaattactctcaattaatctttggatattaggcaatcacaaacagaaccccagcaacttgtcaatgggtggttctagagtggcaagtttattctgcagttttgtgaaaatgcaatggcctaagaataaccggagactattgaggaagaaaagcacatttggataattaatattcgcagtaatacttagtataagttacatagttaacagcatgaggttttgccaaaaaaaaaatagaaaataa

SEQ ID NO: 317662 - DNA, 601 bp, Homo sapiens
aaatagaataaaatacaaagcattctggaaaagattaagtgaaaacattattacttgcagctgacaattctttaattagagaatattttagaaatctacatattttaaaaatgaatgtgtaaactttaaaaggttacaaaatacagtgtcaatattcataaattagtcatatttctacagataagcaatagactgtcaatattttggtgatatcaaacaccaaagaatatatgttttaaaaagttatgaaaggcatctatgaagactgctacagagtattaccaacagaatttagaaacctaaataaataaaattaatccaagtttatggattggagaaattaaatattacaccatattaattactctcaattaatctttggatattaggcaatcacaaacagaaccccagcawcttgtcaatgggtggttctagagtggcaagtttattctgcagttttgtgaaaatgcaatggcctaagaataaccggagactattgaggaagaaaagcacatttggataattaatattcgcagtaatacttagtataagttacatagttaacagcatgaggttttgccaaaaaaaaaatagaaaataa

SEQ ID NO: 317663 - DNA, 601 bp, Homo sapiens
aaatagaataaaatacaaagcattctggaaaagattaagtgaaaacattattacttgcagctgacaattctttaattagagaatattttagaaatctacatattttaaaaatgaatgtgtaaactttaaaaggttacaaaatacagtgtcaatattcataaattagtcatatttctacagataagcaatagactgtcaatattttggtgatatcaaacaccaaagaatatatgttttaaaaagttatgaaaggcatctatgaagactgctacagagtattaccaacagaatttagaaacctaaataaataaaattaatccaagtttatggattggagaaattaaatattacaccatattaattactctcaattaatctttggatattaggcaatcacaaacagaaccccagcaacttgtcaatgggtggttctagagtggcaagtttattctgcagttttgtgaaaatgcaatggcctaagaataaccggagactattgaggaagaaragcacatttggataattaatattcgcagtaatacttagtataagttacatagttaacagcatgaggttttgccaaaaaaaaaatagaaaataa

SEQ ID NO: 317664 - DNA, 513 bp, Homo sapiens
ttcactctgaaaaatggctttctctacttgtcagagaactccacgaccattttttagttaatcaaaaaacttgtattgtttatatcggattacataattctaccatcctagaaatcctgatatatcagaataaataaaatgtttaataatttttcatttttctggtttttaatgaagacagaagaccaatttatagatcaatggtcattcatccatgtttatgcacttggtttgtgtcaattttccatgacacacatcacgttgcaaaaactttcactctaacaaagcacaacattggcaactaactagaaatgtatactttccaagccaagagcatgtttaaataaagtgttgtggtgaatataaaagaaataggaaaaatttggttaacatatggtatatttcatggtttatccaaaaatgtctccttattcrttaaattaagcttcttttacctaatcacaagcaggacactgtcatatgtgtcacagagagcattgtgagatttaagaa

SEQ ID NO: 317665 - DNA, 569 bp, Homo sapiens
tccaatctcagtttcttttatttgctctgaatgtagttccacaataaaatcatcaacagattgctacatgatcagcagtttctacatctagagtttactatagaggcaaattagtagtctgattatttaccaagtgatgaaaattacatttgtttatgggttatatgtkcactgctatcacagaattaattttaaatatttaacgtatattactttctcttgcttttatatatgaattaccagtgtaaagtttaagtgtaaggatagacagttataaatttgattgcattctcaaaatattgcagactttttaacctaaaattttataagaaaggaggagtcaagttattcttgaaaaattcactcagaaaaaaagagttaacataaatttaatagttttataacttatatgtggttaccgaataatatattcacatgaaataattataaatatgcaaattaaattataggattttttaaacagcaaactaattatagaaagaaaatatttggaaaagcgatacagaagaaagatatagtatttttatcatcaaaaaagtactattttt

SEQ ID NO: 317666 - DNA, 569 bp, Homo sapiens
tccaatctcagtttcttttatttgctctgaatgtagttccacaataaaatcatcaacagattgctacatgatcagcagtttctacatctagagtttactatagaggcaaattagtagtctgattatttaccaagtgatgaaaattacatttgtttatgggttatatgttcactgctatcacagaattaattttaaatatttaacgtatattactttctcttgcttttatatatgaattaccagtgtaaagtttaagtgtaaggatagacagttataaatttgattgcattctcaaaatattgcagactttttaacctaaaattttataagaaaggaggagtcaagttattcttgaaaaattcactcagaaaaaaagagttaacataaatttaatagttttrtaacttatatgtggttaccgaataatatattcacatgaaataattataaatatgcaaattaaattataggattttttaaacagcaaactaattatagaaagaaaatatttggaaaagcgatacagaagaaagatatagtatttttatcatcaaaaaagtactattttt

SEQ ID NO: 317667 - DNA, 563 bp, Homo sapiens
acaatttttggggaatccatttgtcatattatgagcagccctatgataagtccatgtggtcaggagctgaacccttttatcaacaaccatgttagtaagcttgggagcagttcattaagctccagtcaattctctagatgactgcagtctccactgacagcttgactgctacctcatgagagttcttaggctagaaacacccagttaagttgacccaacattcctgaccttcagaaactgtttgagataataaatgtttatttccagcagttgattagtatggggcaatttgttatacagcagtagataactattataagtaccaatatggccatttacaggagagttagacattggcattgtcttgatgcatcatctaaaatttatttatacattcaccttccttactttttctctctttttccttccttccaccytccttccctcgtttcctccctcacttccatccttctccacgttctttttgtcttattttaaaatttttctttctgaaaatattttttgaatctcttctatgtgtcagatgcagataattcagtaat

SEQ ID NO: 317668 - DNA, 578 bp, Homo sapiens
actcgcttagcagtgtggcagcagtaccaaagggaatggagtcaaactattcaggagaaactgcctccatgatccactcacctccaaccaggccccacctccatcattaggaattataatttgacatgagatttgttggggacacagttccaaaccatctcagagatataacagtagtaaatacgtatgcacccaacrtcaccaaaatacataaagcatatattagagctaaggagagacatagacctcaatccaataatagctagagtctttaacacttcactttcagcaatagacagtctcccagtctgaaaatcaacaaagaaatatctaacttacctgcactaaagaacaaatggatctaatagatatttacagaacttttcatccaatggcttaggaatatacattcttcttcccagcacatgaattattttcaaaggtagaccttatgttaggtcacaaaacaagtcttaaaatgttcaaaaattaaaataatgttacatatcttctctgacacaatggaataaaactagaaataaataaggagacattttagaaactacacaaacacatac

SEQ ID NO: 317669 - DNA, 578 bp, Homo sapiens
actcgcttagcagtgtggcagcagtaccaaagggaatggagtcaaactattcaggagaaactgcctccatgatccactcacctccaaccaggccccacctccatcattaggaattataatttgacatgagatttgttggggacacagttccaaaccatctcagagatataacagtagtaaatacgtatgcacccaacatcaccaaaatacataaagcatatattagagctaaggagagacatagacctcaatccaataatagctagagtctttaacacttcactttcagcaatagacagtctcccagtctgaaaatcaacaaagaaatatctaacttayctgcactaaagaacaaatggatctaatagatatttacagaacttttcatccaatggcttaggaatatacattcttcttcccagcacatgaattattttcaaaggtagaccttatgttaggtcacaaaacaagtcttaaaatgttcaaaaattaaaataatgttacatatcttctctgacacaatggaataaaactagaaataaataaggagacattttagaaactacacaaacacatac

SEQ ID NO: 317670 - DNA, 578 bp, Homo sapiens
actcgcttagcagtgtggcagcagtaccaaagggaatggagtcaaactattcaggagaaactgcctccatgatccactcacctccaaccaggccccacctccatcattaggaattataatttgacatgagatttgttggggacacagttccaaaccatctcagagatataacagtagtaaatacgtatgcacccaacatcaccaaaatacataaagcatatattagagctaaggagagacatagacctcaatccaataatagctagagtctttaacacttcactttcagcaatagacagtctcccagtctgaaaatcaacaaagaaatatctaacttacctgcactaaagaacaaatggatctaatagatatttacagaacttttcatccaatggcttaggaatatacattcttcttcccagcacatgaattattttcaaaggtagaccwtatgttaggtcacaaaacaagtcttaaaatgttcaaaaattaaaataatgttacatatcttctctgacacaatggaataaaactagaaataaataaggagacattttagaaactacacaaacacatac

SEQ ID NO: 317671 - DNA, 600 bp, Homo sapiens
gtacagcataatgaaaatataaataatgtagtgagtacattttgtttggaagaaaaatgggaataaaattttcgtgagtagtcagatttctgagttagccacactgaacattaacataataactgctatttttaaagatagagtttaaatgtttaataatcaaaaaagatgatctactttttgtatataaggaccgcctcttgaatttctgccwtagacaatgaactaataaatactcctcaggctgcatcaccagaaagacaaataataaggggagggcttcttccatttctaagagatatatgatcataactctatgttatggtctatgtactatttatgtacttggataagtacatacggttaagtaagtgtatatgttcacacacatacacacgcacagctccacatacatatgagtatataaaatgctctccgttagccagaaatccagaacattgtaaatttattcagaatagctaacatggattaaactcagatctttcttcctccaaaatccaaactctttaattatatcaattcttagattcaagttatatggtaaaataaatgtactaattaccaagttgacatctaagt

SEQ ID NO: 317672 - DNA, 469 bp, Homo sapiens
tccttgccgtgctctagattttagagaaaaggctttcggttctcgcctattcaatatagtactagtttttggtctgtcatatatggctttaattgtgttgaggmaatatttacttactactttttttaagagtttttatcatggaggaatgttaaattttatcaaatgctttttcagcatcaatgcaaatgattatatagtttttgtctttcattctattgatatgatgtatcacattcctggatttgcctatctttgcatcgctgggataaatcctacttgatcattatagagatatttttaatgtattgttgaattggtttgctagtattttgttgaggatatttgtctcaatgttcatcaaatatattggcctggcgttttctttttttgatgtgtctttgtctgttttttatatcagagtaatactggcctcatagaatgagattggaagtattccttcctcctc

SEQ ID NO: 317673 - DNA, 414 bp, Homo sapiens
tgcttaattctaccaaacatttaaataattaataccaatcctactcaaactattccaaaaactagaggagcaagggatacttccaaacttattctatgaggccagtattaccctgacatcaaaaccagacagacacattaaaacaaagaaaacttcaggccaatatatctgataaatatygatgtaacaattctcaaaaagtaccagcaaatggaattcaacaataaattaagaagatcgatcattcatcattaccaaatagaatttatcccagggatgcaaggaagattcaacatatacaaattaatcaatgtaataaatcatatccagagaattaaggacaaaatccacatgattatttcaattgaggctgaaaaagcatttgataagattcaatattctttctcattaaaa

SEQ ID NO: 317674 - DNA, 414 bp, Homo sapiens
tgcttaattctaccaaacatttaaataattaataccaatcctactcaaactattccaaaaactagaggagcaagggatacttccaaacttattctatgaggccagtattaccctgacatcaaaaccagacagacacattaaaacaaagaaaacttcaggccaatatatctgataaatatcgatgtaacaattctcaaaaagtaccagcaaatggaattcaacaataaattaagaagatcgawcattcatcattaccaaatagaatttatcccagggatgcaaggaagattcaacatatacaaattaatcaatgtaataaatcatatccagagaattaaggacaaaatccacatgattatttcaattgaggctgaaaaagcatttgataagattcaatattctttctcattaaaa

SEQ ID NO: 317675 - DNA, 592 bp, Homo sapiens
tgatgttaaaacgaggtactataattgctcacctcatttttggttcttatgaagatgcggtcttgtgtggagagttgttcaatttgctttttctatgccagggataatactgaagtgttctattcaaccatcttgctttgcctcccataatcatattatatatattaaatgtctgaattgcccaattcttcattatagatgcttgaaggaaaagttataaggataaaataataacatttatgagagagtcatattaataagtaaatttaacataagactgactggtaattgctacagcagaatcatttcagaagtgctaaagaaatgctacatttawttctagtaaataaaaaaatgtctttttgctagccgttgatatatgagaatgtgggaaagccatgaaactccttgcgtatgaaacaaagtcttattgtacttttcttggggtacataaaaagtaccttaagaaaagggtacagcagcaggtgaaaaaccatttgaaatgaaagattgactagcactgataaaaaagtattaaaacaatgatgtcttttggatttatttttataaactgtctttgaaaatgtttatt

SEQ ID NO: 317676 - DNA, 592 bp, Homo sapiens
tgatgttaaaacgaggtactataattgctcacctcatttttggttcttatgaagatgcggtcttgtgtggagagttgttcaatttgctttttctatgccagggataatactgaagtgttctattcaaccatcttgctttgcctcccataatcatattatatatattaaatgtctgaattgcccaattcttcattatagatgcttgaaggaaaagttataaggataaaataataacatttatgagagagtcatattaataagtaaatttaacataagactgactggtaattgctacagcagaatcatttcagaagtgctaaagaaatgctacatttaattctagtaaataaaaaaatgtctttttgctagccrttgatatatgagaatgtgggaaagccatgaaactccttgcgtatgaaacaaagtcttattgtacttttcttggggtacataaaaagtaccttaagaaaagggtacagcagcaggtgaaaaaccatttgaaatgaaagattgactagcactgataaaaaagtattaaaacaatgatgtcttttggatttatttttataaactgtctttgaaaatgtttatt

SEQ ID NO: 317677 - DNA, 623 bp, Homo sapiens
attcttgtagcaggaacaggagaaggaacctcattgtttttattacattataagatatctccagttcttctcaatttggttttgtgttttactaaagagtcatagctttgtgtgagcaagtaattctgattaatttttcagaaaacttctaaaccacgttgatccaatatgtagacacataattcttcaggttcttttgagacacattaaggtgatatgaggggatttttcaaataattttatatgtttctgagtaaagtagctaagtcctcaagtaattgattttaaatgtgtgacagtctctatttattgtatgctgtgatataatacgaaatttttggtcattatcccagattcctgctatagagttcctactacttttggagatgtctgagtrataggaatgcccttgttatttgttatgagccccttttttattacatttgagtttatgctaataaggtgacagggtaggttcctttagacagcctcaggatgagtatggtcaccacaccaagtgataagagggttgcgagtttgacttcctggaatggggtaggggactagagattaagtagcaactcttgaacgacaagatttgataaacttctaggttggtgaat

SEQ ID NO: 317678 - DNA, 580 bp, Homo sapiens
caccccttcgctcatgccttgccttatgtatctcttcattcgtctgtgcatctatattttttataatatcctttgtaaattagtgcacataaataaagtacttctctgtgttttatgaagcagctagcaaattttcatacctaaggagggattgtgagcgcaaattatagtcagttggtcagaagtayagggcaccccctaaaacttgggattgtcatctgaaggggggtcagtctagtgtgacagggccattaagctatgagatctgatgctatcgctaggcacactgtgtcagaattacattgaattgaattataggacacctagctggtgtccagaaagtgagaattgcttgatttggaaaaaaaccccacacaattaggtgactagaagtgaagtgttctgcaagtactgagagtagtgagagttgtaaaaatgtgtgtgtgtgtttttctttagaatatccctagatccctagacctaaggatgagaattattttaattgaccatttgagaaatgcaaatcaaaactacagtgagatattatctcatctcagttatattaacttttatccaaaag

SEQ ID NO: 317679 - DNA, 580 bp, Homo sapiens
caccccttcgctcatgccttgccttatgtatctcttcattcgtctgtgcatctatattttttataatatcctttgtaaattagtgcacataaataaagtacttctctgtgttttatgaagcagctagcaaattttcatacctaaggagggattgtgagcgcaaattatagtcagttggtcagaagtataggrcaccccctaaaacttgggattgtcatctgaaggggggtcagtctagtgtgacagggccattaagctatgagatctgatgctatcgctaggcacactgtgtcagaattacattgaattgaattataggacacctagctggtgtccagaaagtgagaattgcttgatttggaaaaaaaccccacacaattaggtgactagaagtgaagtgttctgcaagtactgagagtagtgagagttgtaaaaatgtgtgtgtgtgtttttctttagaatatccctagatccctagacctaaggatgagaattattttaattgaccatttgagaaatgcaaatcaaaactacagtgagatattatctcatctcagttatattaacttttatccaaaag

SEQ ID NO: 317680 - DNA, 530 bp, Homo sapiens
attttagtgataattagctgtggatatatccgtataactatatgtttgagacatgggttgatggatgaatatatccatataaatagatttataatatggatatatttatatatataaagagatatatttatacatttactatatatcttattttatataagatatatgtgtgtgtatatatgtgtgtgtgtatatatataatatatatgtatatatataaatgtgtgtgtgtgtacttataggtataatatytcttccatcccctggcacatcacaggctgtctatggctcacatttaattgtttctctccttttttttttttttttttttaccttgaacaccatcctagtttagttgttgctatttttaaaagcttgaatttctaaaaatattaaataaggcttcatgcagggtagcaaacaattttgagatattatcaaaatataaccattgttaaaacatcaccctgaagtctgtgtactggaagatattaatgaagtgattaatactttactcccagtgagctgcc

SEQ ID NO: 317681 - DNA, 530 bp, Homo sapiens
attttagtgataattagctgtggatatatccgtataactatatgtttgagacatgggttgatggatgaatatatccatataaatagatttataatatggatatatttatatatataaagagatatatttatacatttactatatatcttattttatataagatatatgtgtgtgtatatatgtgtgtgtgtatatatataatatatatgtatatatataaatgtgtgtgtgtgtacttataggtataatatctyttccatcccctggcacatcacaggctgtctatggctcacatttaattgtttctctccttttttttttttttttttttaccttgaacaccatcctagtttagttgttgctatttttaaaagcttgaatttctaaaaatattaaataaggcttcatgcagggtagcaaacaattttgagatattatcaaaatataaccattgttaaaacatcaccctgaagtctgtgtactggaagatattaatgaagtgattaatactttactcccagtgagctgcc

SEQ ID NO: 317682 - DNA, 501 bp, Homo sapiens
ctacacataattataaatggtaatagggagataattctgcatttttcatttgttcataagtataactgctcatataaatgaagctatgaatgggtgcttattaagtctgaaaattactgaagcatattaaataaatagaatcaatatcaaattatacatattttaagtcaactgttaatatgcaattataaatacaaaattctaaatgttgcataacttttagatggtcatttagcaataatccaggagaaaatactctgcgtttataagtggcygcaatattaatatgaggcaacagtgtgacataaatattatagattatgtatacaactaagttgcttttaaaacatataatgttgacattatagaaagtataactctaattacattaagtaccactcagcatacatcttgaatactatgttaatttgatgtttcatatcttaaaaaattatactgtataaaaatgagaacaatatggatggtgaggggttgatacat

SEQ ID NO: 317683 - DNA, 614 bp, Homo sapiens
ggatggctattgtcatatgtttatgtttgaaaggctgtcatacacaagtctgtagcaattcattatccagtggtctccaaagtattgtaaggatgggcatgcaaaaawgaccgggaagaaaattttaggaaaaaaaattaaaaatctctaatagatttttaactccttgaacacagatatatgtcctaatgcttcattttttgtctttagtgcttggcatagtgcccctcacataaaagttcttcaaaaattaatgtcgaatagatgaaggtattaacaaacacatctgaccattaatgaaataatcagcagtgcaacgaagtgagcctttgactgttgagagtattgaagcaaaggctaaatgactatcaaattggaatgcaatgaaagttgagacagtaaatatgcctaattttaatttgtgtcttttaaaatcaatttaaaatccatttcaggattatatagcttattatgtttacaaacatttccattaagtggaaggttgtaatatttgctcctctgcaccttaaaatagaaagatgtagtggttactaggacagacgttggcatgaggtaaatatgaagccaaatctggtatacaaaatcaaaattta

SEQ ID NO: 317684 - DNA, 582 bp, Homo sapiens
caatactgatttagtcatacactttaaaataaatgaaagagtataattaaattgtttgtaacacaaaggataaatgcttgaggggatggctatcctattcacctcgatttggttattatgcctcccatgcctgtatcaaagtatctcatgctctctataaatataatatatatgcctaccaggtatccacaaaaattaaaaattaaaaaaaacccmcacacaccaaatctgaaactgtgacattcaagtagaatctaaatctgcaggctacaattatttcaaatcaaactgtgtatttaaacttgtcaggatctaggaaatcagcagttaattaaagcaatatctaatggaagaagttcacattcaattttatgctcttaaacgtccttttttaaaacaaaatttattcggagttgttaatgatataaaacatagagacacttagtcaatttccctttattttatgatttccaataaaatgaagcaaaatactgattttgcatcataaaataaatttagttactctgctgaataaagtctcttatttttggatagcagggcttgatatgcccacaaacacac

SEQ ID NO: 317685 - DNA, 403 bp, Homo sapiens
agtagggtagaacactaagtggtctcctggggtcctcaagtccaggcataggctcttggatagcatttttgggcttgctatgggccagaggggagcccatttccctgaaagctgcatcccagctcaggctgcattcaccacaagctgactgaagaaagcttgggtcttaagtaaacaatggtggtaacctgacagtactccctgtgggcctggggtggtggtgaccatgagtgaagtgcctctgcctgtggaaaggggagggaagattggaaagactgtgtcttayggttctgaattgagtgccagctcagcctgagtacaatagaaaaacaggtaggcttctagggtttttgactccggttcctggctcccagatgacacttctgtacctgcctgagacctg

SEQ ID NO: 317686 - DNA, 612 bp, Homo sapiens
atttagaaaagtggatcaattctgagattgaagaccatgttgataaatactaaattctggaaagaagttaagcgagagatcagaggggagaggtataataaggaaagtcctcatatgatctgctagataagaatgtgttgattcatttctattttatcaatctgacttgtctagtcctaggcttaccctgattgctaaagatactacatccaattttaaataacgtgcaatatcaagaagtatagcatgtatgcagtagctagtcattagattttggaattgtattatgaagaagaattattttttccagtgttatcgatactcaaataggaaatgaagcctttaaaagtatgtatctcatatctcatatctgtattaaattctacagctcatcattaagtctttcacatctattctgctcatttgtgtgatatgtcatctacagatattgcatttcattctgaggattcaggtcaaaatgaataagtaaatctgaacttggtaaaaaaagtattggcaacatttttcaacagataattatcacataaaatacaaactttcttataagccacatgaattaatttaattttttwaaaaaaattacatttatag

SEQ ID NO: 317687 - DNA, 542 bp, Homo sapiens
tagtgtctttacactaaaatttctcatattcaccctttatttctcactatttaatatttatatagcatagcaaaagcttaataaatatttaaagtatttttgtggttaataattggaaaaacaggaagagtccaggaaaatatatgctgaaatagatatcatgttagttaatgttatatgtcaaatttactgggttaagagaggcccagaaggctggtgtaaaactatttctcaatgttttggtctccttacagacgtaaggagaattccagaggagatgattagcatcttaatcattagactgagtaaagaactaatgtgggcaggaatcatccaatccattgagggcgttcctggagtagaacaacaaacaacaacarcagcaacaacaacaacaacaaaaacagagaaagggtgaaagtactctcttttctcgagctggcacatttattttctgccctccaacagagctcttggctctttgttctttggacttcaggatttacatcagcgtccccttggttctcaagccatcagctggg

SEQ ID NO: 317688 - DNA, 542 bp, Homo sapiens
tagtgtctttacactaaaatttctcatattcaccctttatttctcactatttaatatttatatagcatagcaaaagcttaataaatatttaaagtatttttgtggttaataattggaaaaacaggaagagtccaggaaaatatatgctgaaatagatatcatgttagttaatgttatatgtcaaatttactgggttaagagaggcccagaaggctggtgtaaaactatttctcaatgttttggtctccttacagacgtaaggagaattccagaggagatgattagcatcttaatcattagactgagtaaagaactaatgtgggcaggaatcatccaatccattgagggcgttcctggagtagaacaacaaacaacaacaacarcaacaacaacaacaacaaaaacagagaaagggtgaaagtactctcttttctcgagctggcacatttattttctgccctccaacagagctcttggctctttgttctttggacttcaggatttacatcagcgtccccttggttctcaagccatcagctggg

SEQ ID NO: 317689 - DNA, 588 bp, Homo sapiens
ttttgttataagattggggttaacattactaataaactaatgggagggtaaaatttggctttctctcccttgtacaagaattttatgtaayagtaaaggataataaaatatttttgtttgccttgcaaataaactaccaaaaagagagagagaagacaagagatagcttgtttggaaagctaaaacttccctcataatgagtaaaggattttgccttgttttaaaatttttgagtcatcattttggctaaataaatgacttttgtaatttggaattctatttcataatatcaagtgttttaaacctctaacttatttaatagtcttcccaaaatcaaatttcagcttcaaatgttgtctttcctggcccctaaattttggttgctaaagagggcccctggagaatccaaaagagaggtaaacaggattatttgacatgtttagtgaaatgggattgcaaaataaaaataaagttgaatcctctttagattatattataattaataatattaatacattttccaaaattatatgggatttctaaaattctaatgtctgaagatacagtatcaatcatgaagtaattatg

SEQ ID NO: 317690 - DNA, 588 bp, Homo sapiens
ttttgttataagattggggttaacattactaataaactaatgggagggtaaaatttggctttctctcccttgtacaagaattttatgtaatagtaaaggataataaaatatttttgtttgccttgcaaataaactaccaaaaagagagagagaagacaagagatagcttgtttggaaagctaaaacttccctcataatgagtaaaggattttgccttgttttaaaatttttgagtcatcattttggctaaataaatgacttttgtaatttggaattctatttcataatatcaagtgtttwaaacctctaacttatttaatagtcttcccaaaatcaaatttcagcttcaaatgttgtctttcctggcccctaaattttggttgctaaagagggcccctggagaatccaaaagagaggtaaacaggattatttgacatgtttagtgaaatgggattgcaaaataaaaataaagttgaatcctctttagattatattataattaataatattaatacattttccaaaattatatgggatttctaaaattctaatgtctgaagatacagtatcaatcatgaagtaattatg

SEQ ID NO: 317691 - DNA, 601 bp, Homo sapiens
gaatctacacaattttagtatccagtatgcagtagccattcactcacaaaataaatcctttctccaatacttcaccctccctattaatacttttggtgttctgaatgacctttaatcctttatgttacttttcatactgccatatatagatggtccctaacttaytgagtttgatttatgatttttcaactttatggtggtgcaaaagtggcacacattcaataaaaacttgctctgaattttgatcttttgatcaaaggctagtgatacgttgtaagacactcccatgatgctgggcacaagcagtgaggagcagctcccagtcagcaacaagatcttgaagtatcagctcgtactctacagcatacagtatttccagatgattttccctactgtagggtaatgttctgagaatgtttaaggtagactaggctaagctatgatgttcagcaggttaagtgtattaaatgcattttctactcacattttcaacttatggtggatttattgggatgttacctcatagtaaataaaggagcatctgtattggacttcctcaaatgctcatttaaaaacttgttatgtattgttgtgatgtcac

SEQ ID NO: 317692 - DNA, 601 bp, Homo sapiens
gaatctacacaattttagtatccagtatgcagtagccattcactcacaaaataaatcctttctccaatacttcaccctccctattaatacttttggtgttctgaatgacctttaatcctttatgttacttttcatactgccatatatagatggtccctaacttactgagtttgatttatgatttttcaactttatggtggtgcaaaagtggcacacattcaataaaaacttgctctgaattttgatcttttgatyaaaggctagtgatacgttgtaagacactcccatgatgctgggcacaagcagtgaggagcagctcccagtcagcaacaagatcttgaagtatcagctcgtactctacagcatacagtatttccagatgattttccctactgtagggtaatgttctgagaatgtttaaggtagactaggctaagctatgatgttcagcaggttaagtgtattaaatgcattttctactcacattttcaacttatggtggatttattgggatgttacctcatagtaaataaaggagcatctgtattggacttcctcaaatgctcatttaaaaacttgttatgtattgttgtgatgtcac

SEQ ID NO: 317693 - DNA, 601 bp, Homo sapiens
gaatctacacaattttagtatccagtatgcagtagccattcactcacaaaataaatcctttctccaatacttcaccctccctattaatacttttggtgttctgaatgacctttaatcctttatgttacttttcatactgccatatatagatggtccctaacttactgagtttgatttatgatttttcaactttatggtggtgcaaaagtggcacacattcaataaaaacttgctctgaattttgatcttttgatcaaaggctagtgatacgttgtaagacactcccatgatgctgggcacaagcagtgaggagcagctcccagtcagcaacaagatcttgaagtatcagctcgtactctacagcatacagtatttccagatgattttccctactgtagggtaatgttctgagaatgtttaaggtagactaggctaagctatgatgttcagcaggttaagtgtattaaatgcattttctactcacattttcaacttatggtggatttattgggatgttacctcatagtaaataaaggagcatctgtattggacttcctcaaaygctcatttaaaaacttgttatgtattgttgtgatgtcac

SEQ ID NO: 317694 - DNA, 475 bp, Homo sapiens
ggggaaaagggaacacttcctggaggaggtaatatctgagttgattcttcaaaatttataaggttatttaaaaagtactaaacagagtgataataaaatgccatgaggaaattatctttgtaaattaggcaaataatgktttttacacatatcatggatttcatagaatttattttctaaataaattagcattaatataaactattaattattgagattagtgtagtagtcagtaattaataattaattgtactttctgctattctttggagaaaataggaaaaagctattgggtatgtacaatgataaggtaaagaattatgaggaggcatcaaatatgtggcattttaccttaatagaaaaggtaagacacaactcattgctattgttgaaacaaaacccacaggcaaattaaattagtatggcatgatattaaaaaatgtcatcctgccatgcatgattaattttcaagtga

SEQ ID NO: 317695 - DNA, 475 bp, Homo sapiens
ggggaaaagggaacacttcctggaggaggtaatatctgagttgattcttcaaaatttataaggttatttaaaaagtactaaacagagtgataataaaatgccatgaggaaattatctttgtaaattaggcaaataatggtttttacacatatcatggatttcatagaatttattttctaaataaattagcattaatataaactattaattattgagattagtgtagtagtcagtaattaataattaattgtactttctgctattctttggagaaaataggaaaaagctattgggtatgtacaatgataaggtaaagaattatgakgaggcatcaaatatgtggcattttaccttaatagaaaaggtaagacacaactcattgctattgttgaaacaaaacccacaggcaaattaaattagtatggcatgatattaaaaaatgtcatcctgccatgcatgattaattttcaagtga

SEQ ID NO: 317696 - DNA, 485 bp, Homo sapiens
gtgattacagaagtatagatgaagggcacctagaccaggctggggaaggacagtggggaaaagggaacacttcctggaggaggtaatatctgagttgattcttcaaaatttataaggttatttaaaaagtactaaacagagtgataataaaatgccatgaggaaattatctttgtaaattaggcaaataatggtttttacacatatcatggatttcatagaatttattttctaaataaattagcattaatataaactattaattattgagattagtgtagtagtcagtaattaataattaattgtactttctgctattctttggagaaaataggaaaaagctattgggtatgtacaatgataaggtaaagaattatgaggaggcatcaaatatgtggcattttaccttaatagaraaggtaagacacaactcattgctattgttgaaacaaaacccacaggcaaattaaattagtatggcatgat

SEQ ID NO: 317697 - DNA, 496 bp, Homo sapiens
ttgctgttcttgtatcatttatttcaaatgggaaccaatattaatgtaggtagaaaagtaatctcatttcaaaaacacaaatatcaaaagggaatacttctcatttcttccaaatttttactttttcttttctgcctcatttcatttctgttggtagaaaagcgttcaaattggaactaataacgtgcatctttccttcccaaaataatctttcattgttaaatatgttgagaagatggaccatctttcaagttgctgttattttttcatgcagatgcaatttttcttaactctagtcttttgaatcatgtaattgtttcacttgtaatttattcagtgccaaaataactataaatcagtgggaaaaaaagaaaatwcctaggtaaaaacaacatttttttattcaactttatgtcagctgaaagaccagtgggttgacttaatcataatcatagctaatttggagtagtggggagttgtgtaagtgaccacaaaa

SEQ ID NO: 317698 - DNA, 523 bp, Homo sapiens
gttaggctatctttgggtctatgttcagttaccctaaacatggtgttgaaaccattttcagtccttcatggtaatatgttraatccagaatctgtttagagcactcatgataaataattcagcctagtccaatgttatattcacatcactctgtgccaacactgttagggttttttcgcagacatgttcttcagacttctgctgatacaaaatggcaaaaatgtcacttttttgatgcttattgcattatatgtttgggtttacatgttctggcctgacagacttaaatctgtctacaaattcagaagcaatgagaggtgatggagtaggtattaaagagcatcagaggtccctacaatcacatacatcagagaggacattactggttattcaggcaaaaggagattaacctcataagggaggaaaatttacttttaatgtcaaaagcatctcaagataatttatgggttcaaaggctccagcttcaacagaatatacttataagtatccataccattgtgag

SEQ ID NO: 317699 - DNA, 523 bp, Homo sapiens
gttaggctatctttgggtctatgttcagttaccctaaacatggtgttgaaaccattttcagtccttcatggtaatatgttaaatccagaatctgtttagagcactcatgataaataattcagcctagtccaatgttatattcacatcactctgtgccaacactgttagggttttttcgcagacatgttcttcagacttctgctgatacaaaatggcaaaaatgtcacttttttgatgcttattgcattatatgtttgggttkacatgttctggcctgacagacttaaatctgtctacaaattcagaagcaatgagaggtgatggagtaggtattaaagagcatcagaggtccctacaatcacatacatcagagaggacattactggttattcaggcaaaaggagattaacctcataagggaggaaaatttacttttaatgtcaaaagcatctcaagataatttatgggttcaaaggctccagcttcaacagaatatacttataagtatccataccattgtgag

SEQ ID NO: 317700 - DNA, 589 bp, Homo sapiens
tgctatccaaacaatttcagggttagcatgctaagcactttcggaggttatacttttagctggctgaggttgaatgttaaccagagatgtcatctgagacatttgagctctagcattacagatatccttgaaaattttatgacatttttggctgtcaatgtgcctgagtcctccagattcaartcatccattacctaatacttttctctaccacatttggtccatttggttgatttcaactagtttattactgtgtcaccccactctaaactattttcatattttttcttattaggactggcaggtatagttcttttaatgacatcgatttggattttgtttacctcccagtgcttcctctaactggtaccttttaggttaagggctaagcttacagcctgaatgagggtgacagcaactgggtggaaacaaagtgcaaaatggaaaggtattaggaagggagaatagacagtaaacactaaggttggggatggattccaggaagaggagaccacgttgaacaaagacccagaggaaaggtggagcttggcagctccaaatcctcactccatatctgcccactcccaac

SEQ ID NO: 317701 - DNA, 589 bp, Homo sapiens
tgctatccaaacaatttcagggttagcatgctaagcactttcggaggttatacttttagctggctgaggttgaatgttaaccagagatgtcatctgagacatttgagctctagcattacagatatccttgaaaattttatgacatttttggctgtcaatgtgcctgagtcctccagattcaaatcatccattacctaatacttttctctaccacatttggtccatttggwtgatttcaactagtttattactgtgtcaccccactctaaactattttcatattttttcttattaggactggcaggtatagttcttttaatgacatcgatttggattttgtttacctcccagtgcttcctctaactggtaccttttaggttaagggctaagcttacagcctgaatgagggtgacagcaactgggtggaaacaaagtgcaaaatggaaaggtattaggaagggagaatagacagtaaacactaaggttggggatggattccaggaagaggagaccacgttgaacaaagacccagaggaaaggtggagcttggcagctccaaatcctcactccatatctgcccactcccaac

SEQ ID NO: 317702 - DNA, 616 bp, Homo sapiens
ttccccatagtacattcaactgcctgagcatctgactcagacatagcagagatattgctgctgccagagggtaatagtttgtyctgttatcctggaatgcccttgcactgagaaaatgagaaactgggcaactcaatgaatttcccatcctgtggatttctcactggctctccctggctctatttcttcttccattttagagggaatagtcatcctgcttttcaggctaccaccttttctttggaatcagttggatgcatttaatgcatatggaagagatgctgagagggcatgtagtagaaataagaataaaatatttcatttttttctgatttcttggagaatgaaatattccatgtaagtgtatttttctagacaattgaaatctatgccttaaatgtcaaaacttgtttttaactttgagaaatgatgtagcacagtggttaagcacacagactttgaggcaaattgtctgtatttaatcactctctaccttcgtaacttcaggcacttagccccttgtgcctcaatttcctcatctgtgaagtgaagataataatagaccttatcttacagggttatggagaggattaaataatattaaatgagttaatat

SEQ ID NO: 317703 - DNA, 616 bp, Homo sapiens
ttccccatagtacattcaactgcctgagcatctgactcagacatagcagagatattgctgctgccagagggtaatagtttgttctgttatcctggaatgcccttgcactgagaaaatgagaaactgggcaactcaatgaatttcccatcctgtggatttctcactggctctccctggctctatttcttcttccattttagagggaatagtcatcctgcttttcaggctaccaccttttctttggaatcagttggatgcatttaatgcatatggaagagatgctgagagggcatgtagtagaaataagaataaaatatttcatttttttctgatttcttggagaatgaaatrttccatgtaagtgtatttttctagacaattgaaatctatgccttaaatgtcaaaacttgtttttaactttgagaaatgatgtagcacagtggttaagcacacagactttgaggcaaattgtctgtatttaatcactctctaccttcgtaacttcaggcacttagccccttgtgcctcaatttcctcatctgtgaagtgaagataataatagaccttatcttacagggttatggagaggattaaataatattaaatgagttaatat

SEQ ID NO: 317704 - DNA, 616 bp, Homo sapiens
ttccccatagtacattcaactgcctgagcatctgactcagacatagcagagatattgctgctgccagagggtaatagtttgttctgttatcctggaatgcccttgcactgagaaaatgagaaactgggcaactcaatgaatttcccatcctgtggatttctcactggctctccctggctctatttcttcttccattttagagggaatagtcatcctgcttttcaggctaccaccttttctttggaatcagttggatgcatttaatgcatatggaagagatgctgagagggcatgtagtagaaataagaataaaatatttcatttttttctgatttcttggagaatgaaatattccatgtaagtgtatttttctagacaattgaaatctatgccttaaatgtcaaaacttgtttttaactttgagaaatgatgtagcacagtggttaagcacacagactttgaggcaaattgtctgtatttaatcactctctaccttcgtaacttcaggcacttagccccttgtgcctcaatttcctcatctgtgragtgaagataataatagaccttatcttacagggttatggagaggattaaataatattaaatgagttaatat

SEQ ID NO: 317705 - DNA, 579 bp, Homo sapiens
ttttaacaatgttatacctacaggtgtctttcacattatcttctgtactcctttatatgtttaaatggtttcatcatgaaaaagaaaaaaattcctaagtgttcactctgtgaatggctgcatccaaccaagtgaatgtaattcccttagtgggcagaattgaagtaggggaattgaagaggctttctcctaagctrggcatggagtagctaaaggaattaatttgtcagtgaatgaactttgaaagtggctattctcatgtgaacttaatctattctgatatagtcttctttaagaaagaaaaacttgagcagttaacttctttaacactcctgtatctgcagtaataaaaataatgataatattatataagaactttatattcaggttctactcaatgatttatatattttctcatctaattctcacaatgtctctatgaagtagttgctattataaaccacattaaaagatgggctaaagtgcttttcccattcacatagcagagttagtatattactgacaagagtaaccacgagaatcatttactctgagaacaaaaaattaataagtaaataa

SEQ ID NO: 317706 - DNA, 579 bp, Homo sapiens
ttttaacaatgttatacctacaggtgtctttcacattatcttctgtactcctttatatgtttaaatggtttcatcatgaaaaagaaaaaaattcctaagtgttcactctgtgaatggctgcatccaaccaagtgaatgtaattcccttagtgggcagaattgaagtaggggaattgaagaggctttctcctaagctaggcatggagtagctaaaggaattaatttgtcagtgaatgaactttgaaagtggctattctcatgtgaacttaatctattctgatatagtcttctttaagaaagaaaaacttgagcagttaacttctttaacactcctgtatctgcagtaataaaaataatgataatattatataasaactttatattcaggttctactcaatgatttatatattttctcatctaattctcacaatgtctctatgaagtagttgctattataaaccacattaaaagatgggctaaagtgcttttcccattcacatagcagagttagtatattactgacaagagtaaccacgagaatcatttactctgagaacaaaaaattaataagtaaataa

SEQ ID NO: 317707 - DNA, 527 bp, Homo sapiens
gtacatctatcagactttcctagtgttcagatgagcgaatggatgaaattaaagaagatattaatgaatatgtttcctgtttgaaataaagagtgttttaatgagtgaaatagtttaagtgaaaattttttaatatcatttaaattcttaaactaaggttccatttaattatagaaatgcaggtaacttttactttaatgtacctgttgaagtaaccatcatctcgtggtagccaragttacttctaaaatgtatttgacaaattttattagtgtgataatttgtttcaagatattagcatgtttgttaccttgaaacactttattctgattatataacacatatgattaattttccattggctttagcatttcaactgctaagttgaaataattcctactgaattatgaactttgtgaataaaatcagtaaatgttctggtgaagaggcaaattggctatacagttacaggataactttgtaaacctgctgagctaccatgaatcattatgttctatttgctgtac

SEQ ID NO: 317708 - DNA, 494 bp, Homo sapiens
tgcccagtgatgacagtccagataaagctgtgttcattttttacgtttagaagaccrtactttaaatcatgactatcactgaaacagatacattcatttattgttgagtcctgctttaccctgagatgttccatgaacactgagaatacattttctttgttctaattccagcctctgaatcagagccaactagagtgggctcttcataaatatgcattgactgcctgagtattaatgtagggcagggctctgattagcaagtgctacctgcaggaagcagaagaaataccacaaatggagataggacgctattagcagattttatttcattttttcctgaggcttggaaataatcacttctctctcaggtcaaacctctccagctctctcccttcaggatgtgaaaagatctcaaataaaaggcctctatgtgaggatctctttcgctggttgctggaggaagagcatgaaatgagggaagaagcaaattgctt

SEQ ID NO: 317709 - DNA, 494 bp, Homo sapiens
tgcccagtgatgacagtccagataaagctgtgttcattttttacgtttagaagaccatactttaaatcatgactatcactgaaacagatacattcatttattgttgagtcctgctttaccctgagatgttccatgaacactgagaatacattttctttgttctaattccagcctctgaatcagagccaactagagtgggctcttcataaatatgcattgactgcctgagtattaatgtagggcagggctctgattagcaagtgctacctgcaggaagcagaagaaataccacaaatggagataggacgctattagcagattttatttcattttttcctgaggcttggaaatwatcacttctctctcaggtcaaacctctccagctctctcccttcaggatgtgaaaagatctcaaataaaaggcctctatgtgaggatctctttcgctggttgctggaggaagagcatgaaatgagggaagaagcaaattgctt

SEQ ID NO: 317710 - DNA, 595 bp, Homo sapiens
ctgctaggagtaaacagaattggatacataacagaaggtgatacctgcaatctctggccttcaaacattctgggagtgggcttcaggtgcctgatggctctccatgtcactgctgaggagacaggggagaggtgcctaccagctccactggctgagagcctcactccctgctttcagtgcagatctcccttcctcagtatcacacctggtcagggcacaacagagcsaagcgttctgcatacattcagcttcatgtacaatatctttccaaagcttttctgtaatgcctgggtaaagaaagcctatgttgtctgtgaaatcctgtgctcagagccatccagtctcttcgatggtcctacccctggcaacagtttacagtttagattttccccttcattttggtgagttttctctttaaagatcccttattatctgacctaggttgggcccctactaatccattaggattgttttaattactctgattcccacataagggatggggttaattccagtccctttagttcaaggaaaatcctttgccccacagaaattcttgaatacaagttaatatctgagggggagatgcagtatc

SEQ ID NO: 317711 - DNA, 582 bp, Homo sapiens
cggggttcttttggcaagattttattttctagtcacacgttgtactctgtcttatggagggctggagccctttaactccaaagttgctcttctttgtaagctacttctagtaatgttaagcagaataattggccaaataggacaaaagattatgcaaaaaaaaaaaaatctgtggtattcatgctttaccatttatttaaccttttcactctttttcatttaggttaatgaccctttgcaatattctcccaatttgaaacagccggcaaatgttccttatctaactttttatatgktagtaacagaactttgtaagtgtgggtgctaattatggagaagttttatgctacttttcatttttgttttctagcactgcaaaatacaacataatcacattccttccaagatttctctactctcagttcagaagagctgctaattcattttttctctttattgcactgctgcaggtaaagtcacgtcataaaaccttgtcaaatgttcaggtactaataaatgttaagcccgtgaccaatcccctgaggtttatgtaaatgccgagagataagctggttttggtgg

SEQ ID NO: 317712 - DNA, 555 bp, Homo sapiens
aaacacactcaatgaactaaaataagaaaattataagcacagtacatatacagtaaatggatattatttataaaatcttgagcatttcatgctccctgtggagtgaattgatagtcaactaccacaagcataattaacactatcacaagttctaacaagagctcaggagtcaaaaatgacaaagcatggaaatttatcattttttaatattgaggcaggagaattgcaccactgcactccagcctgggcaacagagcaagactccatctccaaaaaaaawaacgtgcgtcaatgagagaaatatctattgatttccattgcagacagaacattttcagggataccaaaagtcttttatttgtacatctttctattttgtttcaaagtataattggaagagtggacttcatcttttaaatagttagtaagatcttaggaactctggtgagatccgtgctcactaaccataacccttaaaaaaacaaagtgttctcaggctacttttgaaaactggtttgtgtcatactatttgttcttcaagctccctggaccctt

SEQ ID NO: 317713 - DNA, 584 bp, Homo sapiens
attctgacttctatttttttctactaccacagcaatgaaatatattcacatgattgtaccctgtaagagagaatgccccagagaacattgctgactccggggcatttgagtttgtaattttatcagatacaaccagatacctaagaatctacagcactccatacttttaccagcaatgtataaatttccactgactataaactgagacaagcacaaacttatccattccttgaattttgtcagtctgatgagtatttgatatttattctgaaggctgtagtggtctggattaatgaaagtataaattacctttacatccctacactgggttggaatcctaactaaatagagtaacgcttctttgaaaatattacagaaccttgctgttcaacacttgctgcatgggcctgctgcatctgcagtgctggtaggctccctagaaatgaggacgtacttctaccccatcccccatttaytgtgttcttgaaatacaaaaccagaatacagaaatgaagaaaggaaatacacaaacttgaggctagtgtcttcttggaatatagatgagtatactctgataaagttaa

SEQ ID NO: 317714 - DNA, 581 bp, Homo sapiens
ttcctctaaaaaaggtcctttacattagataagtctgaataataatgctattggccaatgagtttgaggccaatgctagtcaaacattaagtgcagctgattaacagactgcttaaaagggaggtggtgactggtggggatcagtaagcctccactgactaaatcccttttctttcttttcaaaaatagaaccctcagcatctggatttcaagaaggcttttgtgtaggccctattgttataaatgaagacacacgattccatgattatgaaacaatgtggattcacaactatgtagctgacaaacatacatggaggggtctcacatactaaagctattctttggccatccctgcctgtgagcccttctgaaagagcctcccctgggtcacccttggactcggtctctccttccatctcctggcctggcctagtacctgagccctaggtgtcagggtcaacatggagcacctgaccagccaggccagtcagatcccttttagagaatgtggatttgtggtcagtcaactcagcaccaagtaaggaacatcayggacaggtgggctggagggagcatcatgg

SEQ ID NO: 317715 - DNA, 593 bp, Homo sapiens
taatctcagaatgagtcagtggagtttaactggcacctgcttcttatctccattgtgactttgcaagagaggaaaacaactcacctttgtttttttttttaaacaaagtctcaatcatcaaaaacatccagtgaagaaactaaagtcttcctgcccattacaactttggtagggacatcagtatagcacacacagcaacatacactgtccacaaacaagacaagtgttttatcctacagaaacagacattacccaggataaggaaagtgtgacactctcatctgcctgttgataacacaatgccacaaccaggtttgccaaatatccaacaaatccattaaacaaagctagaaaaagaggaaacccacaaaagagcatccaagaactccagcacrccctaacgagactctgagaatgggtgtggctctgggatggctcatctaccacaagcactgtgggcagtactgaagaacccactaagactggtcagatgagactggctcaaaaagccaagaatcattttcacaaaacaaagtaaggaatggtcggcatccttcagtttgtcaggatgtagctaaagaagacgacagaaa

SEQ ID NO: 317716 - DNA, 554 bp, Homo sapiens
gactatatttcttaggaaagaaatatttcctaggaaagaaaagtgtgggcagagcaggcaatgagccacaacrccagccccacagagtcattatttgtcttcaccacagtcccaagcacatgctgaagctataataaactggaatcaactaatctcaggggaaagggtcattcactcaccaagcaccactatggccctgacactgtgctggacgcacagggaatacaaagattaaacaagcagcagtccttgttttcccagagctcttaatccaaatgtgtcactgaactagttacttgaccttgggcaaattactaaaccatatgggccacagtttcctcaactatcagatggcactccaccttcaccaacctccaggagtgttgtaagtttccataaagtaatctttgtaaaagtactttggaaaatacacaagccaatcaagaacaatactgcagccctgtaatcccctcacatgccacaggttttgcagtgctctcagactttttctcttccccctatttcccacaatataggacccatcaattgctatt

SEQ ID NO: 317717 - DNA, 529 bp, Homo sapiens
gccattctggctactataacaaatcatcatagactgagtggctcataaacaacagaaatctatttctcagttctaggggctaggaagtccaaggtcaaggaactggcagattcartgtctggtgagggcccacttcctggctcatagagagccttcttttcactgtaacttccatggtggcagaaagcacaaagaaagctctctgggctcttttttataagggcactaatcccattcatgagggctttactctcatgacctaatcgcttcccaaagtccccacctccgaaaacctttatattggggatttgttttcagcatatgaatttggggaggacacaaatattcagtgtatagcaaggccactcctctgagctcaaagacatcagaaccagctgagcaagacccctcctcagaggtctgagtttcagctcctcaaggtgtgtcttctagaactctaaattattttagtaattccagcctcttccctatcttccctcagccctaatttcttcttgacaattgctgc

SEQ ID NO: 317718 - DNA, 635 bp, Homo sapiens
ctctggcaagtcaaaaacttctttaaacttcrgtttcttagagtaattggtcttagattatctccaaacttttacctaatagtaaaattctattacggcctagagacagtaatatcagatattaattgaggcttaaaatgtctttaattcattaatatttcatttggaatgttataactagaattgattgactccattataaatgcctggcactgggaaaagaactttacatccattatcatgtgtatttatcatagtaactatattattcagatgaaaaatctgaggcttagaaaggttaaacaactttcccaaggttaccaaactatttagtagatttctaaatagtacatcagctctctcatctttaagatagatatttaattatcctagtaatagcttaacaattttgtacagatgaacaattattggtaaagaatacacagaaaatagcaccctaatattttgttgtcttaatttatttacaattacctcagtgtaaatactgttatctgtgtgcatgtacaaataaactctgatctataccttaggaatgattattttacagctgaaataccctaagaagaatcaacaaccttctgaggtagagttacttagcattttaagtatcatta

SEQ ID NO: 317719 - DNA, 535 bp, Homo sapiens
taattgtttactttttattcagtcacatattatatatttatgtaattctttatgtaattatttaatgtcttttaccctactggattataatcttcaggaggacactgaacacattactttgttgaagataattgagatatgcatctgacaatgacatttatttaattttactctcagcccagacaaaaatgttgaatggtaagtagcctcaccttctccaagagagaaagamcaaattattggcattagattagtgaaaccactgaaatatgagtaatgtcatggcagaagtgttgattactctggaggtaaaggagtatcattagtgaattctgtaaccattgctctggaaaagacactgtggacgttcgcagttggctttgtgagcaaaagtataatgtcctcagctacaggtaaagattccaggaaatcaagtggccaggagaaacgtccaagttgtaaaattaaaattgagagtttatgaaaaactagaatttattgaacaggaaatttgggatatatacttcttctctgc

SEQ ID NO: 317720 - DNA, 575 bp, Homo sapiens
ctttgttgaagataattgagatatgcatctgacaatgacatttatttaattttactctcagcccagacaaaaatgttgaatggtaagtagcctcaccttctccaagagagaaagaccaaattattggcattagattagtgaaascactgaaatatgagtaatgtcatggcagaagtgttgattactctggaggtaaaggagtatcattagtgaattctgtaaccattgctctggaaaagacactgtggacgttcgcagttggctttgtgagcaaaagtataatgtcctcagctacaggtaaagattccaggaaatcaagtggccaggagaaacgtccaagttgtaaaattaaaattgagagtttatgaaaaactagaatttattgaacaggaaatttgggatatatacttcttctctgctcattaaaaatacataggagtaaaacaactgggtcggttggtttatacaagccttttaaaagtaattaatccattgaagttgagtctattacaatgattatgactatggaacttacatagaaagattcccagtaatttctatagccactataagtt

SEQ ID NO: 317721 - DNA, 575 bp, Homo sapiens
ctttgttgaagataattgagatatgcatctgacaatgacatttatttaattttactctcagcccagacaaaaatgttgaatggtaagtagcctcaccttctccaagagagaaagaccaaattattggcattagattagtgaaaccactgaaatatgagtaatgtcatggcagaagtgttgattactctggaggtaaaggagtatcattagtgaattctgtaaccattgctctggaaaagacactgtggacgttcgcagttggctttgtgagcaaaagtataatgtcctcagctacaggtaaagattccaggaaatcaagtggccaggagaaacgtccaagttgtaaaattaaaattgagagtttatgaaaaactagaatttattgaacaggaaatttgggatatatacttcttctctgctcattaaaaatacataggagtaaaacaactgggtcsgttggtttatacaagccttttaaaagtaattaatccattgaagttgagtctattacaatgattatgactatggaacttacatagaaagattcccagtaatttctatagccactataagtt

SEQ ID NO: 317722 - DNA, 540 bp, Homo sapiens
ttttcatggcttcctctttcactgcactgaggccctgctcaatgccccttttcagaagagccttccctgaccactccgtttaaaatggtatcctctcccttactatttattagccttttagctttatttaatttttcttcctagcatgcattacctgacttctttttatacttgctagttgtttgttctcttactataacgtaggcaccactagacaayggtctttgttttttctttcaccactgtgtacctagcagcatatagttataatagtacgtggaacatagtaagcactcagtgattgttgaatacatgaaaattttaattctagtaactctatattactacaatcttttgtttcacctttcacagacatttaatgtctagatataatatcaactttaaaaagcaaattgggtatgtgacatgagtgattatagtacaaaacagtaagaagacaagtgttatgtccaaaataatttaacaaagaaggtggggagccaactttaccatagactttgaactttctcctcaatgtga

SEQ ID NO: 317723 - DNA, 613 bp, Homo sapiens
tatctccatgttgaacctgtaaccttcagagctgtgagacaataaattcctgttctgtaagccaactagttgtggtactgtattatggcaacytaccaaatatattgactatagcttaattgtgtttttaaaatttttacttgaaatattaaggaaggactaatttattggacttaagtctaatttattggacttaatgcatgcaattttaaatttcctaccacatttctttagaatttttgtttagtctattttattcaaccttttcctatttctgtctctttatatagctgatttttaccttcagaattaaacgtggttcatataggacagcaaggtcatatattctaaaacctgttgtcttccttttgcctgtttttaccacattatcatttttccatatgtagcacattatcaaggtgttactcagtgatggttgatcagggaagttcggtgtaaaagatcaccttatgaaagcagaaatagtgctgtgaatgtcaaattactatcaaaatatttgtttcttcatatgtatttgtattaataattataagttgaattttattgtatctacactgataatatatacatcatagttctagtagtttgtgat

SEQ ID NO: 317724 - DNA, 436 bp, Homo sapiens
gtttggttatccacaagctcatccaaactctatcattttgggctactatgaaggcttcattaagtaggcatgattgattaaatcactggccattggtgatcaactcacccttgtttcccctaacaagacaaatcctagttctattgcatgataaaaattgcatgatgcaattttgaaataattgtttttattagtaaagcactctgaaaaacaaatcaatgtaaaatctatctatgcctaatgaatttttttccaaaaaccttaaatggttaaggtgaacaagaggttaggaacatgattcctatatggcggaagtaaatgtataactaatgttttaacctaaacagaacgaaaacttcatctagcacatagtaaatagtaattkttttggttgatgataatgaaatggagaaaagatagaaaaatcaagttgaca

SEQ ID NO: 317725 - DNA, 678 bp, Homo sapiens
tgaggtggctttagggcatccagatactttgaaatatggctttcagcatgaaagagaatgagggaatagaaatacagattttacagtcatcaaaaatggactttggaaaatagcattactcaaaatgagactggcacggttctatattattgtaggattataaataggctcaatgatattgtcaaagaaattaaatagcatgagaaatgctcctattagaataagtaggggaatgtatcctaagcckgatatgtaatatgtatttaacaattgtctttcagttcactggaatactttgaaatggaaattttgtttcccctgacaaaacaaatcctagttctagtgcatgatacaagtttgaattctaggttcaaagttcctaagcaaagagtattagaaaactatcttcattataattaacaagtaaaataagcaggtgttgaaattacagtttctcaagcttaagaaataaatcaggatggggccattaaattgtcttttatggagataaatgcattatttagtaacacaggaaaatggctacataatgtctgcctccttttgatctaaatcacatacagtcagtgtggataataaaaatttatttgtataagtaaattgtacagtactccaggcctacttcgtttctagttggtcttcgtattaaacagaatgtag

SEQ ID NO: 317726 - DNA, 678 bp, Homo sapiens
tgaggtggctttagggcatccagatactttgaaatatggctttcagcatgaaagagaatgagggaatagaaatacagattttacagtcatcaaaaatggactttggaaaatagcattactcaaaatgagactggcacggttctatattattgtaggattataaataggctcaatgatattgtcaaagaaattaaatagcatgagaaatgctcctattagaataagtaggggaatgtatcctaagccggatatgtaatatgkatttaacaattgtctttcagttcactggaatactttgaaatggaaattttgtttcccctgacaaaacaaatcctagttctagtgcatgatacaagtttgaattctaggttcaaagttcctaagcaaagagtattagaaaactatcttcattataattaacaagtaaaataagcaggtgttgaaattacagtttctcaagcttaagaaataaatcaggatggggccattaaattgtcttttatggagataaatgcattatttagtaacacaggaaaatggctacataatgtctgcctccttttgatctaaatcacatacagtcagtgtggataataaaaatttatttgtataagtaaattgtacagtactccaggcctacttcgtttctagttggtcttcgtattaaacagaatgtag

SEQ ID NO: 317727 - DNA, 567 bp, Homo sapiens
gcatagactgcaggttgcatggctacaggtgcagtcatgatgagctcctgtagggggagccccaattgtgtttgcagtagtgagagatggggagaaatagtcactctccattacttttcatgtgtaccaggactgcctgactgttgggatagagactccccccactgagcccagtgtacctgtgcctctgctgaaataaacttcccacaaatggaaagatctaggactcaaggcctgcagtctggtttcttttgtcccatgggtttcttccctaatgtggtgcactttcccttcccctaggagtagmagttgctgaagaccagactactgtgaatcctgctgctcctctgagtctagccacccagtggagctgccacacttgggctggtcctggggcatgtctgcaaggtattcagtgatgtgacctgccctctagtttcccagcagtgggaaccagcaccagctgtcatggaggtgtgagaggagtggcatagatgctgaggcttcctttgttgtgtatagccttagtatgttggccttctcagatgccagctgtaatagtaacat

SEQ ID NO: 317728 - DNA, 567 bp, Homo sapiens
gcatagactgcaggttgcatggctacaggtgcagtcatgatgagctcctgtagggggagccccaattgtgtttgcagtagtgagagatggggagaaatagtcactctccattacttttcatgtgtaccaggactgcctgactgttgggatagagactccccccactgagcccagtgtacctgtgcctctgctgaaataaacttcccacaaatggaaagatctaggactcaaggcctgcagtctggtttcttttgtcccatgggtttcttccctaatgtggtgcactttcccttcccctaggagtagaagttgctgaagaccagactactgtgaatcctgctgctcctctgagtctagccacccagtggagctgccacacttgggctggtcctggggcatgtctgcaaggtattcagtgatgtgacctgccctctagtttcccagcagtgggaaccagcaccagctgtcatggaggtgtgagaggagtggcatagatgctgaggcttcctttgttgtrtatagccttagtatgttggccttctcagatgccagctgtaatagtaacat

SEQ ID NO: 317729 - DNA, 550 bp, Homo sapiens
ggtgggggctgggtcaggtaagtctgtactctggttctccacacgtggacactagcagtggccccattgggtattagagggcagttgctggctgtggcataatattccagggaggagtgcagctgcctctgttacacaaaagaatctgcatggagtgggagttggggtagcaggcagcagtaagcccactcagattccttggcaaggcaggtctcacacagaacacacagtgttctgttagcagcagctggctgtgttccggcagcctctgctcagaactcaaaactgccctaggccataagccttctcaayggagacagaaaccacagcttccaggccattcctagtctgcctatggagcagggatgtctagctcctgtacccatagccatagtgtgcttcctgctcacccctcaattttggccagtggggttcatccccactcaagattaggtctcatatctccgttgggagcttctgtcaacctgtgatcactggctgtgttaactggcagatttctgcaaggtcccctgtgaggtagagttgcagg

SEQ ID NO: 317730 - DNA, 550 bp, Homo sapiens
ggtgggggctgggtcaggtaagtctgtactctggttctccacacgtggacactagcagtggccccattgggtattagagggcagttgctggctgtggcataatattccagggaggagtgcagctgcctctgttacacaaaagaatctgcatggagtgggagttggggtagcaggcagcagtaagcccactcagattccttggcaaggcaggtctcacacagaacacacagtgttctgttagcagcagctggctgtgttccggcagcctctgctcagaactcaaaactgccctaggccataagccttctcaacggagacagaaaccacagcttccaggccattcctagtctgcctatggagcagggatgtctagctcctgtacccatagccatagtgtgcttcctgctcacccctcaattttggccartggggttcatccccactcaagattaggtctcatatctccgttgggagcttctgtcaacctgtgatcactggctgtgttaactggcagatttctgcaaggtcccctgtgaggtagagttgcagg

SEQ ID NO: 317731 - DNA, 550 bp, Homo sapiens
ggtgggggctgggtcaggtaagtctgtactctggttctccacacgtggacactagcagtggccccattgggtattagagggcagttgctggctgtggcataatattccagggaggagtgcagctgcctctgttacacaaaagaatctgcatggagtgggagttggggtagcaggcagcagtaagcccactcagattccttggcaaggcaggtctcacacagaacacacagtgttctgttagcagcagctggctgtgttccggcagcctctgctcagaactcaaaactgccctaggccataagccttctcaacggagacagaaaccacagcttccaggccattcctagtctgcctatggagcagggatgtctagctcctgtacccatagccatagtgtgcttcctgctcacccctcaattttggccagtgggkttcatccccactcaagattaggtctcatatctccgttgggagcttctgtcaacctgtgatcactggctgtgttaactggcagatttctgcaaggtcccctgtgaggtagagttgcagg

SEQ ID NO: 317732 - DNA, 515 bp, Homo sapiens
gaaatgcaagaaatggatttatgttgtttataagtcattcaaatgtatgatactctattgtggcagttccaactaaaacaccaggaattcctaaatatgcactgggaaacaataaagaaatttcaaggtcggcgttattgcttactgtttaaaattgcaatagatgaatttctgttgaaatatctcctaagactgagttgtggttactttaattatagaaagaactattattattttataggcactagtattttatatttcaataccacctgtgtttataactttataaagtgattaaaaattgartggctatcatttgcctttagtctatgatagaatcattctgtaaatcattgtaatgttatatggagtaaggctgtgattcaattaataacattcttactaacttaagtagtaaacagggatgagtttttaaacgttgaatgtataataaaaaaggctatttgacttctttcatggcttcattttattttcattgcttccaagtggctaat

SEQ ID NO: 317733 - DNA, 559 bp, Homo sapiens
gctataaacttattagcattaagacacagatattatttgaagccaccaagttttgggggtggkttttaacgcagcaataggtaactattgaagttccttatgtaccatgattatggaggcaccgtcttagtgccatcactaaggtggataagaagctttttggtttattttgtcagtcctcatcatagccctcataatggactcagattttttctgctgacatcgtggctagaacccaagccattatataaatgaaatcatgatactgttatttgccttcaccctaaatgggaccatattaaatgtatttacatatatttattttaatgacagtctttacatctatgccattgagtaaaaaagaggtatgtgctgtggccaaaatatactttgcataacaggcttatgctgcctcttttatccaccaccaattttcttcaacctagtgggctcaggcattcttctctgagcaaattatttccaaagtctacccaagtctctctctttttgttttgtgtcagtaagaaagcaaagtaccttataaaatataaaaatatcc

SEQ ID NO: 317734 - DNA, 550 bp, Homo sapiens
acaaactttttcaaacaggttatgactttgcattcctatcaggcagtatattgcgtgtccgttactccatttcttattattttaagtttgtttggtaagtactcaaaagaaacattaatacatatgcacaaataatatttaatagtatagttgttacaactttaaatatataccagactttaagtgttatccttatattaactaagaaaaagtttaacaagttgactaccaataaaagaaattcttmcttcaacattcagacaaatccctggatatttaaataacaagcactccaaaatacattgagtaaaagtaaaaatcaaattttaataggaatatattaatataaaaaccttatataagttctttatatttttgtgtatgcatgaatgcatataaatgtacagataaatcttagaagtacactgaagtgtaactagttattgtaaggaggcagcagaggtaggatgtgatagggaatgattatcgaaaggtttagctttatttgtaatgtttttaaaaattttaggaagactgttttgctaaactg

SEQ ID NO: 317735 - DNA, 609 bp, Homo sapiens
ttattggttcatctctttccattcttttactttctatatttatttttaaatgcataaaaagcatatacattgatgtttaagttcagtcttaaaatctgttctttagctcgagaatttagttggttgtatttagactgatttgtaatataattggattcacttttatatgttgttttcctaccgattctaagtattctttttcttatttcttgccttctttggaattaattttgtctcatgatacatttttcttgctaccccagtatttgtaaggtatacactkttttttcaactgtggtagggattaccatggcaattacaaaatacacattttcaacattgaactctaatcagtatcattgctttcttccaagatcatataaaaccaacagaatgatttaatttgctctactcataacaacttacttctgttcaatattttaattctacatatataactctgttaaacattacattatatgttttactcagtaactagtcatttagatatactcatatatttatcactttgtgtactttctttcttccattaattttaccccttcatcggggtcctctttctttttgtctagagtagtggtccccaac

SEQ ID NO: 317736 - DNA, 583 bp, Homo sapiens
aagattttaccatctactgttagaaaactggagaaatctttccagtggaaacaaatgtcattgaggtatgaaggtttggggtttatatattagtaatttgtaaaccataataaaatggttctccatatgataagtgcacatacttgttgttaataccacccaactgattgtgagatttacctgtatgtaaatcagagaactctaaaatattaaaccttgatgtgatttccaaatatctggttgtggtactgcagccgtctttcttgagttttatatatatgcaaatcaaacaaccatcatgtggtgatactgattagatgtgaggyctttttctgactgtaggcagcacttttgtgtttgaactgataaagtgttgtggccacaactgagacttagatttattacacacccacacacactgtacacactaccaactctgcttattgtcaaattgctttcgttgaaatcccttgggaatggagaagtgtagatgggtttactccagattcacttttacattgaggatgtagcctttagagtcctagctttcctggtagaagggtatgagtggttttctatctat

SEQ ID NO: 317737 - DNA, 631 bp, Homo sapiens
aagtccagaaattctttcctctgattgatctagcatattgttaaagatttcaaatgtattttgtgtatccttcaataaatttttcagttccagaatttgttttgttatattaaaaggtatttttggtaaatttatcattcatatactgaatttttttctcatttctttgtgttgaatatctgagaactgttatatctcactttctttaatattagtttaattttttctccagaattgtatgcatttatttttyattggaagttattgctgtagaattatcatgttcctttggagatggcatgtttctttgcttttttatgtttcttttgtccttacattgatatctgctgtaacagtcacttcttccagtttttaaatttgcttttatagtggagaactttttcctgaatatatatatatatatatatatatattatatatgtatgtgtgtgtatatatatatggtgttggttgggtaggacactttgcttctgggtacatgcagtagtgtagtccccatatgatttcttcagcttcaaacaatatcagaaatttctgtgatttccttagtggcttacaccatggttgttagtggaagttgtggcaaaatttttctgggaacagggaagtt

SEQ ID NO: 317738 - DNA, 509 bp, Homo sapiens
acactttgcttctgggtacatgcagtagtgtagtccccatatgatttcttcagcttcaaacaatatcagaaatttctgtgatttccttagtggcttacaccatggttgttagtggaagttgtggcaaaatttttctgggaacagggaagttgggtgggccaatcctcatgccccattgttggcagtggtggggcaagcatgcttgtctttggccccagagcagcatacattggcactggtgttaatggcttcaggcagactgattatttggcttccaaggagcttgcaggggcagcggtttgccaggtgtgtgggtgggwcatccggctcccaagcatgagaatggtatgattaatggtggtagcagtggtgggacaatcctttggctctcaagtggtctgcactgttgttggtggtggctgtgatgactgggtgggccaatgtccaagcctacaggtggtctatatggatgggtacaggtgtggtggtagaagcaggtttggtggacc

SEQ ID NO: 317739 - DNA, 633 bp, Homo sapiens
ccatgtggtagctgcaacaggacagcctatcctcagggcacttatgcatgtggtacaatcctgctactgggagtggtgggatcgctgccaatgccttgcactttggatctggcagcagcacccagcagtggtgcccaacagasgtcaaggatgtcaatggggctccagggatgtggagatgcaggaggttttgggtaccaaggcaggatgcagtctggtaagggctcagctctccaaatgacactgtacagcagctgcttagaacgtggaggatgtgtgggacccagtgtgagcttatttggaatactgtcattgcatggtctctaggcagcttcctatgttagtctcagggcccacttgaattgagaggctctttcatggctaggattgccaaagtctgttgtgggaatgtgaactgctaggggtcactcaccctccctgacactggggtgcctctctgggctcccagccaatcccagcagagcaggcttcctcacttccctctccttccttgccttggatgtttcctgtcatttctctgttgaattccagaattctctcataggtaatatattcaaagcttatttatctactcattattttggttctttgttggggaggcaagtcccagat

SEQ ID NO: 317740 - DNA, 633 bp, Homo sapiens
ccatgtggtagctgcaacaggacagcctatcctcagggcacttatgcatgtggtacaatcctgctactgggagtggtgggatcgctgccaatgccttgcactttggatctggcagcagcacccagcagtggtgcccaacagaggtcaaggatgtcaatggggctccagggatgtggagatgcaggaggttttgggtaccaaggcaggatgcagtctggtaagggctcrgctctccaaatgacactgtacagcagctgcttagaacgtggaggatgtgtgggacccagtgtgagcttatttggaatactgtcattgcatggtctctaggcagcttcctatgttagtctcagggcccacttgaattgagaggctctttcatggctaggattgccaaagtctgttgtgggaatgtgaactgctaggggtcactcaccctccctgacactggggtgcctctctgggctcccagccaatcccagcagagcaggcttcctcacttccctctccttccttgccttggatgtttcctgtcatttctctgttgaattccagaattctctcataggtaatatattcaaagcttatttatctactcattattttggttctttgttggggaggcaagtcccagat

SEQ ID NO: 317741 - DNA, 570 bp, Homo sapiens
attttattccagacaagggaagatagatgtgaatgggtaaaatatcacagggatcagtctatcagttccctaaggtccatggtggagaggcatgaaatcaagaactaagtctgatggtaaggtttagagccaaataatgggcattcaatggtgtttgtttgtttttgtttttttaaacaatgttatacgtgtgtttatgtacattccatggcaatacagaaaattgatttaatcatcagaatgatttgtccaatcatcagtagatatgtgttcartgatggtcttataccttttcatccagatatcacaaatgttttcaaaaattgttttgtggttatccatgttaagatgtaaattcttaatcacttgcataaaagtcataaagaatggtataaaattctcacatttcatatcatagaagcaaccttcatgtactgttctgtttaaagtagtaaaaagaggcacagacaaacaagaatggtatttataatggtatggaatataataaaattacaaactgaggctacagaagttttgtgggtttgtttgtacaaattactcaaaatcatt

SEQ ID NO: 317742 - DNA, 516 bp, Homo sapiens
tttctaaatagataactccagtttcaacaggatatatgtgtcacaacctctaacaatcctcatcatttggcacagaactaagcaataacaattatttctataatgaatagtacttgttatagcttgtaccatttgttaaacacttactgtgtaccaggaacagaactaaggcctrgacacgtgttacctcatttaatcctggggacaactcacaacgcagatgctggtataacataaaatattataaattataagatataaaacattattcctttctctgctcctgtaagcaagaatgtgtatacacaagttattaaccaagaaattgtctccaaggtctccagacaggtaaaaataaagcacatcactgtgtgtctggtttactactattagtgtacaagacagaaaacgtgtgtttgattttgtacatgcataaaaagtctccagaagctacatgagaaacgagttacattattgttgtgggaaaatacaggttcttgtcacacgaccaggaaa

SEQ ID NO: 317743 - DNA, 516 bp, Homo sapiens
tttctaaatagataactccagtttcaacaggatatatgtgtcacaacctctaacaatcctcatcatttggcacagaactaagcaataacaattatttctataatgaatagtacttgttatagcttgtaccatttgttaaacacttactgtgtaccaggaacagaactaaggcctggacacrtgttacctcatttaatcctggggacaactcacaacgcagatgctggtataacataaaatattataaattataagatataaaacattattcctttctctgctcctgtaagcaagaatgtgtatacacaagttattaaccaagaaattgtctccaaggtctccagacaggtaaaaataaagcacatcactgtgtgtctggtttactactattagtgtacaagacagaaaacgtgtgtttgattttgtacatgcataaaaagtctccagaagctacatgagaaacgagttacattattgttgtgggaaaatacaggttcttgtcacacgaccaggaaa

SEQ ID NO: 317744 - DNA, 516 bp, Homo sapiens
tttctaaatagataactccagtttcaacaggatatatgtgtcacaacctctaacaatcctcatcatttggcacagaactaagcaataacaattatttctataatgaatagtacttgttatagcttgtaccatttgttaaacacttactgtgtaccaggaacagaactaaggcctggacacgtrttacctcatttaatcctggggacaactcacaacgcagatgctggtataacataaaatattataaattataagatataaaacattattcctttctctgctcctgtaagcaagaatgtgtatacacaagttattaaccaagaaattgtctccaaggtctccagacaggtaaaaataaagcacatcactgtgtgtctggtttactactattagtgtacaagacagaaaacgtgtgtttgattttgtacatgcataaaaagtctccagaagctacatgagaaacgagttacattattgttgtgggaaaatacaggttcttgtcacacgaccaggaaa

SEQ ID NO: 317745 - DNA, 516 bp, Homo sapiens
tttctaaatagataactccagtttcaacaggatatatgtgtcacaacctctaacaatcctcatcatttggcacagaactaagcaataacaattatttctataatgaatagtacttgttatagcttgtaccatttgttaaacacttactgtgtaccaggaacagaactaaggcctggacacgtgttacctcatttaatcctggggacaactcacaacgcagatgctggtataacataaaatattataaattataagatataaaacattattcctttctctgctcctgtaagcaagaatgtgtatacacaagttattaaccaagaaattgtctccaaggtctccagacaggtaaaaataaagcacatcactgtgtgtctggtttactactattagtgtmcaagacagaaaacgtgtgtttgattttgtacatgcataaaaagtctccagaagctacatgagaaacgagttacattattgttgtgggaaaatacaggttcttgtcacacgaccaggaaa

SEQ ID NO: 317746 - DNA, 629 bp, Homo sapiens
aattatcacaatcttctctgatctatataacatgaaacatttttattctaaattgatgtgaaaactttggattaaaaaaagcttaaaatgcttattcctcaatttattctgatttccaaatttcctttttataacttaatagtttgtcctaactctacatttgggatacatctatttttttcccccaaagaagattatttttttcttttttaytcaaaaatcacctttgttttattctcaacatttgctcctatttcttcaggaaaaaaaatatagatttttaaaataaagattaattataattatcaattttctcaagtaaatcaagtgtattaactaaaacttctaggtttagttagtgtgtgcgtgtgtacccttttcagtttatcctcttcatgatcaaaatcaaaactttttgttcttttaatgatgaataggatagaggatggagaacacaggctttatctttagcttctaatatccagtaaactttaagtacattattataaatcttttagcagggaaaggaaaacttttgcttatgatgacttaatgcaagatattagaccagagaaatgaagggcagaagtggggagagtttagggaatggaaaattatttaaaaatatg

SEQ ID NO: 317747 - DNA, 580 bp, Homo sapiens
attaactaaaacttctaggtttagttagtgtgtgcgtgtgtacccttttcagtttatcctcttcatgatcaaaatcaaaactttttgttcttttaatgatgaataggatagaggatggagaacacaggctttatctttagcttctaatatccagtaaactttaartacattattataaatcttttagcagggaaaggaaaacttttgcttatgatgacttaatgcaagatattagaccagagaaatgaagggcagaagtggggagagtttagggaatggaaaattatttaaaaatatgccttgcttattatgttggaagagttcattctctttctctcacactgtttctctatctctacctcgataaactggtgctatttcttctgagatttcatgggttttgctttgttttgttttttaggatcaaaacaaaatatcctatcagtttccaggtagacaaacgatatggattattttctgctaaaggccatttaataatttgactatggtttctggaaaatagaaccagaaatcaggaacactgaagaaatggattatattctctcaaatccagtaaatg

SEQ ID NO: 317748 - DNA, 580 bp, Homo sapiens
attaactaaaacttctaggtttagttagtgtgtgcgtgtgtacccttttcagtttatcctcttcatgatcaaaatcaaaactttttgttcttttaatgatgaataggatagaggatggagaacacaggctttatctttagcttctaatatccagtaaactttaagtacattattataaatcttttagcagggaaaggaaaacttttgcttatgatgacttaatgcaagatattagaccagagaaatgaagggcagaagtggggagagtttagggaatggaaaattatttaaaaatatgccttgcttattatgttggaagagttcattctctttctctcacactgtttctctatctctacctcgataaactggtgctatttcttctgagatttcatgggttttgctttgttttgttttttaggatcaaaacaaaatatcctatcagtttccaggtagacaaacgatatggattattttctgctraaggccatttaataatttgactatggtttctggaaaatagaaccagaaatcaggaacactgaagaaatggattatattctctcaaatccagtaaatg

SEQ ID NO: 317749 - DNA, 599 bp, Homo sapiens
aagccccaatttataagtactctggtgggaaaatatttataaaaccatattctgcgattgcaggtgggtatgacctaccaaatccatgcttctgctgggtgatccactatggcttcacttctctgcagtttaatgaacttatgtttrctttgtgtctacttttaaaaattaaatatctcagagtgttaggtcattgttacctaattccttagtaagaattgtttgaaaattatttgtggctggattgacagctgactggaaacaaggctttgtgggactagattctggtctaacaatcagatggaaaatgtctgggacatgtaaaaactctcactgtaaatgttctgcagcatgaaaaggcttgcctggcacttttagtcagaaattcaccaaaatttcttcatggttgggtcttgcactctttatggggcatagtacttcccatgaccacatcagggtacatgctagaatattcttccctaactctgctgttaggcagtaaattcattcttctttcatttctcagattaaacattacttacaaggaaataattgggaccactctagctaaagggggttcccagtggtttcagttagct

SEQ ID NO: 317750 - DNA, 603 bp, Homo sapiens
gcattttaaaaggacttacatttaagtctttaatccattttgagttgacttttgtatatggtgagagataggggtctagttttattcttttgcatgtggatattctgctctttggttttcattggcatggaaatatttttctatcccttcactttcaatctgtgtgtgtctttataggtgaagtgagtttcttggaaacaacaaatagttcrgtcttgttttgtttttattcattcagttacactatgtattagataatttaatccatttacattcaggcttattgacaggtaagggtatactgctgccattttgttacttatttcatatgggtttatagttttttttcttctctcattttcttcctttggggttaagcagtttcactagtagtacattttgatttgtgctatttgtttagtgtatctatatagctttctcttttgtggttaccatgaagcttacaaaaatgtcttatagttataacaggttattttaaattgttggcaatttaactttgatgccccaaaatgtaacaaaaacaaacttatgatttaacaccatgctcaacattatgatatattaatgttttaattttattac

SEQ ID NO: 317751 - DNA, 603 bp, Homo sapiens
gcattttaaaaggacttacatttaagtctttaatccattttgagttgacttttgtatatggtgagagataggggtctagttttattcttttgcatgtggatattctgctctttggttttcattggcatggaaatatttttctatcccttcactttcaatctgtgtgtgtctttataggtgaagtgagtttcttggaaacaacaaatagttcggtcttgttttgtttttattcattcagttacactatgtattagataatttaatccatttacattcaggcttattgacaggtaagggtatactgctgccattttgttacttatttcatatgggtttatarttttttttcttctctcattttcttcctttggggttaagcagtttcactagtagtacattttgatttgtgctatttgtttagtgtatctatatagctttctcttttgtggttaccatgaagcttacaaaaatgtcttatagttataacaggttattttaaattgttggcaatttaactttgatgccccaaaatgtaacaaaaacaaacttatgatttaacaccatgctcaacattatgatatattaatgttttaattttattac

SEQ ID NO: 317752 - DNA, 584 bp, Homo sapiens
aaaacattacactgaaactaatttgttgccttgccattatttaggaaagacttacagtgaatatyaaaatgtaaacactgctccaaaactatattgctgcctgccattgtttcccagtctggggaagacttaaggagacaccaaaacttaatttcaaactttgacttgtttctgggccaggaaaagcctccacaggagcacttgggtggaaaatccggccagggatttgggccgtcccacagatttgccccaaacagcaccatggtaccagctaatcttgtcaaaatggtgtccgtcctgatcaaagtacagagtagccaccaatatccatgttctagtcactgctgtttgttctcaattcacctcagctggtttattcctcctggcactccctatgataccagtagggtggaactagagtgggcttcctgcaaagatttccaaaccagcagggggactaaatgttgattccaatttccttctctcaccttggaaaccacaggtctagggaagctgttagttgtggcacgccagctccgggaaggggcagtgcagtctaaaatgactgtttcttttattgatca

SEQ ID NO: 317753 - DNA, 457 bp, Homo sapiens
gattccaatttccttctctcaccttggaaaccacaggtctagggaagctgttagttgtggcacgccagctccgggaaggggcagtgcagtctaaaatgactgtttcttttattgatcacagcttctcttaattctgtgggctcaggtttatccacttctcccccaagtactggcagacttaagagtatttttaatctttgaatagtttctaattatatttttgtggggtagagatgcggggatctgcatctgattcagtgagatctgctattctgattcagtgagtgttagagctatgtatctctgatctccagagtgatgttaatgctgcatgtcaatggaccacattttgagtatagaaccaataacgcaaagtccagtttctattatggccccaaaatagcatagtgrcatccatggttatattgtaaattctgaatgaaatgaggtagacatg

SEQ ID NO: 317754 - DNA, 452 bp, Homo sapiens
atggttatattgtaaattctgaatgaaatgaggtagacatgaatagaattttgaaaagtatcaccctgtctttagggtcagagtgtagcaaagagtattcagggacaaggggaacaagaaggctagtatygctgccaattattctgcttgcttcatagcaaaaaagtgggtagagacattttgaagtcaacaagatgtgacctttttctatactccatttagagttacatttgtgtcaaacctagaaaccaaattaggaattcatcttattatggtgtaacaacttagagttatttattgattgcttaatacgtgccagatattaagtttagtatgtgccatatgggttatatcatttaaccctgacatctccatggggtaaccaattatgcctcactgtaatgcaaattctactgaggcagagggagaggttaggtcacttgtttaatgcc

SEQ ID NO: 317755 - DNA, 452 bp, Homo sapiens
atggttatattgtaaattctgaatgaaatgaggtagacatgaatagaattttgaaaagtatcaccctgtctttagggtcagagtgtagcaaagagtattcagggacaaggggaacaagaaggctagtatcgctgccaattattctgcttgcttcatagcaaaaaagtgggtagagacattttgaagtcaacaagatgtgacctttttctatactccatttagagttacatttgtgtcaaacctagaaaccaaattaggaattcatcttattatggtgtaacaacttagagttatttattgattgcttaatacgtgccagatattaagtttagtatgtgccatatgggttatatcatttaaccctgacatctccatggggtaaccaattatgcctcactgtaatgcaaattcwactgaggcagagggagaggttaggtcacttgtttaatgcc

SEQ ID NO: 317756 - DNA, 594 bp, Homo sapiens
gtgtctcttgtccatattctagtcctgctggtatgaatcgagacatttaccatatcacaaaggggctgatgtaaaatgaaagctccagtgtcactgaggttcttctcattttcagtagttggaaatatctcatcctgtagaaccagattaaattacacatctatttcttgcccatcctgttagtgatagaggagaaaacaaaccatccaattttatttattcttccaaatccaatctaggtaccatcactggcctgaatcagatattttcccctttttatgtttcctggaacgtagtgaatgtatcacatatgtaggcacctaatgctataatgtaatagcttgtatyacttttcccttggcttcctcatctcttctccacaggatgattataaactcagtgagaaacaaatgtgtcatagccacctcttgctttactccttattactgttggtaagacctctatctagattacaatatgaatcaatattctctggtttcttgctcgaatgttttagaataacccttcaaaaacactttcaggagtgttttgtggaacacacttgatgactgtctttcccacttaaattttaaa

SEQ ID NO: 317757 - DNA, 594 bp, Homo sapiens
gtgtctcttgtccatattctagtcctgctggtatgaatcgagacatttaccatatcacaaaggggctgatgtaaaatgaaagctccagtgtcactgaggttcttctcattttcagtagttggaaatatctcatcctgtagaaccagattaaattacacatctatttcttgcccatcctgttagtgatagaggagaaaacaaaccatccaattttatttattcttccaaatccaatctaggtaccatcactggcctgaatcagatattttcccctttttatgtttcctggaacgtagtgaatgtatcacatatgtaggcacctaatgctataatgtaatagcttgtattacttttcccttggcttcctcatctcttctccacaggatgattataaactcagtgagaaacaaatgtgtcatagccacytcttgctttactccttattactgttggtaagacctctatctagattacaatatgaatcaatattctctggtttcttgctcgaatgttttagaataacccttcaaaaacactttcaggagtgttttgtggaacacacttgatgactgtctttcccacttaaattttaaa

SEQ ID NO: 317758 - DNA, 566 bp, Homo sapiens
tgtgattaaattatatatagtaaaatgtaactatgaaaatcatgatgtgtttgaaaatttacacatctaagtaacttgtagatcaaataagcataataagaaaaagaaaatactttgaatgaaattataatgaaaatgctacatatatcttttgggttgcacaaggaaagttatagttttaaaattaagattggaagagaatgaagctgaaaattaaacaarttagctaccttaaaatgttagaaagcaggcagtaaaataaacacataggaagtaaaaacctaactatagaaattaataaaatagaaaataaaatggagtgaataaaaagcaaaagttgattctctgaaaactaacaattttccatagttctggaaaacttagtaaaattaacaaatattaggagtgaaaacaagaaacaaatcaccataattatagatggtgcaagcaataagcagctaaaaagtctttgttctttcataaaccaagatgtattttaaaattaagagaatgtagtattggcacaggaattacaaataaactaacatatagaagaaaaaatagtc

SEQ ID NO: 317759 - DNA, 631 bp, Homo sapiens
aggaaccacctagccatgctaatgcagggcaggcgagccccaaagtagagcttagcccacaagaggtcttggctttgcccaggaaagaactcaagcgcaagccagaggtagaagaaaacaactttattgaaaaggcagtgttacagctctgtgaccattcctgcagagtggggctactctgtaggcagagagtagtagctcagggcagttttctaaacatatttatacccacttttaattgcatgcagattaaggggcagtttatgcagaaatatctagggaagtggtagtaacttttgggtcattgggtcattgccatggaaagaggtgtaactcctaggtattgccatggcaatggtaaatggacatggtacactggtgggcatgtctgattgaaagctgctttcacttcwgccctgttttaactagtcctcaatctggtttggtgtccgagccctgcctctggagtccagtcccatctccagtctcaatgctactcccaaattcttgatccacctaattttaagtaaaaaaaaatgtcttaagctactaagctttgggatggtctaacattcaccagcgctttgatcctatcagtgcaattgtcaacacaatgaaagttacaagtaac

SEQ ID NO: 317760 - DNA, 631 bp, Homo sapiens
aggaaccacctagccatgctaatgcagggcaggcgagccccaaagtagagcttagcccacaagaggtcttggctttgcccaggaaagaactcaagcgcaagccagaggtagaagaaaacaactttattgaaaaggcagtgttacagctctgtgaccattcctgcagagtggggctactctgtaggcagagagtagtagctcagggcagttttctaaacatatttatacccacttttaattgcatgcagattaaggggcagtttatgcagaaatatctagggaagtggtagtaacttttgggtcattgggtcattgccatggaaagaggtgtaactcctaggtattgccatggcaatggtaaatggacatggtacactggtgggcatgtctgattgaaagctgctttcacttcagccctgttttaactagtcctcaatctgrtttggtgtccgagccctgcctctggagtccagtcccatctccagtctcaatgctactcccaaattcttgatccacctaattttaagtaaaaaaaaatgtcttaagctactaagctttgggatggtctaacattcaccagcgctttgatcctatcagtgcaattgtcaacacaatgaaagttacaagtaac

SEQ ID NO: 317761 - DNA, 631 bp, Homo sapiens
aggaaccacctagccatgctaatgcagggcaggcgagccccaaagtagagcttagcccacaagaggtcttggctttgcccaggaaagaactcaagcgcaagccagaggtagaagaaaacaactttattgaaaaggcagtgttacagctctgtgaccattcctgcagagtggggctactctgtaggcagagagtagtagctcagggcagttttctaaacatatttatacccacttttaattgcatgcagattaaggggcagtttatgcagaaatatctagggaagtggtagtaacttttgggtcattgggtcattgccatggaaagaggtgtaactcctaggtattgccatggcaatggtaaatggacatggtacactggtgggcatgtctgattgaaagctgctttcacttcagccctgttttaactagtcctcaatctggtytggtgtccgagccctgcctctggagtccagtcccatctccagtctcaatgctactcccaaattcttgatccacctaattttaagtaaaaaaaaatgtcttaagctactaagctttgggatggtctaacattcaccagcgctttgatcctatcagtgcaattgtcaacacaatgaaagttacaagtaac

SEQ ID NO: 317762 - DNA, 658 bp, Homo sapiens
aattaacctcaggtgtatggtagacaaaaagtaaagccaagttcttaaaataagtgaactatcattaattattgtgactgtataatcatatgtctgatcctaaatataaaccaactcttccsaaaccaaaattttagttttaaattatcaagttttataatctgcaaaaagttagtttaactattaaaaaggtactttacaaagttaaggtcattgttccacctataaatagtatatgattttgagcatttaaacaactgttatttttaatataaattattctaagtaactattgtctacattataaagttctaaacaggaaaaacagaaaaaaagcaatactgagacaaccaagggaattattgaatgatatttgtattacaaagtcacagtatcaatatgtctgtgtaatgtgtgatacatagatcctaatttattcctaaactggaagacacagggaaatattctctattgctgttgtaacatatgaaggagaagaataaaaggaaaggagaagaaaacatcaaactaaagagaaagaagatacagattagagacacattagaagctctagaagtcacagaaataggaagaaataaaaggcatggagaagcaagaagccaataaagacctagacctgtctgatccaggaagtgac

SEQ ID NO: 317763 - DNA, 658 bp, Homo sapiens
aattaacctcaggtgtatggtagacaaaaagtaaagccaagttcttaaaataagtgaactatcattaattattgtgactgtataatcatatgtctgatcctaaatataaaccaactcttcccaaaccaaaattttagttttaaattatcaagttttataatctgcaaaaagttagtttaactattaaaaagrtactttacaaagttaaggtcattgttccacctataaatagtatatgattttgagcatttaaacaactgttatttttaatataaattattctaagtaactattgtctacattataaagttctaaacaggaaaaacagaaaaaaagcaatactgagacaaccaagggaattattgaatgatatttgtattacaaagtcacagtatcaatatgtctgtgtaatgtgtgatacatagatcctaatttattcctaaactggaagacacagggaaatattctctattgctgttgtaacatatgaaggagaagaataaaaggaaaggagaagaaaacatcaaactaaagagaaagaagatacagattagagacacattagaagctctagaagtcacagaaataggaagaaataaaaggcatggagaagcaagaagccaataaagacctagacctgtctgatccaggaagtgac

SEQ ID NO: 317764 - DNA, 559 bp, Homo sapiens
agttagtttaactattaaaaaggtactttasaaagttaaggtcattgttccacctataaatagtatatgattttgagcatttaaacaactgttatttttaatataaattattctaagtaactattgtctacattataaagttctaaacaggaaaaacagaaaaaaagcaatactgagacaaccaagggaattattgaatgatatttgtattacaaagtcacagtatcaatatgtctgtgtaatgtgtgatacatagatcctaatttattcctaaactggaagacacagggaaatattctctattgctgttgtaacatatgaaggagaagaataaaaggaaaggagaagaaaacatcaaactaaagagaaagaagatacagattagagacacattagaagctctagaagtcacagaaataggaagaaataaaaggcatggagaagcaagaagccaataaagacctagacctgtctgatccaggaagtgacacctatgtaactacatgtgtcaggacctttagaatgaatttgaattattaccttgggaaatgccagtctt

SEQ ID NO: 317765 - DNA, 466 bp, Homo sapiens
tttgaagagacagaacaagcatgataaatagacatggcaaggatgttgaaattatcaggccagggaatttaaaacaagtatgattaatatgctaagggctctaacggatagacagtatgcaaatgaggaactaaacagaatttgaatttgaaattctaaaaaagaccaaaaagaaatgctagaaattaaaaaagaaaaacaaatgaagaatgtctttgagggacttattaatgtactgtacacagttgtagaaacaatatctgagcttgaggatatatcagtagaaactttraaaactgtcaaaaaaaattacacaaattaaatttagcagaagttaattgagcaaagaacaattaggtcaccttagaattagaagaggttcaaagagctcagcttccaaatgtgggcaggcagcatttatggatggcaactgaggtgagatagagaaagaggtagactggttaca

SEQ ID NO: 317766 - DNA, 559 bp, Homo sapiens
agttagtttaactattaaaaaggtactttacaaagttaaggtcattgttccacctataaatagtatatgattttgagcatttaaacaactgttatttttaatataaattattctaagtaactattgtctacattataaagttctaaacaggaaaaacagaaaaaaagcaatactgagacaaccaagggaattattgaatgatatttgtattacaaagtcacagtatcaatatgtctgtgtaatgtgtgatacatagatcctaatttattcctaaactggaagacacagggaaatattctctattgctgttgtaacatatgaaggagaagaataaaaggaaaggagaagaaaacatcaaactaaagagaaagaagatacagattagagacayattagaagctctagaagtcacagaaataggaagaaataaaaggcatggagaagcaagaagccaataaagacctagacctgtctgatccaggaagtgacacctatgtaactacatgtgtcaggacctttagaatgaatttgaattattaccttgggaaatgccagtctt

SEQ ID NO: 317767 - DNA, 607 bp, Homo sapiens
aagacccacgagaagcaatgtgccatcagctggcaagaccagaaatatacctttactgtcctacatcaagggtatatcaactctctgcctttgtgtgataatcttattcagagagatcttgatcactttttgcttccacaagatatcacactagtccattacattgatgacattatgctgattggatccagtggkcaagaactagcaaacacattggacttatggttgggcatttgcatggcagagcatgagaaataaatccaactaaaattcaaggatcttctacctcagtaaaatttttagtggtcaagtggtgtggggtctgtagagatattccttctaagatgaaggataagttgctgcatttggcctctcctacaaccaagaaaggggcacaatgcctagtgggcctatttggattttggaggcaacatatccatttattgagtgaccatttattgagttacctgaaaggctgccagttttgaggaggtccagaagaggagaaggctctgcaacaagacaaggctgctttgcaagctgccctgccacttgggccatatgacccagcagatacaatggtgctggaggtttcagtggcagatag

SEQ ID NO: 317768 - DNA, 607 bp, Homo sapiens
aagacccacgagaagcaatgtgccatcagctggcaagaccagaaatatacctttactgtcctacatcaagggtatatcaactctctgcctttgtgtgataatcttattcagagagatcttgatcactttttgcttccacaagatatcacactagtccattacattgatgacattatgctgattggatccagtgggcaagaactagcaaacacattggacttakggttgggcatttgcatggcagagcatgagaaataaatccaactaaaattcaaggatcttctacctcagtaaaatttttagtggtcaagtggtgtggggtctgtagagatattccttctaagatgaaggataagttgctgcatttggcctctcctacaaccaagaaaggggcacaatgcctagtgggcctatttggattttggaggcaacatatccatttattgagtgaccatttattgagttacctgaaaggctgccagttttgaggaggtccagaagaggagaaggctctgcaacaagacaaggctgctttgcaagctgccctgccacttgggccatatgacccagcagatacaatggtgctggaggtttcagtggcagatag

SEQ ID NO: 317769 - DNA, 607 bp, Homo sapiens
aagacccacgagaagcaatgtgccatcagctggcaagaccagaaatatacctttactgtcctacatcaagggtatatcaactctctgcctttgtgtgataatcttattcagagagatcttgatcactttttgcttccacaagatatcacactagtccattacattgatgacattatgctgattggatccagtgggcaagaactagcaaacacattggacttatggttgggcatttgcatggcagagcatgagaaataaatccaactaaaattcaaggatcttctacctcagtaaaatttttagtggtcaagtggtgtggggtctgtagagatattccttctaagatgaaggataagttgctgcatttggcctctcctacaaccaagaaaggggcacaatgcctagtgggcctatttggattttggaggcaacatatccatttattgagtgaccatttattgagtkacctgaaaggctgccagttttgaggaggtccagaagaggagaaggctctgcaacaagacaaggctgctttgcaagctgccctgccacttgggccatatgacccagcagatacaatggtgctggaggtttcagtggcagatag

SEQ ID NO: 317770 - DNA, 555 bp, Homo sapiens
tacaaccaagaaaggggcacaatgcctagtgggcctatttggattttggaggcaacatatccatttattgagtgaccatttattgagttacctgaaaggctgccagttttgaggaggtccagaagaggagaaggctctgcaacaagacaaggctgctttgcaagctgccctgccacttgggccatatgacccagcagatacaatggtgctggaggtttcagtggcagatagggatgctgtttggaagaccctcataagtgaataacagtggaggcctctaggattatgaagcaaggccctgccatcttctgcagataactactctccttttgagagacgcatgctggcctgttaccagactttggtggaaactgaacatttgactatgggtcatcaagtcaacatgcaacctgaattgcctatcaaaaactgggrgctttctgacccatctagccataaaaggtgtcatgaacagcattctatcatcaaatggaaattatatatacgtttttgggctcaagcaggtcctaaaggcacaagtaagttacatgaggc

SEQ ID NO: 317771 - DNA, 524 bp, Homo sapiens
ccttttaaagtcacaattacatcaccaactaagtgacaatatttgcagggctggggtaaagttctccagaaggccatgtatgctctgaatcagcatccaatatatggtactgtttctcccatagccaggattcacaggtccaagaataaaggggtggaagtggaagtgacattactcaccatcacccctagtgatccactagcaaaatgtttgtttcctgttcctgcaacattacattgtgctgcctagaggtcttagttctaaagggaggaacactgccatgaggagacacaacaatgattccattaaactggacactttggggtcctcctacctttaagtcaacaggctaagaagggatttacaattttggctggggtgattgtatcagactattaagatgaaatcagtctattactccataacggagttaargcagaatattcatggactacaggggatccattagggcatctcttagtattaccaaccctgtgattaaggtcaatgggaaactacaacag

SEQ ID NO: 317772 - DNA, 524 bp, Homo sapiens
ccttttaaagtcacaattacatcaccaactaagtgacaatatttgcagggctggggtaaagttctccagaaggccatgtatgctctgaatcagcatccaatatatggtactgtttctcccatagccaggattcacaggtccaagaataaaggggtggaagtggaagtgacattactcaccatcacccctagtgatccactagcaaaatgtttgtttcctgttcctgcaacattacattgtgctgcctagaggtcttagttctaaagggaggaacactgccatgaggagacacaacaatgattccattaaactggacactttggggtcctcctacctttaagtcaacaggctaagaagggatttacaattttggctggggtgattgtatcagactattaagatgaaatcagtctattactccataacggagttaaggcagaatattcatggactacaggggatccattagggcatctcttagtattaccaaccctgtgattaargtcaatgggaaactacaacag

SEQ ID NO: 317773 - DNA, 554 bp, Homo sapiens
tggggacacagcaataccatatcagactaatatctagaatgtacaaggaactcaaatcagcaagaagaaaaataatcccatcaaaaagtgggctaaggatatagacagttctcaagagacatgcaaatggcaaataaacatgagaaaaaatgctcaacatgactaattttgggggaaatgtaagtcaaaaccacaatgcaataccactttattcctgcaagaattgacataagtaaaaaaatttaaaaataacatgttggtgtggatgtggtraaaagggaacacttttacactgctggtgggaatgtaaactagtaaaaccactatagaaaacagaatcgggattccttaaagtactacaaatagaactaccatttcatccagcaaccccactcctgggtatctacccacgagaaatgtagtcattatatgaaagacactcacttgcacacacatatttatagcaacccaattcacaattgcaaaaacatggaaccagcctaaatgcccatcaatgaatgagtggatacaaaaaaatgtggtatgcacatata

SEQ ID NO: 317774 - DNA, 554 bp, Homo sapiens
tggggacacagcaataccatatcagactaatatctagaatgtacaaggaactcaaatcagcaagaagaaaaataatcccatcaaaaagtgggctaaggatatagacagttctcaagagacatgcaaatggcaaataaacatgagaaaaaatgctcaacatgactaattttgggggaaatgtaagtcaaaaccacaatgcaataccactttattcctgcaagaattgacataagtaaaaaaatttaaaaataacatgttggtgtggatgtggtaaaaagggaacacttttacactgctggtgggaatgtaaactagtaaaaccactatagaaaacagaatcgggattccttaaagtactacaartagaactaccatttcatccagcaaccccactcctgggtatctacccacgagaaatgtagtcattatatgaaagacactcacttgcacacacatatttatagcaacccaattcacaattgcaaaaacatggaaccagcctaaatgcccatcaatgaatgagtggatacaaaaaaatgtggtatgcacatata

SEQ ID NO: 317775 - DNA, 470 bp, Homo sapiens
gtgaatgatgccagtatgaaaagcctwtgtacatttttaaaaaaaatttatttccatttgggggaacagttggtatttggttacatgagtaagtttgttagtggtgatttgtgggattttggtgcacccatcacctgagcagtatacacagaacccaattagtagtattttattcctcacccctgtcccatcctttccctgccaagtccccaaagcccattgtgtcattcttatgtctttgcatcctcatagcttagctcacactcatgagtgagaacatacaatgtttggttttccattcccgaattacttcacttaggataatagtctccagtcccatccaggttgctgtgaatgccattaattcattccttattatagctgagtagaattccatcatatatgtatgtatatatatacacacacacactcacacacactcacgcacacacacatatacacacgtagtt

SEQ ID NO: 317776 - DNA, 470 bp, Homo sapiens
gtgaatgatgccagtatgaaaagcctttgtacatttttaaaaaaaatttatttccatttgggggaacagttggtatttggttacatgagtaagtttgttagtggtgatttgtgggattttggtgcacccatcacctgagcagtatacacagaacccaattagtagtattttattcctcacccctgtcccatcctttccctgccaagtccccaaagcccattgtrtcattcttatgtctttgcatcctcatagcttagctcacactcatgagtgagaacatacaatgtttggttttccattcccgaattacttcacttaggataatagtctccagtcccatccaggttgctgtgaatgccattaattcattccttattatagctgagtagaattccatcatatatgtatgtatatatatacacacacacactcacacacactcacgcacacacacatatacacacgtagtt

SEQ ID NO: 317777 - DNA, 470 bp, Homo sapiens
gtgaatgatgccagtatgaaaagcctttgtacatttttaaaaaaaatttatttccatttgggggaacagttggtatttggttacatgagtaagtttgttagtggtgatttgtgggattttggtgcacccatcacctgagcagtatacacagaacccaattagtagtattttattcctcacccctgtcccatcctttccctgccaagtccccaaagcccattgtgtcattcttatgtctttgcatcctcatagcttagctcacactcatgagtgagaacatacaatgtttggttttccattcccraattacttcacttaggataatagtctccagtcccatccaggttgctgtgaatgccattaattcattccttattatagctgagtagaattccatcatatatgtatgtatatatatacacacacacactcacacacactcacgcacacacacatatacacacgtagtt

SEQ ID NO: 317778 - DNA, 233 bp, Homo sapiens
tgctctcttcagagctggtaggcaggaacttgtttaagtctgctgaagctgtacccacagccaccccttcccmccaggtgttctgtcctagggagatgggagttttatctataagcccctgactggggctgctgcatttctttcagagatgccctgcccagagaagtggaagctagaaaggcagtctagctacagcagcttcgccacactgtggtggtttccaccaagcctat

SEQ ID NO: 317779 - DNA, 233 bp, Homo sapiens
tgctctcttcagagctggtaggcaggaacttgtttaagtctgctgaagctgtacccacagccaccccttcccccmaggtgttctgtcctagggagatgggagttttatctataagcccctgactggggctgctgcatttctttcagagatgccctgcccagagaagtggaagctagaaaggcagtctagctacagcagcttcgccacactgtggtggtttccaccaagcctat

SEQ ID NO: 317780 - DNA, 613 bp, Homo sapiens
ggagatgtttggatcatgggggtggatccctcacgacttattgctgtcttcatgatagtgagttctcacgagatctgttcagttaaaagtgtgtggcacttccccctcaactctgtcttgctcctcttctggccgtgtgagaagcctgctcccccttggccttctgccatgtttgaaagattcctaaggcctccccagaagccaagcagatgccagcaccttgtttcccgtacagcctgcagaaacatgagccaactaaaygtctttataaattacccagtctcaggtatttctttatagcaatgcgagaatggcctaatacacatgtgcatatgtatttatttattaatattatgtcattaatggaatttagaatgcaacagacttttccttagtttccatgatgtgaagtgtggggattttttgttagaagtcctgagtcttggagagtctaaaaaagtcatggttttctacacaaagtgagtggtaaattatgttaggtgaaaaagtgacatattctttgaagcctgtgggattcaacatactgcaaaaagaaaaaagaaaaaagaacatgagcaaatctatgaagaaagttttcacattttttagaaat

SEQ ID NO: 317781 - DNA, 579 bp, Homo sapiens
gaacctggctggagatttggatcttttcatcagaagaagggactgtatgtagagactactttagaagttttactgcgtaattattactaagtgaggtttggagtcagacaaacctggatttgtaagctggagaagcaaattatccctgggagcctccacttctataaattctatgaggtcagggtctgcgatactcctgaagcttgtcatctstaaaatgggaccataggctgggcacggtggctcacttctgtaatcccagcactttgggagactgaggtgggtggatcacctgaggtcaggagtttgagaccagcctgaccaacatggggaaaccctaactctactaaaaatacaaaaatcagccaggcgtggtggtgcacgcctgtaatcccaagtacttggggggttgaggcaggagaattgcttcaatctgggaggcagagggtgtagtaagccgagattgtgccattgcactccagcatgggtgacagagtctctgtctctaaaaataataataataataatgggaccataaaccatgctgtccccataacaagctacttttgtctcctgttg

SEQ ID NO: 317782 - DNA, 581 bp, Homo sapiens
gaaagtttaatctcccctagtgtgtagagaaccagagttattcctgccatcatttttcttccttctgttactctggtttccttagaagcattttcagagaagaatccagagcgcactctgtcttggaaattgccggttggtaatggagattttaaagactgtatttgtgaatgcaggtaagaaaaataaggagacagagttgcattctttatagttatttttattctctattattgggaaagattattttctgtatttaccaatcagcttggtaaaccttaaatttaaaaartatgtatgtaataatacattgtttagctgcttgcatttctcatgtcaattttgcaataaaattgttttctgcttacaaaatctgtcaaattcaaagaagctgttaacatacctatcacaacatattatttacactaataattatctctgtctgtgcaattccccactctacacatactaatgcatttaagtcaagtttattatgatagtgtttaagatttatttaatgcctaaaattatatttttatgcataaacatttcagtgttaaatgattaattaggtcagcaaa

SEQ ID NO: 317783 - DNA, 581 bp, Homo sapiens
gaaagtttaatctcccctagtgtgtagagaaccagagttattcctgccatcatttttcttccttctgttactctggtttccttagaagcattttcagagaagaatccagagcgcactctgtcttggaaattgccggttggtaatggagattttaaagactgtatttgtgaatgcaggtaagaaaaataaggagacagagttgcattctttatagttatttttattctctattattgggaaagattattttctgtatttaccaatcagcttggtaaaccttaaatttaaaaaatatgtatgtaataatacattgtttagctgcttgcatttctcatgtcaattttgcaataaaattgttttctgcttacaaaatctgtcaaattcaaagaagctgttaacatacctatcacaacatattatttacactaataattatctctgtctgtgcaattccccactctacacatactaatgcatttaagtcaagtttattatgatagtgtttaagatttatttaatgcctaaaattatatttttatgcrtaaacatttcagtgttaaatgattaattaggtcagcaaa

SEQ ID NO: 317784 - DNA, 607 bp, Homo sapiens
gatattaatgaaagcaattttaataggacrcaggaatgcattgtttgtggccaaactgtgaagttgaaggtgggtcttaggaaaattttttgaaatgaatatgtggaaaaagatcttatggagtaattaatgtagaaataaatgcagtaagtgtcttaacatgaggcaatgaagattagttattacactattggatgaatgctggtttatatggtccttcctctgttggaggtagtaagctctcgtctcagtgcacagaatgaaatctctgtaaacacactcgctatattggagttctgctttctctatttatcatgtttcctgtgatgttactcatgttcaccaaaattccaattaagaactctcctcagtagtgttaatgtaatattaaagtgccattaaagcatgtattaataatttgaatgtgcttataaggattattgtaattataggggctaatccaagttatctgtattcaattatggcaacgtcctgccaaaaatgttgagtatgtttcatttcaaaggacataaggcattttccagaattttaatcctcatttagatacttccttctaagtacctgttttgagatgaggaaatgaaat

SEQ ID NO: 317785 - DNA, 607 bp, Homo sapiens
gatattaatgaaagcaattttaataggacgcaggaatgcattgtttgtggccaaactgtgaagttgaaggtgggtcttaggaaaattttttgaaatgaatatgtggaaaaagatcttatggagtaattaatgtagaaataaatgcagtaagtgtcttaacatgaggcaatgaagattagttattacactattggatgaatgctggtttatatggtccttcctctgttggaggtagtaagctctcgtctcagtgcacagaatgaaatctctgtaaacacactcgctatattggagttctgctttctctatttatcatgtttcctgtgatgttactcatgttcaccaaaattccaattaagaactctcctcagtagtgttaatgtaatattaaagtgccattaaagcatgyattaataatttgaatgtgcttataaggattattgtaattataggggctaatccaagttatctgtattcaattatggcaacgtcctgccaaaaatgttgagtatgtttcatttcaaaggacataaggcattttccagaattttaatcctcatttagatacttccttctaagtacctgttttgagatgaggaaatgaaat

SEQ ID NO: 317786 - DNA, 528 bp, Homo sapiens
ctgtaaacacactcgctatattggagttctgctttctctatttatcatgtttcctgtgatgttactcatgttcaccaaaattccaattaagaactctcctcagtagtgttaatgtaatattaaagtgccattaaagcatgtattaataatttgaatgtgcttataaggattattgtaattataggggctaatccaagttatctgtattcaattatggcaacgtcctgccaaaaatgttgagtatgtttcatttcaaaggacataaggcattttccagaattttaatcctcatttagatacttccttctaagtacctgttttgagatgaggaaatgaaatggagctcatacatcagtgaaaacaagaattaaggaagtattttaatggcacattcataagaaacgtgacttcacagtaatattctattgaccagtgtaatcatcagcacagcsaactgcagaaattaattcagttagttatattatgttcccaaaattatatcagaaattgagacagagtccaggcaca

SEQ ID NO: 317787 - DNA, 548 bp, Homo sapiens
ataggggctaatccaagttatctgtattcaattatggcaacgtcctgccaaaaatgttgagtatgtttcatttcaaaggacataaggcattttccagaattttaatcctcatttagatacttccttctaagtacctgttttgagatgaggaaatgaaatggagctcatacatcagtgaaaacaagaattaaggaagtattttaatggcacattcataagaaacgtgacttcacagtaatattctattgaccagtgtaatcatcagcacagcgaactgcagaaattaattcagttagttatattatgttcccaaaattatatcagaaattgagacagagtccaggcacagtggctcaagcctgtaatcccagcactttgggaggctgaggtgcaaagatggcttaagctcaggagttggagactagcctgggcaacatggtgaaagcctgtmtctattaagaatacaaaaaattagctgggtgtggtggcatttgccttcagtcccagctactccaaaggctgaggtgggaggattgcttgaacccaag

SEQ ID NO: 317788 - DNA, 669 bp, Homo sapiens
ataataagcatagatgaattatttcactagcccctctttccaagacaaaggaataaaaacccagatgctacaggataactttgagaatgataagagcattcatcaatactaactcccccaaaactattagtgaatttttaaatactatcataaacaaggcttatgtttttctatctacagagagtcacaaagtatatcaaagtagcagattttccagacacatcctacataagtaacatccacagtatcattttatactgtcactgaagtagtcctcttcatataaattgaaataaacttgcagacaaatgcccataataagcaggaaaatttaaccagaatgtgaaacagccctgtggtttgtgcctggcttagaatatttatcatcagctggcaatctggcctttcaaaaatatgcatgcatttacaycgtagcaaactgtttatctcaattcaaaagatcacttattaaagcttatccatgtatttgcttatttgcaactgcttattaaaggagatgaatatcaacgttaaacatttttagtgcttgaaaacaggtcctaaaataaaccttactctcattggaaattcttatttcgcttttacaaggtttacctgcataatcaaacgccaaaaaagatctgtgaatctgacctttgtcattccatt

SEQ ID NO: 317789 - DNA, 432 bp, Homo sapiens
ttatatgatgtaaacaatattcttatcatttgaataaccaaagtttatttctattgctctccttctgtagaaatgaacaaagacttcaactctttctcttgttattctaccaagaagactttgagtacctttaaatcagagctatgagttaattgttaaaaattaaattatcttattttcattacacaatgaatcaaggctttgatttcaataacaaaatttgttacttccacattgagtatagaagatcccaacttcaatatatacatattgtaaaaagtctcttcaaaaattgtgtttttatgatatgtaaaactccaggatattgccctcttacttttgtttttcaagcatacttagcagtctttatataaaaaaattatgtgtgaatcttggaattctgwtcttctacaaaaaaaaaaaagagaaaaa

SEQ ID NO: 317790 - DNA, 597 bp, Homo sapiens
tgctctccttctgtagaaatgaacaaagacttcaactctttctcttgttattctaccaagaagactttgagtacctttaaatcagagctatgagttaattgttaaaaattaaattatcttattttcattacacaatgaatcaaggctttgatttcaataacaaaatttgttacttccacattgagtatagaagatcccaacttcaatatatacatattgtaaaaagtctcttcaaaaattgtgtttttatgatatgtaaaactccaggatattgccctcttacttttgtttttcaagcatacttagcagtctttatataaaaaaattatgtgtgaatcttggaattctgttcttctacaaaaaaaaaaaagagaaaaaatattttayattcaatctctctctctctttctcttaaagacaacaaaaaaggatctcatgaacagtctgttcttcattaaacagaaacaatatttacagaacctaaagctgtaatcctgcactttcctagatgaattgcattcagttaagacactcacagatttttttaaaggcatcatataatactggaactcagcctaaggtatcagataaacgaat

SEQ ID NO: 317791 - DNA, 614 bp, Homo sapiens
cggtgtgtccatgtatatgagcctgatctctcatgcgtgttgagctaacagtacayttcctccactgcctggatgatggagcctgtaagagatgtgttcaccagtgccgaccccagatctgctgagtcggaggcaacaccatcccaaatccttcaccagcttgccgagtgtttccccaaatctgagagggcgaaatggagagagagaagtgtcttcatcttacagtaccgtgattgttcatttgagaatcccatgctacggaatccaggtcagaatggaaagcagtggtacataaactagttgagtaatgtcaggccacagaacccattgattctgtatagaatgagtaggtaggaggagtgccacgaactttttctaagttgaaatagatttttccttaaatggctgcatttttagaagtatgaagtaccataagcattaagcagcaatatactttattcctaccacagattttcaagccattggggctttacatagaagataaaactgctaaatatgaaaaaatatatacaatcacttaggcctttaacttcttttactaatgtaagtctaaaatcttttgttttaactttagaacatagattactacattt

SEQ ID NO: 317792 - DNA, 631 bp, Homo sapiens
taatacttactgctaacttggaaggtggcaaagaattcatgctttcatctctagtcatcttttcacaaatctacatttctgcatttgctaaacagtgacataaaaatactcaacagatcgatttgtcaacagtcaagttccatacattttatacaaaaatgattttgagtgcgaaacttaggcttaatgygaactgtgaattgtcatgctatagttaaactaacatgaaggtaaaagactgcataaaacactatacacccaatgaatgacatgtgaaaagacattacttctaaatatctatgtaaggccacctcaggtttagaaaggccttaggccagggactctcccaagtacataattacaatgcttctcttagatgattgtcaggtagaagacagagatttcaaatagtttgtttacctattttttttaaaggctctttctcagtatgactcatgtgaacaatttaaacaaacagctgtggcaggagatggccactgcagcctgctcgagtaggtaaaatgtactgaacctgtgtggttaattagatcaatcttgactcattttctttaatgagacagtataacacacaacgtccaccagacctgttttctgggttttgttttacata

SEQ ID NO: 317793 - DNA, 302 bp, Homo sapiens
agcatacattttacccactttgagtgtacagtgtagtggtttttagtatattcacatagttagtgcagccatcatcacagtcagttttaggacattttcatcacctcggaaagtaaccccagagcctttagctattatccccttatctctcattccctcagtgctcaccccaggcccaagcaactrctaacctattttgtctcaacatatttccctatttgagacatttcataagaatagaatcataggcacatatagggtgtagtcctttgtgactggcttctttcactgagtgtaatgta

SEQ ID NO: 317794 - DNA, 603 bp, Homo sapiens
gaggtaggaaccattattttcctaattttacacctgataaaaataagggtttgagtgattattcagtttttaaaaaataactagaggatagtggaatcatgattcagacccaggcccagctaactctaaagttcacaatcttaactattctggtaatasttttcacttttgtatagacacaataaaatatcttaccacatacaatttttttttaattacaaatttttaatttgtaggtttaattacaaatttttagattcattgaacaatactgttaatgggctcccaaatgctctgtctcagtacctatatgccaataaacagaattattcaattcctcttacatcaaataatctaaaagtagtccttagttacattataagcttcaaatagacagtaagaataatagcttacaaataccaaaaactacaaaatgcactcccaatttatttaatataggaatcatatgctttcctttcattattgtacttaaaaccaaaggatttcagcagttgccactaaaaatcaaaagtagattcaggaaaatgaactttttcacatctgttgcaagtctaaaaaataataatttaatatgctgtaaat

SEQ ID NO: 317795 - DNA, 345 bp, Homo sapiens
aaaaatcatatgattatttcaactgatgctgaaaaagcatttgatagaaktcaacctcccttgatgattaaaaacccttaaaaaactgaatatagaattaacatacctcaacataataaaagctatatatatcagactcatagctagtatcatgcagaaagaggagaaactgaaagcctactgaggatgcccactttcaccattgttattcaacacagtactggaaatcctggctatggcaatcagacaagagaaacaaataaagggcattggcaaaactgaatcagaaagaaattgaatccctaaacagaccaataataagctctgaaattgaggcaaaaataa

SEQ ID NO: 317796 - DNA, 584 bp, Homo sapiens
ggcattgttcacaccactgaatttctgcttcagatttttcttcaggttctccagtttcttctaaaaaattgagcccagctctaaatctcattctactgctctgtgacctcagaaccttattgagctcttgttagcttgatcctctattcccttgtgtgctgggagacttactctcaacaaacttctctcacagatgcgtctgacacactatatatatagcttgctatttctacttctgttatagttagttcctcttaggcagggatctatcttgtttgtctctgtgtccccagaaactagcacatagtaggtatatgycatgttttttaaaataaacttttaatttttgaataattatagatttatgaaaagagttgcaaaaatagcacagagagttcctataatccctttgcccatcttccttcaatgttaacttcttatgtaaccatgatacacagttatcaaaactaaaaaattaatattggtatggtactattaaccaatggtacagaatccagatttcacagattatccacaaatgtcccttttctgatctaggatctaatcaaggataccacgttaaa

SEQ ID NO: 317797 - DNA, 527 bp, Homo sapiens
ataatgtatttgacatatatagtactatagttaaaacatcatggcattatgtagcaattaaaatatcatggaatagaaaagataaccttaatttacatgctagaatacctatgagcttaataaaagataaaagaaatgctaattctttggagaaagatggatttttaaatgaatgttggaataaaatcaaataagaactttacctcacatcatctcccaaattaaattataaatgggttaaagagtttattttttaaaatagaggcagttactgctttaggcagttatgatatacacagattttacttaacacagcattgtgaaaagttgagaatgccagtatgaaaaactagaataatgtataayaaatagttaatttattttcagatgatgaaaaccattctactaagagcaatcaaagaaatctaaaggataagaatagtatatttggccactggaaaaaaagcaaatttctatgtcttcaaaaatgttataaacaacagaaaagaaaaatgtcaaaattagaa

SEQ ID NO: 317798 - DNA, 627 bp, Homo sapiens
tctgcaatagaaataggcagaggatacagtagaggaagagtaatcagctctgcctgactgggtgtagccagggaaaacgacttcataaagggattgatgtcacctgggctgaactttgaagagcaaatagcaatgtcctttctcttttagttatgcagtcatagcctcctgccataggtaagcctcaggagacactatttgtctgttttgaaccatggggaaagagaactaggagtttaaatgtgctaagagccaactatgtgctgttccctttgcacatataattcatgtttaaatcatattcatgatgaaatgaataggattcatctgaaataacgtttacctacaacctgggaagatactgtttttaaaggcyggtatgttgactgggaagcacatttacctgcaaatagcagagaccaacctgttcacagagtggcctcatcatagagccaactgtgtaggtggatgggagctgagattatttcaccaactcaagaatgtcaggactgatatcttcatgattcttttgccttttccctacggttccaagatgtcggtcctgtccagagcaaacaggctccagagctgtctctggattttaggtgaagctcacttggaaacttt

SEQ ID NO: 317799 - DNA, 498 bp, Homo sapiens
taattggaacatctattaagaagactctaacaaggtgaaagtcattaaatctgttcaaaacataaagtggctaaacttcaataggcaatgggagaacacttgtctygatgccatatcacatttagtcaagttgctaataatagcactcttctttaatctggtgtgagttagaaccttgtccttgctccagagtatgcttatggtccttaagcaacagtattagcaccactgaggggccaccacctgctcaattctctcatgcacaccagggaaagtgaacaccccgggtgtggattgttagatgcctcaccagctctccccagtattccttcttgtagctgggttttggtttacctttataatataattaaattgattaaagaaaagtgctagctgtattagagactcagtatctttgtgaataatccatttcatacagaaaacattctattccatggtcacaaactctacccttacatgagttacgatcttgcagat

SEQ ID NO: 317800 - DNA, 589 bp, Homo sapiens
tgctcctctggctgctcatgtcaaggtcaccaagaacctctctcacaaaattcactggtccctctgtccttatcttaytggacatttcagcagcattggcaaaactgtctcaccttccatctgagacagtttttctcttgacacccagggccctatcaccctaaatccctggcccctactcagtcgcctttgctggatcttccttttcttcctaggttttaagagagcacctcagtgcccagcccctagctctcctttgttttctatctacatcatctccctacatgaactcatccagtccgaaagttttaaataccacctctatgccagtgccttccatatttaaatttatagccctgacctttcttttgagctccagatttgtcctaatggacattatcttttaatgggtattaatggatgctgaaaggaatcaccaagttattatgttcaaacacagcttttgattttttgctctctcatctgccaaagggtacctcacctagacctccctgtttcatggcacagcaccaccatcaaatcagttactcagaccgacttgtttctgattctcccctttccctcatcc

SEQ ID NO: 317801 - DNA, 556 bp, Homo sapiens
ttattaataaaggagttctctaaattacctaaataccctatgttgtttgaaaaattctctctaattcttgcatagcaacatacgctcaaaatcatgtgagaacaagcctaccatacatgtgcacaaacaagatttttttcaggatctgtgaatttttatcttcattttcccagaagcagrtgctggaaacctcagtgcctaggacacagaaaagtgcataataaatgtaggctgaaccaatgaatgagtgaatgaatgaatgaacaaacgaataaggagcatatttccatactgtgccctagaatggctgtgaccttattgcatggggtgacttcttcacggactgcagctagattagaaaatgaatgagtgtaatcccacagacctcctaatttggaagatgtcgaacaacaaactccccaggtgcaagttttgtatttttttttctcagtgtgcagattgattgagtctccaatgactttgttatttaccacagatttttaaaattaagattgaataaagtattctttttaaaatagcttgtaatttccttgga

SEQ ID NO: 317802 - DNA, 556 bp, Homo sapiens
ttattaataaaggagttctctaaattacctaaataccctatgttgtttgaaaaattctctctaattcttgcatagcaacatacgctcaaaatcatgtgagaacaagcctaccatacatgtgcacaaacaagatttttttcaggatctgtgaatttttatcttcattttcccagaagcaggtgctggaaacctcagtgcctaggacacagaaaagtgcataataaatgtaggctgaaccaatgaatgagtgaatgaatgaatgaacaaacgaataaggagcatatttccatactgtgccctagaatggctgtgaccttattgcatggggtgacttcttcacggactgcagctagattagaaaatgaatgagtgtaatcccacagacctcctaatttggaagatgtcgaacaacaaactccccaggtgcaagttttgtatttttttttctcagtgtgcagattgattgagtctccaatgactytgttatttaccacagatttttaaaattaagattgaataaagtattctttttaaaatagcttgtaatttccttgga

SEQ ID NO: 317803 - DNA, 525 bp, Homo sapiens
ggcacagaaagacaaataccacatgatctcacttacatgtagaatcttttaaaagtgartttacagaaatagagaggagaatgacagttacaggggtgggcagggaggacagggagtgaagttgctggtcaaagggtacaaagtttcagctagacaagaggagtaagttttaacaattattgcacagcagcatgactatagtccacaataatgtgttatacatttcaaaataactgagagtaaatttgaaacatatcaccataaaaatgttaagtgagtgaggtgagggttatgttaattagcttgatttaatcattccacattttatacatatatcacattttatacatacatcacattgtactccatagactatattagtcaattaaaatattaatttttaaattaaaatttttctaaaaaaatatgcataacaatttatagtcaaaaatatatgcataacttcatataattatttttgtgttgagaacacaaaagatgaggagactgatttgagtaataata

SEQ ID NO: 317804 - DNA, 525 bp, Homo sapiens
ggcacagaaagacaaataccacatgatctcacttacatgtagaatcttttaaaagtgaatttacagaaatagagaggagaatgacagttacaggggtgggcagggaggacagggagtgaagttgctggtcaaagggtacaaagtttcagctagacaagaggagtaagttttaacaattattgcacagcagcatgactatagtccacaataatgtgttatacatttcaaaataactgagagtaaatttgaaacatatcaccataaaaatgttaagtgagtgaggtgagggttatgttaattagcttgatttaatcattccacattttatacatatatcacattttatacatacatcacattgtactccatagactatattagtcaattaaaatattaatttttaaattaaaatttttctaaaaaaatatgcataacaatttatagtcaaaaatatatgcataacttcatataattatttttgtgwtgagaacacaaaagatgaggagactgatttgagtaataata

SEQ ID NO: 317805 - DNA, 592 bp, Homo sapiens
aatttttatgtcatattgagacaatggaagatttttgtttgccttttgagtaaactacaaaaagtggggagggagagaagagacagattcagctggcctcatgctatcttccttgggtcttgttatttggaaagcaaagtctcctctatcaaggtaaaggctctgcttttccaaatttttggacttaycattttggccaaatgaatgatgtatgatgatctgggattctattttatgacttctagtgttttaaacctttggtatttgacaaacatcccaaaatcaaattataaattatgtctctttctaacctaatcttttagatattaggctctctacagtccaaaagtgacatctggcttatgtggcataaaaatcatacaggaagcattgtcaaatatgaaatggtgtttcactttctttgggctatatttgtgtaaatatgttattggtatatgttccaaaattatgtgaaactcataattgttatatgacttactgtatgttaccagtaataattgttatgttaaattattatatgccacagaggtaagaaatttcattgtcaattgtgtctttaactgtggctgcc

SEQ ID NO: 317806 - DNA, 558 bp, Homo sapiens
ctccttatgatttcatctctgacttgaccagtcagcactcctagctcactggtttcccttaacccaccaagctgtccttaaaaactctgatccctgaatgctcagggagactgatttgagtaataataaaattctggtctcctgcaaaaaaaattctaaagaaaagattttaaatctaaatcaaatttactttttatttggacatcagacttactggtaaagtagctgaagaatatagttcactttagatatgaagttagataccacaaacttgaatttagatatcagtgttatgttttaaatttaagtgtgtggttttttgctttatattttttaaagactgataggttacttttgtctggtcaggtttctgaacccttgatcactctcagtatacttggggagctcataccttaatgccaagtcacttttattaaaatccagacctatacgggctagttttaaaaagggagagaccaatgaataactctctggaataacctgatwaaagagcatatgcaacatgtcatgctactactttcacccaccaacacttgc

SEQ ID NO: 317807 - DNA, 530 bp, Homo sapiens
gcaaaaaaaattctaaagaaaagattttaaatctaaatcaaatttactttttatttggacatcagacttactggtaaagtagctgaagaatatagttcactttagatatgaagttagataccacaaacttgaatttagatatcagtgttatgttttaaatttaagtgtgtggttttttgctttatattttttaaagactgataggttacttttgtctggtcaggtttctgaacccttgatcactctcagtatacttggggagctcataccttaatgccaagtcacttttattaaaatccagacctatacgggctagttttaaaaagggagagaccaatgaataactctctggaataacctgataaaagagcatatgcaacatgtcatgctactactttcacccaccaacacttgctgaggtaagtgcttttacttccccaaagagaggattagaaactcagtttcctgggaatccmcaggccataggaacaactttaactgcaattccccatcatttgcttgccctgaat

SEQ ID NO: 317808 - DNA, 530 bp, Homo sapiens
gcaaaaaaaattctaaagaaaagattttaaatctaaatcaaatttactttttatttggacatcagacttactggtaaagtagctgaagaatatagttcactttagatatgaagttagataccacaaacttgaatttagatatcagtgttatgttttaaatttaagtgtgtggttttttgctttatattttttaaagactgataggttacttttgtctggtcaggtttctgaacccttgatcactctcagtatacttggggagctcataccttaatgccaagtcacttttattaaaatccagacctatacgggctagttttaaaaagggagagaccaatgaataactctctggaataacctgataaaagagcatatgcaacatgtcatgctactactttcacccaccaacacttgctgaggtaagtgcttttacttccccaaagagaggattagaaactcagtttcctgggaatccccaggccataggaacaactytaactgcaattccccatcatttgcttgccctgaat

SEQ ID NO: 317809 - DNA, 590 bp, Homo sapiens
ctaaggattttgaagatgatagtgtattctccttgaaggtaagaaatcataatatatccacattgtatttaacagacactcagttcttcagataagtgaaaaaaaaagtcctagacagccttttaagtcttctatttaccaaaccttcatcaacaagtgattcatattatgtgtgcttttaatgaataaaattacatttttaaatgttctatcatttaaaagtgaaatataatattaaatttcatcaccttggaatcaagttccattaaaatgaattaattattcaatccatatatcagaatyaaagcaataaatggaaacaaattaaagaaatacaacccaataaatcaaggttttgtactccactatcagtttagacagaaaaaattttaaatcttaaagagaatgttaccttatatatggggataaagtaggcaacatcaaaattctattgattttcaaattctggagtacacttttaaaaactctatcagtgaactgcttgattgctgttttaaccaaaaattcagtttatcttttatttatattaaatgaaactatatatcctaaataattcccataattaggct

SEQ ID NO: 317810 - DNA, 615 bp, Homo sapiens
catcttggcctcccaaagtgctaggattacaggagttagccactgctccyggccagctgtaaggtcttgagaagactgctggtgaaggctgggaggactgaaaattgtcactggagcctggagaaaaggtaactctattaatgtagtggcagagaatttgctaacattatcacttgtagtaatgtggaaaatagaaaatatacccaaggaacccacggattttagtaagaaaacttctaggcagaatgcttaaagtgccatttaaaaatttaaaaaaaaaattttttttaaagctacacacagtaaaaggtgcaggtagagaaagatgagtcaaaaaagaactgttcagttttcaaacaaaatttggagacaataaagagctagaatgtgttgagtaaaaacaaaacaaaacaaaacaaaaattgttttaacactcctagggggtggctgtaaaataccttttaatgactgtagaaatatttaaggatgtacctcatagagtttccaaaatagacaaaaaggcttttaagaatcctaagggtattgtcccacagcacccaactctgagcccagaccaaaaaagggactatcttgaagagaattgtaggtatgtgt

SEQ ID NO: 317811 - DNA, 615 bp, Homo sapiens
catcttggcctcccaaagtgctaggattacaggagttagccactgctcctggccagctgtaaggtcttgagaagactgctggtgaaggctgggaggactgaaaattgtcactggagcctggagaaaaggtaactctattaatgtagtggcagagaatttgctaacattatcacttgtagtaatgtggaaaatagaaaatatacccaaggaacccacggattttagtaagaaaacttctaggcagaatgcttaaagtgccatttaaaaatttaaaaaaaaaattttttttaaagctacacacartaaaaggtgcaggtagagaaagatgagtcaaaaaagaactgttcagttttcaaacaaaatttggagacaataaagagctagaatgtgttgagtaaaaacaaaacaaaacaaaacaaaaattgttttaacactcctagggggtggctgtaaaataccttttaatgactgtagaaatatttaaggatgtacctcatagagtttccaaaatagacaaaaaggcttttaagaatcctaagggtattgtcccacagcacccaactctgagcccagaccaaaaaagggactatcttgaagagaattgtaggtatgtgt

SEQ ID NO: 317812 - DNA, 615 bp, Homo sapiens
catcttggcctcccaaagtgctaggattacaggagttagccactgctcctggccagctgtaaggtcttgagaagactgctggtgaaggctgggaggactgaaaattgtcactggagcctggagaaaaggtaactctattaatgtagtggcagagaatttgctaacattatcacttgtagtaatgtggaaaatagaaaatatacccaaggaacccacggattttagtaagaaaacttctaggcagaatgcttaaagtgccatttaaaaatttaaaaaaaaaattttttttaaagctacacacagtaaaaggtgcaggtagagaaagatgagtcaaaaaagaactgttcagttttcaaacaaaatttggagacaataaagagctagaatgtgttgagtaaaaacaaaacaaaacaaaacaaaaattgttttaacactcctagggggtggctgtaaaataccttttwatgactgtagaaatatttaaggatgtacctcatagagtttccaaaatagacaaaaaggcttttaagaatcctaagggtattgtcccacagcacccaactctgagcccagaccaaaaaagggactatcttgaagagaattgtaggtatgtgt

SEQ ID NO: 317813 - DNA, 615 bp, Homo sapiens
catcttggcctcccaaagtgctaggattacaggagttagccactgctcctggccagctgtaaggtcttgagaagactgctggtgaaggctgggaggactgaaaattgtcactggagcctggagaaaaggtaactctattaatgtagtggcagagaatttgctaacattatcacttgtagtaatgtggaaaatagaaaatatacccaaggaacccacggattttagtaagaaaacttctaggcagaatgcttaaagtgccatttaaaaatttaaaaaaaaaattttttttaaagctacacacagtaaaaggtgcaggtagagaaagatgagtcaaaaaagaactgttcagttttcaaacaaaatttggagacaataaagagctagaatgtgttgagtaaaaacaaaacaaaacaaaacaaaaattgttttaacactcctagggggtggctgtaaaataccttttaatgactgtagaaatatttaaggatgtacctcatagagtttccaaaatagacaaaaaggcttttaagaatcctaagggtattgtcccacagcacccaactctgascccagaccaaaaaagggactatcttgaagagaattgtaggtatgtgt

SEQ ID NO: 317814 - DNA, 622 bp, Homo sapiens
ttctgtaccttccataaccattgctctcagtattattttcttaatacctaatctgaattcctactgttttaaaatgcattcccctacttagctctacggatatggaaaatacatgctccgctggaaatagtctttcttaaaatatatctgctctgcttaaagattagtttatcatttttgccacatataaaataagctcaggtctctacaagtgcccttgtaatttccatttcataaatttaaaaaatattttgttttacctcgttatatttctaatagtgacctccaaatgggtctgtgtacgatatttcattaaatgggtttagtaggcttccaaagggagaaaagargatttccatttctgcataatattcttgctcttttaagaagaaaacacctctacagtggcagggctaatatgtcgacaggcatattccgtatcatttatgtaagttaacacattctgaggctctgcccatttccacttctctgatttgtcctccctccctgagtgcacaatactgcatttgtcccttttgaacatgtaacagattaaagagctgggcaggaggcagatgtaggggcacctttgatctctcatccttggaggttaagggagggc

SEQ ID NO: 317815 - DNA, 622 bp, Homo sapiens
ttctgtaccttccataaccattgctctcagtattattttcttaatacctaatctgaattcctactgttttaaaatgcattcccctacttagctctacggatatggaaaatacatgctccgctggaaatagtctttcttaaaatatatctgctctgcttaaagattagtttatcatttttgccacatataaaataagctcaggtctctacaagtgcccttgtaatttccatttcataaatttaaaaaatattttgttttacctcgttatatttctaatagtgacctccaaatgggtctgtgtacgatatttcattaaatgggtttagtaggcttccaaagggagaaaagaggatttccatttctgcataatattcttgctcttttaagaagaaaacacctctacagtggcagggctaatatgtcgacaggcatattccgtatcatttatgtaagttaacacattctgaggctctgcccatttccacttctctgatttgtcctccctccctgagtgcacaatactgcatttgtcccttttgaacatgtaacagattaaagagctgggcaggaggcagatgyaggggcacctttgatctctcatccttggaggttaagggagggc

SEQ ID NO: 317816 - DNA, 584 bp, Homo sapiens
tcaatgtaggaggccccatatcagcagatttcgtgaaaccatattgttgaccagaatacaaattatgtaagtattcactttagaaagggagataaataaacgctgggaaggcgaaaaaaaaaatgtactttggcatatgcatattttttcccacaacaaattcctatatcagattatcagccttaaattcatggacatgtcttaatggtaatgttttaatatgatggcctttacttaatactagaaaaatctcaatataattttgcttgattttattaatatatattttagttaaaacaacataacaagaggatgatggttactctttatgactccattacgttcccccaaaatttatatgttgacatcctaacccccagtacctcagattgtgactatatttggagatgagtctttaaagaagtagttgaattaaaatgaagtctttaaaggtgggctttaatccaataygactgctgtccttataagaggagattaggatacacatacatcagaataagatcatgtgaagacaaaataatacagctatttacaagccaaggagggaggctttggaatgaaac

SEQ ID NO: 317817 - DNA, 682 bp, Homo sapiens
ataatcatgcatgagtacacacacacacacacacacacacacttttttagtacataattataagatatccctttacatcaatacattgaaaaaaaaattgctttccttataactgcctacccctaaagttaggtgtatcatatagcatttttgggggaccttgtgctatccatctaagatgtgcaagccctacaagagttaattttcacttctraatacatgacataaacaaataccctctgtttcccatttccttattagaagttcaagttataaatgattaattcaccaggctctgaatacttgaacacaaacacactacacacacacacacaggtatctatgtctgtgtgtatgtgtatttatacacatacaagcatacataatcatatataaacatgcatacatgtatataaagataccacacataaaatatattattaaatgtatgtgatactgtttaaatagagaaacttcttgtgcagcgtgtattaaaaataaattatcccaacttcagcatatacacaatacaaaagcattgatacattttgagtctcttaaaatgtgttacttttcttaaatatgtttgtgaaaagagtctaattaagaagttattatgataattgtttgtcaacttttataaccacctgccagggaaaatgtcaagaaaagaaaaagatga

SEQ ID NO: 317818 - DNA, 682 bp, Homo sapiens
ataatcatgcatgagtacacacacacacacacacacacacacttttttagtacataattataagatatccctttacatcaatacattgaaaaaaaaattgctttccttataactgcctacccctaaagttaggtgtatcatatagcatttttgggggaccttgtgctatccatctaagatgtgcaagccctacaagagttaattttcacttctgaatacatgacataaacaaataccctctgtttcccatttccttattagaagttcaagttataaatgattaattcaccaggctctgaatacttgaacacaaacacactacacacacacacacaggtatctatgtctgtgtgtatgtgtatttatacacatacaagcatacataatcatatataaacatgcatacatgtatataaagataccacacataaaatatattattaaatgtatgtgatactgtttaaatagagaaacttcttgtgcagsgtgtattaaaaataaattatcccaacttcagcatatacacaatacaaaagcattgatacattttgagtctcttaaaatgtgttacttttcttaaatatgtttgtgaaaagagtctaattaagaagttattatgataattgtttgtcaacttttataaccacctgccagggaaaatgtcaagaaaagaaaaagatga

SEQ ID NO: 317819 - DNA, 645 bp, Homo sapiens
agctgggactaaagatgtgtgccaccacacctggctaattgtactttttgtagagatggggttttgccacattgctcaggctggtttcaaactcctgggctcaagagatccactctcctgagccttccaaagtgctggaattacaggcatgcactctcatgtccggcctttttttatttttatttttatgtttttacctctatgttaacttgtctgggcttaaactgagaaatgtttcctgagaactatgactgctgatatcttattttcagcttctaaactggctttttataggttgcacttgtgtctgtttagtcaggtttttagccaattatttgaacataggttttgctgaaacatgtcaaacccctaaggcttccaytatatgatgattgatttttgtgggtgtttgaaagcacattcaaatttaaaatgattctcattgcactcttggttttaggtgccacagcattcaccctggcctgtactgtttttgcacactatggcccagacagccgaggttggggaagactctctagttcttctgtagctgttttcccaatatatccctggtaaattactggttagtttccttcttaaccccaaactaaacagcctcagtctaaatacactgtaagtttccca

SEQ ID NO: 317820 - DNA, 645 bp, Homo sapiens
agctgggactaaagatgtgtgccaccacacctggctaattgtactttttgtagagatggggttttgccacattgctcaggctggtttcaaactcctgggctcaagagatccactctcctgagccttccaaagtgctggaattacaggcatgcactctcatgtccggcctttttttatttttatttttatgtttttacctctatgttaacttgtctgggcttaaactgagaaatgtttcctgagaactatgactgctgatatcttattttcagcttctaaactggctttttataggttgcacttgtgtctgtttagtcaggtttttagccaattatttgaacataggttttgctgaaacatgtcaaacccctaaggcttccactatatgatgattgatttttgtgggtgttkgaaagcacattcaaatttaaaatgattctcattgcactcttggttttaggtgccacagcattcaccctggcctgtactgtttttgcacactatggcccagacagccgaggttggggaagactctctagttcttctgtagctgttttcccaatatatccctggtaaattactggttagtttccttcttaaccccaaactaaacagcctcagtctaaatacactgtaagtttccca

SEQ ID NO: 317821 - DNA, 615 bp, Homo sapiens
gggttttctggaacatgttattaaggtgcattctctttattcattgaaatttatttttayacagttattagaaggaaagtaaagcaagttaaaaaatgtaaggatcccaactttactaaccccattttagagtaatcgtaatttcttctatgtaatgattctgaaagtgtgatttaaccagcttctccaggtctatctattccttgaccttctccttttctcaaatcatcatctcaatcacatctgattgaacagttttttattaatttactttaaacttttctgattttgaacccttctaaaattacaacatatataaaatagttaccatcctgaatagactaacaccaatctttccaagtcagattcagtcttgaatatttaaatggctcttgaaagatctattttcttcagataactgacaaatttaagaaagctattttagggcattctgactactttatcatcctgtataacttgaatgtggattctatttcctcttatctaactctctaagaaacgtaaaattacctggcacaatgctttagattttatttgacataaaaatttagcagtcactacgaaggacaacacataaaacaaagacaaaataaa

SEQ ID NO: 317822 - DNA, 545 bp, Homo sapiens
aaggacctgggctattttctatgcagagagaaatggaggcagcttcagaagacagcaagaatgagggacattcttagacacagagagtctttgccatttttatggacagaggaaaaggaagcagtggagtatgaaattaaacaaagttctaaagagatgagattaaatatcctgactaaggctttagattttaaaattgtataggataattccttcttagagaaagacagggtgaaagaaaatgaagatgggtgtttatatcagtctttatgttatgttttgctgttcatcagtcaagaactaatgtgcctgtaggaaatctggatgcttagagaaagttttctcratttaaagtggtgagagaaagtttggggtattcaatttcgatgtgccctccacttttaatacagttaagcaattcagaatgtattaaaattactgaagcattggctatacatacatttattttataaagcaaaatgaattctgagcaacttaaatacttatctgagaatacagaactggatgaattctgactcttttcc

SEQ ID NO: 317823 - DNA, 616 bp, Homo sapiens
ccacaaaatctgccacctagcagtcttttccatttgagtgacaacatgtgtttcaatgaagaaactcctttagctgactcctgccctgaagtcactgtcagttccatgaaaattgtgcctccagagaaagagtgaacatagtaactttgtcatatatgcttccaaaaaactcagctttttcttggctattatatttttctaggcttgcacaaattgtgttactttaaaaagcaacaaaattattgtatctagctcctctctcagtattgatagtatatgtctgtggtgaatctattccaaatttttgtttattaatatatttttttttaaatgttcaattctwagtgtgtgttttaacattttaaacttctcccttagttgatctcttgtcttatcatcctacatagtatcaatattcttttattcaattgtaatttatttattgtgcttagcctttgttctatatcccacatatttattatttatatttttaacaacaaatgttcctctatttaattttgttaagtcatccacaatgagatgaatctgtatggactgggaccaggattgtgttcactttcattactctagcagctactttctactaggaaagtat

SEQ ID NO: 317824 - DNA, 594 bp, Homo sapiens
ttatgtgcctggttttatgccagtaccatactgttttgattactatagtgctctagtataatttgcrgccaggtaatatgattcccccagttttgttatttttgcttaaaatagctttggatattctgggcctttcgtgctttcttataaattttaggatttttttttctatttctatgaggaatggcattggtattttgattggaattgtactgaatctgtatattgctttaggtagtatagacattttaccaatattgatttttccaatccatgaatataaaatatattttcattttttgtgttctttttaatgtccttcaccagtgttttttgtttgtttgtttgtttgctttttttctatagaagtctttcacttcttcagttaagttaattcctaggtatttaattttatgtgtggctgttgtaaatgtgattactttttaatttctttttcacattgttcacttttggcgtatagaattgctactaattttggtatgttgatttttgtatcctgcaactctacttaattttttttatcagttcttttgtggattctttaggtttttctaatacaagatcatattatct

SEQ ID NO: 317825 - DNA, 466 bp, Homo sapiens
tttttaatgtccttcaccagtgttttttgtttgtttgtttgtttgctttttttctatagaagtctttcacttcttcagttaagttaattcctaggtatttaattttatgtgtggctgttgtaaatgtgattactttttaatttctttttcacattgttcacttttggcgtatagaattgctactaattttggtatgttgatttttgtatcctgcaactctacttaattttttttatcagttcttttgtggattctttaggtttttctaatacaagatcatattatctgcaaacaaggaaaattttatttctttmtttccaaatttccaaatgatttagtttcagttttggttttttaatgatatttggcattagtgtcccagtttctaggaagagttactcaattatttgcataaaggtctatatagagctttaattgtacactccttaatatttttgaatgccct

SEQ ID NO: 317826 - DNA, 466 bp, Homo sapiens
tttttaatgtccttcaccagtgttttttgtttgtttgtttgtttgctttttttctatagaagtctttcacttcttcagttaagttaattcctaggtatttaattttatgtgtggctgttgtaaatgtgattactttttaatttctttttcacattgttcacttttggcgtatagaattgctactaattttggtatgttgatttttgtatcctgcaactctacttaattttttttatcagttcttttgtggattctttaggtttttctaatacaagatcatattatctgcaaacaaggaaaattttatttctttctttccaaatttccaaatgatttagtttcagttttggttttttaatgatatttggcattagtgtcccagtttctaggaagagttactcaattatttgcrtaaaggtctatatagagctttaattgtacactccttaatatttttgaatgccct

SEQ ID NO: 317827 - DNA, 591 bp, Homo sapiens
atattttaaatgagtcaaaatttattcatrtgtttatgctagttccaaataagataacatatttaacttttatttgaaaaactccttcataaattctaagtagtttgtctagcattttaattaaaaaacagtatttaaatacatacagaattactgttattttcttatcacaaaaatattttcttggttgaccaaaatggactactaattttgtcttttattttactatattattttgaatatttttctctctttttggtgcattgtttttatttccatctaccattcttgggcttaaactttttcatttaacaggtttcataatattaaaatttcatagtattaaaagtaaaacatatttacttttctgttattttaggttgattgatttgttttatataagggtctaatttcaatttctttttagaatttttaggctatgactcattgcagtttgctatctattgttgttaataagtagtcttctctcaatttataaggtttctttttctacaagctgattcttcctccataatactgcgggagcacttaagtgaacagtgaatgctaaaatagagaagataatttact

SEQ ID NO: 317828 - DNA, 591 bp, Homo sapiens
atattttaaatgagtcaaaatttattcatatgtttatgctagttcyaaataagataacatatttaacttttatttgaaaaactccttcataaattctaagtagtttgtctagcattttaattaaaaaacagtatttaaatacatacagaattactgttattttcttatcacaaaaatattttcttggttgaccaaaatggactactaattttgtcttttattttactatattattttgaatatttttctctctttttggtgcattgtttttatttccatctaccattcttgggcttaaactttttcatttaacaggtttcataatattaaaatttcatagtattaaaagtaaaacatatttacttttctgttattttaggttgattgatttgttttatataagggtctaatttcaatttctttttagaatttttaggctatgactcattgcagtttgctatctattgttgttaataagtagtcttctctcaatttataaggtttctttttctacaagctgattcttcctccataatactgcgggagcacttaagtgaacagtgaatgctaaaatagagaagataatttact

SEQ ID NO: 317829 - DNA, 622 bp, Homo sapiens
tgctggtcaagattggcacacaagaatctacaggccaggactgataaactcaaagcctctcatagcagaacctgtgggtttaggctggtgagtagggaaccttagctggatctggcaaggtaaagacatcctggcgaggttctggtagtctaaggctggtaagtcaattgctgggataactctgaggcttattgagagttcatccaaggagatgtcactgaaactgctggaggtaaaggccactgctcatagatacacagaacaagaaagaagaaaataattaaacactggaaccaggaaaaaaaagagcctttctttcttctctgtccctagagtgttctcaactgccaatatttagcatcagttacaaaagaaaatgcttacagagtctccatttcacaaagcagtcaatgaagagtgagtgggattggagcttagaatcaataaattgataactggcacacactaatctttgctttgatttgatttgaataattatatttaataaataaattccattgatcttttcttkgaaataaacttttaatatatcactgaaaataatttaaataattattatgtccacacttaaatatcaggaatacaaatgtgtgttaactct

SEQ ID NO: 317830 - DNA, 637 bp, Homo sapiens
cactgcacttttatttgaatggctaaaatccaaaaacctgaacaatatagaagaacttttattcattgcacatgggtaattaccatggttaaaatatttgatagtctttggaataatgtttggtaatttctcacagaattaaacatagtcttaacgtgacaaagcaatcacaccccaaagcatttacacactgatccaaaracctatgtcgacacaaaacacagcacacaaatgtggactggagttttatgcatcattatcaaaactggaaacaaccaaaatatcctttattaggtaactggttacatagtcatacaatggattactattcagtgatataaaggaatgagttctcaagacatgttaagacatagataaatcttcaatgtgtacgttaaatgaaagaagccagccttaaaagactatatatgactcaatttatatcacacttggaaaacagcacactccagagacagtaaaagtaaacagatcagtggttgcagcattcagtgggaactgagaatttaagtaggtaatgtaaagggaatttgttagggcagcagaacaattctgaataatactttaatagtggatacatattgctatactttttttactcatgaaactattgaacaaa

SEQ ID NO: 317831 - DNA, 637 bp, Homo sapiens
cactgcacttttatttgaatggctaaaatccaaaaacctgaacaatatagaagaacttttattcattgcacatgggtaattaccatggttaaaatatttgatagtctttggaataatgtttggtaatttctcacagaattaaacatagtcttaacgtgacaaagcaatcacaccccaaagcatttacacactgatccaaagacctatgtcgacacaaaacacagcacacaaatgtggactggagttttatgcatcattatcaaaactggaaacaaccaaaatatcctttattaggtaactggttacatagtcatacaatggattactattcagtgatataaaggaatgagttctcaagacatgttaagacatagataaatcttcaatgtgtacgttaaatgaaagaagccagccttaaaagactatatatgactcaatttatatcacacttggaaaacagcacactccagagacagtaaaagtaaacagatcagtggttgcagcattcagtgggaactgagaatttaagtaggtaatgtaaagggaatttgttagggcagcagaacaattctgaataatactttaatagtggatacatattgctatactttktttactcatgaaactattgaacaaa

SEQ ID NO: 317832 - DNA, 545 bp, Homo sapiens
aatactttgcagggctgggcaaagttctcaagaaggtcgtgtatgttctgaatcagtgatcaatatatggtactgtttgtcctataaccaggattcacaggtccaggagtcaaggggtggatgtggaagtggcaccaatcaccaacaccccaagtgatccactagcaaagtttttgcttcctgttcctgcgacattacattctggtgggctagaggtcttagttccagaaggaygtacactgcaactaggagacacaacagttttgttaaactggaagttaggattgccacctggacagtttgggctcctcctacctttggatcaaccggctaagaaggaagttactgtgttggctggggtgtctgacctggactatcaagatgaaatcagtctactactccagaacagaggtaaggaagaatatgcgtgaaatacaggagatccattagggtgtctcttagtattaccatgccctgtgattaaggtcaatgggaaactatagtagcccaatccaggcaggactacaaatgacccagacccttca

SEQ ID NO: 317833 - DNA, 545 bp, Homo sapiens
aatactttgcagggctgggcaaagttctcaagaaggtcgtgtatgttctgaatcagtgatcaatatatggtactgtttgtcctataaccaggattcacaggtccaggagtcaaggggtggatgtggaagtggcaccaatcaccaacaccccaagtgatccactagcaaagtttttgcttcctgttcctgcgacattacattctggtgggctagaggtcttagttccagaaggacgtacactgcaactaggagacacaacagttttgttaaactggaagttaggattgccacctggacagtttgggctcctcctacctttggatcaaccggctaagaaggaagttactgtgttggctggggtgtctgacctggactatcaagatgaaatcagtctactactccagaacagargtaaggaagaatatgcgtgaaatacaggagatccattagggtgtctcttagtattaccatgccctgtgattaaggtcaatgggaaactatagtagcccaatccaggcaggactacaaatgacccagacccttca

SEQ ID NO: 317834 - DNA, 637 bp, Homo sapiens
ggttcaagttgacaaggaatggacttgtgatggttaatacggagtgtcaacctgactggattgaaagatacaaagtattgattctgggtttgtctgtgagggtgctgccaaaagagattaacatttgagtcagtgagcttggaaaggtagacccacccttaatctgggtggacacaatctaatcagctgccagcatggctagaatataagtaggcagaacaatgtgaaaaacagcgtttttctcctagcgtacatctttcttccatgctgagtgattcctgccctcaatcatcagactctaagttcttcagttttggaacttggactggctctccttgctcctcagtctgcagttggcctattgtgggaccttgtgatcatgtgagttaatacttaagaaactcccatatataattccattaatattgtcccactagagaactctgactaatacgctatggtcaccaccacaargagcccatgttgtttgctgcctggatattatcaatgctcactcaaggcccaagagctcctcagtcagcttgtgaaaatgctgccaggcctggatctctcccttcaggccagtggtctcccctttggcccactgcaggtccagaaatgccatccgggagccaaa

SEQ ID NO: 317835 - DNA, 593 bp, Homo sapiens
tctgaaacctatggggcatacattagcaatagtaaaatccaaactcaattcccgacaagaccgactcaagcccccacagtaaaggtctattcaaagataaagcatgctagtttccaggcataaatacaaattaccttcatctgttttttactgtcctttgcaatatgtttaacttttcacagaaacatatgaggcaaacaaagtgttaagaaaacaagagctgtgaaaagaaatatcaataaataggagyagatctagataaagtgcagatgttagaagtatccattaagagatttaaaataactatttattaaagccttcaatgaaaaatgtggaaaatatgcatgatgagatagataatttcagcacagagataaaaacaattagaaaaataaaaagaaaatagaaatgcaaaacatagtaacagaatgataaaaaaaactctcagtagacttgacacatttgtggaaataatgagtaaacttgaggacagataggtaaaacttggacaactgaagaataaagaaaaatatagagaatccagaacacagaatccaagagatttttaatgatatgtcattatctatttgttt

SEQ ID NO: 317836 - DNA, 575 bp, Homo sapiens
ctctcagcaatgtgaggattgtaaaataaactccctcttaatgtttggatagcacttactttgagtcaacccccaacacacacacttatttacttaaaactcttcttctcagaatcattctttccagaattccttttacttaatatttccaaaaactcaagggttattaatctgttctgtttagtcactggcatgcccatcactctgcccatttgcttcaagggtactggtgcaggtgttcttagtttctagcgattcctgaaattctgaagaataccactttccccagtactaaactcacatgtggatccttgatctttagagtggaattcttccaggttatatttctgtgggcctttcaacctataatgacacaattagtctggcacagaacaccttgtgtwaaatctgcactttggctgaaactacacttcctttttaacaataaagactggcctcttattgcataccttatctcaatgtctgtgtggtgttttctagatgacagattgttcaggcctacatcagtctatgaacattttcagattatttgaacagcaatggtaaatgcataa

SEQ ID NO: 317837 - DNA, 575 bp, Homo sapiens
ctctcagcaatgtgaggattgtaaaataaactccctcttaatgtttggatagcacttactttgagtcaacccccaacacacacacttatttacttaaaactcttcttctcagaatcattctttccagaattccttttacttaatatttccaaaaactcaagggttattaatctgttctgtttagtcactggcatgcccatcactctgcccatttgcttcaagggtactggtgcaggtgttcttagtttctagcgattcctgaaattctgaagaataccactttccccagtactaaactcacatgtggatccttgatctttagagtggaattcttccaggttatatttctgtgggcctttcaacctataatgacacaattagtctggcacagaacaccttgtgttaaatctgcactttggctgaaactacacttcctttttaacaataaagactggcctcttattgcataccttatctcaatgtctgtgtggtkttttctagatgacagattgttcaggcctacatcagtctatgaacattttcagattatttgaacagcaatggtaaatgcataa

SEQ ID NO: 317838 - DNA, 559 bp, Homo sapiens
ctatgtaaagagaaactgataatactatatyataggatttataatatatgtacttataatatttatgaaaaccatagcatctatgagaggaaatgaaaaataacaagtagtcattaggcacttacattacatataaacggatacaatattaactaaaagtatgttttaacaagttaaaaatacatattgaaatccctagggaaaaaataaatgtaatgcaaaaattatagctgaaaagtcaatgaagcagataggttcaaattatgtaacatttctaattctggataacaaagtgtgtttcagattctctcattgtcattgactccctcaggttggctgagcctcttcaattttacaattactggtcagtgcagtagatgataaaaaaaaatgtgatgaatcacactaggaacacacacaccattgacaaaaatgtaatttgaatgtgtccaactttagctgcctagggaaagataaacatattaagtacctaaaaggagaaaagctagaaatatctgtgaagaaaactgaccctatgaaatataccaaaatagcttgc

SEQ ID NO: 317839 - DNA, 559 bp, Homo sapiens
ctatgtaaagagaaactgataatactatatcataggatttataatatatgtacttataatatttatgaaaaccatagcatctatgagaggaaatgaaaaataacaagtagtcattaggcacttacattacatataaacggatacaatattaactaaaagtatgttttaayaagttaaaaatacatattgaaatccctagggaaaaaataaatgtaatgcaaaaattatagctgaaaagtcaatgaagcagataggttcaaattatgtaacatttctaattctggataacaaagtgtgtttcagattctctcattgtcattgactccctcaggttggctgagcctcttcaattttacaattactggtcagtgcagtagatgataaaaaaaaatgtgatgaatcacactaggaacacacacaccattgacaaaaatgtaatttgaatgtgtccaactttagctgcctagggaaagataaacatattaagtacctaaaaggagaaaagctagaaatatctgtgaagaaaactgaccctatgaaatataccaaaatagcttgc

SEQ ID NO: 317840 - DNA, 559 bp, Homo sapiens
agacagtgaggcatggagaatttcttaatttttaattctttgtttttttctacaatctagaaataagatttagaagattaactatatttaaagtttttttgggaaatttacttcataatatgtcacatcaaaaacattagttggtttttcattttgtttcaacatattttacaagtatgtaacaaaggcaatttaaaaataatttgtcatcaagtgatttgtcttcgatgaaagaaagacaattaaaaggaccctctctcttttgtaaattaagtacttctatgttgtaatcacagatttaaaaagcagcaaaatattaaacttgcatgattcctaacttatggactttgccgtatctgtttcatgatcattgacatgtgtatgactcaaatattttgtcagtatctgaaagtgaatatacaggtgctaataatttgtcagacaagtttttttatcatggtgttaatctttttattctaattagaaatgaagtcaaccaataagatttcgtaatcattaattaataatgtayaagttcagcaatatcagaaatgatatt

SEQ ID NO: 317841 - DNA, 377 bp, Homo sapiens
ctccgtctcaaaaaaaaaaaaaaaaaaaaaaaaaaaaaaattctgtcctttgcccatttttaatggggttgtttccttgcttgagttgaaaataattaggttgtttccttgcttgagttaaaaatccaaataaatggaaaactatttagggttcattaatttccaaaattwatactgggaaaatgttcatactacccaaagggatttacagattcattgtaatctctataaaaatcccagtatcatttttcacagaaatggagaacacaaacttttaattcacattgaacctcaaaagatgccaagtagccaaaataatccttagcaaaaagaataaaattggcagcatcactctacttgacttcaaagtataaagt

SEQ ID NO: 317842 - DNA, 579 bp, Homo sapiens
gggtatataactatggtaaacattaccaaaatgtactctttaagtatgatcagtgttaaatgtattaaattatattttaatgaagctgtttaaaaataaaagagaatagactgtctattagtcacagaatcctatttccctaaacacctgtagttagtataaagaaacaaaaactgaagtatatactttgttgttcttattgtctttgctgtttttaataaatgtttgcatagacattcaacataatctggatatatgtagaaaaaataattctatctcaattttagatttgttctctcttttaaaagacagaggacaaagagaacggaaaaaaataataaaaagagttaagacaattcaggaggaaaactaaattaacagggagaaaaaagagtaaaccaaacaatcttggctgygttctcaccttagcaaacaatttatatgtgtaacactgtgtacaagactaccattggctaaacaccagctttttttttttcatgtaaagtctctatagattatctgccctagtacttttcatcaatgctgttaatacaaagtacattgtacttacaattcaat

SEQ ID NO: 317843 - DNA, 609 bp, Homo sapiens
tttgtacaggtcgaatcgttaattatatgtcttcaaagatttaaatctagttaaatgtacaaattagttgattgtactattttctagcttgggggttgttctttctatacacaaacaactttgtatcaataatcttgtctaaaacaaaataaataatattttggtataactttttctttaaggaacaagttatagcttatttattgtttctctcttctaagtatttacactatttctacatttgttcaattttttaattcactcaacaaaatggattcactacctactatgtgtgaaattctactgttggtrtaaatgaggtctctattatcatgtactttatcttctaaagtaaaggtatatgtcaaaatagtttgacactaataagctcaccctgaattgcttatatgaggaacattgatatttatttggcaaaatgtattggtctgcaggctttcttttcctgataatatatttcatactaaaaaataaactcttacatttggtacattacttataaccctttattatgtagattaatttcacttctcctcaactaggaaggccatagattttttttccataaaaaataagacaaatcatagtaag

SEQ ID NO: 317844 - DNA, 609 bp, Homo sapiens
tttgtacaggtcgaatcgttaattatatgtcttcaaagatttaaatctagttaaatgtacaaattagttgattgtactattttctagcttgggggttgttctttctatacacaaacaactttgtatcaataatcttgtctaaaacaaaataaataatattttggtataactttttctttaaggaacaagttatagcttatttattgtttctctcttctaagtatttacactatttctacatttgttcaattttttaattcactcaacaaaatggattcactacctactatgtgtgaaattctactgttggtataaatgaggtctctattatcatgtactttatcttctaaagtaaaggtatatgtcaaaatagtttgacactaataagctcaccctgaattgcttatatgaggaacattgatatttatttggcaaaatgtattggtctgcaggctttcttttcctgataatatatttcrtactaaaaaataaactcttacatttggtacattacttataaccctttattatgtagattaatttcacttctcctcaactaggaaggccatagattttttttccataaaaaataagacaaatcatagtaag

SEQ ID NO: 317845 - DNA, 644 bp, Homo sapiens
attgaaacagagagttcaaagtagctgttttgaggaaactcaaataaattcaagatatcacagagaagaaattctgaattgtatcagataaatttcacaaagatattgaaataattaaaaagcaagtagaaattctggagataaaaaatgcagttactgtactgaagaatgtattggatttttttttttttagacggagtctcactcttgcccaggctggagtgccgtggcgtgatctcggctcacttcaagctccacctcccgggttcacaccattctcctgcctcagcctcccgagtaggtgggactacaggtgcctgccaccatgcctggctaatttttgtatttttagtagagacagggtttcaccgtgttagccargatggtctggatctcctgacctcgtgatccacccacctcggcctcccaaagtgctgggattacaaggaatgtttaaatagcagaatcaatcaagcaaaagaaagagttagtgagcttgaagaaaggctatttgaaaatacatagtcagaggagacaaaagaagaaaaagccagtgaaacctacctgtggaatctaaataatagcctcaaaaagggcaaatctgagacttgttggcctaataagagagttaggaaaggagaagg

SEQ ID NO: 317846 - DNA, 458 bp, Homo sapiens
tgatgttgaacattttctcataaatctgttggttatttgtagcttttttgagaaatggctaatcagagcatttgcacatttttaattgaattatttgcagtttttttgctattgtattgagttccttgtatattttggatattaattccttgttggatgaaagatttgcaaatattttctcccattttgtaggtggtcttttcactgtgttgttgattccttggctttttttagtttgacagaatcccatttgtctgtttttgcttttggtgcctaagtgttcatcaatagatgacggacaatgcaaatgtggtgtacatacacattggaatactattcagccacagaaaaaaatgaaatcctgtcattcgagacaacatggatgagctgggaagacattaaagtaagtgaaataagccaggaaaagaaaagttawtaccacatgttctcactcatat

SEQ ID NO: 317847 - DNA, 584 bp, Homo sapiens
taaataactgagccattgagtggtctcattcaacaggaagtccaggtgttatcaggaagggggagatcctcggttcttggtcttacttgggagacagatttctactaagtgacaattcaaagatatcagtgagccctattgaagggaaattgagaacagagagtttacatagagagacaggatactctgaaaggtgaggcagagtgggctactgaaagccagtgtgccggcaacagccctgagagtctgcatgggctttttataatgttggattgttctggaagttcccacctttgtcttaagtcaccacctttttctttctctagttttcccacttctgtcttaagtacccacctttccccatctagtttctgcccaggcttgtggaattctctcttactctctgttgatacgcatgtgcaaaccaggaattggatatgaattctayctaatggctgtgtttttcactccaggaaggttgtgtagtggttaaacctgtacttactgctcctgcgtatctcttagggatttctcctctgccctcttcccttatcatcatgcatctagtgacattctggcaggtt

SEQ ID NO: 317848 - DNA, 559 bp, Homo sapiens
aattggatatgaattctatctaatggctgtgtttttcactccaggaaggttgtgtagtggttaaacctgtacttactgctcctgcrtatctcttagggatttctcctctgccctcttcccttatcatcatgcatctagtgacattctggcaggttaactgcagagtgagggattactgcaagtcataagggacattgctttccatctaggtgttttccctcctctctcctcatatctagcatggatgctttgagtggtctttggggtgtgagattttccagccctcccttttctcaggggcttccccttctgctcatgtctggctatcagcctactctaacacaggtgcaggcaggactctcatcagtgaccatcatcagccttcctggaaggctcaggcatccttggtgagcaacacttgtgatttcatttgcaactgtagtagttagtctttctgagctcagacaagccatttgtctttcagcttttggtctctataaccctgaaccctcttagcactcctgcagatgcacaaagcctggaagagcaaggggctaaa

SEQ ID NO: 317849 - DNA, 654 bp, Homo sapiens
tttgcaactgtagtagttagtctttctgagctcagacaagccatttgtctttcagcttttggtctctataaccctgaaccctcttagcactcctgcagatgcacaaagcctggaagagcaaggggctaaagctttaggaaccaacaccaactgctcgagatgaagctttttgtcctttaaatccaggtaaacatatttagtatattttttggtaaatatatttagtacacattgtaacattttctggtcacactgtcttgcagttactactcattaatactactgtagtgcaaaaacagccatagacaatacaaaagtgaatgaatgtggtcatgttccaattaaaattttatgtacaaaaattggcccctggctaaattgggccaatggggagggttgccatatttagcatataaaaatataggatgcttacattggaatttcaaataacaattaacttctttaatctaggtatstcctaaacaattatttgttatttctatgaaattcaaacttaaccaggtatcatttatttaactttcaactctacctgcaagttgtaatgtgatgacttctggtttagacagattttctgaggaggaattcattatgattatccagatcccaggaagatttacaactctactcattgca

SEQ ID NO: 317850 - DNA, 519 bp, Homo sapiens
ttttggtttaaagccagcaccctcagaggaccccaaatataattcataaaaaacatcagtcttcytacaaaagttgaaaacttgattctcactgtcttggcctgagttgtcagcaaagcacaagctactatgggtaacaattttacctacagagttgccctcacaggatctgtgggtttggattcataccgtcttggtggagaaatggctcagacttgaaacttctcccaattgtgttatggagaaaccatcctcatatcacacattataggttcctcaagattaagaacaaccaaacatgacttcaatctcatagtcaacaattgcaaatacagcaggaaaaagccttctgttttcaaagctcataataaaactaaatacagagtaatttcattttattattttgttgttgttgttgttgaggatcttgctgtgcttcccagactagtctccaacccctgatctcaagcaatcctcttgcctccacctcccaaagtactggatccacaggcgtgagcc

SEQ ID NO: 317851 - DNA, 426 bp, Homo sapiens
gggtatgctttttgttggtctcctctgctcagattttcccattctctgaacactactgccctcacctcaatcataaggcacacataaaaatggatagaacagaaaacagaatggtcatataggaaaaagagaagttatacatatagtgagaaaaaacgccaaaacatgtgtatataatgttagaataaaataaatggtagaatagaagggttcaagtgtgaggtaaaaacaaaatggcaattgtgaaaacataatattgaaatagaaaaaraaataaagtagcatgttattgatgaaacaaatttacttagaaaacaacataactcaagttactgaggaaaatgttttatacttgctataattatattgttcattgtcacgttaataagcacctttgttttttttttttggaaatatattgtttta

SEQ ID NO: 317852 - DNA, 594 bp, Homo sapiens
gtgctgtggctcacgcctgtaatcccagcactctgggaggccgaggcaggtggatcataaggtcaggagatcgagaccatcctggctaattcagtgaaaccctatctctactacaaatcaaaaaattagccaggcgtggtggtgggtgcctgtagtctcagctacttgggaggctgaggcaggagaatggtgggaggcggagcttgcagtgagccaagatcatgccactacactccagcctgggcaacggagcaagactccatctcaaaaaaaagaaaagaaaaaaagaatgcaccaccatgctcaactaattttttacttttttatacaggtgaggtctcactgtgtttcctggctaagacaaacttattttaatttagaataatttgtatattctagagctttatgtataaaaatgttatttttgatattkaatacttcaggtagagaggcagatgaatacaccagtgcttgttacatttattccatagcatgaaatgattaaaaactcaacatagatttaggcttagggtttaatcagtgtcttgcccaaatgagtcctggtgcttttaatttacaaaaaatgaagaggaa

SEQ ID NO: 317853 - DNA, 642 bp, Homo sapiens
gtttatgtatttaatggcatcatacatttctcttagactctgctcattttctttcttctttttttcctgtgttattcagatgatataatctctatccttgtctcttcaagttcatagattgtttattcttcaagttttgatatactattgagccccatgagtgaatagttcgttttaattattctactttcaactctagaattttcacttagttcttttataaaatttatttttgttgatattctctagttaattagatattatcatcataccatcttttaattatgtaattttttaaatgtttgaatatttttacaataattgctttgaagtctacatctatgacccctcaaaaacaaattctatcacttgattttcttttgtgtatggatgacaccttcttgtctctttgcatgttttacagtgcttttctgaaaagtgaacattttatktttcatcaaaaatatattttatttgtatacacattaaaatagcatatttcagaaaaattagtaatataatatttcctactctcacatttcatagtgttatttaaacactcaaaatatacagtattagcatcctcatcagtgaaactgctttcggatcatctagcagtgaaaactcagcattttaaataat

SEQ ID NO: 317854 - DNA, 538 bp, Homo sapiens
atgggagaccagagttttattattacacaaatcagccttcccagaaattcagaagctagggtttttcaaagatagtttggtaggtagggtgctaggatatggatgtttctaattggtaggagatgcaatcttaggggtgcagaaaatggccttcatgcactgaggccacttctgggtgagggtcacaggagtggttgagtggakagttgcaggcaaaagcctgcaaaagccagaaaagacatatcaaaaggccagtcttgggttctagactagtaaattggagaagttgcaaaccttgtgacctctggaataatggctggtaatcatttaactacacctacaacttatagaaactcatcctcctaacctggtggtctttcattagatttataaaggcagtatagcctgagggaggggctactatcatttaaactataaactaaatttctcctagttagattggcccaagtccaggaatgaccaagggtagtttggaggttaaaggcacatctctttcactgtcataattttctgacta

SEQ ID NO: 317855 - DNA, 541 bp, Homo sapiens
ctgccgagcgtggcatctggcaggggaggtggtggaaagtctgcttggaacagagctgcatgggctgctttctgtagtagtttgatgcagtttttatgatcgccacaaatctgcgccccccccccctcctctcgcactgagggtctccaagggcattcgtggcagtaatgccggacacttccccatgttctcacccagcttgccctgcagaaccgtacaggggagcagaaccttccagcgggggcaggagccaaggagaaggcacagaacatggggaagtcgaggcccggttcgtggggcacaccgcctctggcagtatacacaggacccaccaatcacagagactgtaccccgggcccatgcttgctaaggtcccagggaggaaaacagaaacagcatcaggtgggtgaactggggaagctatgaggagaatctgctcttgctagaattaaactccagaccagagcacgtggatgagtctcctggggctgctgtgacagawgaccacgaactgggtgacatgagacaacagaaatggatt

SEQ ID NO: 317856 - DNA, 520 bp, Homo sapiens
gtattctcacatggccttccttggtgcttgctagagagacatagagaaatagagacagaaaatctcttcctcttgttatgaatccaccaattgtattggattaggaccctatccttatgagcatatttaactttacttcctaaaagccctatttctcaatacagtcacattgagggttaatgtttcagcataagaatttggggcagggaccataactcagtccatagcacctaagaatgtgttgcatatgtccaccggttaacatatgcaagattcacaaccaacacaactgcctggtgaaaccccagccccattgtgatggcagtctcctaatgaccagacaaatcatgaagcaatcacagaaaacacaacccagctgaatwgacccagaccagaagcgtcatcccagacctcacacaaaagaataagctaaatcaaatgtgatttttttaagctgctaaattctggattgtacgtttatgcagaaagagctaactgatataataggctagatatttga

SEQ ID NO: 317857 - DNA, 520 bp, Homo sapiens
gtattctcacatggccttccttggtgcttgctagagagacatagagaaatagagacagaaaatctcttcctcttgttatgaatccaccaattgtattggattaggaccctatccttatgagcatatttaactttacttcctaaaagccctatttctcaatacagtcacattgagggttaatgtttcagcataagaatttggggcagggaccataactcagtccatagcacctaagaatgtgttgcatatgtccaccggttaacatatgcaagattcacaaccaacacaactgcctggtgaaaccccagccccattgtgatggcagtctcctaatgaccagacaaatcatgaagcaatcacagaaaacacaacccagctgaattgacccagaccagaagcgtcatcccagacctcacacaaaagaataagctaaatcaaatgtgatttttttaagcygctaaattctggattgtacgtttatgcagaaagagctaactgatataataggctagatatttga

SEQ ID NO: 317858 - DNA, 592 bp, Homo sapiens
aataatttgttagtaactttccaaatatgatgaaaccctgaattacagacccaagtccaataaccttttatataaatgtgaaaagatggagtcccgctctgtcactcaggctggagtacagtggcgctatctcagctcactgcaaactccgcctcttgggttcaagcaattctttgcctcagcctctcaaagagctgggattataggcacccaccaccatgcccagttaatttttgtatatttagtagagacaaggtttcatcaccttggccaggctggtcttgaactcctgacctcatgatccatccaccccagcctcccaaagtgctaggattataggcatgagccaccgcgcctgggcaacagttaggttttcaactcttgccccctccttacctccctcatctggtagtccccagtgtctatctttgccacctttatgtccatgagtaccgattgaacaactttcaaaatgcaataagataacacataataccaattraaatggctaacattaatgttgaacagcaaccaatattggtcaggatgtgaaataattggaattctcatatactgctggtagaagcgtaaa

SEQ ID NO: 317859 - DNA, 518 bp, Homo sapiens
attgtatgattctattaaggtgaagtttaaaaataatagacttaatctctggtgatagaaatagatcagaagttgcctatatgtgtggggactaactaagaagarggaatataatttcctggggtgatttgcaaatatctcaattggagtgttgattacagagatatgtacatttgtcaaaacatataacagtttatctctaggatctatgcatttcactgtgtatatatatatattttatctcaaaaactgctcatagaacattatttaggcaagatcatcaagggcctaaaactattagaaatggtaaaaacaatcccatttactgaaatattacagcatgattaagaaaagggattaagttcagggtcagacttacagtatgatgtgctgatatttggaagccttaaagactgtgctactttttctctttaccacactcccatgctcccttgaaaccccaactctccttcagcagtaaatagggcattccttattagaccagaaaacatgattac

SEQ ID NO: 317860 - DNA, 546 bp, Homo sapiens
cttgaaatgaacaaagagaagaaagagcctcctgaatctctctacattccatcctggaaacctcaatagattcttctgaaagagtaaacatggtgtgtggttgctcgtacatgcaaacatgcacgatcttctctgtttctttttcttatatcttctcaattccaaattctgcaatcactggaacaagaaaagctgccccagtgggatttctgtcatgatttgctttagaaagtactcgaaaccacagatgaccattacttgccaaaatttgagtcaggayttgttgacgcataaggttcaaataatttgtataaacatccaagcacttagacagtatccaagatatttctttttcttggaagaaaaaaaaatcatctgtaaactatcttttattgttttataattgcccccttatttgttacccacatttcattttagattgtaacttttttgatgataggatatgatacctaagcaaggctgagtttataataggtactaggtttgataatacctagctatataaacatattatgaaataaatgt

SEQ ID NO: 317861 - DNA, 549 bp, Homo sapiens
ggcagtgcaagtgtaagactaagatatatgagaaaagaaaagtaatgaaggtaattctatatcaacctggatttctgaagtgacaatctaggacaatggctctcagagtaagatgagaagacagagatgaaagtttaggaggcccygggctgctggaatttgcaacgtaaaggaccagagaagagatagtgacacagagaaagagatctgtcttagtagtttctagagctctcacagagctggcaagtccttgagacccataagaagcatggcttagcagggctaaactagcccagaataaagactaccatctttattaataaatcggaaaaaccatcttcagaaggttcaaactaagccaaatataactgacagaagaaagtctaatacttttgaaagaagacaacataatctagcacacaacaacataaaattcactatgtccagtgctcaattaaaaacagctcaacaattgaattagtatagccattatggaaaacagcaggaagaatccagaaaaacttacaaatagaactaccataggatcca

SEQ ID NO: 317862 - DNA, 487 bp, Homo sapiens
ttgcaataagttcctaaaactgaacttagggctgtgtgttgtattatggctcatgaccctgtgaccccagcactttgggaagccatgrccagaggatcacttgaggccatcagttcaaggctgcagtgggctgtgatcacaccattgcacttgagcctgagtgacagagcaagaccctgctctaaaagaataacaataaaataaaatgaaataaaaataataaaaattgaacttcgtatgtctcaatagtttctcttgaatccatcccttcaattgtcaataaactgcattactgaggaaattatttggatgattgattatatatcttttaactgtgttaatttcttaatatctataaataaagaaatgtttaaaaaatatgcataacagcttctgaagtagtcatgctttttgtaaatcagaatagaattattgaaatatgtgcatgtaatttagataacatacatcatagtaaattaaatatatt

SEQ ID NO: 317863 - DNA, 570 bp, Homo sapiens
gctgatctatggtagcatcttagcccttccatggtaacttgcaatcagttaaacttcaaatcctgaagcctgcatttcatattataacacatgtaaagcagaattttgcaataagttcctaaaactgaacttagggctgtgtgttgtattatggctcatgaccctgtgaccccagcactttgggaagccatggccagaggatcacttgaggccatsagttcaaggctgcagtgggctgtgatcacaccattgcacttgagcctgagtgacagagcaagaccctgctctaaaagaataacaataaaataaaatgaaataaaaataataaaaattgaacttcgtatgtctcaatagtttctcttgaatccatcccttcaattgtcaataaactgcattactgaggaaattatttggatgattgattatatatcttttaactgtgttaatttcttaatatctataaataaagaaatgtttaaaaaatatgcataacagcttctgaagtagtcatgctttttgtaaatcagaatagaattattgaaatatgtgcatgtaatttagataacatac

SEQ ID NO: 317864 - DNA, 429 bp, Homo sapiens
taatctaaatcatcttattaaagataaaaacagtcatactggaccaataacaaaacccaactacatgctacttacaaatacacgcctgaaataaaatcacaaaaactgtttgaaaacaaaatatggaaaagacatgtggtgcagaatccaaatgaaagctgtagtagctgtattaatatcagacaaagcaggcttctaaaaacttgataataatatagagaggcacttcataatgacaamattttcaagtcactaggaagatacaacattttttatgaatctagtaatgtagccttaagccaaaattaattaaatacaatcagaaacagaaaaatccaaaattatgagggatttttaacaaaattcagtaactgatttaacaaacaggcatatattggtaaggataggcaaagtttaagccattaaaca

SEQ ID NO: 317865 - DNA, 613 bp, Homo sapiens
tcatggagttttcttaaacagagctatgtgaaccctttgtccagcagttcatacatctctttgtctttagggtgggtcactagcaccttatttttttttgatttggtaatgccatattaccctgattgttcttgatccttgtagttgtgtgtcaagtgtctgcacatttgaagaagtgcttattcctgtattcacagactggctttgtttgggaaagcactggggaaagtatagtacttgggctttccagatgcctggagcagctgtagccattgcagagctgtcagaatcctgggcccactaaagcaggtgcagcactggggcaaggcagaagcctgaggcccacygtggctgatgaaccatgaagcctggggcctctgtgggctgcctgctgctgaagattgtccagggcccagggccactacattttgcctggcagtggtatggaattggctcacaattcctttgtctctagatataactccttattctagagttacttaaatgttccaaagttttaaaaatactgatgcctgggtcctacctgcagcatttggatttaattggtctagggtgcagcctgagaactgagattgataaagactcttgaggg

SEQ ID NO: 317866 - DNA, 616 bp, Homo sapiens
tacctaggttagaatgacctacacaaaaaagaagtaagtccacagaagggcagtgaggggacagaaatgagaagtggtgtctttttgtttaagcctagactgaaattttgtatcagggcactgattggttggcttatatcttaaccacgctactccacgacaaaaattccagttcstttaacttatacttaaatgtttcattcatttctgattttctttacatttgaagatctttaaaatctaaaatgaatattctttattactttaaacataccttctgtattctgttatgaaagagaataataaaaattatgtcagattttgaaaacaacatgcatcttaaagtttaatgtcaactatttgttaaatatcatactatataaaatattaatgattattttaaatgtttgaatttatattagaataatgatgagaataaagagctttggcaaaaaccagttagatccgagaaaattttagtaacgtttaaaataatataaaaatatagagagcttataaatcaagttagatatccaaaacctggtactgactgtaaaggaaatctcattctaaacaatgcagccaacatagagaaaagacacatgaaaagaaagga

SEQ ID NO: 317867 - DNA, 534 bp, Homo sapiens
ccacccttgcataaactctaagactaagatcataatttcttcattagattatrctagtttagcagagcagagagttgatcaagttattttaagtggtagaggtgtttattgtctggatgccttttggaataaaaaaatcaaggtctttagccaagtaggtcttataaaaacaaacaaactaggaaaatgaaccaagcagatcttagtggcagctggaactacaatagagtcgagcttcaatgatgtaagaattgatgctgatgatgatgctggtggggctggaggtattagtaaaaacctcacatcccctctgggatcctagcagcaggagagcttggcccctgaaatcttgctggtgggattcagttctccctcttggctactctttggattttggttgccttttcccactatagtgccctctgttaatgcctctgagcatctgcctgctcttatattctgcttcctcaggtttggctcagttgtgatcacacccctcatcacagctcctttacataataaactcagttagta

SEQ ID NO: 317868 - DNA, 547 bp, Homo sapiens
tacctctcctgttactagtgccttgatactctgacctttgaaactcctatccattaagtcagaatctccatttctttcttggtggaacaatccatgataagtggccatccagtcagaactatttccattagatcaagttttggccaggcaggtatcacaactagcacatgagtgttaaaactattaggaaagcagttgtttattttttcaaatatgattcctaaaaaaaaaaaaatcccttaaatccctgatagtaggcataaaagtcacttttattaatagatgaattttcaatttattatcttattattattttttaaataaattttaattttaaatttttgtgggtacatagtagatgtatatacttatggggtacatgagaagttttgacacaggcatccaatgcataataatmacatcatggagaatggggtatccataccctcaagcatttgtcctttgtgttacacacaatccaattatacttttagtaattttaaaatgtacatttgaattattgactatagtcatcttgttgtgctat

SEQ ID NO: 317869 - DNA, 624 bp, Homo sapiens
tgtccaatgtgacactggcattaacagtattgcccaaacttgagaagtattgtattagagctatagtagttagagctacataaataccttaaatgaatactctgaacctaaaatgaaactttttaataatcacagtcagagyaaacaataatatttttaagtgggaataaacagctgaacatatgaaaacaagtattgtgtagaattgtaaatggaacatggaacaatgtaagataggagagatgagaaggtgatagagacccagaaaaaattaagcaagaggaaagggacattttccataggtataacattatcataatttcctatattagaagtgactgtcaaaattctactatgcactatttatcattggttacataactagttcaacattggggaatttctattttcaatacataggggggaaggtcagtctttttcaatttgagtgaatatattgatttagataagctttacattatagaataatttcaggatgtgctgcaaatatatttattagttaagaaattatttattctgatccttttatgggttagggacctcatgagacattgaaggaacaaaaatgagtaaagcacaatgtctgtcttcgaagtactcata

SEQ ID NO: 317870 - DNA, 624 bp, Homo sapiens
tgtccaatgtgacactggcattaacagtattgcccaaacttgagaagtattgtattagagctatagtagttagagctacataaataccttaaatgaatactctgaacctaaaatgaaactttttaataatcacagtcagagcaaacaataatatttttaagtgggaataaacagctgaacatatgaaaacaagtattgtgtagaattgtaaatggaacatggaacaatgtaagataggagagatgagaaggtgatagagacccagaaaaaattaagcaagaggaaagggacattttccataggtataacattatcataatttcctatattagaagtgactgtcaaaattctactatgcactatttatcattggttacataactagttcaacattggggaatttctattttcaatacataggggggaaggtcagtctttttcaatttgagtgaatatattgatttagataagctttacattatagaataatttcaggatgtgctgcaaatatatttattagttaagaaattatttattctgatccttttatgggttasggacctcatgagacattgaaggaacaaaaatgagtaaagcacaatgtctgtcttcgaagtactcata

SEQ ID NO: 317871 - DNA, 509 bp, Homo sapiens
cagtttcataatattgcttcttcctatccatgagcgtggatagcatttttttttttttttttttttttttttgtatttctggtagaatttctttgtattactggtagaattcagctggaagtcaatctggttctgggatttttttggttggtaggctattagttactgcctgaatttcaraacttgttattggtctattcaggaattcaactttttcctggttcggccttgggagggttcatatgcccaggaatttatccattacttctagattttctagtttatttgcatagatctgtttaaagtattctctgatggtagtttgtatttctgtgtagtcagtggtaatatcccctctatcattttttattgtgtccatttgattcttttctcttttcttctttattagactagctagcattctattttattattttgttcacaaaaccatcccctggattcattgatttttttgaagagtttttctgtgcctccatttccttcagttc

SEQ ID NO: 317872 - DNA, 509 bp, Homo sapiens
cagtttcataatattgcttcttcctatccatgagcgtggatagcatttttttttttttttttttttttttttgtatttctggtagaatttctttgtattactggtagaattcagctggaagtcaatctggttctgggatttttttggttggtaggctattagttactgcctgaatttcagaacttgttattggtctattcrggaattcaactttttcctggttcggccttgggagggttcatatgcccaggaatttatccattacttctagattttctagtttatttgcatagatctgtttaaagtattctctgatggtagtttgtatttctgtgtagtcagtggtaatatcccctctatcattttttattgtgtccatttgattcttttctcttttcttctttattagactagctagcattctattttattattttgttcacaaaaccatcccctggattcattgatttttttgaagagtttttctgtgcctccatttccttcagttc

SEQ ID NO: 317873 - DNA, 509 bp, Homo sapiens
cagtttcataatattgcttcttcctatccatgagcgtggatagcatttttttttttttttttttttttttttgtatttctggtagaatttctttgtattactggtagaattcagctggaagtcaatctggttctgggatttttttggttggtaggctattagttactgcctgaatttcagaacttgttattggtctattcaggaattcaactttttcctggttcggccttgggagggttcatatgcccaggaatttatccattacttctarattttctagtttatttgcatagatctgtttaaagtattctctgatggtagtttgtatttctgtgtagtcagtggtaatatcccctctatcattttttattgtgtccatttgattcttttctcttttcttctttattagactagctagcattctattttattattttgttcacaaaaccatcccctggattcattgatttttttgaagagtttttctgtgcctccatttccttcagttc

SEQ ID NO: 317874 - DNA, 660 bp, Homo sapiens
aaaatggaacaaaatcgaaaaaggtcagaggttcatatttcatgtattttaagcagtgtcaattttctaagtattatgaaaagttgggaatgaaaaagagactacattggtggaaggcaaacagtctctcccacacattccacctctttatgtcaacaatgtcaagaagttgccaagctaatgattccacattcaaccatcccagccacatttcttattcttctcattttattttctatacactaatagttgccatcatggaatgatattctaaagttaagaaaatgttaaaatatggaaataaattaacaaaaacaaagacagattgtagttggtcctaaaggaattgactttttgacaagtaaaacttcattaacagaaagtgtgtctcagtatgaactagtttacaaaatatagaataaatattaagatgagatacataacttttacagaaagacagacctcggaatttattttaaaatgttttaaaacattgaaaaatgtttccaytgactaataattatgtttgcccataacttttcaagaacatatcaattgtataaaatataatccaatgtaaacttttaaacaatttttcatttcatgagattgcttttgactggtaaagtcagtgcacatgcagttgtgtgtggtattaca

SEQ ID NO: 317875 - DNA, 550 bp, Homo sapiens
gtggtattacacaatatacatcaactgtcactgtcttttcaagtactgaagcagcacggccagtttttgcaggcattaaaccaaagattttgacttctcaaaacgatctttttccccctttgaactctccataaccctactcaaacccacgaacacaaactttatagttttctcacattcatttaacacaggtcatgcgtcctgatagacacctaattcattcartaaacatcgagaaatattaacactattttaccatgcatttgcagagcttttgtgtctgtgatatttttctaactcttttaaaatttcaaagccttggaattattcaatggcaatgacactctctttttctttataaatatcctgtctagaaataatattaaaactctaatatgatttgatcatttaaaagtataagttaaaatgtgagatttcttgtgttcttatgcttccattttgcttttgaatagtaaaacttctctttcctattcttactacttttaaaaatgtggctccctcaaaaatatcactgcaaaagggtttaaag

SEQ ID NO: 317876 - DNA, 622 bp, Homo sapiens
attcacaggccagcagttcattgtgtttcctactcacatgttgttcctgatgaattatttttaaagtatgactaaattattcattatacaagatcacaattatttatgcaactgaggtttaccactaacattccaatatggattgttttaactatgggacttctataaagcttctaagaaatagaaatatatgcctagaattaagtaatttatatgggacacaccataatggtagaggaataatacagtggttgaacctttaaatcttaagggaatcattaataacaaatctgataaaacattatttacaataattacatatgcagtcaaattttatgtacacatctcattttgaatatctcaaaacagtcaaaccgattaagctgccakacctaaacaaatttctcccacaggttatctgcctcatgtatttcattaaataaaaattaggtaatactatataacaataatagtataaaaatataaaattatgtatgatttaaattttattttcacagcatcagaaaaataaaaactgtaacaaaaaccttgaggtagttaatctatctttatttttcttaggcatctctgccccttcactctgttgatgaaggtatattcc

SEQ ID NO: 317877 - DNA, 502 bp, Homo sapiens
tctcacatctcagttccaacaactttaagtttgactttgactaagataaatttaagtagcattttctattagagaaacagcacaacacaaatgcagtttctgaaggaaaggccagagatatgtcagcccacttcattatgaaccaagcctgggaaggaaaatgatgtgtgagctaacraactcacaaataattacactggacatttttatgctgccaccagaccttttgtaaggctatataaactgatcttaattttgttatactgacccctaaaggcacttcccattgtaaaatagtctattaagaattggtctatatttgggaaagcaataatattaagttcattatggctttttgcagtccaggcactaatgtagcttgtgtaatcctcttaaggttttaatgggttaaagctattttaagaatttttgcaatcaaactatataggtatgcttagaaaggtacttgtcttccaggccctttaaaatatatataagataa

SEQ ID NO: 317878 - DNA, 502 bp, Homo sapiens
tctcacatctcagttccaacaactttaagtttgactttgactaagataaatttaagtagcattttctattagagaaacagcacaacacaaatgcagtttctgaaggaaaggccagagatatgtcagcccacttcattatgaaccaagcctgggaaggaaaatgatgtgtgagctaacgaactcmcaaataattacactggacatttttatgctgccaccagaccttttgtaaggctatataaactgatcttaattttgttatactgacccctaaaggcacttcccattgtaaaatagtctattaagaattggtctatatttgggaaagcaataatattaagttcattatggctttttgcagtccaggcactaatgtagcttgtgtaatcctcttaaggttttaatgggttaaagctattttaagaatttttgcaatcaaactatataggtatgcttagaaaggtacttgtcttccaggccctttaaaatatatataagataa

SEQ ID NO: 317879 - DNA, 514 bp, Homo sapiens
aaactgatttataattttcctggagaatgagaaaggaagaaagaaatgaggtctgcctaggcatattaatccatacctttggcacatagcagatcaagcttactctcaatcttgccacagttccaccaagaacagtttagtayactttacaactgaggctatatgctttttttaaatttattttttatattaaattggcaagttataatagtatatatttgtgaagtacaaaacgatgtgatgatatgaatacaatgtattgggttggtgcaagaacaattgtagattttgccattaaaaataatgacagaaaccacaataacttttgcaccaatctgtcaattgagaaaaatgatgagaaaagtctcaatcattttaggaagtttatttgccaaagttaagggtgcacgccggtgtcacagcctcagaaagtcctgacgacatgtgcccaaggtggttggagcacagtttggttttatacattttagggagatatgagacgtccatcaatata

SEQ ID NO: 317880 - DNA, 504 bp, Homo sapiens
ggtgttgttccctttgccattcatgtccccatcccctctatccctcagcctctgtaaccactattctactctctgcttttatgagttcaattgtttcagattcaattcatgaatgtgaacatgtagtatttgactttctgtgccttgctatttcattcagaataatgccctccatgttcatccaaattttacaaatgacaagagttcctcctttttatggctgaatagtactctactgtgtatatgtgccagatttcctttatccattcatctgttgatagacacttcagtcgattttataagttggttattttgaatagtgctgcaatgaacctgggagtgcttataataacccaaattactgaaatacaaatgaaatgcrtgacttgattatcataaatacatacagcctcagagtttgcaggaatattgaagatgaactagatcaacaagatgtctgctgcaaaacttaatgtgcaaaaatgaagcggtcattctgtggat

SEQ ID NO: 317881 - DNA, 504 bp, Homo sapiens
ggtgttgttccctttgccattcatgtccccatcccctctatccctcagcctctgtaaccactattctactctctgcttttatgagttcaattgtttcagattcaattcatgaatgtgaacatgtagtatttgactttctgtgccttgctatttcattcagaataatgccctccatgttcatccaaattttacaaatgacaagagttcctcctttttatggctgaatagtactctactgtgtatatgtgccagatttcctttatccattcatctgttgatagacacttcagtcgattttataagttggttattttgaatagtgctgcaatgaacctgggagtgcttataataacccaaattactgaaatacaaatgaaatgcatgacttgattwtcataaatacatacagcctcagagtttgcaggaatattgaagatgaactagatcaacaagatgtctgctgcaaaacttaatgtgcaaaaatgaagcggtcattctgtggat

SEQ ID NO: 317882 - DNA, 547 bp, Homo sapiens
caaggaccccagaagcaaatgcaacaaaataaaaatagacaaatgggacctatttttttctgcacagaagaagaaatactagcagagcaaacagacatcctacagaatgggaaaacatagttgcatcctatgcatctgagaaaggactaatatcctgattctatcaggaatttaaacaaatcaacaagaaaaaaactgcattaggaagtaggcaaaggacatgaacagacacttctcaaaagaagccatatgagtggccaaaaagcatgtgaaaaaaagctcaatatcgtcagagagacgaaaatcaaaaccacaatgagrtatcatctcacacaagtcagaatggctattactaaaaaatcaaaaaataacagatgttagcatggttgtggagaaaagggaacacttatacactgtgtgggggaatgcaaattagttcagcccctgtggagattttccaaagaacttaaaacagaattaccattcaacacagtaatcccactactgggtatatacccaaaagaaaataaaacattctaccaagaag

SEQ ID NO: 317883 - DNA, 513 bp, Homo sapiens
ttcaagaagggaagagaagaactgaaggattccaaattgtccactatgtacatactggaagttgaaccaagagtttacatttctgaggttcacatctccatcagtctttttgtctgtacatttcctgrtggtgggattagtggggggtgtggaactcagtagaacgaagagactttgctatcagagttgtaaaatggtgtattaccctgtgagcaattgcacttggaaaggaaccagtaatttatatgagaagtgtttaagattgcctgctcacccagtgatccatgccaggtcagttccagtaatgctagaaaacaaaaggaggtacacatcactgggaaagagacaccttatacgccttaagagcttgtgaagggaagcactaaaatgccattttctcaaatgaactgatcattaccatttaaaatcctgagggctgtgggactggggaggagagaaagaatttttcttttgatttaacagggctctgaagtactggttttaagggggagg

SEQ ID NO: 317884 - DNA, 601 bp, Homo sapiens
ggattacaggcatgagccaccatgctcagcctattcccttagtttttgttagacagtcacagggtgcatatcagcagatgttagataccttaggtgctgatttttgagctattgtcttttatgtttcccacccacccaccttatatrctctgcaaaaccatatttctctcttaccaactggctctctgttagacttctactcataggtgctagaggcaacttgaaggagaaaaaggcaaaagaaggttgtcattctctcctgtttgctttcagctcctctcagcaatacccagcaacatttcttcatcctgacaataaatgtttgctctggtagcaataactaattccactttgcatttgctccaacactttcagaaataacttccccaaccccactaaaaatggaagcatcaattggctgataccccctcttcagaggatagagtcccagccctgtagtgcccctcctcctagatcagagccacccccatcccctcctcctagatcagagacacccacaccacgtagtagcacatccttctcgaaggactgacttacaattttgtgtgaccccttctccaacactcaggttgcaataata

SEQ ID NO: 317885 - DNA, 601 bp, Homo sapiens
ggattacaggcatgagccaccatgctcagcctattcccttagtttttgttagacagtcacagggtgcatatcagcagatgttagataccttaggtgctgatttttgagctattgtcttttatgtttcccacccacccaccttatatactctgcaaaaccatatttctctcttaccaactggctctctgttagactkctactcataggtgctagaggcaacttgaaggagaaaaaggcaaaagaaggttgtcattctctcctgtttgctttcagctcctctcagcaatacccagcaacatttcttcatcctgacaataaatgtttgctctggtagcaataactaattccactttgcatttgctccaacactttcagaaataacttccccaaccccactaaaaatggaagcatcaattggctgataccccctcttcagaggatagagtcccagccctgtagtgcccctcctcctagatcagagccacccccatcccctcctcctagatcagagacacccacaccacgtagtagcacatccttctcgaaggactgacttacaattttgtgtgaccccttctccaacactcaggttgcaataata

SEQ ID NO: 317886 - DNA, 546 bp, Homo sapiens
gttgtgtgtacttttggctgtcttagagaacgtgagaagagggaatggtgacttccgttttggtgtagtttctagaaacrttgctcatttatttccacttgctttgtcagagctaggtcaaccctagaggcactctttcccactcttttttgtaaaaaggaagaaagggcaacggataattagggaacacggactcagacattaaagaaaaagatgagcctactgataatgggaaccttaagggctgtactgtttaagtatctgactcataggagccactcaaataataattaaataaatgttttaagttttcctgggtgagtgaacttttcatgttggcaggagcctcaatcacctatgaatttcctaaggaaaatgtttaggttatccttggatttcctcgaatgcagaaaggatggttgttttcttaattcaaacattgaaaaacaaacaaacaaacaaacaaacaaacaaaaacccacggagaaacttcaccctagtgaatgcaattctgtagacagaaattgttaagaatataggaaaggt

SEQ ID NO: 317887 - DNA, 623 bp, Homo sapiens
catttttataaccagttctgaattggtttgtaggaattggtatctatgacactgtctatacctttccggtgctataaatttttgtctaggacataattatctgactccccaaaattctgtctcataattacatgtacatgtaaaktttttgttgcataatggactgtgtaagtgagcaatgccatatttgcagtggacatttattcacaagaaatagtgacaacttaagtgaaaaattattgtataaaactagaaaattgaataaagcacctagaaaatgcataaaactaggtggtaatcagaatgtcaggacagatgaagaaaaaagcaaaagcatcaactcagaagcccaaaaatggtggtggtggtggtggtggttgttttgcataaattgtctgtgtttaaagttttcagcatcatatgtacaagaagaatgaatgcagatattttcaattttcatctgcaatatcccactttaaaaaaaaaattgaatcagccagagagttaaacttttctatgtgaaactccacaaagaagttgaacaattactgaaagtaaaaacagtgaggtggcataattataaaaacttagagaaggggcatggcaagtacaaattgattata

SEQ ID NO: 317888 - DNA, 623 bp, Homo sapiens
catttttataaccagttctgaattggtttgtaggaattggtatctatgacactgtctatacctttccggtgctataaatttttgtctaggacataattatctgactccccaaaattctgtctcataattacatgtacatgtaaagtttttgttgcataatggactrtgtaagtgagcaatgccatatttgcagtggacatttattcacaagaaatagtgacaacttaagtgaaaaattattgtataaaactagaaaattgaataaagcacctagaaaatgcataaaactaggtggtaatcagaatgtcaggacagatgaagaaaaaagcaaaagcatcaactcagaagcccaaaaatggtggtggtggtggtggtggttgttttgcataaattgtctgtgtttaaagttttcagcatcatatgtacaagaagaatgaatgcagatattttcaattttcatctgcaatatcccactttaaaaaaaaaattgaatcagccagagagttaaacttttctatgtgaaactccacaaagaagttgaacaattactgaaagtaaaaacagtgaggtggcataattataaaaacttagagaaggggcatggcaagtacaaattgattata

SEQ ID NO: 317889 - DNA, 535 bp, Homo sapiens
cacaactgccacagccttacagaacagcctgggggtagtcacaacacaaatgtctctgtttcctcactaggggaatgaagataatcatacgtatctatctggcagaagtgttaggagaattaattaatgtttagaaagggctttaaaaccctggatgaaagttactaggtaagtacaaagtgttattatgatcattttaatagttatgattactgagatattaaatgtatgatatgtattgccctgcaaattctagtctgggtgggcaccgcagkttacaaataaatgagttaaaataaaataactttaatgtttgggtttttattttgttttctttgtgagacagagtctcgctatgttctcaaacttctgggctcaagtgatcctcctgcctcagccttccaagtagctgggattaattttaatacttgttcttaattttgtttatagcaatgtgtgagtgggcaggacacttaactgtttctgtatttctattccttaacatttcattttagcttttaaaaacattcctaaa

SEQ ID NO: 317890 - DNA, 359 bp, Homo sapiens
caaataattgtgccctaacggaatatacatttcttcaaataaagaagaaagctttaggcttctaagtgcagtattagtgatayaaccagagtatataagagactcatactagcctcctaattgtgacgttttataagggtaactttgcataaactgctttggatctgctattatgttgctcttttaatgcatttttttgaaaaattaataagctatttttaatcattgcccatttttgaccaaagaataaaaaataaagcttattttcaaaagaacttcttatcatgtgaccaactttttcaaagcgtagatacccttgtctagtcttatctttagtcatggtcaattttttcttatga

SEQ ID NO: 317891 - DNA, 604 bp, Homo sapiens
atagaaaaatgccaaaatctcttctcattagtaattaaacataagtggatgaaactttccaatcaaaagatgaagattgagaaaattgatttttaaaaatgtgattcaactatatgctatctatacaaatagtttgaaagtgaaaggatggtaaatgctactagtaacaaaagaaagtatgtacagccattttgtctgatagtagtatagtcatgcatacttttgtttagttactatagtaaatatgctgctatcaracaaaattgactttaaacaaaaaagttcatacaaagaatgacattatatattaacataagatttaatacaagaaaatataataaacatttatacatttaataaaagtccatcaaaatatataaagcacaattaattaaatttaagatagaaatagaccattctacattatactctcaataaaggattgaacaaccagaaagaaaataagtgctatagactgaatgtttgtgtgaccaaaatttatgttcaagtgcaatctttattgtgatggtatttggaattgggcctttggaagataatgaaattaatgctcttttaaccagaggccagatagcttgctgtttct

SEQ ID NO: 317892 - DNA, 623 bp, Homo sapiens
ctctcaaagcactggaattacagtttcttcctttcttcctctcctcctaaggcctcctccaccaccttggaataaaccgcctagcttggcaatgtaacttcaaatgataacactgcttgtatgaaaaatttggtgtgttcagaattccttacaactgagttaaaaataatctatgaaacacaatctattttactagaaattggctgcacatgaatttaaggacatctaaatttccagagcatttatcactcataaggaagctggtaggaaaaataactggaaatgagatgagagctgtagtgagtattgggcatrggaagggagaagacttctcccccataactgagcttgaaataacaactttttagggtccattttacttcccctgcatgttaaaaattaataggcatcattttcagagcagttttagatataaagaaataattgataagaaagtacagagagctcttatctatccaccctcagtttccctgtcagtaatatcttgaattactttgttataattggtaaaggcatactaacacattaactaaagtacataatttacattagggttccctttttgtgctgtacagctctatatattttaacaaatgcataat

SEQ ID NO: 317893 - DNA, 589 bp, Homo sapiens
tccctttctgcttggtacacttagaataatttatttttcaggcactgaaacgtctgactaatacatccattttctccatatagcctccttgagttttcagataaatatcattgggagctacaggacaatgtagtcacttagagtccttcacatgccttctacgagatgtcgccctccccagatgtctgcaccatcatggaggagcaattgtcaaatcacaaaaattaaatatgcaggattatacttaacagtgttgtctatcctaatctaaggcacaatctctattaaaccattctcattggtatgaacacttgatctagttctctaatcgcacaaacacacacaacacacactctcacacaccatctttgcttcaatggctctgctacctgtgctcccgtttctctgttctgcactgaaaaatttaytgaaatattcgtctgtactcatggtttcacagctcccctggactgttctcttcagttgatacaagtctgattttatcttcagcaccgcaaaactagttttgtcaagatcaccaacaacctccatgttgccagtcagacaacatttatctgtcctatctaat

SEQ ID NO: 317894 - DNA, 589 bp, Homo sapiens
tccctttctgcttggtacacttagaataatttatttttcaggcactgaaacgtctgactaatacatccattttctccatatagcctccttgagttttcagataaatatcattgggagctacaggacaatgtagtcacttagagtccttcacatgccttctacgagatgtcgccctccccagatgtctgcaccatcatggaggagcaattgtcaaatcacaaaaattaaatatgcaggattatacttaacagtgttgtctatcctaatctaaggcacaatctctattaaaccattctcattggtatgaacacttgatctagttctctaatcgcacaaacacacacaacacacactctcacacaccatctttgcttcaatggctctgctacctgtgctcccgtttctctgttctgcactgaaaaatttactgaaatattcgtctgtactcatggtttcrcagctcccctggactgttctcttcagttgatacaagtctgattttatcttcagcaccgcaaaactagttttgtcaagatcaccaacaacctccatgttgccagtcagacaacatttatctgtcctatctaat

SEQ ID NO: 317895 - DNA, 563 bp, Homo sapiens
cagcaccgcaaaactagttttgtcaagatcaccaacaacctccatgttgccagtcagacaacatttatctgtcctatctaattcaacctctttaagggtgggacatggttgaccatttcttcctttccgatacaactgaattctgagacactgtatcctcttggctttcctcctccctgtctggttactctctttcagtctgatttgttggtttttttgtttctgtggcttcttctacctgttttgagcctcaaagttcagttcctargtcgtcttctattatcttctaagatttctttatctttcagaaatttgctattgtactatatgaatataactttcaagtttatatatttcataccctctcccctgagctgctaaagatttgcatatccaactgctgctttgatgtttccatatagatgtcaataaaatattcaaactgaaaataagccaaaaacaaattatttactaccccagttaaaaactgcttctctacttgtctttcccactccggtaaacagcactattgtgcacctacttgttcaactctcaacccccaa

SEQ ID NO: 317896 - DNA, 475 bp, Homo sapiens
attatgttcctgtgacaggattatattccaaggaccaacttgcctaggtctggtcacccacccggtragaaggagagcttacactttggcaagatctcacaagagtgtgtccagtgagagagaaataattcaaaaggaaattagaacgttttcacctcccctgaaaattgagtgattggttgctagtttgctttttaaaaaaatttaaaaagcccatggcagctcatataaatttttcctattatgaaaggttctttagtcttttatatgttacaaaactatagatttactaaaggctccacatcatcttcctttccttcccctgtgtcccttctgctgcacttagagcaacacactccatcttgggggtattcctaggttatagagaggtgcatattaacaccttaaaggtacacattggagacaccgtgtttcaagcttctaccaatcgatatccaggttgcctttatttaga

SEQ ID NO: 317897 - DNA, 583 bp, Homo sapiens
tgtccagtgagagagaaataattcaaaaggaaattagaacgttttcacctcccctgaaaattgagtgattggttgctagtttgctttttaaaaaaatttaaaaagcccatggcagctcatataaatttttcctattatgaaaggttctttagtcttttatatgttacaaaactatagatttactaaaggctccacatcatcttcctttccttcccctgtgtcccttctgctgcacttagagcaacacactccatcttgggggtattcctagsttatagagaggtgcatattaacaccttaaaggtacacattggagacaccgtgtttcaagcttctaccaatcgatatccaggttgcctttatttagaaaataaagcaccgtctttggagttaggcaacaataagaacagcaattatcaccaatgcttaaacaaagcacttattaatgccgaatattattctaagagtgttccgtattctaactcatttaattttcacagccctatggaaaaggtacagatgaagaaatgaagactaaaaacacttgcttcaaactaaagacctgctacattaccaaataatt

SEQ ID NO: 317898 - DNA, 605 bp, Homo sapiens
ctgcaactccaactgtgaaaggaatggcgaaaagcaggaaacaaagccagagacaggaagggcattaccaaattcttatatagcgtgctcatcrtgttttctgtaatacattctttatagctttactctccactgtcaggaaaaaaatgatgaaaacctattgtcttacgagcaagacaaagaaaccatattttttttttattccctcaatacctctgacattgtcttaagagtaaaagcgacagtaaggttcagaaaacaaaataacttgcaccgtggccatttttccacaggcagaatgtagaatggaatcattaggaagtaatctgtaaagttaaagtgttttaaagaacaagaaatttgagctcaaagagatgaaatacctgctttgctcaaatcactaagtgaattagggatggaatgtgaaagaaatcccaggtctccagactctgatttatgttctcaacattataccacacttcctctaaatatcataataaatactttacatatatactcaaatgtgtgaatatagaacatatatatatatatatgtaattatagacttaaaatataaaccaacatatagttgattgactaaatcc

SEQ ID NO: 317899 - DNA, 503 bp, Homo sapiens
tgtgactttggtaagatggaagcaaaagcaacttttgtctcctgtaaactctgcttaaggtcttcagaaacatttttttctcttcttcttttttgtttaatttttattttatttatttatttattttactttaagttctgggatacatgtgtagaacatgcaggcttgttacataggtatacatgtgccatggtggtttgctgtacctatcaacccgtcatctaggttttaarccccgcatgcattaggtatttttctctttttaatccaattttctgttcattactctctgatgtttactttgttgcttccttaaaagttaaattgcaagatgcttttttctgacattgctttccaccaataaaatttaattcccctcctttgccttccaaaataccccatccatatttgtatcttagtgtccataacactgtattgcccttaatcatagtattaagctaagctcctcctgaaattgtggtgaagtaacacatggtattata

SEQ ID NO: 317900 - DNA, 585 bp, Homo sapiens
aatgatacagtattcaagttgaaagtttcacaaagtaaagggacaaaggtgacatycatttcagctttttctctttccttgaatttttgatttatatgactcaaaaggttaatcttagtaaagcacagggaaaagatagttatccaagtgacatttgcagacattctacaggtatgatatattaaagggtgcatttaggagtccaaggaatattggaaaataccacacatagacagttttaacattgctgccttcttgtcaaaagtacaaaatgatcaacatggaaaggcatcatttacagtcagaatttgactggaagggattgtaaaaaacaataatttcaattctgttatttttaacccaaagttattgggcagcaattccgtaactggtaacaattttccaaattataattaagtacacgtgaatgaaagaaatccaatggggtagcgggggaaaaggttgattaagatgttgtcttcaaggaacctaaagccttgtgaggcagacatatttaaacatgtaaatagtgcaaggcagagtaaagtaattgccatttagaagttcaaagtgctttgagagccc

SEQ ID NO: 317901 - DNA, 658 bp, Homo sapiens
cagttttcagtttatattagactatttgggtggggaatggaaaggtattgtttttaaagttatattccctatcctgtggtatttcagatggtttatgtattttagttatctttgctttccctggctctaagcatgatgctggctatatgacatgttaattaggttgcattgtacacatcagaaaatccaaatagtgttagctgatacaacttagtgttaaatttttattatgtatactaaggttttttgttttgttttgttttattctactaagattggtgcttgtgtctattcatgagttctggcctttacaaattcatccaagaagcaagaaagagggggtggcagggaggacaatgggcccccttccayataagtctagacccctataaagaggtcctcagatacatcagccagtggcttccattcatatctcattggccacccctagcttcatgagagaaggaaaaaatataggtatgtgtatatatacacaaatgtacacatatctatataatatatagatctacacatatatatttattaaattgggtacttgctaatcttaataaaattgtggatttgttcttaaagtagaagcaagcatatataccgggcagggaattaactatctttgtcatagtgattataggagata

SEQ ID NO: 317902 - DNA, 618 bp, Homo sapiens
ctgcatttgtgggttccttgatgttgcagtcacatatgactgttccccagcaactgatgtctggttcaataggaatcctttgacctctcatcaggagtaaatctctcaatccacctgaaatggaagctctaagtcttcttactcccaaatgtctctaagtattgtctcttcctttctacctctactgccttgtataagtgtattagtctgttctcacattgatatgaagaactatctgatactgggtartttataaagaaagaaggtttaattggctgacagttccataaactgtacaggaagcttggctggggaggactcaggaaacttacaatcatggtggatggcgaatggggaagcagacatgtcttacatgggtggagcaggaggaagagagcgaagggggaggtgctataaacttttaaacaaccagatctcttgagaactcactcaccgcacaagaatagcaagggggaagcccactcccatgatctaatcacttcccaataggcccctcttccaacactgggaattacaatttgacatgagatttgggtagggatacaaatccaaaccatatcaataggtctattcacctgttgtctagagactgtgaca

SEQ ID NO: 317903 - DNA, 485 bp, Homo sapiens
gtgtgcgaggctgcatttgtgggttccttgatgttgcagtcacatatgactgttccccagcaactgatgtctggttcaataggaatcctttgacctctcatcaggagtaaatctctcaatccacctgaaatggaagctctaagtcttcttactcccaaatgtctctaagtattgtctcttcctttctacctctactgccttgtataagtgtattagtctgttctcacattgatatgaagaactatctgatactgggtaatttataaagaaagaaggtttaattggctgacagttccataaactgtacaggaagcttggctggggaggactcaggaaacttacaatcatggtggatggcgaatggggaagcmgacatgtcttacatgggtggagcaggaggaagagagcgaagggggaggtgctataaacttttaaacaaccagatctcttgagaactcactcaccgcacaagaatagcaaggggg

SEQ ID NO: 317904 - DNA, 532 bp, Homo sapiens
  misc_feature (1)...(532): n = A,T,C or G
ncccagtcaagtgtgtccagacgtccaacctacagaactgtgagataataaatagatacttattttaaactactcaatttttggtaatttgttatgtggagctataaagttaatacaatgtcttaaattttttatgtatgtgtttgtgtgtgtgtgtgagagagagagagagagagagaaagagacagagagagaatttctcataggctgactctaggtcagtggtactctatttttcaatgctatgtcagcctgaaataattgaaaggaccagaatccaggtttgaagagtttattcatgcaaaaagctgggaaagaccatccggaaaatatgaactccagagaaatgggatcagtactcagatgttaaaagttaaggtsttgcttatataggcagaaaataaatcaatttaacagtattataacattttttgtacaaggctagtttaggagtcacaacaatttaataaattatggttcgttttcttatccataaaggttatttttatttcctttccaatttaagagtata

SEQ ID NO: 317905 - DNA, 608 bp, Homo sapiens
ttgcatattagcccccaacccaaacctcatgttgaaatttgatcctcactgttagaagtgtggcctaattgggggagatgtttgactcaagggggttagatccctcctgaaaagcttggtgttgtccttgtggtaatgagggagttctccctctgctagttcccttaagagctatttgttaaaacagaacctggcatctccactctctctcttgcttcctctctcactgcgtcacctctgcacacactagctcctttttcccttccaccatgagtggaagcatcctgaagccctcaccataagcagatgctggtgctgtgcytcttttacagcctgtgggagggtgagccaaattaacttttctttatacattacccagcctcaggtatctcttcatagtaacactaaacagactaagacacggaattacaaattttctccacatttatctgaattatagctatgctcttagaaacacactctagtggcttgcttttaagatcatgggcatatgtgacaatgagcagaagactgaatgtaaagagcaaatagaaggtcccccacttatgatcctgggtcatgtgcaaaggaagtcacatgttagtcct

SEQ ID NO: 317906 - DNA, 590 bp, Homo sapiens
gaatgtaaagagcaaatagaaggtcccccacttatgatcctgggtcatgtgcaaaggaagtcacatgttagtcctcctccaatgtgtgagttcttttccacctaggttaaatatttagtccattgaggagtgggtgttggagggctggataggtgcacatgagagctcatttctgaatcttaattcctcattaaatccatggaagaaggacaactctgttcaacttcctacttcccatttgagagcaagcacctcatctttgcactcaacgtgtagttgaaagaatgacatcaatggaaaaaygttttaagttacagaaataaaaagaaccacaatctattttacaagagaataatagagcaggatgtaggggagatccgtggttttggagtcaagtaatttttgttgtaatttcaattttctaatctatcaatggatataatagcaataatactcatatcacaacactgagatagtagataaaaacaatgtcttagatatattaattgcttagtaaaaaggtatatgattattcaagatcttctactccttttaaacaatttacgtgattcttttagttaactgaagaa

SEQ ID NO: 317907 - DNA, 615 bp, Homo sapiens
ctttacaactgtctgcttatgagatttagttcacattccctttaagctcaaaatattttaaagttccagcagcttaaattttgaattacttattttcacagctgacatattagctacaacaaagcaaacaacataaacagtattaggtccctgtttttgaattggctttgaagtttacttacatcatctaatacctctattgtagagcaaatttakgtttcatggggtccagagattacacagttttaggattctcttatgaaaaaaaaatacatgcttaaaatataaaactaagtgtaaaaatgaatagttaggattaggaatgatcaattttgaaattacagtttttagaaaactgacaaatgatatacatatgaaaaaattaaaagagtaacattctaaaataaaatagctgccttatagatctgtgtgatagttttcctggttcttgcttgcataaagttgaatgattttgcactacttttagtatagaagatagaaaaataattcaggcttatcacagagttgataaacatttattttttattgtcaataggaaagctttattttacttcataattcattatttgtaatattatatacatttttaggatt

SEQ ID NO: 317908 - DNA, 615 bp, Homo sapiens
ctttacaactgtctgcttatgagatttagttcacattccctttaagctcaaaatattttaaagttccagcagcttaaattttgaattacttattttcacagctgacatattagctacaacaaagcaaacaacataaacagtattaggtccctgtttttgaattggctttgaagtttacttacatcatctaatacctctattgtagagcaaatttaggtttcatggggtccagagattacacagttttaggattctcttatgaaaaaaaaatacatgcttaaaatataaaactaagtgtaaaaatgaatagttaggattaggaatgatcaattttgaaattacagtttttagaaaactgacaaatgatatacatatgaaaaaattaaaagagtaacattctaaaataaaatagctgccttatagatctgtgtgatagttttcctggttcttgcttgcataawgttgaatgattttgcactacttttagtatagaagatagaaaaataattcaggcttatcacagagttgataaacatttattttttattgtcaataggaaagctttattttacttcataattcattatttgtaatattatatacatttttaggatt

SEQ ID NO: 317909 - DNA, 615 bp, Homo sapiens
ctttacaactgtctgcttatgagatttagttcacattccctttaagctcaaaatattttaaagttccagcagcttaaattttgaattacttattttcacagctgacatattagctacaacaaagcaaacaacataaacagtattaggtccctgtttttgaattggctttgaagtttacttacatcatctaatacctctattgtagagcaaatttaggtttcatggggtccagagattacacagttttaggattctcttatgaaaaaaaaatacatgcttaaaatataaaactaagtgtaaaaatgaatagttaggattaggaatgatcaattttgaaattacagtttttagaaaactgacaaatgatatacatatgaaaaaattaaaagagtaacattctaaaataaaatagctgccttatagatctgtgtgatagttttcctggttcttgcttgcataaagttgaatgattttgcactayttttagtatagaagatagaaaaataattcaggcttatcacagagttgataaacatttattttttattgtcaataggaaagctttattttacttcataattcattatttgtaatattatatacatttttaggatt

SEQ ID NO: 317910 - DNA, 603 bp, Homo sapiens
ttctctgctgaactgaacatgttcactccttgggaaatrttactaaagacatcatgttactgtcatttttgaaagcataaataccacttagaaacaatatcagctcatgcaaattacccaaatggttcatttgtaaggttacatcagggaaaccgcattgtctccaaagggtcagggaccatcttacagttaacatttttctggttttttagaaggtctgacagcctcacgttagaaagagtgacaacacaaggctaataccttcacttttctcaaggtctttgtcatctgctgtaatttacaaagctcttttgttgaaaggacctacacctattttatgaaaggaaacctgactagtgtttgatcataattttaacctgttttcttgtgtaggaggtgctattttaggcttattagtaaaccaagctctcctaaatccttctcctaccttcaggtcgtacagatccatagacccaacagagtggactaaatatgttttgtaccgttgttcatccaaggatttggattcttttcattcctcttgtggttatctaaatgacagctaactaaaaacaataaagtagcaacgttgaaagagcagtt

SEQ ID NO: 317911 - DNA, 598 bp, Homo sapiens
aggaagaagtagagaagaatggtaccagacctatctgttccttgcaaaagcagcaaatgcttccctcagtatttcttggcaaattattatatcttaagaagcagagtatgtctgacttactcctagcttcaaccaacagtgggaagatgaatatttaattagatacgtagctaatctgagcaaaatctgagttatatttacaaagaacatgggaagaatgattgggtaagcagctagcagtgcctgccactgtgcaatcctcatacttggtggaagaggggacatttctgattaaaggtgcagaarctttgtaacataataagcataattatatttccggtgagcttggaaccctgagttgtttgtctacgtgttttcagactgagaagcaaagaacacagtcaagtaactgaagatagaggcatttttgaattggttaaaggaatggagttagaaattagttttaaataatgattcccttgaaaaccatttctgttgtaattgatgagaaagtaaatacatgtacctttgagagttgcatccttaagtgaaaatatcctattgttcctagttagtttttgcaagcaaaataaatatc

SEQ ID NO: 317912 - DNA, 598 bp, Homo sapiens
aggaagaagtagagaagaatggtaccagacctatctgttccttgcaaaagcagcaaatgcttccctcagtatttcttggcaaattattatatcttaagaagcagagtatgtctgacttactcctagcttcaaccaacagtgggaagatgaatatttaattagatacgtagctaatctgagcaaaatctgagttatatttacaaagaacatgggaagaatgattgggtaagcagctagcagtgcctgccactgtgcaatcctcatacttggtggaagaggggacatttctgattaaaggtgcagaagctttgtaacataataagcataattatatttccrgtgagcttggaaccctgagttgtttgtctacgtgttttcagactgagaagcaaagaacacagtcaagtaactgaagatagaggcatttttgaattggttaaaggaatggagttagaaattagttttaaataatgattcccttgaaaaccatttctgttgtaattgatgagaaagtaaatacatgtacctttgagagttgcatccttaagtgaaaatatcctattgttcctagttagtttttgcaagcaaaataaatatc

SEQ ID NO: 317913 - DNA, 598 bp, Homo sapiens
aggaagaagtagagaagaatggtaccagacctatctgttccttgcaaaagcagcaaatgcttccctcagtatttcttggcaaattattatatcttaagaagcagagtatgtctgacttactcctagcttcaaccaacagtgggaagatgaatatttaattagatacgtagctaatctgagcaaaatctgagttatatttacaaagaacatgggaagaatgattgggtaagcagctagcagtgcctgccactgtgcaatcctcatacttggtggaagaggggacatttctgattaaaggtgcagaagctttgtaacataataagcataattatatttccggtgagcttggaaccctgagttgtttgtctaygtgttttcagactgagaagcaaagaacacagtcaagtaactgaagatagaggcatttttgaattggttaaaggaatggagttagaaattagttttaaataatgattcccttgaaaaccatttctgttgtaattgatgagaaagtaaatacatgtacctttgagagttgcatccttaagtgaaaatatcctattgttcctagttagtttttgcaagcaaaataaatatc

SEQ ID NO: 317914 - DNA, 684 bp, Homo sapiens
attagaacatttacaattgtacatgcagtttgcattatatttaatggaacaatgataacttagatacttaattacatagttttacccatgtagctcctttagtaaaagtatgggggtaaagaaatgaatgaaaaccatctgaatttattcaaaagaacatgttggaacatgaatggatgtgacaggaataaatatatccagggttgttttgtatgtatacttttgatcataggtaattaacaattttagtagatgtactaactattaaattgccagtaytgagaatccactaggtgccatgtattgttttaagaactctgcatgcatttactcacataatccctgcaaaaatccagtgagacaagtactgttattctagtcatttcacacaaaatagagtgaggcccagataactgaatgccttctccaatgtcaggtggctatgaagaggaagagtcaggctttgcacacagtctggcttcaacatctacattctgaactgctctgatatcctcctactgaaaagaaaatgtaaatgaaaaattaaaaaaaatcaactggctgtaggataactgctttaagcacatgtccacataatagtcataaattatttctattaagttgttgtattcttatttttgagatggagtcttgctctttcaccaggctggagtgcagtggtgc

SEQ ID NO: 317915 - DNA, 615 bp, Homo sapiens
catcttggggaggcaagagaacatgaggaggtgcctcatgaatgtaaataatgcaaaaatacattgatttataagaaattcagaagttagagattagaggtcttgcctaaatttatgctactgttcccaaaaaagtgtcttaaaagcaccttttattttgacactgatctgtattaacaatgctttgaacacaggagttaagaagatgaagctgtgatgtacatcatagtgcacgttaagaatgggtcaaaagaagatgtgattratgtcatcctcctcttcaactcacagtataatttttaacttcccatagtcgaaaatttaatctggctttcctaaattcaacaggttttactttgacaagctcccaagtgatattttaagtctaaataatcagctcatatgaagagtcacatgtgttttacatagaatttatgacagtacttttactgttgagtttgaaattaaaaaacagaaaacactaatgtacccttcatttcctaggtttattttgcatacatttaaacaagttttctactgtaatgaacttatcaatctctaataacgcaatgacttttacttacatgtactttttcataactaaaaaatcgtgat

SEQ ID NO: 317916 - DNA, 615 bp, Homo sapiens
catcttggggaggcaagagaacatgaggaggtgcctcatgaatgtaaataatgcaaaaatacattgatttataagaaattcagaagttagagattagaggtcttgcctaaatttatgctactgttcccaaaaaagtgtcttaaaagcaccttttattttgacactgatctgtattaacaatgctttgaacacaggagttaagaagatgaagctgtgatgtacatcatagtgcacgttaagaatgggtcaaaagaagatgtgattgatgtcatcctcctcttcaactcacagtataatttttaacttcccatagtcraaaatttaatctggctttcctaaattcaacaggttttactttgacaagctcccaagtgatattttaagtctaaataatcagctcatatgaagagtcacatgtgttttacatagaatttatgacagtacttttactgttgagtttgaaattaaaaaacagaaaacactaatgtacccttcatttcctaggtttattttgcatacatttaaacaagttttctactgtaatgaacttatcaatctctaataacgcaatgacttttacttacatgtactttttcataactaaaaaatcgtgat

SEQ ID NO: 317917 - DNA, 615 bp, Homo sapiens
catcttggggaggcaagagaacatgaggaggtgcctcatgaatgtaaataatgcaaaaatacattgatttataagaaattcagaagttagagattagaggtcttgcctaaatttatgctactgttcccaaaaaagtgtcttaaaagcaccttttattttgacactgatctgtattaacaatgctttgaacacaggagttaagaagatgaagctgtgatgtacatcatagtgcacgttaagaatgggtcaaaagaagatgtgattgatgtcatcctcctcttcaactcacagtataatttttaacttcccatagtcgaaaatttaatctggctttcctaaattcaacaggttttactttgacaagctcccaagtgatattttaagtctaaataatcagctcatatgaagagtcacatgtgttttacatagratttatgacagtacttttactgttgagtttgaaattaaaaaacagaaaacactaatgtacccttcatttcctaggtttattttgcatacatttaaacaagttttctactgtaatgaacttatcaatctctaataacgcaatgacttttacttacatgtactttttcataactaaaaaatcgtgat

SEQ ID NO: 317918 - DNA, 615 bp, Homo sapiens
catcttggggaggcaagagaacatgaggaggtgcctcatgaatgtaaataatgcaaaaatacattgatttataagaaattcagaagttagagattagaggtcttgcctaaatttatgctactgttcccaaaaaagtgtcttaaaagcaccttttattttgacactgatctgtattaacaatgctttgaacacaggagttaagaagatgaagctgtgatgtacatcatagtgcacgttaagaatgggtcaaaagaagatgtgattgatgtcatcctcctcttcaactcacagtataatttttaacttcccatagtcgaaaatttaatctggctttcctaaattcaacaggttttactttgacaagctcccaagtgatattttaagtctaaataatcagctcatatgaagagtcacatgtgttttacatagaatttatgacagtacttttactgttgagtttgaaattaaaaaacagaaaacactaatgtacccttcatttcctaggtttattttgcatacatttaaacaagttttctactgtaatgaacttatcaatctctaataacgcaatgamttttacttacatgtactttttcataactaaaaaatcgtgat

SEQ ID NO: 317919 - DNA, 513 bp, Homo sapiens
agttgtcagtataaaaaatggattgaaatccaactaatctactttagatagaggagaggtgaccccctccacatgccccttagagagaaactggactttatcctgtaagccagcagtccccaacttttttggcactagggaccagtttcgtgaaagacaatttttgcacagacagagcagggcggggatggtttggggatgaaactgttccatctcagatcatcaggcattagattcttataaggagaatgcagcctagatccctcgcatgtgcagctyacaacagggttcacactcctgtgagaatctaatgccacccagatctgacaggaggtggagctcaggcagtaatgcctgctcaccagtcgctcacctctggctgtgcagccggttcctaacaggccatggactggtaccagtccacagccccaaggttggggacccctgctgtaggtaggcaatgggaggctactgaaatattatgggagagaaacgattgaagtggattgagct

SEQ ID NO: 317920 - DNA, 346 bp, Homo sapiens
gagagtcttgtggcaacccatagtttaggcaccttttagccattattacattattttctaattccttatggccagtcattttagaactacaggctcaaagaaaaggtccccttgttttgsaagtgaagatttgtttcacaggaatgtgtgagtcagctgtctgatagagtgtgcaggtttgagggggaggtatgtgggggtgagatttaaagcatctaagatccctcccaatgttgacacttaattatctggaagaggataatgacttaaaattccagaaaagaatgattatgacaggaaaacataagtagtaacaatatattgaaccctttatatgaaagaggta

SEQ ID NO: 317921 - DNA, 510 bp, Homo sapiens
aaaatcccattttaattcaacaattgaagacgtgtcccgagattttacttttctcacaatctcccaacagtgccaacgctgctgaacgaggtgctttaamtagcaaggaaccagggaactttattgactacagatttagtggaccctattccagacctagtaaatcagaaactctggggaggaaacccaggggaataaatgtttaactcactctctaagagattctaaggcatgtaaaagcttgataaggccgtgagagaggcttcagttggttctaacattatttgacagtgcaattcactggagacacagtctgatcgaattcctgattcatcatcttgactccagggtaaaatgcttctgatatgctaagaaaccctcatccttttctgtaacaaaggtaatgagttaattttccaaatagggtaagtagataatccttctcaatttaccaacataactcacccaatattaagaagcattagaaaaggcatccattttgccagtgca

SEQ ID NO: 317922 - DNA, 510 bp, Homo sapiens
aaaatcccattttaattcaacaattgaagacgtgtcccgagattttacttttctcacaatctcccaacagtgccaacgctgctgaacgaggtgctttaaatagcaaggaaccagggaactttattgactacagatttagtggaccctattccagacctagtaaatcagaaactctggggaggaaacccaggggaataaatgtttaactcactctcyaagagattctaaggcatgtaaaagcttgataaggccgtgagagaggcttcagttggttctaacattatttgacagtgcaattcactggagacacagtctgatcgaattcctgattcatcatcttgactccagggtaaaatgcttctgatatgctaagaaaccctcatccttttctgtaacaaaggtaatgagttaattttccaaatagggtaagtagataatccttctcaatttaccaacataactcacccaatattaagaagcattagaaaaggcatccattttgccagtgca

SEQ ID NO: 317923 - DNA, 510 bp, Homo sapiens
aaaatcccattttaattcaacaattgaagacgtgtcccgagattttacttttctcacaatctcccaacagtgccaacgctgctgaacgaggtgctttaaatagcaaggaaccagggaactttattgactacagatttagtggaccctattccagacctagtaaatcagaaactctggggaggaaacccaggggaataaatgtttaactcactctctaagagattctaaggcatgtaaaagcttgakaaggccgtgagagaggcttcagttggttctaacattatttgacagtgcaattcactggagacacagtctgatcgaattcctgattcatcatcttgactccagggtaaaatgcttctgatatgctaagaaaccctcatccttttctgtaacaaaggtaatgagttaattttccaaatagggtaagtagataatccttctcaatttaccaacataactcacccaatattaagaagcattagaaaaggcatccattttgccagtgca

SEQ ID NO: 317924 - DNA, 637 bp, Homo sapiens
tgcaaacgcaaattggatgatatcactcctctggtccaatcttctcatgtctttcagtctcagagtaaaagccacgatcttgcaaaaacctacaaggccttgcaaaatctgccccccgccccccatctcttgtgttttattttctttcctattgctctttcctccattcattctgttccagctctttgcacagttccaagcatcctgcggccttggggcattcacaaaattgcttgctctatcttatcattcccccaatcccttacccatcccatatattcatggtttttctctcacctttaaattttacccaaatgtcatcttctcagtgcaattttatttaattgcagctctccctgttggaccccttcttgctccacatttgcttgtctccattgcacttaccactgcctacttgactcttgtcttagctcagattgccataccgaaataccatagactgcatggcttaaacaacaggaatttatttctcatagttctggatgttgggaagatcatgatatggactgattcagttcacccttatgggctctattcctgrcttacagtcagccttctttttgctacgttctaacatggcagagagagagaatgctctggcctctcttcctcttct

SEQ ID NO: 317925 - DNA, 580 bp, Homo sapiens
gtggtcttttgtgtttggtttctttcacttagtataatattttcaaggttcaacaatgttgtagcatgtattcgtactttattcctttttattgccagtgtttgctagtattttattgagaaattttgtgtctacatttataagagatactgctctctagttttcttttcttgtgctgtttttacctggttttggcataaggataatgctagctcctagaatgggtttggaaatattcctttgtcttctcttttttgaaagagtttgtaaagaattattactaattcttctttaaatgtttaatcgaattcaccagcaaagccatctggaattgggctttaagttgtgggaaatgttttcgtttgaaattaaawcattttacttgtaataagtttattcagattttctatttcactttgaatcaatggtggttgtttctggttgtctttctagaaatttgtcatgtcatctaagctacctaatttgttggcacacaaatgttcacagcattcctatatgatccttttttatttctgtaaggttggtagtgatgtctccactcccatttttgattttatca

SEQ ID NO: 317926 - DNA, 513 bp, Homo sapiens
aatctaagacaagcatctctcattgtcactattaataggaacttagagactgatttttggatcacttgctcttaaactgtattcagatgttgtgaaactggcyggctgacaaatctaatcaaattaactccaccttaaagcaaaaccctgtttcgcttttttgctagcgcacttttttaattattcaagcaaaacagctttcttattcaatttgaaatctgtatttgtgcacaagtttgtctcacattgctcaacatcatctattaactgtttacacacagcagtgattctccaaaactatttttgatcttctaaacacatatttaaaacacatacaaacagaagaaaacactctgaaataaaatacactttattctattatattattatatacactattttatttatatatgttattattagttttctttgagacagggtctcactctgtctcccagggtgggatgaagtggtgcaatcgtgtctcactatagccttaacctcataggctca

SEQ ID NO: 317927 - DNA, 513 bp, Homo sapiens
aatctaagacaagcatctctcattgtcactattaataggaacttagagactgatttttggatcacttgctcttaaactgtattcagatgttgtgaaactggctggctgacaaatctaatcaaattaactccaccttaaagcaaaaccctgtttcgcttttttgctagcgcactttttwaattattcaagcaaaacagctttcttattcaatttgaaatctgtatttgtgcacaagtttgtctcacattgctcaacatcatctattaactgtttacacacagcagtgattctccaaaactatttttgatcttctaaacacatatttaaaacacatacaaacagaagaaaacactctgaaataaaatacactttattctattatattattatatacactattttatttatatatgttattattagttttctttgagacagggtctcactctgtctcccagggtgggatgaagtggtgcaatcgtgtctcactatagccttaacctcataggctca

SEQ ID NO: 317928 - DNA, 513 bp, Homo sapiens
aatctaagacaagcatctctcattgtcactattaataggaacttagagactgatttttggatcacttgctcttaaactgtattcagatgttgtgaaactggctggctgacaaatctaatcaaattaactccaccttaaagcaaaaccctgtttcgcttttttgctagcgcacttttttaattattcaagcaaaacagctttcttattcaatttgaaatctgtatttgtgcacaagtttgtctcacattgctcaacatcatctattaactgtttacacacagcagtgattctccaaaactatttttgaycttctaaacacatatttaaaacacatacaaacagaagaaaacactctgaaataaaatacactttattctattatattattatatacactattttatttatatatgttattattagttttctttgagacagggtctcactctgtctcccagggtgggatgaagtggtgcaatcgtgtctcactatagccttaacctcataggctca

SEQ ID NO: 317929 - DNA, 503 bp, Homo sapiens
tctgttttaacaaggcttgcaggagattgtggtgcatgcttaaatttgagaactaggtttgtataagtcctttaatttgtttggcaagtactctctgtggcttttactatcaaggcaagtttgagaagttctgtttttaggrattgaggaaaaacttttgccctaggcccactgaaaaatgcttccttcctctggagaaagcgatagtaattcagattctcttccctcatttcagctgtggattcattgaaattagggcagtagagtactaattcccagagtcctaataaatttgacttcctacttctgggtggaggaacagaattgggagagttgcagaagctagggaattaagagaataataattagcaaattttatcggaatctttatctctgtatttcagttctagaaattgagtattttatatattttatcatgattatataaatggagctaaatgagtttcctgaaatttacattttatgcacagaaaacaggctct

SEQ ID NO: 317930 - DNA, 584 bp, Homo sapiens
tgttgcctaccttatattctttacagtttttgttcatactctctcctaacatatttttattaggagtttaacaggccaatatattctttctaaaatactgttaaaagacacacaggagaatatatatwtctctacttttatgtaaatcagctttaccattttctaagtgtttacacattagagttgcactttactcccaaaggtacactgagttgtatccagattgatgctaattatcatcttacagatgaaactggggcttagagaagatgtgacagaagtgaaagtggagcccagaccaccgtaccacagctcattccacatggaaatgcctttacctacctatgaactgatactcagagcctggcaacaactttcaaccctccactcaccaacttttccaaataaaagcaagttacgggtcaaaatgttgtcatttgacattaaccattatttaaccaatgtccctataatcaagagacacttagagcatatatttaatgttgatcacccttggcacactgttcaaagaccagttcaggatgatgaaaatcaagttctcattttcaggccttacaaaacta

SEQ ID NO: 317931 - DNA, 584 bp, Homo sapiens
tgttgcctaccttatattctttacagtttttgttcatactctctcctaacatatttttattaggagtttaacaggccaatatattctttctaaaatactgttaaaagacacacaggagaatatatatttctctacttttatgtaaatcagctttaccattttctaagtgtttacacattagagttgcactttactcccaaaggtacactgagttgtatccagattgatgctaattatcatcttacagatgaaactggggcttagagaagatgtgacagaagtgaaagyggagcccagaccaccgtaccacagctcattccacatggaaatgcctttacctacctatgaactgatactcagagcctggcaacaactttcaaccctccactcaccaacttttccaaataaaagcaagttacgggtcaaaatgttgtcatttgacattaaccattatttaaccaatgtccctataatcaagagacacttagagcatatatttaatgttgatcacccttggcacactgttcaaagaccagttcaggatgatgaaaatcaagttctcattttcaggccttacaaaacta

SEQ ID NO: 317932 - DNA, 522 bp, Homo sapiens
aaataaattaattaattaaaataaaaataattataatcaatgctttgttctatgttgcctaccttatattctttacagtttttgttcatactctctcctaacatatttttattaggagtttaacaggccaatatattctttctaaaatactgttaaaagacacacaggagaatatatatttctctacttttatgtaaatcagctttaccattttctaagtgtttacacattagagttgcactttactcccaaaggtacactgagttgtatccagattgatgctaattatcatcttacagatgaaactggggcttagagaagatgtgacagaagtgaaagtggagcccagaccaccgtaccacagctcattccacatggaaatgcctttacctacctatgaactgatactcagagcctggcaacaactttcaacmctccactcaccaacttttccaaataaaagcaagttacgggtcaaaatgttgtcatttgacattaaccattatttaaccaatgtcccta

SEQ ID NO: 317933 - DNA, 584 bp, Homo sapiens
tgttgcctaccttatattctttacagtttttgttcatactctctcctaacatatttttattaggagtttaacaggccaatatattctttctaaaatactgttaaaagacacacaggagaatatatatttctctacttttatgtaaatcagctttaccattttctaagtgtttacacattagagttgcactttactcccaaaggtacactgagttgtatccagattgatgctaattatcatcttacagatgaaactggggcttagagaagatgtgacagaagtgaaagtggagcccagaccaccgtaccacagctcattccacatggaaatgcctttacctacctatgaactgatactcagagcctggcaacaactttcaaccctccactcaccracttttccaaataaaagcaagttacgggtcaaaatgttgtcatttgacattaaccattatttaaccaatgtccctataatcaagagacacttagagcatatatttaatgttgatcacccttggcacactgttcaaagaccagttcaggatgatgaaaatcaagttctcattttcaggccttacaaaacta

SEQ ID NO: 317934 - DNA, 557 bp, Homo sapiens
caatgctgcaggaatcactgtccaaaacagaaaggaaggaaaggggacgcctggagaagacccttccaggaccagagagggggcttaactaaatacatgaaggtggggacgctctgggtcagagaattctgaagggtcatagtggcttgggatctctcatagccctggagtttatcttatccatgtctaacagatgtttggtgcagtttcgtgtgatatgcaaaacaagcagctctaaatggctaraaatgtgcttaatggggttatgtttaaaacaattgaatgtgttaaaaatttgagcttggcactggtgggcttctggactaatggattccagcctactgcgaagaagggaaaaacacacggcaggtccactatacggggccacttgtggctcattgaaataacaaagccttacctcacttttctttgcatgcctatctgtttatgcacacatctcagatgtattagaggtaaacatgaaaaaataatgtgagaaatgtaggaaattacatttataatattagggtgataaaggctaaatctaaaagtcacac

SEQ ID NO: 317935 - DNA, 613 bp, Homo sapiens
aacttcctaacatgatttgcaggaattggtccagattcatttcttttacatcgtctagcctcaatttcttaataaatgggttttatagtattcgctgagaaggaataagtaaaatacctagctaacacagtacctgaaataaataagggactattaaaagtttttttctgtttttccttattaagtatccatacttaccccacaaataaatttctgttagtttaaaatcaacatggctattctccagaaaggtatccttgatcatgataccttcttgtgacttatttaatttgtgttggaaataacagatggaaatggtctaaaatgggataaaataattcatccggtcttcaggctagacaagctattggttctggaccacattttggtgtcatctatatttgactcttttagtctttaaaaatcagtcaacccattaagcaaacaatttgcttttagtccttttagtgatattatttcaaaagggggagattttgaatagcaaacagagcaggaatagcatcgtgttgtatacctgaaatacatacaataaaatttatttaaaaaatgaaaattctaacagtttaagtgrgagagcatatattcatgatat

SEQ ID NO: 317936 - DNA, 665 bp, Homo sapiens
taaagactcccagtgataaaaaattgtctgtattctgagtctaaccagtgacatattttaattagaggacaaacccagaatatctaccctccagtcctttgtatcactaaagcaatttccaaagatggaactgtctgcagaaaagaataacacaattaaatgtattattgatgcatcaggcagaaattagaacacaacacaaatgcataatgatataatttcttagctgtaccactctgaaaaataaagataaaagatgctagtgagctatttatgatgggactacagaataataagattaatgaaaagaactcaggtaatttattttcatcataggttttaaacagtcactgaattacctatgattgcagcaataaaggttttttgaaaagtcattggagaactcaacatgkcaaggccctacttcctattcaattggaagggtattgatttagtgctggaaggagtttttttttttttttttttcaactctatgttcataaactgagtgtttatgtggctgggattctctctttttctttctttcttttactcgatacaaaagtactgagttatcactcattgccaagcacagtgctaggtgctgatgatcaaaaggaactaagttacagtccttgatcctctagacctcactctagctcaca

SEQ ID NO: 317937 - DNA, 665 bp, Homo sapiens
taaagactcccagtgataaaaaattgtctgtattctgagtctaaccagtgacatattttaattagaggacaaacccagaatatctaccctccagtcctttgtatcactaaagcaatttccaaagatggaactgtctgcagaaaagaataacacaattaaatgtattattgatgcatcaggcagaaattagaacacaacacaaatgcataatgatataatttcttagctgtaccactctgaaaaataaagataaaagatgctagtgagctatttatgatgggactacagaataataagattaatgaaaagaactcaggtaatttattttcatcataggttttaaacagtcactgaattacctatgattgcagcaataaaggttttttgaaaagtcattggagaactcaacatggcaaggccctacttcytattcaattggaagggtattgatttagtgctggaaggagtttttttttttttttttttcaactctatgttcataaactgagtgtttatgtggctgggattctctctttttctttctttcttttactcgatacaaaagtactgagttatcactcattgccaagcacagtgctaggtgctgatgatcaaaaggaactaagttacagtccttgatcctctagacctcactctagctcaca

SEQ ID NO: 317938 - DNA, 665 bp, Homo sapiens
taaagactcccagtgataaaaaattgtctgtattctgagtctaaccagtgacatattttaattagaggacaaacccagaatatctaccctccagtcctttgtatcactaaagcaatttccaaagatggaactgtctgcagaaaagaataacacaattaaatgtattattgatgcatcaggcagaaattagaacacaacacaaatgcataatgatataatttcttagctgtaccactctgaaaaataaagataaaagatgctagtgagctatttatgatgggactacagaataataagattaatgaaaagaactcaggtaatttattttcatcataggttttaaacagtcactgaattacctatgattgcagcaataaaggttttttgaaaagtcattggagaactcaacatggcaaggccctacttcctattcaattggaagggtattgatttagtgctggaaggagtttttttttttttttttttcaactctatgttcataaactgagygtttatgtggctgggattctctctttttctttctttcttttactcgatacaaaagtactgagttatcactcattgccaagcacagtgctaggtgctgatgatcaaaaggaactaagttacagtccttgatcctctagacctcactctagctcaca

SEQ ID NO: 317939 - DNA, 665 bp, Homo sapiens
taaagactcccagtgataaaaaattgtctgtattctgagtctaaccagtgacatattttaattagaggacaaacccagaatatctaccctccagtcctttgtatcactaaagcaatttccaaagatggaactgtctgcagaaaagaataacacaattaaatgtattattgatgcatcaggcagaaattagaacacaacacaaatgcataatgatataatttcttagctgtaccactctgaaaaataaagataaaagatgctagtgagctatttatgatgggactacagaataataagattaatgaaaagaactcaggtaatttattttcatcataggttttaaacagtcactgaattacctatgattgcagcaataaaggttttttgaaaagtcattggagaactcaacatggcaaggccctacttcctattcaattggaagggtattgatttagtgctggaaggagtttttttttttttttttttcaactctatgttcataaactgagtgtttatgtggctgggattctcyctttttctttctttcttttactcgatacaaaagtactgagttatcactcattgccaagcacagtgctaggtgctgatgatcaaaaggaactaagttacagtccttgatcctctagacctcactctagctcaca

SEQ ID NO: 317940 - DNA, 615 bp, Homo sapiens
tccagtgtattagaatggaatgtaaagacacaatttgaggagagccttaaaaatgtttgtaggagtttatgtggtacaaatgcatgtaagcatagactggtcatgctttttttctagagaattccgaagatggatgtctgtctagagcttcttgtgatggggagcaggatagagagggaatgcagtagctgaagttccttgcacttgatgcagcttggatgtatgtatttcccattggtctagcggatgtcttaaaagataatcacaacacacctaatggcacttcagctaagagggctatctaccaggcaaagaagccccagtgtttagaggctgtggggtaaattgaattgacaacaggtgcacgagctgttactagaggtcagcccggaaatgtacaacacatgtcagagaagaatgcactacagatggccccatggggactccatttatatcccaagagagagccagcatttggattcctgacctaaagggaaatccaaagacragaaagctataaggtgtgccacataacaaaaaccctattgcctgctgtttctctcataagctcctctcctgcccagattttggaagaatctgaagcagcagagcaag

SEQ ID NO: 317941 - DNA, 574 bp, Homo sapiens
ttccttgcacttgatgcagcttggatgtatgtatttcccattggtctagcggatgtcttaaaagataatcacaacacacctaatggcacttcagctaagagggctatctaccaggcaaagaagccccagtgtttagaggctgtggggtaaattgaattgacaacaggtgcacgagctgttactagaggtcagcccggaaatgtacaacacatgtcagagaagaatgcactacagatggccccatggggactccatttatatcccaagagagagccagcatttggattcctgacctaaagggaaatccaaagacgagaaagctataaggtgtgccacataacaaaaaccctattgcctgctgtttctctcataagctcctctcctgcccagattttggaagaatctgaagcagcagagcaagtgggataaagaarcaaaaggagagaagagtaaagagtggttttctctactccactgtggctctacaagtctggaataggcctgaatggaaactgcaggggagacatttgcattagagaatgaaatgtttattagactgtatttcatggcttca

SEQ ID NO: 317942 - DNA, 560 bp, Homo sapiens
ttagttaaacatacaaaaatggaatgcaactgattcatgaagtattaagttctttatacatggaggtgctcaaataaacattggttatgtaagcatttaacagggctatatgtattcatatgcatctctttgggcaagatgtgtattaactrtttgctaagatttcctcccactctgacaatatttctgtaccctttctccaactagtgaaggctgaagaaccagtttcttatactatgaacatggcaaacacaatggttctcttggtcattcctatgctagttcacccatgacctgacccaatatcagaatggagttgtcctactgcaggtcagctgcagtgagttagaaaatcgtctgggatagaataagcacttaatacatgttagccattattactgttgtggtttttgttgttgttgttgtttgcagggaagagcacatttcccaagctctaactcttcatttactcagctggatctgccaacacaactgaagataagactgtctttctattttgaaaattgacacctgaatgcagaaattaaatggagtgatgt

SEQ ID NO: 317943 - DNA, 594 bp, Homo sapiens
aagtgaacaccatttcactcctggctagcgagaataagactacagcttttgctttttgttataaataatggtcctaatcataccttgtgggaactactactttaaaatgataaggctgagacttgataccttattccaattaaaaaatagcctgagttcagaatagcacacacataagtgatgattacattttttcctttcccttactatggaagaatccaggggttattttagtatcaggagaaccatatttttataaatggacttggaagctaaacatactttctcttcagttaccaacaaattttgacaagtgactaatgcatcaggctccrtcctatcagttttgtttgctctttctcttgttctttgtcaagagtcttcaataaattgattagtatcaaagggaagatcttaaatcttggagcttttctttttggaaccttttaattcagttcctgtcacaccttcctttgatttttaaaaaaatctccccttaactgttctgggatctcactgctgctcccacacgcctaacacccatcccctccacattcacccaaagggagacactgggggaggcaagtgtatgga

SEQ ID NO: 317944 - DNA, 629 bp, Homo sapiens
tggcacttgagtcttgaggtgacctcatggatgacaatattttgaaaggagatgtgagtctagatgtccttttctcaaacggagaagcatgtaatgcttaagagaaagaaatctagkgtcagacttgagtttgaatccaggttcaaccacttcgaaccaatatgactttgaccaaaagatgtactctatttgatcttcagttacttcccatataaaatagggaaaataacagctgctgtatagtgttgtttggagggttcgatgtgatataggaaagtgctcaatttctgctatatattgagtactggataaacattgtaattatgataatgatgacaatgataatgatgaaaatgataaaataataactttgactattaggaaaagtgaatctattctataaaccctctgaattaatgttcctaatccattgacatgcttcagactcattttcaaaagccactgatattaaacatgatttattgagttatatatccttctcccatatggatgccacaagttatccagaatgcagttctaggctcctgtcctccctttttagacttattttctacttcttcctatattacatgcttgatgctaaggttaaattaaatagtctacaaaca

SEQ ID NO: 317945 - DNA, 506 bp, Homo sapiens
aatttgtggttgttcaagtaaattaagacagaagtcattcatggattcaacaaatatttattgacttcctgttatgtgcaaggcactacgcatgatgcaaaaaataaaaaaaaaatcactagtcaagcaaacagacagcactctttgctttcatggcccttacaatctgataatggagatagacagaaaatatttcaaaaaataagtgataggaagaaaaagattagatggtatggaagggaataacacgagactgacttagaaggtttccctgaagaatttatatttaaaatgaaacctaaagaaygaataagtgttaagtaagtgaagagtaaaaaggcaaaacattagcaggtgtaaaagccaaaaatgaaaaagaactggatatattcacagaattgaaagaagcataagaaaaaaaagtcatagtggctattgcataagtcagaaagaagctcaatgagacaacacttcaggaaaaatcagatgcaagagcttacagtcac

SEQ ID NO: 317946 - DNA, 574 bp, Homo sapiens
atatgttatttttgatattcttgtgaagcctccaagtagagagakcaaagaaaaagagcaagagctgacacttgatagaacatgctgtgtgttaagtccgttcatgaagtttatgtcatgaattcattgaatccttaccacaaccatatgtgggaattaaagggactattctatcattggccccatttttcacatgaaggcagttgtatacacaataaaatgagagtttatattaaattacatggaacagttcttagtgtgtgttattaatattgagaaaagtgtatctgttctgtttcttgcttagaatattcactgaaaatattttggatgtcactggatgcccctgttggatgctgccctgtggaaggagcactgtgtttcaaagctgggtgtagttgtagatggtaattaaaggcacaaaagagataaagctctgaaggacaaatgaattgaagaagatgcagtgattatgacaaaagtactggatgcccaattctatgcttcaacaagttcacaattctacttctcaagatgataatagagggcaatttaattaaaagataatggaata

SEQ ID NO: 317947 - DNA, 634 bp, Homo sapiens
ttcacatgtgctatttaatcctcatgaaaaattataatgtgccctctccaagagagaagaaattgagaactctaaaagctccacatttaacaggttttggcagagttgcattctttccattggaaggagaataattaattttttatcaggctgtcaaggatgtttagtctttttggtaacagttcacagcactaagacacattggactgtcacatttctatgaactgtagcaacttcaaagatcatttaataattcatcagggaaagtttctagtattgtagtggcaagaagatatgagactggctatagatttggcacaggtagaaattacagttattcagtgtggtaaaatttatcactgtaaactgaaagaaccaaaagaattccaattagatatcttgtcagttttattatttgtatcactgtattccttttgaataatctaaatgggtttatatgttttccaaatataatgatgcccttataaggaagtttttagcatttaaaataaagaagtaaaaagatatttattttctgttttttatattaamtaatgtttttatatgcagcaatttattcacatatatctacgtctatctccatttttctctcttatatatagacacatacaat

SEQ ID NO: 317948 - DNA, 622 bp, Homo sapiens
acatttcctattatcataccttctctttatttcagataagaataaattttctctttcttctggagtttttagttctgccccttgaaacctccagaatggagaccagttaccagaaacgtcaacccagatctgcagagccccattcagcttgatgttctatggtacacatctatgttttcccacattataatgatatgttaatgtatgcatggatatggttaacttgttagagacaataatttaattatagactcagacattccacaacataaacaacttatcatggaaggaagacataagaatggctcaaacattcagatttagtatgagtataattatgaaataatatgccaattaggaaatgcaaataccttttaagaaaaacaaacattttagaatatgttatgtcttctcctagaaagcatacattagtgaatcagagaggaaaaagaatatacaatctttsggttcatggcaagttagtttctgtttctctctcttcgaattacatctatctgtcttggtctcttgctatctctgatttattttctttgctttatatgaactagggctcaaactccctgtgaagagtcaactttttgcttttccttagtttagacta

SEQ ID NO: 317949 - DNA, 552 bp, Homo sapiens
tgttcagcctgaagagtttatgatggcctcctgtattcttcctgtaacgtgttcaaattctagggtaaaataaatttaaaacacaaacccaggatgtgtccttttaagctcttataaaggatatcatgtagataagccaataaaaaccacaaaactcccaatttggtcaaaagggaccttactgtattaatatatgcatmctaattcatgcagtcacttaatttctcatcatcttccttctaaacaccattccatgcacattttatatagcaacattgctgaaaaaaatgcatggatccacaaagatctctcatcttttttttttttttttgagacttgctttgccacccaggctggagtgctatggcatgacctcagctcactgcaacctctgcctcctgagttcaagtgattcttgtgcctcagctcccccaagtatctgggattacaggcatgtgccaccacacccagctaatttttgtatttttagtgaagatggggtttctccatgttggccagactgctctttaactcctgacctcaggtgatcca

SEQ ID NO: 317950 - DNA, 608 bp, Homo sapiens
gaatattaaagtttactttttatatatgtttaatattttgtatcaatgacttgtctaagaatatttcccactgattttaatattacttctgtgttttgaagagaataggaaagagtatttatgagttgcacaactgacagaacaataatagatttgagcatttgaaaagaggtttattttcaaataactcctatggagcaaaccacattacttgagtagaaatatgaaataactagaactgtatttaaaaagtcatcacttggtacaatttcatgtaagttatacaaaagatgagtatctcaagwtttattctgattttacaagtatgtaatttttcaatttttacagggttatatattcatttaacatatttggtagatatcaaaccaaaacctattttttcatgtatcatgcactttcttacacattgtagattctcttgtcatctcttaatctttctttcatgaccttctagattattctggcataatatactatttaatggtgtaatttatcattgtaatgaattgattctctgtgtgattcccactggatatatagtggcaaaaaaccaattggcatgactatgtttctttatatgacagaaa

SEQ ID NO: 317951 - DNA, 608 bp, Homo sapiens
gaatattaaagtttactttttatatatgtttaatattttgtatcaatgacttgtctaagaatatttcccactgattttaatattacttctgtgttttgaagagaataggaaagagtatttatgagttgcacaactgacagaacaataatagatttgagcatttgaaaagaggtttattttcaaataactcctatggagcaaaccacattacttgagtagaaatatgaaataactagaactgtatttaaaaagtcatcacttggtacaatttcatgtaagttatacaaaagatgagtatctcaagttttattctgattttacaagtatgtaatttttcaatttttacagggttatatattcatttaacatatttggtagatatcaaaccaaaacctattttttcatgtatcatgcactttcttacacattgtagattctcttgtcatctcttaatctttctttcatgaccttctagattattctggcataatatactatttaatggtgtaatttatcattgtaatgaattgattctctgtgtgattcccactggatatatagtggcaraaaaccaattggcatgactatgtttctttatatgacagaaa

SEQ ID NO: 317952 - DNA, 561 bp, Homo sapiens
cagtaatgcatttttcattcttttaacatgtggattgaacactaaccatgaaaaaggcatggcgattcttaatatgcaggttattaagaataaaactgtcatctctcacagaatattcacagtgaatatacgacccacagcaattataatgatcaagatttttaaagttaaatataataagaaagakataaaattagcatggtggacatttggaagagaagatgtcttttttcttatggaggagggatgtaaattccaataacgtaacttttctatgtaggtaaaaaggatttcctataagaggaaaaacaaagtaagctttgaagaagatataaaatataataaattctattgttaaataaaccatcctgtgacttttgcttttagatttcaggaaccactgtagctttcataattagaggtttgattatttgttgtacaacttgattgctacattctgtatcctaggtctcatgtgttccacattaaaatgttttataattaaaatacagcatctccatgttgtataattaattataaattccaaccacaaaaggaaca

SEQ ID NO: 317953 - DNA, 574 bp, Homo sapiens
tgtgaaaaacagttcagtgcatgaggttaaggctgatgttaactttctcacacagccggttacctgcattaattatcaagattgtgagtggcactttcatttaaagtgaattgtaataacactttttgagtcactaggcagatacatgaagtgattcagtgtttcaataaagcagtcacaaaaataggtgattttaaaaaatagtaatcataaaagtatactttgagttcatatttcttatctttttttaaactttgttaatagaggaatggtgaagaaatatcaatgaaatttggctaaggtttcttgagtcagcaaaaatcccaatttatgtatctttatgcagttgggggaagaccccaaacttattacaagaaccaacaaattttgctaaacataaaggaaataatacactgattacraaattaaatgtaactttccaaatatttttcaaacttactggttacttccttacctgtcccagagaagatgaggacattttcactccaactggctttaaaattcctaaatgaaaaccattcaatttgtaattgttatcaaataattaccacaa

SEQ ID NO: 317954 - DNA, 578 bp, Homo sapiens
ggaagaccccaaacttattacaagaaccaacaaattttgctaaacataaaggaaataatacactgattacgaaattaaatgtaactttccaaatatttttcaaacttactggttacttccttacctgtcccagagaagatgaggacattttcactccaactggctttaaaattcctaaatgaaaaccattcaatttgtaattgttatcaaataattaccacaatatctgttagaatacagtttgggcatacatttgtgtagccataacaaaaataaataatattcaaggactaaagtcacttttcacatattgaaaatattgggttcaattatkacaaagcttaaggttcttagtaatgtctctaatcaaataaagataatttaggtaatagagactcaatgcttctgttgattacataaaaatacatttcccaagtcattaatatagaggaagtattatgtctcaataggctttatcctctgtctttaattaattgttattattccccaatgtgctgggtgtacttttctgatagactaggaaggggacaaatttaggatcccagtggcaagagtaa

SEQ ID NO: 317955 - DNA, 578 bp, Homo sapiens
ggaagaccccaaacttattacaagaaccaacaaattttgctaaacataaaggaaataatacactgattacgaaattaaatgtaactttccaaatatttttcaaacttactggttacttccttacctgtcccagagaagatgaggacattttcactccaactggctttaaaattcctaaatgaaaaccattcaatttgtaattgttatcaaataattaccacaatatctgttagaatacagtttgggcatacatttgtgtagccataacaaaaataaataatattcaaggactaaagtcacttttcacatattgaaaatattgggttcaattattacaaagcttaaggttcttagtaatgtctctaatcaaataaagataatttaggtaatagagactcaatgcttctgttgattacataaaawtacatttcccaagtcattaatatagaggaagtattatgtctcaataggctttatcctctgtctttaattaattgttattattccccaatgtgctgggtgtacttttctgatagactaggaaggggacaaatttaggatcccagtggcaagagtaa

SEQ ID NO: 317956 - DNA, 578 bp, Homo sapiens
ggaagaccccaaacttattacaagaaccaacaaattttgctaaacataaaggaaataatacactgattacgaaattaaatgtaactttccaaatatttttcaaacttactggttacttccttacctgtcccagagaagatgaggacattttcactccaactggctttaaaattcctaaatgaaaaccattcaatttgtaattgttatcaaataattaccacaatatctgttagaatacagtttgggcatacatttgtgtagccataacaaaaataaataatattcaaggactaaagtcacttttcacatattgaaaatattgggttcaattattacaaagcttaaggttcttagtaatgtctctaatcaaataaagataatttaggtaatagagactcaatgcttctgttgattacataaaaatacatttcccaagtcattaatatagaggaagtattatgtctcaataggctttatcctctgtctttaattaattgttattattcyccaatgtgctgggtgtacttttctgatagactaggaaggggacaaatttaggatcccagtggcaagagtaa

SEQ ID NO: 317957 - DNA, 429 bp, Homo sapiens
ggacaaatttaggatcccagtggcaagagtaaaaactccagagatcatggacagtaatctaagatcaagtctacaatagaagtcaatttctcaagtttaatttccagaaaatgtacaagaattgaattagagggccagattcttacgctattagttaggtgttgcttgatctgttggaggaatacaggcaagaatccaaaagtgaattgcattgcaagacagaaataaggacatagccaaggcaacataataactttaaactcttttattcaactggcaacwctcagagagggtaaattatatttcagatattttgtatccccaggaaattgttctgtaattgtcatgaattatatatttaatatttggtacacggttatcactaattacctgagaaaatgaaaatgacagtctaatgttgagccaaat

SEQ ID NO: 317958 - DNA, 429 bp, Homo sapiens
ggacaaatttaggatcccagtggcaagagtaaaaactccagagatcatggacagtaatctaagatcaagtctacaatagaagtcaatttctcaagtttaatttccagaaaatgtacaagaattgaattagagggccagattcttacgctattagttaggtgttgcttgatctgttggaggaatacaggcaagaatccaaaagtgaattgcattgcaagacagaaataaggacatagccaaggcaacataataactttaaactcttttattcaactggcaacactcagagagggtaaattatatttcagatattttgtatccccaggaaattgttctgtaattgtcatgaattatatatttaatatttggtacayggttatcactaattacctgagaaaatgaaaatgacagtctaatgttgagccaaat

SEQ ID NO: 317959 - DNA, 559 bp, Homo sapiens
gaagactaataacacacagggtgagaaattggtcaaaagagggaaatttttaagtttgggtcacaatagatattattcttgttattctttataagactcaggattccatttctctacttttccttaattcatatttcttgtactttgtagatattttaactttaacatatttacttttttctttcttgttatacaaattctattgtaacaacacacacaaaaataaaartaaacccaatgcaaagccacggtcaacatgtggttcacctagatattttatattaatatgaaatactgatttatgcacacacatgtgagcatatacagacttgcacagatgtacattgagagaagataattttgatttgctacctatttttacacttgactatgtattagagatcatgacattatcaggttttaatgggctcacagttctccattgtatggaggaaatatgactctttaatagagggttagcatcttgtatagttctaatttttgctcctataaacataacttataaagatccctgtaactgtgtcatacttttattatt

SEQ ID NO: 317960 - DNA, 559 bp, Homo sapiens
gaagactaataacacacagggtgagaaattggtcaaaagagggaaatttttaagtttgggtcacaatagatattattcttgttattctttataagactcaggattccatttctctacttttccttaattcatatttcttgtactttgtagatattttaactttaacatatttacttttttctttcttgttatacaaattctattgtaacaacacacacaaaaataaaaataaacccaatgcaaagccacggtcaacatgtggttcacctagatattttatattaatatgaaatactgatttatgcacacacatgtgagcatatacagacttgcacagaygtacattgagagaagataattttgatttgctacctatttttacacttgactatgtattagagatcatgacattatcaggttttaatgggctcacagttctccattgtatggaggaaatatgactctttaatagagggttagcatcttgtatagttctaatttttgctcctataaacataacttataaagatccctgtaactgtgtcatacttttattatt

SEQ ID NO: 317961 - DNA, 580 bp, Homo sapiens
atagagatgtttatatacttttatataatttttaaatcactatcaagacaatcattaaatttttcactctgtaccattcacagaataattgtatttatatttataagctgaaatgttcatgaaatgaattcatcttcagaagagcttattaaattcttaatataaaatgaattcaatttcccagctttgtaataaagtttcccccgatattcctaaataacatcttgttgtgttttcttctcatcgatattgtggtggttgttttctgtgctccatcagattttggaatcaaatagaataagaatttttatataatctgggacccattaagtatcataaattagttaatataaaaggatttgaaaaaaaatctttaaaatgtgtgggactcaaaatttggagtaaggagaatttctttgcattagattttctttttctggagtcatggtsttcaggtttttttacttataagtcacaacttcacattttcccagagaattataatgttgggtgattctctaacttaatttgaaaaaaatagtcttcgcttttaaaataaaataattaacctggcaaaaaa

SEQ ID NO: 317962 - DNA, 381 bp, Homo sapiens
atagatcattttggggagaattggaatattaagaatattctgtttcaaccaaggagcatggtctctatttactttggtcttctttaatatctatgagcaatattgtgtrgtttttaatgtaaatatcttgcacatattttgataaatctggtttcttatatttcaggttttaatgctattacaaatggtaggttttttgcttcagaattttattccattttctttttcggttactcaatttgttggcatataatttttcatagcagtctcttactgtcattttttatttctgtggcatcaattatgtcttctctttcaactctgcttttattcatttgagccttatctattttttttagtctagccaaaggtttgtcaatt

SEQ ID NO: 317963 - DNA, 615 bp, Homo sapiens
tgctataatttaaaaaaatctatggtcatcttaagaagtgcagaaaaagcttttgacaaaattaaaaatttattcgttataaatattttcagaaaaatataaatagctttataaaggctatctataaaaattccacagtaaggatcatacataatggtagaaaattgattattccttcctaatttttgaagaacgaaaatacatttgccttcagtacttccaattaacattctactagagaccgtagctaatatatttaagcaagaaaaaacgtttaaaaatatactgattggaaataaaggagcgtaacacatttgtttacaaatgactatttatgtagaaaatcctaagaaagatattaaaaatgtaagagcaaatatggaaatttaatacggcctccaatacaaagtcaatacatagtaggaataaacctttgaaaaaaaatttttaaatacaattttaattaacattgcacaacattaaatagatagggataacttctatgtcgctagtaacttaaacctgaaamaaatgtttaagctaagtctgtttattttggaactgacagtgtaactaagatttccacttattaatttccacgtgcaatgcaatgtt

SEQ ID NO: 317964 - DNA, 403 bp, Homo sapiens
atgccagtctcatctccctaactggacacaaagttcttagaggatgaaaatgcttgttctttgtaactcctagaagattttgcttagttctacctataaatggtgattaataactactgatgaggtgatctaaagttcagttgaaataatgcccatctactcccatgcagttctttctaagggctctctctcttcactggtgtctgtactmaccagaagcactgttacacactgtgtgccatggtcttgttttttccccctttcaaatatgagtctggtctctccaactaacttctaagttccttaaagactcttataccttttaagcattctttacaatgttaagcagaccactggacacagagtggtatttaacataaaccagtaataaagacacctaaat

SEQ ID NO: 317965 - DNA, 403 bp, Homo sapiens
atgccagtctcatctccctaactggacacaaagttcttagaggatgaaaatgcttgttctttgtaactcctagaagattttgcttagttctacctataaatggtgattaataactactgatgaggtgatctaaagttcagttgaaataatgcccatctactcccatgcagttctttctaagggctctctctcttcactggtgtctgtactaaccagaagcactgttayacactgtgtgccatggtcttgttttttccccctttcaaatatgagtctggtctctccaactaacttctaagttccttaaagactcttataccttttaagcattctttacaatgttaagcagaccactggacacagagtggtatttaacataaaccagtaataaagacacctaaat

SEQ ID NO: 317966 - DNA, 403 bp, Homo sapiens
atgccagtctcatctccctaactggacacaaagttcttagaggatgaaaatgcttgttctttgtaactcctagaagattttgcttagttctacctataaatggtgattaataactactgatgaggtgatctaaagttcagttgaaataatgcccatctactcccatgcagttctttctaagggctctctctcttcactggtgtctgtactaaccagaagcactgttacacactgtgtgccrtggtcttgttttttccccctttcaaatatgagtctggtctctccaactaacttctaagttccttaaagactcttataccttttaagcattctttacaatgttaagcagaccactggacacagagtggtatttaacataaaccagtaataaagacacctaaat

SEQ ID NO: 317967 - DNA, 565 bp, Homo sapiens
aaggatgacttccaaaagggtcaacaaaggagtgacagtgaaatggtgacaaatactgagaatttttaaagaggattttttttaaaaattgggaaagtgtgctatgacaaagtcaagggaggctcatttcaagaaggaaaatgtagctaaaagcctcaccattgtagagatggagtgagatgaaaactgtagactccactgaacacagttgtgaggatgtcagtctactgggaggtggaaacatttaggtttgggggaggcagcagagggagaaaggttaagggagaacagatgagattcttctttgaacagctcatcatgaaggagagcatggtggttcagcctctcttcaatgactttytcatgtctaccagcattttgtttcactgattttctctattgcttatctgtttttggtttcattggtttctgcttttatttgcttgctttgggtttactttgctttcctactgcacttgacaagtcttaaaaaaaaaaaaaaaaaaaaaggacaatgccaaaaattgcattgcaatccactgctggtgggaaagtaaaatggcac

SEQ ID NO: 317968 - DNA, 604 bp, Homo sapiens
aaattgcattgcaatccactgctggtgggaaagtaaaatggcacaatttggaaaattgagtgtggcaatgggtgaaggtacaaatgacgcaaaaataggagaatgctggcaactattaaaattggtgttgtggtttattacactagtctacttactttgtatattctttaaatttccataacaaaatatgaaaaagttaataaaactttttaaagttcttaaacttgaaacccgctttctttgcccaaaattataatttgaggagataaatactgtacaaaacatttatataggccaggcgccatggctcaygcctgtaatcccagcactttgggaggccaaggcacgtagatcatgaggtcaggagttcgagaccagactgaacaacatggtgaaaccccgtctcaactaaaagtacaaaaattagctgggtgtggtggcatgcacctgtaatcccagctactcaggaggctgaggcaggacacttgcttgaacccaggaggtggaggttgcagtgagctgagatcgcgccactgcactccaccctggtgacagagcgagactctgtctcaaaaaaagaaaaaacaaaaccgacatttatata

SEQ ID NO: 317969 - DNA, 604 bp, Homo sapiens
aaattgcattgcaatccactgctggtgggaaagtaaaatggcacaatttggaaaattgagtgtggcaatgggtgaaggtacaaatgacgcaaaaataggagaatgctggcaactattaaaattggtgttgtggtttattacactagtctacttactttgtatattctttaaatttccataacaaaatatgaaaaagttaataaaactttttaaagttcttaaacttgaaacccgctttctttgcccaaaattataatttgaggagataaatactgtacaaaacatttatataggccaggcgccatggctcacgcctgtaatcccagcactttgggaggccaaggcacgtagatcatgaggtcaggagttcgagaycagactgaacaacatggtgaaaccccgtctcaactaaaagtacaaaaattagctgggtgtggtggcatgcacctgtaatcccagctactcaggaggctgaggcaggacacttgcttgaacccaggaggtggaggttgcagtgagctgagatcgcgccactgcactccaccctggtgacagagcgagactctgtctcaaaaaaagaaaaaacaaaaccgacatttatata

SEQ ID NO: 317970 - DNA, 604 bp, Homo sapiens
aaattgcattgcaatccactgctggtgggaaagtaaaatggcacaatttggaaaattgagtgtggcaatgggtgaaggtacaaatgacgcaaaaataggagaatgctggcaactattaaaattggtgttgtggtttattacactagtctacttactttgtatattctttaaatttccataacaaaatatgaaaaagttaataaaactttttaaagttcttaaacttgaaacccgctttctttgcccaaaattataatttgaggagataaatactgtacaaaacatttatataggccaggcgccatggctcacgcctgtaatcccagcactttgggaggccaaggcacgtagatcatgaggtcaggagttcgagaccagactgaacaacatggtgaaaccccgtctcaactaaaagtacaaaaattagctgggtgtggtggcatgcacctgtaatcccagctactcaggaggctgaggcaggacactygcttgaacccaggaggtggaggttgcagtgagctgagatcgcgccactgcactccaccctggtgacagagcgagactctgtctcaaaaaaagaaaaaacaaaaccgacatttatata

SEQ ID NO: 317971 - DNA, 577 bp, Homo sapiens
caagcggattataaaatcagtaggggacgggcgcggtggctcacaccggtaatcccagcactttgggaggctgagccaggcggatcacttgaggttgaaagttcaagaccagcctggccaatatggtgaaatcccgtctctactaaaaatacaaaaaattagccgggcgtggtggtgggatcctgtaatcccagctatttgggaggctgaggcaggagaatcgcctgaacccagaaggtggaggttgcagtgagctgagatcactccactgcactctagcctaggcaacagagtgagactctgtctcaaaaataaaaataaaaataaaatcaatatgaaaaggcaagaagagtaatgaagggaggagtaacgctaatcaattttaaagacttactataaagctacagtaatgacagcgtagacagccacaaagatcaatgaamcagaatagaaagtccagaaacagacacacaagaatgtggccaaattaacttttgacaaaagtgcaaatgcaatagaggaaggatagtcttttcaaaaaacagtgctgaaagaactggatatccaaatgaaataa

SEQ ID NO: 317972 - DNA, 605 bp, Homo sapiens
gtttctgttttatgcgccccctccctttctctgtcacacacacacacacacacacacacacacacacacacacacacacacacacacacagagtctccctcccttctctcctccattcctgcccaggctgcagaaggggaccgttgcaggggccrtcagtctttccacccagcctggccttcgggatggggtcagcacgcctcatggagcccctactgtgtgcatggtcctttgtagagttgcagggatttgggggtcaatgtgcactaaacagatgacacacaccctgcttcttagaacaggcctgggtgcaggagctggagaatggcaggtttataaaggaacatgccaggtacatgtggggctcagggaagtgggggtggaaggacattgcctttcatgtccttcaatccaccctccatgaaaggtcaatgtggagcacgccctgtccccaggagtcatggaaaactttcttaaattatcctttgtcccaggcaggactcactgcataatttgcaggacccagtggaaaatgaaatgcaggggaacttgcccaaaaatcattgagaatttcaagatagtcatggcagagcattaggacacca

SEQ ID NO: 317973 - DNA, 576 bp, Homo sapiens
acattaagttatcaaccataaaccaagggtctgaagagaacccttctgttttcctggaaaaaactgagagaggctttaattaaacacacatctctctcctgactctataaaaggatagttaattttgaaagacaagtttataacccaagcagccccaaatattggaagaatgctgcaaaaagttagctattgcaccagacagtactctaaaraaaatcctgaaagtcaccaccttggtcttttataatcgggaccatgaggaagcccaagaaaaagggagaaaaggaacgagaaaaaggcagaggcactaatagctgccatacaggcatataaacctctcgatcccagggagcttctcattctatgaccgactgttatcagtgtgggagcactaaaagagagtctgcccccgaaatcagaagcagcccccacggccctgtccaatctgtaagggagactactggaagacaaactgcctccagaaacatacgtcccaaggttcagagccggcttctcaaatggtccagcaggactgatgggtcccagggctctcctccccagctctgacagcccagg

SEQ ID NO: 317974 - DNA, 479 bp, Homo sapiens
agcggggattgatggcggtaggaggcaggtaaattctcagatgaaactcaaccttcaagccaaggacagtcgaaagcctgaaaaccaagctacaagttctggataaatccatggactagagagctctcattcctgtttggcatgctctctcctgattggtccttatccttcacctactttacatatacctgcccttccccagttggtcctctacactatcgtgcctatttctaaatggtgctttttcaagcatacccacagaccaatcagcatgyacttcccccatttcaagcccataaaaacctctagactcagcctcgtggctggcaacccaccttcgggtcccctctcgctgttgagagctttcctgtcactcattaaattctaccctgccttactcaaaaaaaaaaaagcaatgggagatcattaattaaatggctttgaccagagaagtgacatactctgatttatgctttaga

SEQ ID NO: 317975 - DNA, 479 bp, Homo sapiens
agcggggattgatggcggtaggaggcaggtaaattctcagatgaaactcaaccttcaagccaaggacagtcgaaagcctgaaaaccaagctacaagttctggataaatccatggactagagagctctcattcctgtttggcatgctctctcctgattggtccttatccttcacctactttacatatacctgcccttccccagttggtcctctacactatcgtgcctatttctaaatggtgctttttcaagcatacccacagaccaatcagcatgcacytcccccatttcaagcccataaaaacctctagactcagcctcgtggctggcaacccaccttcgggtcccctctcgctgttgagagctttcctgtcactcattaaattctaccctgccttactcaaaaaaaaaaaagcaatgggagatcattaattaaatggctttgaccagagaagtgacatactctgatttatgctttaga

SEQ ID NO: 317976 - DNA, 479 bp, Homo sapiens
agcggggattgatggcggtaggaggcaggtaaattctcagatgaaactcaaccttcaagccaaggacagtcgaaagcctgaaaaccaagctacaagttctggataaatccatggactagagagctctcattcctgtttggcatgctctctcctgattggtccttatccttcacctactttacatatacctgcccttccccagttggtcctctacactatcgtgcctatttctaaatggtgctttttcaagcatacccacagaccaatcagcatgcacttcccccatttcaagcccataaaaacctctagactcagcctcgtggctggcaacccaccttcgggtcccctctcgctgttgagagctttcytgtcactcattaaattctaccctgccttactcaaaaaaaaaaaagcaatgggagatcattaattaaatggctttgaccagagaagtgacatactctgatttatgctttaga

SEQ ID NO: 317977 - DNA, 479 bp, Homo sapiens
agcggggattgatggcggtaggaggcaggtaaattctcagatgaaactcaaccttcaagccaaggacagtcgaaagcctgaaaaccaagctacaagttctggataaatccatggactagagagctctcattcctgtttggcatgctctctcctgattggtccttatccttcacctactttacatatacctgcccttccccagttggtcctctacactatcgtgcctatttctaaatggtgctttttcaagcatacccacagaccaatcagcatgcacttcccccatttcaagcccataaaaacctctagactcagcctcgtggctggcaacccaccttcgggtcccctctcgctgttgagagctttcctgtcactcattaaattctacyctgccttactcaaaaaaaaaaaagcaatgggagatcattaattaaatggctttgaccagagaagtgacatactctgatttatgctttaga

SEQ ID NO: 317978 - DNA, 557 bp, Homo sapiens
agcggtgttgtgattgggtatgtgctgactactgaatatcaaagagaaatgtacatcagagaccacccagccttcacagtatgtagcctggagaatactgtagttgatgggaagtagaagcaagaaaatttaggtttgaggaagttcttttttagatatactaagactgaggtaagacaggatccatttgttagaacctcaggtatgtcagcactaaatgagaagccccaaaggggtctcatcctgggatttgtcacttccatcatcaacctatatgtcccccttcaaggctattcctactttaattagatccctgcatctaaggaaaaagtggtctctttttgcttctgtsccaacatctgtagctgcaacaaagatcaattacaatgcccttaacaggacttcagttccaagtttttactgagtcaggccgcatgcctggctgatcaaactgcaaccctcacagactggatggctgcacttcactgaagggcaaagtgattaatggatgacctttactttgccaagctttgacggaccagacaagaaaaagaacc

SEQ ID NO: 317979 - DNA, 545 bp, Homo sapiens
ggcatgagctctaaccagacattcaaactgagccaacatgtatagaacagctgccctggagagtcagctagacctgcatcgaactttgtcaaaagggagaaaaagctttatttttatttttaattgatggtaaacaaaccaaaatattggggtttcttgttcctgaaacatatattagcctctcctgactaatatgaatgcctactatcattggtttttctccacttgaatttcaatatccaacttaaatcccacttgttatggaacatcttcaacaagcatttattgagtacctagcatgtgccaagtactgcatcagctgttatatgactacagraataaacacttcatctcccccgcaacctggcagaaactcaaaaactaaaaaagaaaagcatgcattattaatcataatataatgtggtaggtgttgtataagaaggaaaaacaggccgagcgtggtggctcacacctgtaatcctagcacttcgggaggccgaggcaggcggatcacgaggtcaggagtttgagaccagcctggctaa

SEQ ID NO: 317980 - DNA, 531 bp, Homo sapiens
caagtagtgaggacacagatgataagcttgtacaggtgataagaaatcaataggtcaatattcagataccaggcagcatgagcaggagaaacaagacctacatttctactggtggtcaragtgaaccagtttgtgaggcttgttttgcttgtctccatgaggtcttctatttacgtaacctgtcaatgttctccatttttgagcccttatagtattatatacctctcattagccatttaacacatatacttttaaaaattattttactgaatgttttatgcatatatgaattacttacaaattaattgttcattatagtgtcttagaagaaaatatatttcacttagctttttgagtagtttgtactcattgttatttgtttattgattcctttatattcaatttctttattgcttcttaccgttctcataatggatcaggatgtctcaggtaatattttgctgaagccacttcatcacagcaccttctggattgaagccctagtatccagggggaacaggtgggtaatca

SEQ ID NO: 317981 - DNA, 531 bp, Homo sapiens
caagtagtgaggacacagatgataagcttgtacaggtgataagaaatcaataggtcaatattcagataccaggcagcatgagcaggagaaacaagacctacatttctactggtggtcagagtgaaccagtttgtgaggcttgttttgcttgtctccatgaggtcttctatttacgtaacctgtcaatrttctccatttttgagcccttatagtattatatacctctcattagccatttaacacatatacttttaaaaattattttactgaatgttttatgcatatatgaattacttacaaattaattgttcattatagtgtcttagaagaaaatatatttcacttagctttttgagtagtttgtactcattgttatttgtttattgattcctttatattcaatttctttattgcttcttaccgttctcataatggatcaggatgtctcaggtaatattttgctgaagccacttcatcacagcaccttctggattgaagccctagtatccagggggaacaggtgggtaatca

SEQ ID NO: 317982 - DNA, 647 bp, Homo sapiens
tggggactccatttagtaacttccgcagtgccaaattcaaggttttaatatttgagatgacacagtgattaaaagctgaccttgttctcatggaccatgcagatgatttacagaaatatactagtaatcaagcaattaaaccccagttctaaggtggcatacatgtagcccattatagaatacatcaaacccaactttaaagtggaagatcaaggatgcctaccaaagaaggcaccaaactcaggcctgaagaatcagtagggctctaggttgagttggaagagtgaacagaataacagaagggaagttcattgcagtctcagtaagcaagtgccatgaaagaatatggcattttcagggaactgcaaagtcctattagaattcttcacagctgaaatctgaaatgtaaggcaatccataggctgaactggtaaactgctatagcagttgggcagactacaaaataatttgtacattagttcaagatgcttagactgtatcctgaggataaagacarctatagaaaggtttttaagagacgtgtaccacaatcattatgttttagattactctcacctattgtggcaaaacttgagctagaatctaggccccaggttttccccaagattatgctttgaactcactat

SEQ ID NO: 317983 - DNA, 436 bp, Homo sapiens
gtgtaatgttttctaaaaaggcatgaaatccctcacaaaatgtaatctcatttactttattttagggattttgatatactatccaggcaaataaaacctgccaagcacaaagtrtactgggaataaccaagaatcctatgttgaactaaaaatatttttctttctgtatctttttaggcaagcgcagcctgtgtatatgctgagtagctcacttctctactctgagttacttgagaactaagccagggaccacatctcctccaaattattcttaaagtagcttatatggttttaaaatcttatttcagtaacctaattataatccctacttttagtacccttgaagagtcagtccccttagaaaaaatattgcttcttaaaacatcccagataaacgtatgaaatgtttgaatatgtacatatagaaagatttgta

SEQ ID NO: 317984 - DNA, 413 bp, Homo sapiens
caaaaatttgacatcccatttggcatagtgagtcagaattaataaactctcctctttatttttgctttatttaggccctcaatagattgtataatgcccactcacattgggaaggtttatctactttactcatcccaccaattccattgctaatctyttccagaaacatctacatgaatatacctaaaagtgatgtttaatcagctctctgggcatcatgacccagtcaagttcacacacaaaattaaccattataatgctcttgttctatgctgaggctatttctcatgagtctttatataatactgaaaaatagtttgggaattatgtcaatgacttataaataacttcatagacctgagatatattagaaaaaaaatagaaaaccataccatccatatgcatatttacaa

SEQ ID NO: 317985 - DNA, 413 bp, Homo sapiens
caaaaatttgacatcccatttggcatagtgagtcagaattaataaactctcctctttatttttgctttatttaggccctcaatagattgtataatgcccactcacattgggaaggtttatctactttactcatcccaccaattccattgctaatcttttccagaaacatctacatgaatatacctaaaagtgatgtttaatcagctctctgggcatcatgacccagtcaagttcacacrcaaaattaaccattataatgctcttgttctatgctgaggctatttctcatgagtctttatataatactgaaaaatagtttgggaattatgtcaatgacttataaataacttcatagacctgagatatattagaaaaaaaatagaaaaccataccatccatatgcatatttacaa

SEQ ID NO: 317986 - DNA, 413 bp, Homo sapiens
caaaaatttgacatcccatttggcatagtgagtcagaattaataaactctcctctttatttttgctttatttaggccctcaatagattgtataatgcccactcacattgggaaggtttatctactttactcatcccaccaattccattgctaatcttttccagaaacatctacatgaatatacctaaaagtgatgtttaatcagctctctgggcatcatgacccagtcaagttcacacacaaaattaaccattataatgctcttgttctatgctgaggctatttctcatgagtctttatataatactgaaaaatagtttgggaattatgtcaatgacttataaatarcttcatagacctgagatatattagaaaaaaaatagaaaaccataccatccatatgcatatttacaa

SEQ ID NO: 317987 - DNA, 564 bp, Homo sapiens
actgagtatggaatgttttggatagaatactttatcttcaaaatctgtggacatatattgcttaatctttggtatttagtggtgcaagaaaaaatctgaagtcagccttcattaactgttgttgttattagtatcatttgctttaactagctcatttttggcttcatatgattttattttcattttaaaattaaattaagcttgccccttgatatttctctctttttaaaatatttcttggttttggaatactacaaaaacaaacaaaaatttttaaaaaatayatttcttggtggatggtaaaattaccatacacaggctggacacaaggatgtcttctacctaaacaagctcgcttatgcaattctttaaacactatttcaactctgtgtaattctttaaacactatttcaactctgtgtaagcatgtatctcatttcttctccaatcatgttcatggttatcatttaactgaactataagttcttcattatctttctgttcttcattacttcttaattttgcagaaaagattttatttccatgcaattttttgtaatctca

SEQ ID NO: 317988 - DNA, 564 bp, Homo sapiens
actgagtatggaatgttttggatagaatactttatcttcaaaatctgtggacatatattgcttaatctttggtatttagtggtgcaagaaaaaatctgaagtcagccttcattaactgttgttgttattagtatcatttgctttaactagctcatttttggcttcatatgattttattttcattttaaaattaaattaagcttgccccttgatatttctctctttttaaaatatttcttggttttggaatactacaaaaacaaacaaaaatttttaaaaaatatatttcttggtggatggtaaaattaccatacacaggctrgacacaaggatgtcttctacctaaacaagctcgcttatgcaattctttaaacactatttcaactctgtgtaattctttaaacactatttcaactctgtgtaagcatgtatctcatttcttctccaatcatgttcatggttatcatttaactgaactataagttcttcattatctttctgttcttcattacttcttaattttgcagaaaagattttatttccatgcaattttttgtaatctca

SEQ ID NO: 317989 - DNA, 570 bp, Homo sapiens
attcctgaaaaatatgcattccagccctagcttcttagccaatgcaaacatcagctcttggcagaagaggccttgctttgttgagttggttttctctctgtcatctgcatgatagctattccctctgggaaaakgttctgccgcaaaggtaggactttaaaatggtgcaaacagattgtttcactatctggtttgctgccagctgaccagaataaccctagtatctgctttctacttttcaaattaggagtgtcagtgaagttttgacatggtttctctaattacttcctaagtaaacagctctttaataaggagaaatgtgaagccctttggcagtttttcaagcagaaattccttaatagtttttgtatatgaatgacatcaccttccagggctgttgcaggttttctcctcatatttcaggtcccctcaatggaaattataggaataatgacttagttgcctttttaaatgttgccagaataaacagaagtctgcaatctactgagagttagagaactacatttcttaagagaaaacaaacatcaaacttttcaataattccaactg

SEQ ID NO: 317990 - DNA, 570 bp, Homo sapiens
attcctgaaaaatatgcattccagccctagcttcttagccaatgcaaacatcagctcttggcagaagaggccttgctttgttgagttggttttctctctgtcatctgcatgatagctattccctctgggaaaaggttctgccgcaaaggtaggactttaaaatggygcaaacagattgtttcactatctggtttgctgccagctgaccagaataaccctagtatctgctttctacttttcaaattaggagtgtcagtgaagttttgacatggtttctctaattacttcctaagtaaacagctctttaataaggagaaatgtgaagccctttggcagtttttcaagcagaaattccttaatagtttttgtatatgaatgacatcaccttccagggctgttgcaggttttctcctcatatttcaggtcccctcaatggaaattataggaataatgacttagttgcctttttaaatgttgccagaataaacagaagtctgcaatctactgagagttagagaactacatttcttaagagaaaacaaacatcaaacttttcaataattccaactg

SEQ ID NO: 317991 - DNA, 577 bp, Homo sapiens
acaggagctgttaggagtatggctttcacatctcctgcattatctccaatctatacttctattcattttttcctatctgaatcaaggaagtttctctacctttgtaaaaaattatcagagcatctctctacctgtgcctttggttctatttctttaaatctttttggggcattctctacaaaatacctcatctttcattaatttctccttctccatagatgttatttattttgtctgacaatgtgtttaagacatcaacagtaattaaactacgcctccactctacttcccacttaagctacagtttatttcctttcagtaacgaacagtgtatcataattttcactccatcctcttataccttcaagtctacatacatcaaatttttacccccatagtccarctgaaactactataacaaaaggtcaccaaaggcctgccaccagtcaaatctcacgattttatttctaggccccatctttctggacctgtgagaattttgattgagagttcgactcttttgtccttatacattttgtaacttttttcccatgaggttttatgaaataactcaccc

SEQ ID NO: 317992 - DNA, 602 bp, Homo sapiens
aattaactgttaacactatgttcaaagagtaatgtagaagaaaaacacagattgtgcctcttgtagcttttataaagtagttggagagacagagttttataaatgaaactagagagccgtatataatcaaatgaatgattttttccaattacatcatcaccatttatatgatggaagaagatatttttctcgagttcttaattgtgtccaatgactctgaactttaacagctggaaatgaacagtttgrttgacaatagtcagtggaaactcttgtctgggaatgagttcaaagcactgtgattaccaagagtgggattgtgaaaatcaagtacagcccatggggaaaaagctctcatcatgaagactatctagacagggaatggagatgaatcaatgcaattggagattcaagctgtgaaactggaagctatttgggtgaggtttgatgctgaggtcactattgaatttaatggctttgtattgctaacagcaaccaccaggcaagagttaggaacaatttgtcccactctaggaagagtgccaatctaaagtgcgaatgtgtccagaatccatcccctaacctcctccctgactccaata

SEQ ID NO: 317993 - DNA, 567 bp, Homo sapiens
ttatttccaaaatctggaaagtattaacttgtatgaggagcctgatggatgtggattattgtaaacaaataatgcttctccttgtgagaagaatgtaaccccttccatgagggagaaggttgcactctggtttatacctggctcctgggctatcccctggcttagaggcacagtctatgtagaggagaaaacagaatgagtrccctttcccctgcttctatatagctgctgcttttaaacgttacctaaaacttcacttgtaccaaattaaaatatctttagtgtttagttatcttagtgcctcaagagcctaggtgatttaagaaaatctctatgtatgtgttacaaaaatgtgcttccttttccagacactttattttcatgttttggaaacctattacaataacattattagggcagggcatattactgttatataccaaaaaaaatcttaataataaaaaatgctatgatgtctacattgtaagaatagtccctagatgtgtgcaaaacacactctgcctaactattcttgacagctatatctgacatttccaacacaaacct

SEQ ID NO: 317994 - DNA, 553 bp, Homo sapiens
gagaaaaacaatttaaatgatagtagatttttcatcagaagctacagagcctgggaagaagtggcacaacatttttcaatgctaaaatgaaaaaaaaatgcaaatgctgaactccaaatccagtgaaagtattctttttgaataaagcagaaatcaggacatttttagtgaaagaaaagataatttgtcatcagccaacctatcataaaataaatggcttgagaaatacctctaaataaaaaggaaatgataaaagaaggaatcttgaatcatcaggaggaaagaaagaagaataacagaattagtaaaaaaatatgggtaaatatttaatacaatacatgatccttatcatctcagctcctattattgctacaggtagacaggaccacctggcagtgctctgtttgtggaccagtgtcttagaaggcttgaggctttgatgttgacactactgtggcaagatgaraccaaatgagggtgttctatgaaatgggagcagggaaggccaggaactctgttgctgccattgctatcagtgctatgactgtcagta

SEQ ID NO: 317995 - DNA, 602 bp, Homo sapiens
agacaggaccacctggcagtgctctgtttgtggaccagtgtcttagaaggcttgaggctttgatgttgacactactgtggcaagatgagaccaaatgagggtgttctatgaaatgggagcagggaaggccaggaactctgttgctgccattgctatcagtgctatgactgtcagtagaacaaaccacccaccaggctgggggtggagcaggggccaatatagctggggccctgctgttgtcaatggatcaaaatgccccagggccatcagaaaactctccattagttttctccacataattgtatttaataatagtaataaatkattaatattgcctacaatgaatagtaatgatatcataatttattttatactttaaatgaatacaatatcctgtcattataatggagcattatcgtctctgcagcaatattacttcaccatagacttcattactgatcatgataataatgattctttgtcaccagctatttgtcacattacatgtagaataaagcctgaggattattttatcctccatcaaaaaaaaaagtgacaacaggggcatatagaaacaacttttaaaaagttgatcaatatgt

SEQ ID NO: 317996 - DNA, 330 bp, Homo sapiens
tgaaaagaagagtgttttatattttaggaatttgaaagtcagcttatatttatgatcagcttgctgctcgcatgaagaaactgtttctttttttttattattatactttaagttttagggtacwtgtgcacattgtgcaggttagttacatatgtatacatgtgccatgctggcgcgctgcacccactaactcgtcatctagcattagtagaatcagaataaatttgaggaaggaaaagttgaaaatagagtgatgagcaatgggaatagtctgggcatgacatggaagtgacaagtgcaaggggtggcagtgatagagggaatacatgg

SEQ ID NO: 317997 - DNA, 567 bp, Homo sapiens
ttccagtttgggaataacagaaatggtgctactgtaatcaaaacaggtccattgcccagtgtacatggtgagttaatacaccgagacactgggttgcaacagagaaagaggtttacctttaggactgctgaacaargaaacagaaggacacctcaaatccatctctctgaggagtttggggctaaagtttttaaggatattggagtggactgaagtgtggagatccttgattaattaaagaatgcagggtgaagtcatgggacaaggaaattttctcatgcttattcaattccttggtggggatctttaaactagttggcattagcatttccactgaaatgcagaatgtgcttaagcaattcttaaatgaaaatcttataatcctaatttcattgtctaaaaggacaatggggatgcaaatggtcagtatctagtgttgtatggttttcagttacaaggaaatgggtcaaagtgcaaccttgattaatgcttaattaaaactatttatgtccagaactcttgcgaacccagtgaggatagcctcactgctatgaatattattaaacg

SEQ ID NO: 317998 - DNA, 517 bp, Homo sapiens
ttttaatgaccaaagatgatgaatgttttttcatagttttgttgactatttggaaaaccattttttgtaaagttttactctttgctcattttactgttcacctgttggcattttggttacagtttggagagttctttgtatattatgattcttttatgggtatgtgtattacaaatatcttttctcactttgtggtttgaatttctaaatcttaacaacgtatattgatttaatgaagggtttaaagtagtccgacttatcatctttcttatgattagtgtgttttctttccagtttataaaatatttgcatatagcctgaaggccatattttttctctttgtttattgctctttagaagtttccactttttaaaaaaaaatggcggctttactgaratataattcacataccataaaatctacccatttaatagtttgaggtacagttaattttttttttttttacttacagttaaaggtacaacttgctagtttttagtgtatttacagatagaa

SEQ ID NO: 317999 - DNA, 417 bp, Homo sapiens
agtcccagtgagatgaacaaagtacctcagttggaaagtcagaaatcacccatctcctgcatcaatcacactgagagctgcagactggagctrttcctattcagccatcttggaacacccctaaagtattttttaaataatttcatctcacagtaatgattaaaaaaatgcgctagcatcctaaattcagaagaacactacattaatctgataaaatataagtagaaaaatcatttacaacaaccatcatgtgtaataataaaatgttgaatgacaagaattcccagtacaaatgctttcactcactattgttctggaaatcttagttaaaaaaaaaaaaacaaaacaaaacaataaataactttttcaggatgaaaaaacctaaataaaagccaaagagtttgagacatgcctggg

SEQ ID NO: 318000 - DNA, 567 bp, Homo sapiens
cctcttattctgcctttgcatatcacctttcttacacatgagtgggtttaaactctaacatttttccactttcrcaaaaagattgtatgcatcataataataattgaggatcttctaaaaagcacatatttctgcttaccagggtttgcttatatgctttctacttaaactgtggagacgttaccaggttaagaaaataaaaatacaagatgcccagtcaaatttgaattttatattgcatcatatcaaatttacgtatatcaaacaattttgttcatgcaatatttgggacattgctaaaaatgtattgtttatgtcatattcaaatataactgcacattctgcattttattgtcaatcttaactgatcttttgaaaaatctatttggagaattccctggctttcttcaagatcatctctagggagggatttcaggtgagttaacagaaatcttagaagcaattaccggaggtatatataattttcccctttccttatcccacaagtgggcaaccaacctgcatctgaactcaggtatttcacctgtcctctggttactgtgacgt

SEQ ID NO: 318001 - DNA, 567 bp, Homo sapiens
cctcttattctgcctttgcatatcacctttcttacacatgagtgggtttaaactctaacatttttccactttcgcaaaaagattgtatgcatcataataataattgaggatcttctaaaaagcacatatttctgcttaccagggtttgcttatatgctttctacttaaactgtggagacrttaccaggttaagaaaataaaaatacaagatgcccagtcaaatttgaattttatattgcatcatatcaaatttacgtatatcaaacaattttgttcatgcaatatttgggacattgctaaaaatgtattgtttatgtcatattcaaatataactgcacattctgcattttattgtcaatcttaactgatcttttgaaaaatctatttggagaattccctggctttcttcaagatcatctctagggagggatttcaggtgagttaacagaaatcttagaagcaattaccggaggtatatataattttcccctttccttatcccacaagtgggcaaccaacctgcatctgaactcaggtatttcacctgtcctctggttactgtgacgt

SEQ ID NO: 318002 - DNA, 567 bp, Homo sapiens
cctcttattctgcctttgcatatcacctttcttacacatgagtgggtttaaactctaacatttttccactttcgcaaaaagattgtatgcatcataataataattgaggatcttctaaaaagcacatatttctgcttaccagggtttgcttatatgctttctacttaaactgtggagacgttaccagkttaagaaaataaaaatacaagatgcccagtcaaatttgaattttatattgcatcatatcaaatttacgtatatcaaacaattttgttcatgcaatatttgggacattgctaaaaatgtattgtttatgtcatattcaaatataactgcacattctgcattttattgtcaatcttaactgatcttttgaaaaatctatttggagaattccctggctttcttcaagatcatctctagggagggatttcaggtgagttaacagaaatcttagaagcaattaccggaggtatatataattttcccctttccttatcccacaagtgggcaaccaacctgcatctgaactcaggtatttcacctgtcctctggttactgtgacgt

SEQ ID NO: 318003 - DNA, 567 bp, Homo sapiens
cctcttattctgcctttgcatatcacctttcttacacatgagtgggtttaaactctaacatttttccactttcgcaaaaagattgtatgcatcataataataattgaggatcttctaaaaagcacatatttctgcttaccagggtttgcttatatgctttctacttaaactgtggagacgttaccaggttaagaaaataaaaatacaagatgcccagtcaaatttgaattttatattgcatcatatcaaatttacgtatatcaaacaattttgttcatgcaatatttgggacattgctaaaaatgtattgtttatgtcatattcaratataactgcacattctgcattttattgtcaatcttaactgatcttttgaaaaatctatttggagaattccctggctttcttcaagatcatctctagggagggatttcaggtgagttaacagaaatcttagaagcaattaccggaggtatatataattttcccctttccttatcccacaagtgggcaaccaacctgcatctgaactcaggtatttcacctgtcctctggttactgtgacgt

SEQ ID NO: 318004 - DNA, 545 bp, Homo sapiens
aatgaagaaattaagaaggaaatttaaaattttcttgaaacaagtgataatggaaacccaacattccaaaacctaggggatacagcaaaagcagtaataagagggaaatttatagctataaatatctacatcaaaaaaagaaagaaaaaacttcaaataaaaaactkaatgatgcatctttaaataactagaaaagtaagagtaaaccaagcctaaaattactaaaagaaaataagtaacaaagatcaaaacagaattacatgaaattaaaaagaataaaataatacaaaaaattaacaaaacaaaaacttgttttttttttgaaaagctaaacaacattgacaaacctttagccagactaaggaaaaaaaagagaccaaaataaataaaattagagacgaaaaaggagacattacaactgatactgcatgaattcaaaggatcattagtggctgctgtgagcaaccatatgcaaataaattgaaaaatctagaagcaaagacagtaaattccatttcatttaatcaagagaacttcagcagaag

SEQ ID NO: 318005 - DNA, 655 bp, Homo sapiens
gatttagctgtgactttcttctttccttaatcaccctaagaaattaattttatcaaagaagcatattttggcattctagatcttctccattacatctttcttttgttttttaaatgtcactaatttttgcttttttttttttgagacggggtcttgctctgttgcctaggctggagcacagtggcgcaatctcggctcactgcagcctccytcttgtgggttcaagcagttctcctgcctcagcctcctgagtagctgggattacaggtgctcgccaccactcccagctaatttttgtacttttagtagagatggggtttcaccacgttgaccaggctggtctcaaactcctgacatcaggtgatccatctgccttggcctcccaaagtgctgggattgcaggcatgaggcacgacacccggccttttgctcttattttcttattatttttcttctacttgtttttaaatatttttcccttttttaacttctgttttgatatagagcatttacattatcttttatttctaggaataatttaaattttattatagtttttctttaacccataagctatttagcagtataagctgaaaatattttacccaaaaatgcttggaacaagaagtgtttcagatttcagacttttttggaa

SEQ ID NO: 318006 - DNA, 552 bp, Homo sapiens
tctaattttaatttttttctggaacgagcctgaattgtaccatatttagatctggggaaatgggacttatgtcctgggagctatagtttaaaagactcagatctggcccttctgtggctgtgactcttcccgtggtgtaagataactttagggcaaagaagatgtgctttctgaagcccaaaactctctcttctgtatcacatgcattcttctctttccaaatgtcctgcatccacctctaggaactatatgggcttcactctcagaatgttcttcccggaacaaaccatgccacccatgtgaaacagccaggagtagattgtytagaagctggagggattaacaatgggggggaaggtgcttggtatatccacacagctgaaacaccttgcactgtaggacaaaatgggaattagtgggaaaggaaaacattgtgagtgggctacggtcttccacttgcacttttgccccgggccttgcaaatgttagagccaggcctggatctgtgtggaaattttcaatgtttttgattgctttgattttgtttggtat

SEQ ID NO: 318007 - DNA, 563 bp, Homo sapiens
tctctcttaacctccctattgaaaaggcattgtcctgggctrgggaaaccacagtatggcacagtaaaacattcaataaaattgaagtatccccagtttttatcttctggcataccatttcagagaatcttgagggaaaaacaatgacagtgatattgcttgaatattgtagatgattagtcagaatgaaataattgaataatcaaaaaggtctggattcaaattttagctctgttactttctaggtgcatgactctagatgaattacttaatccctctgagttttagttcttcatctataaactgtgaaaaattactcatcagagttattggaggagttagaaacaatatatatgtagtatattccatttattaggtgccacatgaaatagagaacccggatttatgttcccctgaagaggatttctgttgtgttgtgacttctgcactggggtttaaggagatagcaactcttcagctttgagagtttccctcctattaatgcctcacaaggacgcgaaaaaaagaagatgagaacagatttctctctctttcaaactgac

SEQ ID NO: 318008 - DNA, 595 bp, Homo sapiens
aagggattacactagtggtattaattcctcttcacctctgcaatcttataatgctttaaaaatgtttgtcctgcaactacaattatgtttgctgatttaaatttagcattattattgatctttaaatattactatttttaaaatatttgaacatatatcattttcttggatttccttttgttgttccacagttaatgtttctcaagtttaaagaatttgtttaagaaaatctttattttgtcttcattttcagtaatttactacccctcattgatayaaaaccccttcagcttgcagatttttctgctccatattgctatgaacagcactgccattaggccttgacaagaaaagacctatcccaggattcaagttttaggagcccatacatggggaatgccttccttaaatttttgaagtcccactttgatggccaggagtggcctgagctgacagtgttataggaacagggccagtaagcctagattcagactttttgagatctcattcttgggttccactagatgtccctatcagaaacttatccctatcagaaacttatatccatagagtcatcccaggacctgtggccggg

SEQ ID NO: 318009 - DNA, 595 bp, Homo sapiens
aagggattacactagtggtattaattcctcttcacctctgcaatcttataatgctttaaaaatgtttgtcctgcaactacaattatgtttgctgatttaaatttagcattattattgatctttaaatattactatttttaaaatatttgaacatatatcattttcttggatttccttttgttgttccacagttaatgtttctcaagtttaaagaatttgtttaagaaaatctttattttgtcttcattttcagtaatttactacccctcattgatacaaaaccccttcagcttgcagatttttctgctccatattgctatgaacrgcactgccattaggccttgacaagaaaagacctatcccaggattcaagttttaggagcccatacatggggaatgccttccttaaatttttgaagtcccactttgatggccaggagtggcctgagctgacagtgttataggaacagggccagtaagcctagattcagactttttgagatctcattcttgggttccactagatgtccctatcagaaacttatccctatcagaaacttatatccatagagtcatcccaggacctgtggccggg

SEQ ID NO: 318010 - DNA, 595 bp, Homo sapiens
aagggattacactagtggtattaattcctcttcacctctgcaatcttataatgctttaaaaatgtttgtcctgcaactacaattatgtttgctgatttaaatttagcattattattgatctttaaatattactatttttaaaatatttgaacatatatcattttcttggatttccttttgttgttccacagttaatgtttctcaagtttaaagaatttgtttaagaaaatctttattttgtcttcattttcagtaatttactacccctcattgatacaaaaccccttcagcttgcagatttttctgctccatattgctatgaacagcactgccattaggccttgacaagaaaagacctatcccaggattcaagttttaggagcccatacatggggaatgccttccttraatttttgaagtcccactttgatggccaggagtggcctgagctgacagtgttataggaacagggccagtaagcctagattcagactttttgagatctcattcttgggttccactagatgtccctatcagaaacttatccctatcagaaacttatatccatagagtcatcccaggacctgtggccggg

SEQ ID NO: 318011 - DNA, 599 bp, Homo sapiens
gcactgccattaggccttgacaagaaaagacctatcccaggattcaagttttaggagcccatacatggggaatgccttccttaaatttttgaagtcccactttgatggccaggagtggcctgagctgacagtgttataggaacagggccagtaagcstagattcagactttttgagatctcattcttgggttccactagatgtccctatcagaaacttatccctatcagaaacttatatccatagagtcatcccaggacctgtggccgggtctcagttctaagaggaaagtctggaacctcccagatggccagtgcagtattttctttaaaagatcatgtgatatccatccaccaaaatggtgtaaagaagatgattttgtgtcactcatatatgttatgcaataaaacctctccataataagaaaatttcaaggttctgagctatcgtgatccactcttcatgtagtatggacccatgtatcagctttcattaatctgtgatagcacatctagtctacagccctcgaaggcagcaatttttgtggcagatattatttacactgtgtgtcccctacttctgacatataggtgatcattc

SEQ ID NO: 318012 - DNA, 609 bp, Homo sapiens
actgccattaggccttgacaagaaaagacctatcccaggattcaagttttaggagcccatacatggggaatgccttccttaaatttttgaagtcccactttgatggccaggagtggcctgagctgacagtgttataggaacagggccagtaagcctagattcagactttttgagatctcattcttgggttccactagatgtccctatcasaaacttatccctatcagaaacttatatccatagagtcatcccaggacctgtggccgggtctcagttctaagaggaaagtctggaacctcccagatggccagtgcagtattttctttaaaagatcatgtgatatccatccaccaaaatggtgtaaagaagatgattttgtgtcactcatatatgttatgcaataaaacctctccataataagaaaatttcaaggttctgagctatcgtgatccactcttcatgtagtatggacccatgtatcagctttcattaatctgtgatagcacatctagtctacagccctcgaaggcagcaatttttgtggcagatattatttacactgtgtgtcccctacttctgacatataggtgatcattccactcttctgct

SEQ ID NO: 318013 - DNA, 560 bp, Homo sapiens
tcaaccagttgttttcatgatctacaggmcagaattaaatcacttgcttttacgtcagtgtctgtgtatttgggggaaacatttataaaacatgaataaatattcacttgaaattctataattatgacaaatccattccattcaggcctatccaactgagctttgctcatggagatatcgttactgtaacaatgttctcctgagtgaaacaaaaggaatttagcaaaaccaataagcaatcatgtttttttacttaaaacgtcagcatacaggctggcaccttggctcactcctataatgctaaaactttgggaggttgaggtgggtagatcacttgagctcagaagttcaagaccagtctgggcaatatggcaaaactccttcttgacaaaaagtacaaaaatcagtcgggtgtggtggcatgtgcctgtagtcccaactacttgggaggctgaagtgagaggattgcttgagcccaggaggtggaggttgccgtggaccataattgtgccacaacacttcagcctggatgacagagtgagaccctgtagttaagtgga

SEQ ID NO: 318014 - DNA, 457 bp, Homo sapiens
agtttgtttctactagcaaatttattttggcattactgcttatctagatatgtgtacagttttcaaattcaccttttactgattaccttattcaattaatgagttaaatgaaattgatatctgattatatatttacatgagtaatgtttttaactttttgacaagttatacttcagtgttgccactaattcaatttataagtgaagcaaatacgattctgsatggtaaaatagtggctgaatttgattagctgactacaagcaaatctcagaccagagtccaatttttcctttttattctgcctactaatgcttaattcgtgatatagcctaaaacttcagcttatatttttgacttttacttctctacaattctgtttttacttctgattacctactcccatcaacatacacgtgcactcacacaatccaaataagagagacctgaaagtattatg

SEQ ID NO: 318015 - DNA, 571 bp, Homo sapiens
gccttcttgctgatggggactctgaagagtcctgaggtggtgcagggcatcacatggcaagagagctgagtgtgctaacatgctgtcctcaggtcattttttctcttcttataaagctaccaattyccgtcccgtgataactcactaatccatttacccattagtctttagaaaaagccctcatgactcaatcacctcttaaaggccccaccttttaatactgccacataggattaagcttcaacatgaattttggtggggacattcaaactatagaagtcacatagataatgagtagaaaatggaaatgcatcaattactattaggttcctgtgagggacagatcattcaacatactagtaaattaaataaaggtaatttatttcctttttgtttcaaataagtctagagggacccaagttcactctaatttctttttctgaaatatttagcatgtggttttcttctcagaatccataatgtctgtatttcaactatcagaaaagatgaaaaaaggaactagagtatgcctagtattaaagtatacttaaaatatactttattttaagta

SEQ ID NO: 318016 - DNA, 412 bp, Homo sapiens
cagaagacaaggaataataataaagatcagagtggatgtcaataaaacagaaaaaagaaaaacaatataggaaattaatgacktcaaaagtgggatctttcagaagaccaattaaatttataaacccccattcagactgatcaggaaaaaaaagagaagacacaaattagtaatatctggaagcagatcacacatcacaacatatttcaagaatccaagacagtgaagatgggtccaaatgcataaaccccccaaaagtgaggctatgtaatggtgtatctacacccagaatgtgagaatggaaaacaatgcatgttccctagaaaatgatggtgcacatctccatttgttggcccacaaaggggctcccaatagcgttaagcttaaagagtaggtcgaagaacagtggttt

SEQ ID NO: 318017 - DNA, 539 bp, Homo sapiens
cagctctcttattgttgctatttgtatgacatgactttctacattccttcactttcaacttgtttgtgtctttgaatctaaagtgtctcctgcaggattttgtggatcctgtggattttgtttggcatctggtcttaaaatatctgccttttgattggattgtttaaagtatttccatttaatgttattattgatatagttgaatttatgcctgccattttactttttgttttttatgtctcgtttcttttcctcttcctctgttcctccaaaatgaatattttctacttaatattttaattcctttaataagtttttaagctacttttgaattattttcttagtggtcgttctggtgcttacaatatgcatcttaacttatccaatctaatttagatttaaattaatttaatttcagtaagatatagaaactttacttctatatggctttttcccttcctcctgtcatttattattgttgtatatattataacatctatrtaagttattaatagaaacataaggattcattgttatat

SEQ ID NO: 318018 - DNA, 548 bp, Homo sapiens
ttgtgaaagtgttttcctggttgtaaggttcttgactgacaattctttttctttctgtatttttgaatcccactacctctggcctccattgtttctgaggagaggtcagctgttagccttcttggggttcccttgcatgtgatgagtcacttttcttgttctgtgttcaaggttttctctttgcttttgcctttcgactagttcagtgatgtctatttmcctgcagtgtggagcctctgatgtctctgctctgagggtgcagccttgagaaggcaaacagtctccctggccagcatagatctgtgagatctgtggtttagttgggtgcaactttgactctctttccgtgatctgcctgttttaagcttctggctggtctgcctctattcatgtctcacacagatattagcctccagtaattgctattttctctatattgttttaaaaaataccttggtgtataatgcttcatagtttaattcaattaaagccatgtctttttgcagggcaaggtgttcccatcttcatgtcttgcactgacccaagga

SEQ ID NO: 318019 - DNA, 451 bp, Homo sapiens
tctcaccccatggcacttctcctgtgcgggtctatcttcacatgccgtcttcttctaaggatgccagtcatatggkattcaggctgccctattccactgtaactccatcttaactaatgacatctgaaatggcactactttcaagggtcacattttgaagtactggtggttaggacttcagacacacaattcaagccatagcatgtaccaatatcggtttcctgtctgtgatattgtactgtagtggtataaaatatcactactgggggaagcggataaaaggcatggcactctgtgcaccatttttgcaacttcctgtgcatctataattacatcaaaatcaaaagagttttaaaaattattatgttacataaacggagatcaaatggggatcttactccattttccatctttattgacacatttttgggctttacatttccaactgttt

SEQ ID NO: 318020 - DNA, 451 bp, Homo sapiens
tctcaccccatggcacttctcctgtgcgggtctatcttcacatgccgtcttcttctaaggatgccagtcatatggtattcaggctgccctattccactgtaactccatcttaactaatgacatctgaaatggcactactttcaagggtcacattttgaagtactggtggttaggacttcagacacacaattcaagccatagcatgtaccaatatcggtttcctgtctgtgatattgtactgtagtggtataaaatatcactactgggggaagcggrtaaaaggcatggcactctgtgcaccatttttgcaacttcctgtgcatctataattacatcaaaatcaaaagagttttaaaaattattatgttacataaacggagatcaaatggggatcttactccattttccatctttattgacacatttttgggctttacatttccaactgttt

SEQ ID NO: 318021 - DNA, 621 bp, Homo sapiens
ttctgccattgcattggtgtttggggggttttgttctcatagtacagaaaagcttttaattgttaaacktgtgcaaaataaaatgcaaactgcacaactcaattactttccttcaaactgatggccatgtttctcagtgtctgtcagttgttttaacaaaaacttttctcatctgcaaagaattgaaattaccctttcaacatatgttttccaaaatccctgctctgttttctctttgaaattcaaaattactaatataccttactgcaaatataagtgcctttctccagaaagctctagtggccaagtagaaatgtttcccttcggatcaaggaaatggtattttgtgattaaattagtttgagcaacacagctctgggtgttttatatcgcagagctgtgattttctagcagatggcttcgacatttttatactgaggcaagttttagttttccaacctcagttaaaatctttaaaatgtttgctttagaaggaattactacacaatgggaaaagaaccatatgcaataccttatcatttaggaaaaatattccattttgaaactgagtttcattaaggcctgttttgtgtaagcaggctgcaggttcagttgctacac

SEQ ID NO: 318022 - DNA, 585 bp, Homo sapiens
tcccaatgagacgagccggattcctcggttagaaatgcagaaatcacccgccttccatgttgatctctctgggagctgcagaccagagatgttcctatttggccatcttgccaaccacctctataatcatatttttctaattaataatataaaatatgcaatgatatatatttggctggccatatatatatgtgtatatgagtgtgtgtgtatatatatatagatatatatatacgtgtgtgtgtatatatgtgtgtgtgtrtatatatatatgtatctatatatatatatacacacacacaataaagagatggatctatttctctatggccagccaaatatgaatactttttttaagcctatatttcagttaatactggtaatttatgttttcccaggaaaaaattttgattttattcaagttttcttattaccagatggtcgaacataatagtcccttacaattgctttagtgtcctttgtgtttggaataaattttcttttctgatttctaatttggggattgttttctcattttgttatttattcattgactcatttcataaataagtattgaatgcttaa

SEQ ID NO: 318023 - DNA, 601 bp, Homo sapiens
agataagggttcaggtgagcagagaagtgaggtaagcatgtacttgtttcagagtgatccctctggctgggaggatggataggctggagacagcctggaggctggggctcagctaggaggctaaagcaataatctaggtaagatgtgaggagaggacagagtcaagatcttttgcagaggtcaatctgaggattgattaggtgcctaattagaggtagagatgaaggaggggacagggttctggatgacacccaagttctggcttgtgcccctggcccagagagggtctggcatgtccattatctcacagtggctatgccagggcatgagctcagttcccatatgagtccctaccccagctcttactctactctgcctgatagggtgaccttctatgagtccccttagcatggtcctccttccttaggctcactgtcactttttttttttttttaatagagatagtctcgctctgtcacccaactggarcacagtggtgtgatcacagctcactgcagcctcgacttcctgggctcaatctatccacttgccttagcctcctgaatagctgggactaaaggcgtgtgccaccatacctggc

SEQ ID NO: 318024 - DNA, 626 bp, Homo sapiens
tgccccttcttctttgatgggctgcaccttcagccgccttgctgaccagtgtttccagggaaatgacttctgagctccatttttataaaacaggaaatgagtataaagtactgtctgtcagttcctacatggcaaaccagagctgaggcagccaccccgaggccataatgtcttttcatccaagtcatgatgatctaatgtaattataaaattattaaaagaagtactaatccacagtgacttcattcctaaaatatctgttgtccaatgttcaattccagtgcttcctaaacaaaaggacctatcattactctttttttttttttttttaaggaaagtccctttgggaaaactgcataacagatatctgggacccaacatttttccacttctaggatgaacctttgagctgatggtgcttgctatttgagtaaaaagagtactatttaagaatatttgtacaagaacaaaagtttggaaagaaactgacattctttttggctgggcgtggtggctcatgcctgtaatcccagcactttgggaggcygaggcgggtggatcacctgaggtcagggattcgagaccagcccagccaacatggcaaaatcccatcaccactaaaaata

SEQ ID NO: 318025 - DNA, 609 bp, Homo sapiens
cagagtagccctaagacacagcagttgggtgattgaagtaacaggcaggcgaagtgaagggaaaaaacttgttaccaccttctgatgctgagaaagacctatagcttctttagacaataaacccataaccactctggcctataagaaaatcagttagggaaaatcttttcaacatatttgacaaaaggttaaatatcacaaatacataaagagcttttacaagtaataagaaaaaggaatagccgggtgtggtggtgggcgcctatagtcctagccacttgggaggctgaggctgcaatgagctatgattgtgccactgtattccagcctgggttacagagtgagaccctgtctcaaaaagaaaacaacaacaacaacaaccagggatgtatgcmgagatttatacatgtgtgtatttataacagtatcataatattaaaaattgaaaatgatataaatgtccaaaattgagaatttgctttaaaaaccatggtttacctgtataatatgatattatacagccatttaaaattagatattaaaataatttttaattatatgaggagatgttaatgatctattgttaaggggagaatttttaaaaagcag

SEQ ID NO: 318026 - DNA, 526 bp, Homo sapiens
ctgacctgtttcctgctctgacctcagataacgttatatttcttcactgctgttttggtttcctgaatatctggtcccttgcttgctctgaccttggggaatgtgtccccaagtgttttctgcgtcttgttcatgggatttggagtggcctggctggaagatggatgtgttgggaaagggtgggaaataaggacagggtcagccacagaggctccacagtggagcctggccaggcagaggagtagggagggggctcagtgacaccatccccaggcagkctgtggctgtgggatgtgggtgtgggtcctccgggatcaggctgacctggttcttgtggactacagctttgagctgctcctgcctttgagacacattggctgaaggtccttggctggaagttcctaagcattatccctgccctatggccctgaaacctcgcagggtaattccagaggaatcacggctcattgttctccagagtggaaagaggaactgcggtgtctgcggtggggaagcaggaggagga

SEQ ID NO: 318027 - DNA, 515 bp, Homo sapiens
ttgcactccagcctgggcaaaacagtgagactccatcttgaaaaaataaaaaataaaaaataaaaagtctgttcrttttaaaagcttctggggagcaattttcttagctttgtttgagaacatactccaacattcaagagttccatcactttatcacttcttctgccatttctggtattcagtgatcaggtccattgtacctttgttggcttcctaagaaagtgacccatcagcttctagttgctgttggttttgaacataaaaacactaattggcttcattcccagttttttgaggaatggctttcaactgtgacttcttaggtatacctgaaggaagaaatgctttgaaaaatacctcccctgccttgtaaggaccagggtccagtgaaaggaatgacacttttattcaaccaaacaccatgtgaaatttggacatgaaaaggtaggcctggatctaagttgggaataaggattggagagaactgagttagagaaatatagaatccctgggag

SEQ ID NO: 318028 - DNA, 515 bp, Homo sapiens
ttgcactccagcctgggcaaaacagtgagactccatcttgaaaaaataaaaaataaaaaataaaaagtctgttcattttaaaagcttctggggagcaattttcttagctttgtttgagaacatactccaacattcaagagttccatcactttatcacttcttctgccatttctggtattcagtgatcaggtccattgtacctttgttggcttcctaagaaagtgacccatcagcttctagttgctgttggttttgaacataaaaacactaattggcttcattcccagttttttgaggaatggctttcaactgtgacttcttaggtatacctgaaggaagaaatgctttgaaaaatacctcccctgccttgtaaggacmagggtccagtgaaaggaatgacacttttattcaaccaaacaccatgtgaaatttggacatgaaaaggtaggcctggatctaagttgggaataaggattggagagaactgagttagagaaatatagaatccctgggag

SEQ ID NO: 318029 - DNA, 616 bp, Homo sapiens
tgctgttggttttgaacataaaaacactaattggcttcattcccagttttttgaggaatggctttcaactgtgacttcttaggtatacctgaaggaagaaatgctttgaaaaatacctcccctgccttgtaaggaccagggtccagtgaaaggaatgacacttttattcaaccaaacaccatgtgaaatttggacatgaaaaggtaggcctggatctaagttgggaataaggattggagagaactgagttagagaaatatagaatccctgggagcaatctgggagataagtggaaattaaagaaaaaggaaattaagaagacaaattaaaattggaagaggagctagcaaagtggcaagaagcataggcattatgcagagtccatggtggtggcagagctagtgagacatcatgatggtgctggatgtcttaaaacaacatttaagaataagactacagttaactcgaacaacaggagagttagggatgctcacctcctgcacagttgaaaatccatgtataacttttaactccccaaaaacttamctgctaaaagcctactgttgatgggaagccttaccaatgacatgaacagtcaattaacacataatttgta

SEQ ID NO: 318030 - DNA, 545 bp, Homo sapiens
ttgtttcaaattcagctcccacagatgttccattttgttcatcaagaaagtgagtctctgggaagttaagtgactcacataagttcacaaaggaagccatgggcagagcagaagttctcacctcaatggcctgaatccaaggcttgggcactagttccacagaacaaacagcctgaccatgcggctcggcgggtcaggagttggttctccctgagtaatagagctatgcagggctcagcaattctggagaatggggatgggataacccagttatctgccatccttctaatstacctatatttactccagtatctctctctctcccctgtctctttccacttcaaatacgcccctcacactgactcatctacagccttctttcttgcccacccaaatcaatttctgcttccttccagtgctcagagagaatttccacctctggtaggaaagtctggttgcagtgagagatttttcccagttagggcaaaatccaagtagggaggaaaggagaagggagagaaggtaaggaagacagatcaacaccc

SEQ ID NO: 318031 - DNA, 670 bp, Homo sapiens
tccttctaatgtacctatatttactccagtatctctctctctcccctgtctctttccacttcaaatacgcccctcacactgactcatctacagccttctttcttgcccacccaaatcaatttctgcttccttccagtgctcagagagaatttccacctctggtaggaaagtctggttgcagtgagagatttttcccagttagggcaaaatccaagtagggaggaaaggagaagggagagaaggtaaggaagacagatcaacaccctatatctgcaagatggcaccttaacaagggtcaacctcagggagtcatttctggtcttttttctataccyttttattcctgacacaagtctccctacaggccctacatccctctacagaaataagatctccagggtccttcttctgaagtttctggcctgagggttattttaaagttggcatcaactcaactcagacactactctaagaaggggaagatattttacttcatgagtgagtgatttttttcttttaagactcaaggtgtgagtagcttctctctttgaaccctccctctcaaaaaaaaaaaaaaaaaacaggctttctagctggaatattttacatattcaaagtaaaactgcccacagccacatcttgggccttttcagtttgacagtatctgtgg

SEQ ID NO: 318032 - DNA, 554 bp, Homo sapiens
caatgatgggaactgatttatgtccctagaatttcctccaattgtcgatcaagtttggttacagagggagagctcatcccaggaaattgtacaactttggtttccagtaatcagtgtcattttatcttacattatcacctttggctatttgatgaagaaaagtttaattcagtcaaggaaaacacaaagaggaaaatctgtcattgccaccaaggcatctcttagatctattagccaatgtatttgaaacgctggcacactccaagtggagttacttttggccctttcctggagattttcagaacgtacttgtcaacactaagatactgtaatgataagaaattatacccagacttgaaaagaagaaaaatgcttcaattttcatgaatggaaattgcaacaagttcaattcaagtattatctttggaacatttgccaagtaaacagaaaaagccaaatttttctattcagtgtttgsgaaaattttagttgaggtaggccacctgtgagatctaatatttgaatgtcagtttcactccattttagatttttct

SEQ ID NO: 318033 - DNA, 616 bp, Homo sapiens
cctgccaaccctgatcatgtactaagggccctacgagtctgcattgctccctctacccatatgactttcaggaagaatctaaaacctcattcatgctatggggttactgctctgaattatgtgcatttgcattctaacatccttcaacttcagtctgagtaaaattctaaaagtgaaatgtcaggaatttgctaataaagtgtggagtggggaggtcttcctagggagagctcctacaagtacttctgtggaaagtagattctccaacctctgtgtctgctctggttctaaagccttatttctaagggtgcatgcaaggtcctttgggccctgtttggcattttcagcactttactcaggcagcatctggattttctcagatccattctcactgtatgttacacmgggcagggaaacctcctgtttgaagcctgaatgagttattacacattactaagtctgggcttccaggtgacagtgccaggaaagattgattcaaccctctatcaacatcatggacttactattatctcccaaacaagatgtcattaacagccactgccccatctttcagaaagatcacagatctatcccataggtacacactgccaaggag

SEQ ID NO: 318034 - DNA, 608 bp, Homo sapiens
cttggggctttgatgtaattagagcagatgaattaggcrggtgagaaggagaaattgaacaagtttctttgtcctttatattctaatactaatagtcttttgggggtagtagctctataatttcctagtgtttgacattgagcaaaggatgttagcatgttttagcatacaagtccaccacaatatttgcaatattacctgattgaatgcagatgtcttttaatttgatcttgtttatgttgaactatgtcatataccagaagttcctaagtgagcctctgccttgatttagaaagtctgccaattttgaaaaatctatctttagttactgatttatcttacagtctggttgaaactgaaaagaatcttgaagaaagcaagaacagatcggccatatcccttttggctgcagaggaggaaataaatcagctgaaaaagcagtaagaaaaaaattacaggattattgcagcctaaatcattgaatttagcttttttggtgctccattacaacatgaaagaatctgttcactatcagagagaaaatgcagaaatatttttattaattatatatatatatatatttactacaaagatattacttatctact

SEQ ID NO: 318035 - DNA, 333 bp, Homo sapiens
cctccctgcccaaattcaatttcactctcctggaagtccgtattaaagagactgtcaggatcaaccttgatgggccatgtgggacacagttttgagaagatcccaagaggtctcattgcagcattcaccactccatgaaagagaacaggaaygcaagctgcatttccccctccacttcctgcactacggccattgtttcccttcagtagctcagatgggccatgtctggagaccatattgaacacacaaatagctttttctaaaacatagatgttgtaagctaagccctgttggtcttgcacatgtcagccacattgttgtgcctaaaatttg

SEQ ID NO: 318036 - DNA, 528 bp, Homo sapiens
atgcaaaattgtaggctttctgcaaacttgatgcatgtaattagtagacataaagtcttctgaataaacttatgaggctttatttagctagaatgtgtcagattgaacattttaaaatacatgttttctttccagtatacctgtctttccccgcagatgttgatttcttgaggattttggttatttgaaatttggattgttttcctaaatctgctttgtagagatgtgggagattatttagwgtggaataatatattttttgaaaatttatttattcgcataaagtctttagctcattagtttataatattcttggagttattattttaaaacttgtggttcaaaggggatataacaactagatggataggaaaaattgaaagcttgatttttcctcagctaaaattggaaaccagaactttatcactcctatttttacagatgccatgtggcgggaaccttggccaactgggatgtgggtggctgagtctttcttcagcttcttactggaaactgtggcgttttctt

SEQ ID NO: 318037 - DNA, 559 bp, Homo sapiens
cttaggctattacaaatctgtgtattgttggactttctgaatttatatttttgactttctttaatgtgagcatccttcaacaggtatcataaacattcaaaagggatttactgtagtcataggaacaaaatgactattctgagaatttcattctggcaaactgaatgatgtactgctagttatatatgtctattgaaccatgactctttccataggaaaactctgagattactatcatcagagtcaccatatccataaccaactgaatgcttctgatgtattttaatctggttttgttgatagtgataaaacactggcttggctctatttggactgagtaatttaaaaatattttacattgatgaaatcatattttaataataaagttaattaaatatattgactttttcccaagtttagargcagcaactatttcacaaagaggaaaaaatgttgtcaatacttacataagattatttaatttcagttgattcttgtacgaagaactatagaaatagttgatctttcttcttttttcgaattaaaatgagcagcctct

SEQ ID NO: 318038 - DNA, 555 bp, Homo sapiens
tctatagggttagattctgaaaaggaattgctatacccttgagacagagcagtgtcccctatttggagrcctgtaggcccccaagcatggaaataaaggaaaattctgagttccttcaagggaaattccaggcacctgctaaccctgagaagtacgtaagtaacttgataagcaagaaggtaatagtagcctaaaacaatagccaaggaagttggggtctggaggcttttggtttccctacttaaagataacatcttaacacatgtccatgagttgtctttcagaaacttggaccccctctcactggatccgcagacctcaaataagggggaactgaagactgaaaacttgaccagggttctttgctctaaatgtcttccagaggggcctagagggagtcacattttcaagccagttaatattcttttctgctaaccccaagtttttaaacaattgcaaatcagaaaatctttgaacgtacctactacccgtaagctccctcatgccctacaacttcaagatattttggccttttaggccaaaaccaaagtttaa

SEQ ID NO: 318039 - DNA, 666 bp, Homo sapiens
gattggagagccgggggactgtcgttctttctcctgattcctggatgcaactagagtgtccacctgcttcagctcagcagtttcctctccatcttccctctcttctctcctcagcacattcctgcctgagaaacaaactgtcaatcgtccataactaggaagaaaggggaagtgagcacaagctaatggctgtctgattgatggttttctctaaattatacactctttatttcaacttaaaacatgtaaatctacaatttaaattgtacacatacaatacattatgtactaatcatatattcaatatatacatatatgatttatcaatatgtaatatgaggscttttatttcagtgagaacttattatttagtgatctataaaatgcttctggcatgaagtgtacccataatgcattgtctgctactcccaacttcaattctttaaagatgaacagaaacttaaagatacttccctgtttgttggagtatagaatttttgaatttttatttttcctacccctttgttgttacacacataattatactttatttttcatttgtagccataaatatgttctaatgtttacatctgtggtcgtagaaccagtagaacctccacaatttatagaactaatttcatgtatgattatgttgcatttaacatt

SEQ ID NO: 318040 - DNA, 580 bp, Homo sapiens
atttgttacaagtgatgagctaatattgatacattattattaaatgaagtccctagttacaataggattctccatgttgtatattctatgggttttgacaaatgtataatgacgtgtattcatgttatagaatcataagaatagtatcactaccctaaaaaaatccctggtgctccacctattcatccttctttcctctccccatgaatccctgacaaccactgaccttttyagaacctccacagctttgccttttccagaacttcatatagttggaatcatatggtatatagcttttacagattggctcattttatcatgttctatgtgtctagcactgtgttacatttcctaaattatctcctttaacccagtcggatgctactattatgctcagtatatggcatatatatatatatatatatatatatatatatatatgctatatagtatatagcaaatagctactattatgctcatctatatagatgagagaactgagctcagagaagataagttaattggcccaaggacacatggtaagtgctggggtttgagaaactcaggcctatcttatttt

SEQ ID NO: 318041 - DNA, 630 bp, Homo sapiens
aaagggtgggatatcttgaagtgggggcaggtcataggtagattaaaagattttctgttttgcaattggttaaggaagggaagctttgtttaagatctgggtcagcagaaaagattgttagctctggtttctggtgtgacttctttcaggaccatcaggaagaaatttacagcaaagagaagtggtcagagatcagtcctcagttcctcctatctgaggtctacatgctgttcggtgggggtctgggtttctgaaaaacaactcaggaacatatgttaagattttatctttactttctatagagaaccaaacattgtattattttaacttcctgggagattgttttaagctactattaccttcttgcttatctagttgctcatttatttctcagggagacctaggtacctggaaattcccttgaaggaactcaggattttctattatttctatgcttgggacccacagacccctaagaagtgtccctgctccatctcactctggkactggatgagggcaccagatatggggatttacacaccaaggcaggtggtatgtaatttttatcttgtatccatagccttgtgtggcatctggcatggaataggcacttactatttgttgaatatt

SEQ ID NO: 318042 - DNA, 556 bp, Homo sapiens
ctattatatttcacaggtctaaaaagaaaaaccatacaatcaccccctttgacgaagagaaaaaaattagaaaaaaatgagcaactgatcttgacaaaaatgttcaataaaataggaatgcatgagtcattcaggattgggtcctttcaggaaaacagaragcacattagatatttcaacaggagggatttaaaaaagagaattgtttaaacaggtactagaggactagaacagcaaaactaggacactgagcaacctgcagaccataaatgcaaggaagcagctaccacctccagtttgaggggttccaaaggatgagattaagttacaagatcatgggagctcaaaggaagggccccacaaagctggggctcagacctgtgagaagggggcactgctcagctgctcagctgctgttagttctttaggagctcagaggagggaagtgcatctgagttggggcttatacctctgaggtgggagcactgcctagctgctgctggtacctacaaggcggagtgatgaggctggctctggcaatctagaaaaataaata

SEQ ID NO: 318043 - DNA, 562 bp, Homo sapiens
ccaaaaaaaaactagctctctttctgtgtttaatttattgccttggtaaaatttccttcaccataagagaatattagtagaaatcgaagatgaccaaagctgagaagaaaccaatataattgcttgtatcggcaagacaccatgctctcagattttcttgtttaagcatattaaamctgtcctcaggctatctttgaacacagaaaagctgaactgtgtgtgtatgtatatacatacagataaacacaaatataaatattaaaaaatatataacatcagtctccatccattggtgagctggagctggggatcaatatgcatataactggctctccagggagagctatctgatagggagctatatcagctagggagagccagttttatgtttatcgttccaactctgcgttcagtgatatcatggccatgatgggagtgtttataccatgaattttggcaagcactatgtgatggttaattttatgtgtcaacttggctgggccatggggtacccaggtacttggtcagacatttattctaggtgtttctgggagggtttttt

SEQ ID NO: 318044 - DNA, 444 bp, Homo sapiens
gtacttttattaaaaataaacattgctcttaaatattagcttaaatattcacaaagaacattataaagaagagagtgtgttgtctcctaaggcattatgggaaagtttttgatcatggtgttcctgaatggccgaggtgggtgtccttgattaagctagacaggattatctgcctttggatcttgtctttctcatgtgaacttagatttttctgaactctttagatgaatagttaccttcaccacattttaagaggagaacccaaagtgtgaatgtctccaagatattcagattattttcagatgacatggtacytaatgaaggaaagtctggcaatagaatctgataaatctgctacacattttaagctcctacacatcattaagggtttccaaagggagtccgattctgatctttattgccttaaacattacagagggggct

SEQ ID NO: 318045 - DNA, 616 bp, Homo sapiens
ccaaactatctttgcctgctacacagttttggattggctaaaataccacgggtgttattttcaaagactattggagaattcgtttcaattgtgtgcttttttctctatagtacattataaaaacttgaaaaagcctgaccacctcttctcaaaagttgtcaaatattaagacagcaagaaaacaaacctctttgcctttaagacctatttggcgttgttgtctcttgtgttcttgaccacacttcccttttgcccttgtgtactttcagcttctccctccaaactaacagctgtggccacacacttggcagctggcaagctaacacccagatgccaagctcttgaacagattttctaggagcagacttgggctctatggcggctgcccacaaaccccctccctgctagctggttccttggcaagttctttgattcatttgatttttggcaragtaactcccctgctgactatgaagtctccgagtctgtcaagcgcattagtcagtctaaacgtttatttgactgccccttcttaccgtgtctaaagatgaaagttatctaagatctatgtttaatgtcatacagagctaaataaaaagtggttctgcacagttga

SEQ ID NO: 318046 - DNA, 508 bp, Homo sapiens
gctaatgcacatgaggcttaatacctaggtgatgcattgataggtgcagcaaaccaccatggcacacatttacctatataacaaacctgcatgtcctactcatgtatcccagaatttaaaattaaattaaatttttaaaaggaagaaaatcagtttttcttttcttccacatggtcaagctgtaaatttttataaacttttatgctctgcttcccttttaaacatacattccaatttcagaccatctctttttgagttggcatgcttatgaaagcatatgactgtatgctttaggaaaaagccaggtcgcatcttgaatgttttgyggcttagaagcttcttctgccagataccctaaatcaactctctcaagttcaaagttccacagatctctagggcaggggaacaatgctgccagtctctttgctaaagcatagcaagagtgacctttgctctagttcccaataagttcctcatctccatctgagaccaccccagcctggacctc

SEQ ID NO: 318047 - DNA, 530 bp, Homo sapiens
aagtgatatatctttgaacacaggatgccaaactccaaatctcagaattaaatgcaatcttgatttatattaattgttttttagtagacataacactaatgcatatgaatacaaaaaygcataaaattaagccttttgtcttaaggggatatttgagagacagtgtgtatccctaatctgtatttatccactatgtcaatgccacattttccttcacagaacctcactgggtaacctttttattagaaagaaccatcttcattgcatgagctatgagttaccagttaccaatcttagctctggttctaggagtcttaccaacaaaatgtgtggtcttgagcaaggtcatacaatttatatgagtctcactttctttctttgtgaaaaatatgcatgactactagaatagtagataattcctgaataggctgagattgttcctgcctcagatctttggctttagcctttctgtttagttggaatttcatccacaagtttttcattctaggtttattttccctgtttattac

SEQ ID NO: 318048 - DNA, 530 bp, Homo sapiens
aagtgatatatctttgaacacaggatgccaaactccaaatctcagaattaaatgcaatcttgatttatattaattgttttttagtagacataacactaatgcatatgaatacaaaaatgcataaaattaagccttttgtcttaaggggatatttgagagacagtgtgtatccctaatctgtatttatccactatgtcaatgccacattttccttcacagaacctcactgggtaacctttttattaraaagaaccatcttcattgcatgagctatgagttaccagttaccaatcttagctctggttctaggagtcttaccaacaaaatgtgtggtcttgagcaaggtcatacaatttatatgagtctcactttctttctttgtgaaaaatatgcatgactactagaatagtagataattcctgaataggctgagattgttcctgcctcagatctttggctttagcctttctgtttagttggaatttcatccacaagtttttcattctaggtttattttccctgtttattac

SEQ ID NO: 318049 - DNA, 630 bp, Homo sapiens
gtgccactgctattaggttcaattacttgagaacagagaattaatattaggactaataatagtttcttatatatcattatatcttaatgagtttgaagtattatctaacattggaagagagagttatgccatgaaactagtacacattaatttaagaactacattgtaatcacaccccaaatcaaatwgtccagactccttgacaagggcgtaattcaaatgtgaagccccatggcatcaagaggcactgcaatgaaccttaaaagttttcacagattcattaatttgttaacataagtatgtggaagttaatttgaactttcaaacagattttattgaagcattctctatgtcacatgaggcttattattaagagaaatataataaacatacaaaccacaaaacaataaagatttcaaaaatattacctttacttgcttcctacactgaagctgacttactttaaattatataaaattgtatattaagaattttggcaaactattcactcgtaaaatgcatttaattttctgcgcattttgaatacacactttagcaacttgtttcttcatattatgtctatatttcaggagagcaatttagtacatggtaagaaacacagtttttaag

SEQ ID NO: 318050 - DNA, 278 bp, Homo sapiens
tcccatgatcttcattgtcatgggtttatacctttaaaaacctttcattatcatcttattagtatctttgcataaagtagatcaatgtatagacttaatttgtaaccttgaatcacaaggcatatagatacgtatttaaacataagagagtttatgtttgtgtgggtgttacagctgaaagarcactgtagttagagtcaaaagatatataaatctgaatttaagtttctttacagccatataccaaatggttgaccttgaacaagtacataataact

SEQ ID NO: 318051 - DNA, 544 bp, Homo sapiens
aagtgctgctgcaattcatgcacgttgtctctggtctgctgggtcactttgttggtgtgggccaacagctgtgcctgaagcttgtgtatgtagtatatacaaattttcctccttcattttctctaattcctgtgcctcatacctgtgtggtttcatgggaaagttgctaacgttttcctcatgtgaatttggtggctggaggcgttgagaaacagacaatgattttaatttgtcccagaggttccaccacatcatcagagctgctagtttgtccttgctctccatatttcacatccaatttttttcctgctgttcgacctgatgacaaaatccagcaccaaaagcagaatcaacagccttaaataggctgcttaacttgccctcacaattgagcacgttcaaaawcctataaaagcacactctattcatattattaacagtaagtctgcttatctgattgaaatatacctgataatgaacagtaagatacaatcatgaagtaggcacaagacaatggactgcatgcatcttaggaagtgaaaag

SEQ ID NO: 318052 - DNA, 565 bp, Homo sapiens
gattgcaccctttatttggttctcagcttgaactgtattgatgtatagaaatgctagttatttctgtatgctgattttgtatcctgaaacttcactaaagtagtttatcagatctaggagtcttttggagggaggtttagagttttctaggtatagaatcatactgtaagcaaatagagataatttaatgtcctctttcctatttggatgccttttatttctttctcttgtctgattgctctggcaagtaastaccatactatattgaatagaagtggtgagagtagatgtccttgtttttgtccagttctttgggaaaatgttttcaagttttgtcagttcaatatgatgtttgctgtgagtttgtcataaatggctgttattattttgaagtatgctcccttgacacctactttcttgaaggtttttatcatgaagggatattggattttattgaatgccttttttgcttccattgagattatcacatggtttttgcttttaattctgtttacgtggtggatcatgtttattgatatgctgaaatttaaccatccttgcatcc

SEQ ID NO: 318053 - DNA, 533 bp, Homo sapiens
gtaaaccttgtaccaacccatgtttacaaattaaagactgaagttccctgttgacattttcttcatgatattatttaatccagttaatctaatctatctgcttacccacttactcacaatactgggctaggtacttgaagagataaaaagctgatctcaagttttcatttaagattgataaaaagagagacatagagtaactagaaaatatagctacttcctagctaggtgactttgggacaattaattaaacattctaaaccacaatttcccatccttaaaatgagtataattatagtatgtaaattgtttatttgatataagcattagatgagaaaatgtattaaaaaggtatttagactaacacttggaatgtagaaagctcttgtgttattagcatactgttaatatatatgtcacacacaaagtgcgagcaacttgatatgaagaccaaagtagtaagagatcacaaccaatcaggagcatctttarcaaaggtctttggtttggactttaaatgatgaaaataattt

SEQ ID NO: 318054 - DNA, 405 bp, Homo sapiens
gaaaaacaaatagctaggaagtaccttaggagatgcrctagattaaaggaaaaaataccacttaccccaatataatggctaataattgaataaggagtaaacataagtgttattagacatgtagaaaccctagtgaatgagactctggaataaaggaggcattgtagagctatctggcaactctcagttatattaaatgtataaagtccacattaagtgtttgaaattcctgtggctatgcagttgaatggttatgcaatttcacttcttggaaaatatcccagaggtttcctcagataacatgacaggacattcaagaagacttcgtcacagctttgcggtagtaggcaattgtatgcaatatatgtacatttcaggggatcactatgtaaggaagagaagtaa

SEQ ID NO: 318055 - DNA, 560 bp, Homo sapiens
aagagataagcaaatttactgtgacactgtattagcagggactgtgtccttgtcaaggaactggtagatggggtagcatattccaagagactacagccactgcctctgacctgaaaacagatatattggatttagtttgttggacataagttaattatcaagtttcattatataaattgtcttcacagagaaaaggcagtaggatggctcattactgcagaatcccttgctcgrcttcactgaagcccttgctctctaatgccaagagccacagcctctgacggagactttaattcatggtgatactgcaatacagttcatttcaggatctctattgttgtgtccctgagggttcattcttctcagtaatgggaatggctctgctctataggaggttaaacatacagaaccctagtggcttgcatgattactgacttcagaatagtccctggcacacagatgatgtgaaagaagctgttttttttggtttttttttttttttggtttttgttttcccctggcctggcaagcaataccacctaatgtagagttttctctta

SEQ ID NO: 318056 - DNA, 560 bp, Homo sapiens
aagagataagcaaatttactgtgacactgtattagcagggactgtgtccttgtcaaggaactggtagatggggtagcatattccaagagactacagccactgcctctgacctgaaaacagatatattggatttagtttgttggacataagttaattatcaagtttcattatataaattgtcttcacagagaaaaggcagtaggatggctcattactgcagaatcccttgctcggcttcactgaagcccttgctctctaatgccaagagccacagcctctgayggagactttaattcatggtgatactgcaatacagttcatttcaggatctctattgttgtgtccctgagggttcattcttctcagtaatgggaatggctctgctctataggaggttaaacatacagaaccctagtggcttgcatgattactgacttcagaatagtccctggcacacagatgatgtgaaagaagctgttttttttggtttttttttttttttggtttttgttttcccctggcctggcaagcaataccacctaatgtagagttttctctta

SEQ ID NO: 318057 - DNA, 552 bp, Homo sapiens
caagggtctgttttcactgaaaagcacaccaatactcaaaatatttccatcaattcccagtgcttactcacagaatgttttcttcatttctgtggcaatgcatatacatgctgctacaatattgtctttatgggacatttactgtgtagttctgcttttcasaggcacttagaaaatgcctttttgatgatcattaaactgtgattacttggcatgctaagatttatgagattcgctcaagtaggttatcatcaagcattctctattttttaagtgttcttatatttgtcagttcaaggttattcagaaaatgcaaatgactcaatgagatttattggttaaacttgcaagaaaatattctgtgtggagtactactcagacaagtgcatgcatatagtgtacaaagacttagataattgattatagatatcagcaataccattttatttatatatttgaagagtgaaggtcatataaacttaataatgaaattattgaaaaatggaaaagttgcccagaatgtcactctatttaaatattattgttagcatg

SEQ ID NO: 318058 - DNA, 552 bp, Homo sapiens
caagggtctgttttcactgaaaagcacaccaatactcaaaatatttccatcaattcccagtgcttactcacagaatgttttcttcatttctgtggcaatgcatatacatgctgctacaatattgtctttatgggacatttactgtgtagttctgcttttcagaggcacttagaaaatgcctttttgatgatcattaaactgtgattacttggcatgctaagatttatgagattcgctcaagtaggttatcatcaagcattctctattttttaagtgttcttatatttgtcagttcaaggttattcagaaaatgcaaatgactcaatgagatttattggttaaacttgcaagaaaatattctgtgtggagtactactcagacaagtgcatscatatagtgtacaaagacttagataattgattatagatatcagcaataccattttatttatatatttgaagagtgaaggtcatataaacttaataatgaaattattgaaaaatggaaaagttgcccagaatgtcactctatttaaatattattgttagcatg

SEQ ID NO: 318059 - DNA, 547 bp, Homo sapiens
cctttgcttatgttattatgattgttgtactgactatattatacayatattgcaaatttttgaatttctacattaaaatctcttgataaacacattatcagaaagtaatttctaatcaatttctataatctcttcatattgataaaaaggtaaaacatttgtccaataacttcccagataatttttcactttttgtttctattattttacctagagaaatttaaaatgtttacatattaaaagattttcatgagtaatttgctatcaccttaatttagaaaatgtcaatgcttccaataagtgtttatcttctgtttcattgcatttgaaagagaattatttaaaatgtacctaaatttttttctagcatacgttataaagtgagagcttttaaacatttaaatatttcgaatcagttcttccaacataattcgtttcccatcagtttgccttgccttcattatcagctattaaaaacttatgagccaaagaatctttttagccaaagaatctttttcttgcctgtatatcctattctaccggtttc

SEQ ID NO: 318060 - DNA, 547 bp, Homo sapiens
cctttgcttatgttattatgattgttgtactgactatattatacatatattgcaaatttttgaatttctacattaaaatctcttgataaacacattatcagaaagtaatttctaatcaatttctataatctcttcatattgataaaaaggtaaaayatttgtccaataacttcccagataatttttcactttttgtttctattattttacctagagaaatttaaaatgtttacatattaaaagattttcatgagtaatttgctatcaccttaatttagaaaatgtcaatgcttccaataagtgtttatcttctgtttcattgcatttgaaagagaattatttaaaatgtacctaaatttttttctagcatacgttataaagtgagagcttttaaacatttaaatatttcgaatcagttcttccaacataattcgtttcccatcagtttgccttgccttcattatcagctattaaaaacttatgagccaaagaatctttttagccaaagaatctttttcttgcctgtatatcctattctaccggtttc

SEQ ID NO: 318061 - DNA, 547 bp, Homo sapiens
cctttgcttatgttattatgattgttgtactgactatattatacatatattgcaaatttttgaatttctacattaaaatctcttgataaacacattatcagaaagtaatttctaatcaatttctataatctcttcatattgataaaaaggtaaaacatttgtccaataacttcccagataatttttcactttttgtttctattattttacctagagaaatttaaaatgtttacatattaaaagattttcatgagtaatttgctatcaccttaatttagaaaatgtcaatgcttccaataagygtttatcttctgtttcattgcatttgaaagagaattatttaaaatgtacctaaatttttttctagcatacgttataaagtgagagcttttaaacatttaaatatttcgaatcagttcttccaacataattcgtttcccatcagtttgccttgccttcattatcagctattaaaaacttatgagccaaagaatctttttagccaaagaatctttttcttgcctgtatatcctattctaccggtttc

SEQ ID NO: 318062 - DNA, 517 bp, Homo sapiens
gctaaacaaacggaaaaacctgctaacttggggggaaaggattgtgaacacaatctggatttttgcttctgcccccaaatttgaatcatgttgcggttacttgccagttgcccccagatcccagaactgaccttgatctgaaccaggaggaacagactttacttgagtcctccttctgaaactgtccctaacccgttgttacctttgaaaacaacgttcccatcttgctccaaagccccaggccagatttctgctttggttgctgtcatgtagattcctttctaatgcccacccaggtatccaggtttcctttaggactgaggtcstgccttcctctacccaatccccaggcaccagatttctaggcaccaatgactagggacttatttcccgtcaacaagtttccagacactgcatgtctgcctcctgtcttttgagccatccattaattaactgttgtactctgcttatcgattgagatatttaatgcatggtctttacccatctgctaccaact

SEQ ID NO: 318063 - DNA, 582 bp, Homo sapiens
acctgtacatcctgcacatgtgaccctaagcctaaaagtaaaaaatatataatgttgataatatgaaaatgctatcctgctacatttgctacgtaacttatacataaatataccatatctacacataatatatatgaatatgtacatattgatgggaacaaatatattaaaggtgcatataagtttaatttgttctggatataacagaatctctcccttttctcttctgtattattttcttctgcattacagatgtattctcagcttcagwtctcttcaacatcatgagcccaattttctgtgataccagttatccttactgcttctaatgctgttattagtaatgctattgaatctttagattccttggggacttcccttagtttttacacacctttccttaccttttttactccctctcagctcattctgttttctctaatattaatatattatttttatatattgttccataaactcatattttaattttgttaatgattcaaagcaggtgatttttgaatttttctttagactcctggggaaattattttctgaagttaatttttctcagcacctaga

SEQ ID NO: 318064 - DNA, 567 bp, Homo sapiens
tatatatagttgaaaaaaatcttaagtcacaaaaactttatcaattatctgaacataacacagctgaacttaaatatctatttttatcagacctccattatgtggccagagtttgaatcccaacataaccacttagcatgtttgtgatcttgaacaagtaatttatccttttatgcctaaattggttcctgtataagaagacaaaaaatttatttcaaaggattattttgaagatttagtggcataataaatatgaaagttctccacaaaattaaagcactaagtacaytgttaattgagaaaacaccatgaaagattttttgtctttctgacactatttctctatagaggcttctaacttagaaatgaataggttaaatattgaaaatgttggtaaaaccagaattaatctgaaaagaattagtatccttctaaattatttctgggatattaattgatataaacttttggcaatgtcttttgaaattgtgaaatgtgcctagcctttgattcatcatttccactgtaggaatttatcctagaggaatatttacaaagttttcaaag

SEQ ID NO: 318065 - DNA, 567 bp, Homo sapiens
tatatatagttgaaaaaaatcttaagtcacaaaaactttatcaattatctgaacataacacagctgaacttaaatatctatttttatcagacctccattatgtggccagagtttgaatcccaacataaccacttagcatgtttgtgatcttgaacaagtaatttatccttttatgcctaaattggttcctgtataagaagacaaaaaatttatttcaaaggattattttgaagatttagtggcataataaatatgaaagttctccacaaaattaaagcactaagtacactgttaattgagaaaacaccatgaaagattttttgtctttctgacactatttctytatagaggcttctaacttagaaatgaataggttaaatattgaaaatgttggtaaaaccagaattaatctgaaaagaattagtatccttctaaattatttctgggatattaattgatataaacttttggcaatgtcttttgaaattgtgaaatgtgcctagcctttgattcatcatttccactgtaggaatttatcctagaggaatatttacaaagttttcaaag

SEQ ID NO: 318066 - DNA, 531 bp, Homo sapiens
aagcactggctgtttaaggaaacagtgactgtgtcatgtttctgcactatgcttgcctctctatgaacagaacactcttgacttctaaaacacatggaaagcagcgaattcagtatccaaatgttaaatcctattttatatgctactatataaagtgcatttagaccaggagtcaataaagaaggaggaaaaattcccctctgttatttgagaagatgggtttaggattcatgatagaggataaaatttcaaacattttcaatgaagaggcagagggctgatctgctgtgagctgtcatgtattcccagtatttggtcaggatgcatggaagcaacaaggtgtgagctctcacatcatacccccaggacttccgtccttcactctgcttctttgtgtaatacagtgagcagctaaatattttgaccattactatgaaaaatttgggagatggctacagaaatagattatttaaaagcttcatatrctgtttttactgattcagtactaactaggaaaaggcataattgaat

SEQ ID NO: 318067 - DNA, 621 bp, Homo sapiens
gtaagtgatcagtaagtgttaccaatcaatgtcttcttattataattaggtagatttatgccataatattataaaatcrtatatatatatatataaaagttcaattttagagaatatgcatattaccagaaataaacatatcaaaatgttaacaggtgatacccatggatggtacaattatagttcattttaatcatatacttcataaatattttgattgtatattctatatgaatttagtattaaataaatagtattaaaatatattattaagttgcataattacaatttcaacatggtgtcacagaggatttgttatatacttgtaagaaaaaaatcaaagaagagaatttctgattttggtgtatattaacatcaagaacacaatttgaaccaaagagttaaggtataataacagaataattagaataatatattcccccttcctgacttaatacaacatttaaaaatagagatatgaaaaataatatgaatactgcagtgcattttatatttcaaaaaaataaacaatgaaaatagtgttaacttaaaggacacttcctgatatctgaagcttgagtaacggcaggtgaattttataataacaccctccccacaaag

SEQ ID NO: 318068 - DNA, 596 bp, Homo sapiens
aactacacacattatgcatcattatgcattctctacaatttccaattccagtgtctctacagtgaatgcaagaacctaaaagacattataggaagcagttgtgttcaccatattccagatatttatgacttttgacttccttccaaaacctaattttatagctgctttatttaagtggcatacctttatggaattctcccaaaacattcaatttagtttttcttgacacaattttttcttttatgttgatattttattggtctggataataaaaataacatgtgcaactctccttaacagttacagacaaaacagaactgaatttttaaaaatagaattcaaggctgggcgcagtggctcacgcctgtaatcccagcactttgggaggccgaggtgggcggatcacgaggtcaggagatcgagaccgtcctggctaacacagtgaaaccccatctctactaaaaatacaaaaaaaaaaaaattagctgggcatggtggggggctcctgcagtcccagctactcgggaggctgaggcaggagaatggcatgaaccygggagctggaggttgcagtgagacgagattgcgccactgca

SEQ ID NO: 318069 - DNA, 594 bp, Homo sapiens
tcagcctgggttgttttcataaatgatttaggtaaaagtctctggagccagacttgttagatttttaacctggtcatgaaattctatacaactgttataatttagtggaaaagttatctctcggcttcatttttatttctcccccaaaataagagatatagttggttatatggctataaattttataagaaaaaaagcaaatttatgaattaaggataagtgaaacttgaaaacacttttaggtttttaaatcctgcctccaccacttaaaatatagatggctaatgctgtagattttgcctccaagcccttacattagagtttttttctgttcttttctttctttctttctttttctgactacactgaaaagacagagttctttggayactttgaaaggacaaaatggatagagtttttcttatccacttttcctagggctccccttttcagttggaagtgttatatcagaatctttgttccagcccattgtctcatttaaccagaagttaagtctcctgtgcattagagggaataaaaacctcagtgctcccagatcaaaattcatatgagctattatctacttttcatgct

SEQ ID NO: 318070 - DNA, 620 bp, Homo sapiens
cttacatgaataagaaataaawttttttcatcttctcatcattgcatgtttttttggttgtttattacagcaactggtgttactttaagtaatacagaattagtgtaccaccatttcacttttcatattcaaaaattagacattatgccttttaaaatgttaccaacttataacagctgttaaattgtttcttccatttgaattctttacattagaaaagatgaactagggatgggtggcatgtcataattggccaacagtttcaatgtgacgaaagacccaagggatttagttaattaatagtgaaacataaaccaaaaacataatcaacatgcaagtggcatgggatactggtgcttagaacaggggacaaaatagcctcatgaagttgtccagtggtcagaccagacctgaacttcagttctggacagcatccctcagaagtgagatgaatgaactacagttctcagtgaaaaggactgggatatttttcctggaatatagataccaaaaagaggtggggctggcatgacaataacattaatgaggataacacaaataggcacttcttttggggtgggtatactaataattaccccatcacgaaaaccagccaagtt

SEQ ID NO: 318071 - DNA, 606 bp, Homo sapiens
gggggtacatgtgcaagtttgttaaaagggtatattgcgtgatgcagaggtttggaagacaattcattccatcccccatatactgagcatgctactgaaaagttcgtttttcaaactttgtccccctctcttcctcctgccttgagcaattttcagtgtctaatatttatatctttgtgtccctgagtgcccaaggtttagctccaacttataaatgataatgtgcagtatttgtttttctggtcctactttaatttgcttaggataatggccgccagctgcatccgtgttactacaaacgtgattttattattttttttatggctgcatagtatgcagtgttatatatgtatcacattttctttgtccaatccactgttaatgggcacctagattgattccatgtctttgctattatgaatagtgctgcgatgaacatacaagtgcatgtgtctttttggtaaaacaatttgttttcctttggatatatactcaattgtgggattgctggtttgaatggtagttctgctttctgagaaatctccaaacttatttctttgagaaaaaaagaactctcyaactggtttccacagtggttgaactaat

SEQ ID NO: 318072 - DNA, 598 bp, Homo sapiens
ctgacctaatttcattgtttactcaaaagccattcaggagcaaatcgtttaacttctaggtagttgtataattttgagagatcttcttagtattggtttccattttattccactgtggtccaagaatatggttggcattatttcagtttttttgaatttattgagatttgctttatgaccaagcatgtgtttgatcttggagtttattgtgtgtgcaaattagaagaatataatactgtggttgatgggtgcagtattctttggatgtttattaggaccagttggtcaagtgtccaatttaaatccagaayttgtttgttttctgccttgatgatctaactaatactgtcaggggggtgttgaagccctccactattattttgtagctgtctaagcctttttgtaggtctagaaatactgattttatcaatctggatgctccaatgttgggtacatatatatttgggatagttaagccttcttgttgaattgaatactttatcattatgtaacacccatctttgtcttttttactgtagttggttcaaagtctgttttatcttatgtaggaattataaaccttgctctttgtttattt

SEQ ID NO: 318073 - DNA, 481 bp, Homo sapiens
atgggcttatttgtggagttcacagtgatcttagctccttgctcagttctggaggagcaggggccaagattagcaggtaggtctgcctccctgtgcttctccagtggcagggagaagcaccagcactaagggagaagccaatgggtggctaccaagtgcccagaggtgtgcctaggcatggagctggtaaacctaagccccaagttctccrcttggggatgaggggcatcccaacttttaatccatgagaatgggtgaaccagatacctggagatatgcctgggtgtgtagcagagagggccccctttcaccagaatctctgcacaggaagggtggggcagtacaggctgctgttccagacaagtggctgccctccatgcctaaagatctgcctcagtctacagcatagaggacaccctgcacccagttctttgctcaaaaaaggcagtttgtctcgggctgctcagttaggtgaggtggt

SEQ ID NO: 318074 - DNA, 573 bp, Homo sapiens
taggtgaggtggtactccagatacctagaaatttgcatgcacatggagcaaagaaagacttgctgcaccacaatctaggtccaggaagggcagggcagctcaagctgctaaactaggtgaatgggtgctctaaatgcctggatatcttcctgggcacggagtggagagggccccactgcaccttgatctatgttcatgaagggtgagacagctcatgctgatgattcaggcaatcaggtgctctaaatgcctggatatatgcctgggggtggagtggagatggccccatttcaccgtgatttcagggaagcaggctggggcacccagcaatggcatccacagactggttccaggtcactgaactggctctayctgcaagtctcactgcctaggataaactgcagctttagaagctctccccaccctagacttgtcacaaggaagagcacaattccagcgcctactgttgaggtgctttccacagttctggctgtggaggccacaacccggccccagagcaggcactccaatgtctggcctgagactcaaatgtctgtgtgaccatgctgccag

SEQ ID NO: 318075 - DNA, 573 bp, Homo sapiens
taggtgaggtggtactccagatacctagaaatttgcatgcacatggagcaaagaaagacttgctgcaccacaatctaggtccaggaagggcagggcagctcaagctgctaaactaggtgaatgggtgctctaaatgcctggatatcttcctgggcacggagtggagagggccccactgcaccttgatctatgttcatgaagggtgagacagctcatgctgatgattcaggcaatcaggtgctctaaatgcctggatatatgcctgggggtggagtggagatggccccatttcaccgtgatttcagggaagcaggctggggcacccagcaatggcatccacagactggttccaggtcactgaactggctctacctgcaagtctcactgcctaggataaactgcagcttyagaagctctccccaccctagacttgtcacaaggaagagcacaattccagcgcctactgttgaggtgctttccacagttctggctgtggaggccacaacccggccccagagcaggcactccaatgtctggcctgagactcaaatgtctgtgtgaccatgctgccag

SEQ ID NO: 318076 - DNA, 494 bp, Homo sapiens
ctgctgcaataaatgggagtgcagatacatcttatatctttgatatactaatttcctttcttttgagtatatacctagtagtgggactgctggattctatggtagttctatttttagttttttgagaaacctccaaactgtactccatagtagtcatactaatatacatttccaccaacagtgtacaaaggttcctttttctccatatccttgccagcatttgttattgactatattttggatacaagctattttaattggggtgaggcaatatctcactgtagtttttatttgcatttctctgatgatcattgatgcggagcacctcttcatacatctatttgccatttatatgtcttyatttgagaaatgtcttttcagatattttgaccattgtttaattgtattattagatattttcttagagttatttcagttccttatatattctggttattaatccattgtcttatcaatagttgcaaatattttct

SEQ ID NO: 318077 - DNA, 547 bp, Homo sapiens
ctcttgtgaataaaacatcattctatatgtaaacagattcactcaaccctttggttgtagaaaacttcagagtcggtaagttgctgtctaacttcctgttgcatgcacttgccagagaaaagtgaacaatgccttctgtgccagcatcatttggggatgaaaagaatcatttcacatagctgaagggggcagcctggtgcttccagagaaaggcaatgaaaaccacagggaataaagtactgaacaccgcattgcaagtttgcatgaggggggccacactgttggctaccatggagaaaaagaccaaaaggactgccatgacagcaaggaggatgtsgatgactttgtccagaagattccaggcagtggcattctccagcccttctagctccaccacctgctagtgctgcatcatgaatatccagctccatcttagaaacgcaggtctggcatgcctcctggatttcccaggcccatcctgatatgcaaattttttccctgctgaccagttcctgcttcaagttcaagatttcattctggtgaagct

SEQ ID NO: 318078 - DNA, 505 bp, Homo sapiens
gaaaccccatctctactaaaaatacaaaaaattagctgggcatggtggcacgctcctgtagtcccagctacttgggaggctgaggcagaattgcttgaacctggaaggcagaggttgcagtgagccgagatcatgccactgcactccagcctggggacagagtgggactccatctcaaaaaaaacaaacaaacaacaaaaaagtggacctgtattagttgttgcaaaagtatattgcaaactctagtgyaatgactaaaaaaatataaaaaagtataatgaatatttcaagaaaggggagaaaagggaataatttaaaatgcacttaaaaccacaaaaagaaaaaaaatgtggaagacaaaaataagaaccaagaacaagtacaacaaatattaaagtgcaaaaagtacaatagatattaatacaaatatatcaataattatcttaagtatcagtggcctaaatacatcaaagaaaacacagagattgccaaattggatcaaaaa

SEQ ID NO: 318079 - DNA, 611 bp, Homo sapiens
catgcacacacacagagacatacagtgggccagcagctttgtaaatgtcacacttggaaattgtggaacacctcatgttccaatctttctaccagtctattcagtagcatcccctcaaaatgaaataaaacactaaaacaacaaacagtgtaattaccgctaaacaataatttcatgataaatctttataatacctatgggacctggagcaattgctagtagagagttaagatttcttgactaccagtgaatcatcactgatggaaggaactgaccagatcaatgtaggatatggactggcctgggcacagaaaacaagcagtgggtgatgaaagtgcggggtgataatggaaggaaaggacaacgaccacacgttccctttaatgcccctgactaggggatcactcatattttagagaggaggaattataacaacatttgaaaaccactcttgttctatgtatacattatttatgggcaatatgatgtactgcttaaatactgttttgaaatcagtgagtcctgmgtttaattttggtcctaatatttacagttatgcaaactagactacttattgcctctacaccctcctttccttattggatgaatta

SEQ ID NO: 318080 - DNA, 607 bp, Homo sapiens
ctgtgcataatttcacttctatctatatttattttacagtgagcagcgtaatgacaatttcagtaattgcaactctataaaaatttgcctacctagcttatctcactatcacaagactgtgagtcagtcagattagaaaaagtacagcatgtgaaacagcactggttgccttccaaaaatatgggccttctataaaaactcaagtgatgctttgcacttgtttgcgttcttatctattgggtaatggtttcttcccgatgttttgattgggacgtgtgcattcctctttaattcatagtgatttatgggggcaccctccttackaacagacaaacgtatttggaagagtagaagtgccagcccatttctgcagactttgttataaatggctgttatgttgctgtcgagcaatttgaacagaagagaaagtccatctggggcaaatttaagctatcgtgcttggaaggatttcaaggactaaattagcccacaaactgttagctaaaaataaaagttttattgtttgttgtctaacttaaaaatcccaccattgaaattaacaccaattacatctactgtatatgtgtatgtatagattcccctaagg

SEQ ID NO: 318081 - DNA, 660 bp, Homo sapiens
tcaagaaaaaccagcttttgactaaaaaaaaaaaaaaaaaaggctagtttcaggctggagtgtattgtcaagaccaagttataaacttctgaaaaacaggaatgataatggaattgctgctacaaccttaaatataayggtgtgaatggctctgctattatttactatggtaacgtaataaaagacagcactgtttgggccattatactcactgctcttttttcagtataaatcattatatttattatctgtcttcttgtatagggggtcataagaaaggccaatcgaaagctgaggaaacctactttcctaaaagaaattgagcctatttctaattcttcttctttatcaaatacaagggaacagagaattttttgtgaaaaattgtttcatgtaagagtaaagtgtagattattggtgagaaatgacattcacttctagacatcttttagatccctgggagatattgccagtctctctctgatatttttacctttcttccttggaggatttgtttcctggcaggttttgagcagtgggtgctggagcttttattctgttctggagacttgtgttattatttattgattgataactaaagctatgatcttagcaaaataactccttttgagtgaattttatttaaacatcagaaatgtg

SEQ ID NO: 318082 - DNA, 660 bp, Homo sapiens
tcaagaaaaaccagcttttgactaaaaaaaaaaaaaaaaaaggctagtttcaggctggagtgtattgtcaagaccaagttataaacttctgaaaaacaggaatgataatggaattgctgctacaaccttaaatataacggtgtgaatggctctgctattwtttactatggtaacgtaataaaagacagcactgtttgggccattatactcactgctcttttttcagtataaatcattatatttattatctgtcttcttgtatagggggtcataagaaaggccaatcgaaagctgaggaaacctactttcctaaaagaaattgagcctatttctaattcttcttctttatcaaatacaagggaacagagaattttttgtgaaaaattgtttcatgtaagagtaaagtgtagattattggtgagaaatgacattcacttctagacatcttttagatccctgggagatattgccagtctctctctgatatttttacctttcttccttggaggatttgtttcctggcaggttttgagcagtgggtgctggagcttttattctgttctggagacttgtgttattatttattgattgataactaaagctatgatcttagcaaaataactccttttgagtgaattttatttaaacatcagaaatgtg

SEQ ID NO: 318083 - DNA, 660 bp, Homo sapiens
tcaagaaaaaccagcttttgactaaaaaaaaaaaaaaaaaaggctagtttcaggctggagtgtattgtcaagaccaagttataaacttctgaaaaacaggaatgataatggaattgctgctacaaccttaaatataacggtgtgaatggctctgctattatttactatggtaacgtaataaaagacagcactgtttgggccattatactcactgctcttttttcagtataaatcattatatttattatctgtcttcttgtatagggggtcataagaaaggccaatcgaaagctgaggaaacctactttcctaaaagaaattgagcctatttctaattcttyttctttatcaaatacaagggaacagagaattttttgtgaaaaattgtttcatgtaagagtaaagtgtagattattggtgagaaatgacattcacttctagacatcttttagatccctgggagatattgccagtctctctctgatatttttacctttcttccttggaggatttgtttcctggcaggttttgagcagtgggtgctggagcttttattctgttctggagacttgtgttattatttattgattgataactaaagctatgatcttagcaaaataactccttttgagtgaattttatttaaacatcagaaatgtg

SEQ ID NO: 318084 - DNA, 660 bp, Homo sapiens
tcaagaaaaaccagcttttgactaaaaaaaaaaaaaaaaaaggctagtttcaggctggagtgtattgtcaagaccaagttataaacttctgaaaaacaggaatgataatggaattgctgctacaaccttaaatataacggtgtgaatggctctgctattatttactatggtaacgtaataaaagacagcactgtttgggccattatactcactgctcttttttcagtataaatcattatatttattatctgtcttcttgtatagggggtcataagaaaggccaatcgaaagctgaggaaacctactttcctaaaagaaattgagcctatttctaattcttcttctttatcaaatacaagggaacagagaattttttgtgaaaaattgtttcatgtaagagtaaagtgtagattattggtgagaaatgacattcacttctagacatctttyagatccctgggagatattgccagtctctctctgatatttttacctttcttccttggaggatttgtttcctggcaggttttgagcagtgggtgctggagcttttattctgttctggagacttgtgttattatttattgattgataactaaagctatgatcttagcaaaataactccttttgagtgaattttatttaaacatcagaaatgtg

SEQ ID NO: 318085 - DNA, 621 bp, Homo sapiens
ttaaggtgactgagtagcaacataatgggttcaggtgctgtatgaaactactcagatattaatccacatggagcagtgtgccaatggaagacagtctacatttcccgtttgaaatattcattgctttcctggattacacagttcacacaggaagtatgtactgaatagacacagtgagtgccatatatgttgcagtgtttgtaatatgacccaagtatgttaaccaaaattagacacaatgtgtaagaatattaactgtatatctaaggtagggatggcagtaatcattctctccttatttttcttactctaatattttagaaattatatttataawctttcattatgtttctatcatgctgacaaaatatttccattgttaaaaagatcggattaaatggaacatcaactcttggtctggaatttgaagattctttcatttaactatgccttttcaaccttattttcaaagctcctctctaagtatccactggtgtgggtgtagcaggggtatcttaacctgagcagaactttcttcagttatttctatactgtcagcacatagaaaatataatccacagtattacattttgttgaaacaaaaataagcacaattccatt

SEQ ID NO: 318086 - DNA, 590 bp, Homo sapiens
aagagacgttggtcggaagttttctttcttactatatttttcattttgtaccagagtaatactggcttcatgaaatgagttgggggtgttccctcttatttytgaaagagtttggatggaattgcaactgtttcttccttaaatttttggtaaaattcaccaataaagccatctaggcctgaagtttcctttaagggaaggtttataagtataaattcaatttctttaaaatatactgtgctaaaaatgttatctatttcttccttagtgagctttcagtttattacaatgaatgagtcaatttcatctgagttgtccaatttattgacatcaagttcttcataatattatattattgttcttttactaactgtagaatttatcatatttattgttcttagaggactagcttttgatttcatggacttttctctattgtctttctgttttcaatttcgttagttttgctcttatcttcaatatttccttttgctttgagtttagctcttctcttactcatttattaaggtggatgtttagatcattgatttgggatctttcttctttcctgatataagtaatcaatgcta

SEQ ID NO: 318087 - DNA, 590 bp, Homo sapiens
aagagacgttggtcggaagttttctttcttactatatttttcattttgtaccagagtaatactggcttcatgaaatgagttgggggtgttccctcttatttttgaaagagtttggatggaattgcwactgtttcttccttaaatttttggtaaaattcaccaataaagccatctaggcctgaagtttcctttaagggaaggtttataagtataaattcaatttctttaaaatatactgtgctaaaaatgttatctatttcttccttagtgagctttcagtttattacaatgaatgagtcaatttcatctgagttgtccaatttattgacatcaagttcttcataatattatattattgttcttttactaactgtagaatttatcatatttattgttcttagaggactagcttttgatttcatggacttttctctattgtctttctgttttcaatttcgttagttttgctcttatcttcaatatttccttttgctttgagtttagctcttctcttactcatttattaaggtggatgtttagatcattgatttgggatctttcttctttcctgatataagtaatcaatgcta

SEQ ID NO: 318088 - DNA, 590 bp, Homo sapiens
aagagacgttggtcggaagttttctttcttactatatttttcattttgtaccagagtaatactggcttcatgaaatgagttgggggtgttccctcttatttttgaaagagtttggatggaattgcaactgtttcttccttaaatttttggtaaaattcaccaataaagccatctaggcctgaagtttcctttaagggaaggtttataagtataaattcaatttctttaaaatatactgtgctaaaaakgttatctatttcttccttagtgagctttcagtttattacaatgaatgagtcaatttcatctgagttgtccaatttattgacatcaagttcttcataatattatattattgttcttttactaactgtagaatttatcatatttattgttcttagaggactagcttttgatttcatggacttttctctattgtctttctgttttcaatttcgttagttttgctcttatcttcaatatttccttttgctttgagtttagctcttctcttactcatttattaaggtggatgtttagatcattgatttgggatctttcttctttcctgatataagtaatcaatgcta

SEQ ID NO: 318089 - DNA, 590 bp, Homo sapiens
aagagacgttggtcggaagttttctttcttactatatttttcattttgtaccagagtaatactggcttcatgaaatgagttgggggtgttccctcttatttttgaaagagtttggatggaattgcaactgtttcttccttaaatttttggtaaaattcaccaataaagccatctaggcctgaagtttcctttaagggaaggtttataagtataaattcaatttctttaaaatatactgtgctaaaaatgttatctatttcttccttagtgagctttcagtttattacaatgaatgagtcaatttcatctgagttgtccaatttattgacatcaagttcttcataatattatattattgttcttttactaactgtagaatttatcatatttattgttcttagaggactagcttttgatttcatggacttttctctattgtctttctgttttcaatttcrttagttttgctcttatcttcaatatttccttttgctttgagtttagctcttctcttactcatttattaaggtggatgtttagatcattgatttgggatctttcttctttcctgatataagtaatcaatgcta

SEQ ID NO: 318090 - DNA, 583 bp, Homo sapiens
tgtgccacatattttgacctcagtaaatgttcatwtttattataagctttgtatttcataatttttctttttagaaaattattttcaaaggaattgataccacaatctccatagcactaaaattccaatatggagctcttattttgagaatgtcatataaactgtcacatggtatgatacctttcatgtctggcttcttttacttagcaaaataattttgatattcattcatattgttgcagtattagtaatttgttgctttttattgctgagtagtattctattgtatggctgttcataatattcaccatattttatccaaatatggaatattttatatgtgcccaaatattcatcatattttgtctaaatatgatggacatatgggttgtttccagtttgagactattgtgaaaatgcttctatgaatatttgcatagacatctttgtgtggacatacgttttcttttgtcagtagtaaacatctaggagtagaattattgggtcatatggtaagtaaatgtttaactttaaaagggatttttctgaagtagctgtatcatttgtattcccaccagcaata

SEQ ID NO: 318091 - DNA, 558 bp, Homo sapiens
tccttttgtcagcaattcctctactttgtcatatattaattacaaaatccaacttctggatggctactctagaaacaaggctgatatgccctgggaatagaaagcagcaaggatggaagaggagatgagagatatgttgatgackgtgtactgagaaagcacccctttgatttctgtaaagtgaccacttaccccccacctatgactcagatttttactgtgctcaaggttagagacagaagaaaacagagttttgtgactaaacatcactgggctggttggatccatccacctggctctaatcatccaattcatgcacctgtgcttccctcatttattccttatgcttgatttagtttctgtataagaacctgatttctctaaactggggttctttactgacactttttccagaggataacagggagaatagtataacctctgtggctggatcccacatactttccgcctgtgggatcttcatgggctgccattttgcctttctaggcccagctgactctcctaaggccatgtttctctgaaattctaatccacaag

SEQ ID NO: 318092 - DNA, 579 bp, Homo sapiens
gtgtcacttcacccccagctttaggtagctcagaacagacagagaatctgtttgtttaggagaaaggaagggaagagaacaagagtctctgcctggtaatccagataattcttccagatcttgtccaagatcatcaaagtagtacctccataagtctgcaagaaccacagcattactaggcttggggtgccccctaaaatagatacaaattagatcacaacacccaagttatttcaaatatctagaaagccttcccaagaaggatggctacaaataaacccagacagtgaagactacaataaatacctracttttcaatgtccggacaccaaagaacgtctactagcatcaacaccatccaggaaaacatattaaataaggcatgaatgactaatcctggagaaacagagatatgtggctgtattagttcattctcacactgctgtaaagaactacctgagactggataatttatgaagaaaagaggcttgactcacatatccacaggctatacaggaggcttggcgggggaggctcaggaaactgacagtcatggcagaaggcaaaggggaagccagc

SEQ ID NO: 318093 - DNA, 579 bp, Homo sapiens
atatatatttttaaaatacaaaggaatattttaatctcagcttaactatttcatggttttatactcactctgcattttacttccattattgacccrttaaaagtgttctttgcctcaggaatagaataaagagaacatcagaaccaattatcctggaacattaagcatgttattatttccaaatgacatgtttacttaaaacgaaaaaaaaatcaatgttgatttttgtattgctaataagaaaaaaagtcactaaaatttaaatataaagattcttaccatcaataaaacataaagaaacaaaagacttatttaataaaagcaaacaagtatttgttatctgtcattaattacacaagttttggagaaatcatctattcagtgatatggttgtttttcttataattttacatagaagcatctttttgggaaattgtttcttatcaggaggcatgtttacatttacagcagatgaaagtaaatctcattcattaaaattaataatgataaatatcctcatttgcttattggaagtgcataatcagattgaattagtactgtgaattgattagtctacaa

SEQ ID NO: 318094 - DNA, 579 bp, Homo sapiens
atatatatttttaaaatacaaaggaatattttaatctcagcttaactatttcatggttttatactcactctgcattttacttccattattgacccattaaaagtgttctttgcctcaggaatagaataaagagaacatcagaaccaattatcctggaacattaagcatgttattatttccaaatgacatgtttacttaaaacgaaaaaaaaatcaatgttgatttttgtattgctaataagaaaaaaagtcactaaaatttaaatataaagattcttaccatcaataaaacataaagaaacaaaagacttatttaataaaagcaaacaartatttgttatctgtcattaattacacaagttttggagaaatcatctattcagtgatatggttgtttttcttataattttacatagaagcatctttttgggaaattgtttcttatcaggaggcatgtttacatttacagcagatgaaagtaaatctcattcattaaaattaataatgataaatatcctcatttgcttattggaagtgcataatcagattgaattagtactgtgaattgattagtctacaa

SEQ ID NO: 318095 - DNA, 582 bp, Homo sapiens
ccatatgtcaattttacataacttgttaacattgaaattgcatcaaagttcaaagttgcattgtgtctttcacattattgttacccatatttcacttttgacttatggaagagcaagcaactgatacaagactggagcatgcattatcacagccgttatcagatataagtgctaaaatgttgacagcttagaaattaaaattcctggcagaccacaaagctttcttttataaacattagaattacctttctatttcaaaaaagaaaaatgactttgacctcattctaatgcttattaccaagaacgtttcagaaagcagattagtcaaaatacgctttgccttcattagtattccctgcatcatgctataactaatgatttctattactaattgtcattactaaacaggttttatctgaaaactttgtgacaaattttatgcattctttcactttactccctttgaagaaaaggaaactttattatacaataatataatctttcagtcagttagcaaaataagttggttacccacwgtgtgaataatactgtggttagacatattcgggagtgtccaaagga

SEQ ID NO: 318096 - DNA, 541 bp, Homo sapiens
aattaattttatatttacctttatttatttgatttgcagcaattttaagttttttrtatgagtacaggcttttgttttgtatctttttccttctctgtaaacatttttttaaaaagttctttcagagcagatctgctggcaataaattttatctcactcttttattttttgctgaaaatttatcattttgctttcctctatgaacaatctttatgttggttatacaattcttggttgactaattttcttttagcacttttagatgctactacattgttttctagcttttacagtttctaaagggaaatctgctatgcaaagtttttttttttttcctatgagacagagtcttgctgtgtcaccctggctgcagtgcagtggcatgatctcaactcactgcaacctctgcctcttacagttcaagcaattcttgtgactcagcctcccgagtagctgggattacaggcctgcaccaccatgcctgcttaatttttgtatttttagtagagacggggtttagccatgttgctcaggctggtct

SEQ ID NO: 318097 - DNA, 580 bp, Homo sapiens
atgtcattatttgtatacattcaataagaatctattttctttttaacatgrctcaagtggagacattgatggttttaccaagactttggaatggcatattttcagatatgactagatctctttctggaattggttgactttatagagctgataaaaagcccattaaaatgattgacctgctaccttctctacacagtttccgtacaaagtttctgtccttgagtaagaaaagaatgcaatgggactccttttttaatgaatggttctgagataactggctagacatatgcagaagattgaaaccagaccccttcattataccatatacaaaagtcaactcaagatggactaaagatggacttaaatgtaaaacctaaaactatgaaaatcctggaagataacccaggaaataacattctggacatagtccctggcaaagatttcatgacaaagtcatcaaaaccaattacaggctgggcgtcgtggctcattcctgttatcctagcactttggggggccaaggcaggtggatcacgaggtcaggagtttcaaaccagcgtgaccaacatggtgaaacccc

SEQ ID NO: 318098 - DNA, 455 bp, Homo sapiens
tattgtgccctttaactaaatagatatttgataaattttaactacatatgtcattaggaatccagcgatatatatggcatcatcttcccttttcaagaaagtggcaatctatgaatctgkgctatttgagatagcacaaatatgtgatacatattagtgtcatgagtactacaaaccacttatgaaattgtctgattagaaggattgcaaaaaataataacagctataagataagatattgcatttataaatgtgtgtagatattctgaatataaaggattagttttcactatttctttaaaccgtaagatactgattgctgtgaaaagcattactaccttcaaagtgatccacaaatccattttttcatctctgatctctatcaacttctatattttcagtctttattatttgtttccttatgatctcctgtgattccttaacattattcaaaa

SEQ ID NO: 318099 - DNA, 543 bp, Homo sapiens
tccagtgcaattcttgacacttgataagtatgttaagggctataaatataaatataaacatttttattaattaaccactaaatattattaatataataatgcaataaatcagagtatgacattaccactgtgtgagataaaatgttctaagaatttgaacatagcactatacaggtaaaaaagaactctgacaataactgtcaaccttggaattggaatgcaatgacataaaatgaaaacttcccattcgacttctcaaagttaattcttacatatgcctctcttttcctttcttaacttcacctttattaaaaaatattttatccaaataaaatatttcaagttcagcaacatcattcattcatttgtattggctacctactgtgtgtcagatatttttccaggasctgaagataccacagtgaacaaaaaagtttcaagtcactatgctgattgagcttacattctagtggtggaaacaaataattgaaggcgaaagggcccattgatggaaaagcattgcatgtagaaagaacagctgtg

SEQ ID NO: 318100 - DNA, 272 bp, Homo sapiens
tggggaaaaaaagtcatctttcttaattatattttacgaccatctgttatgtttgttgtaataactaaacaaatcttactctaactacaagtatatagtagcttttggagttatggtagctaaagtcttaggaaaacatagatggagtrtagaatgcttgaactgagtcataatggataggtaggaattagttagataaaaaagagggagtacattgtagcagagggcacacaatgagtaaggtcacagagaaataaaataccatggcaaca

SEQ ID NO: 318101 - DNA, 596 bp, Homo sapiens
cagccaaaccatattaattgtattgcaaaatactaataagaaaataggagaaatttgtgtcttattctgtatctatgttacacaaatcataaacctaaaattgagctaaaatatccttttgtcttaaagctacgaaaatccaaaagtataaaaactcttccactgttgacaatttagaagaggttacagtcgtacaggccagagaataagtatggtgggccaagcaaagagaccattgctagtccctccctatctctacctctgaggctggaaccaaacttaagcaacgggagctctcccaaaggagttaagcatgccaaggccagaaatgagcaagggcagtatgacaaaggactttagaggtggttgggtctccttggctttcatttcaagggtactgycacctgtgaagatctcaacacatggctaggaggccagggcccactcagttcagatggcagccatgttgattataggaccagggcatccacggaaaagataagcattttcccagcatccttcaggccaggcatggggtgggacctcactgggatctagggcaggtcaggatcccatcaggccatggaaagaggttg

SEQ ID NO: 318102 - DNA, 596 bp, Homo sapiens
cagccaaaccatattaattgtattgcaaaatactaataagaaaataggagaaatttgtgtcttattctgtatctatgttacacaaatcataaacctaaaattgagctaaaatatccttttgtcttaaagctacgaaaatccaaaagtataaaaactcttccactgttgacaatttagaagaggttacagtcgtacaggccagagaataagtatggtgggccaagcaaagagaccattgctagtccctccctatctctacctctgaggctggaaccaaacttaagcaacgggagctctcccaaaggagttaagcatgccaaggccagaaatgagcaagggcagtatgacaaaggactttagaggtggttgggtctccttggctttcatttcaagggtactgtcacctgtgaagatctcaacacatggctaggaggccagggcccactcagttcagatggcagccatgttgattataggaccagggcatccasggaaaagataagcattttcccagcatccttcaggccaggcatggggtgggacctcactgggatctagggcaggtcaggatcccatcaggccatggaaagaggttg

SEQ ID NO: 318103 - DNA, 356 bp, Homo sapiens
tcattaataaagagtcctgtaattttatttttattttatataattttataaaacacattcaactagggaaattaagaaaataccaaatcatatgagttaaatacatttgtatctatagttcaaaattaatctccaacaatactgttgcttcaaaaacaacaacaacaacaacaaaaacaacaacaacaaactggaycaaagaaggcatacaaagacaaaggtgtatgtgaaaagatgatcaacatcactaatcatcagggaaatacaaatcaaaaccacaataaaatatcacctcacaacttcacacctgttgggatggctataatcaaaaagttagaatataaaaagtgttaaaa

SEQ ID NO: 318104 - DNA, 558 bp, Homo sapiens
attttatcaattaacataggcaacgtgaaaaacaaaaagagaagaaaaagaggagtgtctgttgccaatttcacataggactcaagtcttggttcaaaaaattctttactcttgacctgagttacaaatcatcctcaagttttccttttaccagaggagaaggctccagcctaagggtcagataatcaacaaacttggaaaagagtaggggaaagtgttggctcttctcttactacattgctgaaaaaccagtctattaagttaattattgtgtttcaacaaatcttcattaataaagagtcctgtaattttatttttattttatataattttataaaacacattcaactagggaaattaagaaaataccaaatcatatgagttaaatacatttgtatctatagttcaaaattaatctccaacaatactgttgcttcaaaaacaacaacaacaacaacaaaaacaacaacaacaaactggatcaaagaaggcatacaaagacaaagrtgtatgtgaaaagatgatcaacatcactaatcatcagggaaatacaaatca

SEQ ID NO: 318105 - DNA, 598 bp, Homo sapiens
aatgccagctgctagtttatctatgctactcagggaaggcttctgtgatagataaagtatcattagagaagaaacatggaagttgtgaggtgagccatatggataactggagaaccagcactgcggagtgaagaaacagtaaatgcctggaggtgggagtacacctagagctcaaatacaggcaggtagccagtctacatagagtgcactgagcatgagacagagtagaaaataaggtctgaaaggtaagggagaaggatggatcctgaaggaccttgtacttcattgtaagaacattgggaaactttcccaatgagcaaaaacatgacagccagatggtcactcttggctgctgaaagaaacataaccattattactacaaactctatgatataaatttgctcactgatttataacacattttacaactttgtagttaaactgaaaagtttttaacattrttaagcaacataaagtgaaacgtagctaaattctattgagaaaaagcaagtaagaattatttcttcacatcactattagaaatattttaatgacttaataaacaatttgtcagacaagataatatatgcagacagct

SEQ ID NO: 318106 - DNA, 631 bp, Homo sapiens
taaagaagcattatttataaaattatataatacttaaaaactttatatagtgtgtttaaggaatcctagtgacttgagttaaaatatgagaaactgcattataaataagatattctgattttacttctaatttttataacaaggaatattaataaaattaactgaaattacttgtgaaaattcatgaaaatcatctgttaaatctttttcaaaactgaatgctttctcctttctacttctgtcagaggcatgtgaaccagaacaactccatcttgaataggagctaggtaaaatgagactgaaacctaccgggctgcagtcccagacagttaaggcattctaagtcacaggatgaaataggaggtcggcacaagaaacaggtcataaagaccttgctgatgaaacaggttgcagtaaagaagccgggtaaatcgtagcaaaaccaagatggccacgagagtgacctctggtcgtcctcactactacatgcccatcaacacgtgacagtttacaaatgacatggaaaygtcaggaagttaccctatatggtctaaaaactggaggcataaataatccaccccttgtttagcatatcatcaagaaataaccataaaaatgggcaatcagcagc

SEQ ID NO: 318107 - DNA, 611 bp, Homo sapiens
cacagccaaaccatatcagaatgcaatataaaaacagaaaaagaggttgtgtttataccacaaaacaaagaactaagagcactaggaagaactaaatcccatgagcaaatataagcattactaataaaatatttaatgcttttctgtatctagttagagtctacaccacttataggttttaaaatattatttctgtaaaacttgttaaaattcattatgtattggaattaattaggagtaatgtgagggtttgggccatttaaaaatggaaggaggatagtgcaaaagccagagaaggatgtactcagaagtttgttagtggtaagataaaacttttgattttagaattttgaaattttttgccactatttcaaataaaatatttacttctttataaatagagttattactattttgttaatttactcctaattgaaataaacttatcaagtttcatctactactcaaataaggcaccactgattatatgcttgcatcttccagaaataaaagcagataatcttaaaggatatatttttaaaaaaaaacctcattaaaattgttttgaaattgtaactattttagastaagtagaaagtctcaactggtta

SEQ ID NO: 318108 - DNA, 513 bp, Homo sapiens
tactgcaggcattttcagtttccactctttaatgtttaatgtggtgtgtcactgtaggtatctcaaaataaaaacccattttttttaatgcttcaaataaaaagtcatgtatattaaaacttggctaagatagtcacacaattagaaaatagtaagggaacagatgactttggcaattactgcatcytgagatgaaaaatataattttccttattattaatagaggagatttgtgaaggattaagatcacagtgacaggaggtttgaagcaattagacatcactatcaatacctgtaggacactagtgctcatagataaatcccatggtgtcctcaatttcaattgaatgctcctgtccaatctttgaaaacagtagttatcaaaaatatacttttcggaatataatacccaatgagaagaaaaaaacttccaagaaacatgaacaatttttatcactctttaatatctgaaaatgttcttctgattgtttttctatgctaaaattcctaaca

SEQ ID NO: 318109 - DNA, 579 bp, Homo sapiens
ccagtagctagactaatacccagtagtgcagctcttttgtacttcctggcattcacatgtgaggtctgcagtggaggtggaaaaagatggtcccctcaggtccactcctgggccttggtggagcctcctctgatctctgatgctgcaagttcatttttttttttaggtgttacgggtaatgggacccactcaggcagcagctatggcaggtaggtatgccacacctttctggactagccctgtggagggagacatgccctgctctagatctggcctaagaatccatgcatcttgtcccctctcagttctatgagggtgaaggctcctccctgttgctcaaatgcctgccacaaatttcatattcctgagctatgaactgcagcctagaggcactgtggcatcttacagcttggggtcaggttttggctgcactgggggatccaatttgctcttgggttaccaggaaagtactcaggtgaaacaatgcacttatgttgagtttcagaagctgtgctatgtacacattcacccaaggtggctaggcrtggtcccttttagaacagacataccccagtccca

SEQ ID NO: 318110 - DNA, 617 bp, Homo sapiens
gtagttcaattcttagttttttgacaaatctcctaactactctccacagtagctggaggaatttacattcccacaaacagtgtatcagtgtccacttttctatgcagccttcccaacatctgctattttttgactttttaacaaaagccattctgactggagtgagatgctgtcttattgtggttttaatttatattttgtggtccgctttttaagaaaagttttcttgatgcttagggtcaatcttttatgccaacaacagtaaatacaggtagtcttcaattttcmtttgttcccctttcatttaactcactttatctactttatatattggcaccctgacactacctttcttatgcacagttcagctagtgaacaaacactttgtgctagcacatgctacctgcatgccaacacttcagtaaccagacaatacacatagttatctgtaaaatggatttatataattttatttatgaaaatttatatataaatatataaatggatgtatataatttatataaaataatgtatataattgtttgaatagttttattgatttttaccttattattttcaaaaatgataagacatctcacaatcttttttatttattt

SEQ ID NO: 318111 - DNA, 629 bp, Homo sapiens
tattatcaacggcctctgtcaatgatcagcaaatttccagaagttttaacattcttctaaatcatttatcctgtgtaaatgtcataatggaacaggcaaagttacaaattaatgctggagttttgaagatatcaaagttattaatgtataattcaatttaattttaattaattctaaacatatccttcaaaatttttttaacttgaatgtattagaagtgccaagataataataataaaaaaagagccaatgggtggggattgtacctgtcagatagtaaacacactgaaaacagtatactacagctgtaacaatggtcagaattatcagcatacccaataatatatcaatctaatagaagagagactagaaatgtatttaagtatatatggtaatttawaatattgattgattaatttattcttttattgtcaactaatatttactgaatgccaaattctgtataatgatgagtaatatcaaataattataatttttattagattattaaacattaaaaagctgataacatcaattattattaggtctatggctaagcaagccctgtcaagaacagctggcagaagtgtaaatggacattcttgttgacagaaaaatttgggaaaatg

SEQ ID NO: 318112 - DNA, 526 bp, Homo sapiens
ggaaagctttgggatattttctaaaataacaataacaccggcctggcaaagtggctcacgtctgtaatcccagcactttgggaggccaaggcgggcagatcacctgaagtcgggagtttgagaccagcctgaccaacatggagaaaccccatctctactaaaaatacaaaattagccaggtgtggtgacacatgtctgtaatcccarctactcgggaggctgaggcaggagaatcgcttgaacccgggaggcggaggttgcagtgagctgagattgtgccattgcactccagcctcggcaacaaaagtgaaacttaacaacatgagttcaactctgaaaagaccacagttataaaaattattatgatattaattaagttctgaggtactaagcatctgatctaaggcaatggcagtaaaaatggaaaaaaaaaaaaaaaggaatgggtataggagacattgccaaatacaatacaaagaggaatagaggaacaagaggtcacctcccaccatatcaaattctgaat

SEQ ID NO: 318113 - DNA, 526 bp, Homo sapiens
ggaaagctttgggatattttctaaaataacaataacaccggcctggcaaagtggctcacgtctgtaatcccagcactttgggaggccaaggcgggcagatcacctgaagtcgggagtttgagaccagcctgaccaacatggagaaaccccatctctactaaaaatacaaaattagccaggtgtggtgacacatgtctgtaatcccaactactcgggaggctgaggcaggagaatcgcttgaacccrggaggcggaggttgcagtgagctgagattgtgccattgcactccagcctcggcaacaaaagtgaaacttaacaacatgagttcaactctgaaaagaccacagttataaaaattattatgatattaattaagttctgaggtactaagcatctgatctaaggcaatggcagtaaaaatggaaaaaaaaaaaaaaaggaatgggtataggagacattgccaaatacaatacaaagaggaatagaggaacaagaggtcacctcccaccatatcaaattctgaat

SEQ ID NO: 318114 - DNA, 366 bp, Homo sapiens
tgtccaccagacccggcgactataatcatcataaattctttgtaagttgtgtacaccattaaaaaaaaattacgtgttcagtgacatcatatatattagcacctttattctgctgattatactttcaaaagattctcagatgtgagttctataaaggaaatctgggtactatttatttattcattcaatagtgtgaacagtttttattttattctaaagctttttttcataaacmcctcatttggaaaataatcgtttttcatttcagcatttttgtataaaaagtccaaaactccaaaattttattccaatttaaaatcacagccttaaataatctacatagctgattatgctaaaagatgaaca

SEQ ID NO: 318115 - DNA, 537 bp, Homo sapiens
cgaaactccgtctcaaaaaaaaaaaaaagaattatgaaatatggtcatctatgctatgttaattttctgttgctttttataaaagcatatttcaatgtgaacatatattaaatatgaatatactaaatataaaatgagtcattttcattaaatatgtaacattccacatttgaaagaaaactratttttttaatattatgaaacagatatgtcatgggacgtaacgatggtggatacctaatgattgattcaaaaactgctgaaatcaaatttgtcaaaaatatgaaccgagattctactttcatagttaacaaaacaatcacagctgaggttctggccatagatggtaagaaaaatatttgaatcatttcagaggaatgttatcgtaattgatgtttctttatgcatagatgattatgattattcaacatattatctttaccactggagagagagaattatcttaggagtgttgggcctcaagtttgaggcagctgaatccgggagagaaaactaagagtttcaacttctcagtgg

SEQ ID NO: 318116 - DNA, 538 bp, Homo sapiens
ctcaattgtgatgctaagtataattgtaaaactaatctaattcagagaaaaatgtttgtttacacttagagcttcacaatgatagaaattccaataaaataaaatttctattcatatgtatatttcattacagacaagtatgctaggctgctcaataaaaaccttaaaatacattaaaatatgtgtgaagcttgaaaatatattccagtaggatgaacctatggaagggataattcatcaatagaaatgtggtataagagttcaaggagtaataggagtaaaataaattccaactgacaaagaacttattcatctatttttctaatggatgaaactgagcatcagggcaacagcatgtagattcttgcatctcccacagctcctcatacgttcccttaccttccagcaaaaatattattgaccrtttctggaacatccgctgacttagagcctttacaactgtgttcttgtttcaccctgggtgaaatgctcttcctcatcaattcctcttatcaaactagcttcattctgcagagcc

SEQ ID NO: 318117 - DNA, 568 bp, Homo sapiens
aaatatacttgggtgcttagccacagtggtgtccttatcaacagaagagaaaaatgctcttctctcttttaggtgagcacgactcaccagcacaacttttatgttatatgggatgtgcatacatggaacaatgataatctttaaactctgcagwctgtaaattctggtgaaagctcaatgaagggtgagataggcaaggctcctatatggtgaagatagattgagaaaaggaaaactgcacaacttatacagtatggcacatcatgagctcctcaagtagctaattaaatttgtttcactagaatcaaataattggaaccaagatgattccaaaagaagtggcagccaggggtaaccaagctatctatctatccagagttgtgaattggtgaaaacattctctgttcttcaaattcaatatcactgtttcttctaaatgcaccttacaatattaaataaatgtcctttctaagtaaaattgttctcacactgtaagacacctgaaccatttttgcttaaggtgaaggaatttgacattgaaaatggcactacaaaatggcaaacagtc

SEQ ID NO: 318118 - DNA, 568 bp, Homo sapiens
aaatatacttgggtgcttagccacagtggtgtccttatcaacagaagagaaaaatgctcttctctcttttaggtgagcacgactcaccagcacaacttttatgttatatgggatgtgcatacatggaacaatgataatctttaaactctgcagtctgtaaattctggtgaaagctcaatgaagggtgagataggcaaggctcctatatggtgaagatagattgagaaaaggaaaactgcacaacttatacagtatggcacatcatgagctcctcaagtagctaattaaatttgtttcactagaatcaaataattggaaccaagatgattccaaaagaagtggcagccaggggtaaccaagctatctatctatccagagttgtgaattsgtgaaaacattctctgttcttcaaattcaatatcactgtttcttctaaatgcaccttacaatattaaataaatgtcctttctaagtaaaattgttctcacactgtaagacacctgaaccatttttgcttaaggtgaaggaatttgacattgaaaatggcactacaaaatggcaaacagtc

SEQ ID NO: 318119 - DNA, 556 bp, Homo sapiens
aggattattaagtaagtatttatgtttagctattatgtgccaaaagaaaatgtcagcctttggggatggggggaaagacatacaacattttaaagccatttttttcaraaaagtaatacttctgttgattgagaaagtcgtacatagtattatctaaaagagaaacggaatgttacagactgtttaaaacctggatgttacagactaacttactccttaactgtgttcttatagcaaaaaaaaaaaaagaaaagtcacaatattatctgttacacggagatatcaaaatagttaaatataccttaaaaatgaatgtcaaaacaattcctaatgctaatttgtatggtttccatgataagctgggttggcctaggcatcaatttacctcatttcttcatgaaaaaaattgagataaatggacttcaagaagtcacagggagatagatctcaagaaaggactttcttagctctccctaagatttttgtttttgtttttgtttttgagacaaggtctggctctgttgcccaggctggagtgcagtggtgcgatctccaa

SEQ ID NO: 318120 - DNA, 486 bp, Homo sapiens
ctatgcaatcatcatgcatgacttcattcattcaacagttaaaatttgatcttgtattatttgcagggtctgtgcttgcactggagctacagaaggaaactctttgccctcttaaggagtttatcaatgttgtcatcatgcaactttaatcttcaatttgttttaaatgtaaagttttcgaagaaagtagatttatttaggtgacaagagttatctgggtttgagtggaagctctgaattctgaaaaygggaagggtgtattagcagaaaaggaaggagaccacgcgaataaatggttatagaaaccagaactctttctttgaaataaaatattgtttggctgtaaacaaatcctagtggggagtatttgtgagtgtctgtgtggatgaatgtgtatattcgtgtgtgtatctgtggacgtgtacatctgtatgttcatgaatttgtggggggtgtttctgagtgtgtgtgtatgtagaaaggaag

SEQ ID NO: 318121 - DNA, 486 bp, Homo sapiens
ctatgcaatcatcatgcatgacttcattcattcaacagttaaaatttgatcttgtattatttgcagggtctgtgcttgcactggagctacagaaggaaactctttgccctcttaaggagtttatcaatgttgtcatcatgcaactttaatcttcaatttgttttaaatgtaaagttttcgaagaaagtagatttatttaggtgacaagagttatctgggtttgagtggaagctctgaattctgaaaatrggaagggtgtattagcagaaaaggaaggagaccacgcgaataaatggttatagaaaccagaactctttctttgaaataaaatattgtttggctgtaaacaaatcctagtggggagtatttgtgagtgtctgtgtggatgaatgtgtatattcgtgtgtgtatctgtggacgtgtacatctgtatgttcatgaatttgtggggggtgtttctgagtgtgtgtgtatgtagaaaggaag

SEQ ID NO: 318122 - DNA, 556 bp, Homo sapiens
aggattattaagtaagtatttatgtttagctattatgtgccaaaagaaaatgtcagcctttggggatggggggaaagacatacaacattttaaagccatttttttcagaaaagtaatacttctgttgattgagaaagtcgtacatagtattatctaaaagagaaacggaatgttacagactgtttaaaacctggatgttacagactaacttactccttaactgtgttcttatagcaaaaaaaaaaaaagaaaagtcacaatattatctgttacacggagatatcaaaatagttaaatataccttaaaaatgaatgtcaaaacaattcctaatgctaatttgtatggtttccatgataagctgggttggcctaggcatcaatttacctcatttcttcatgaaaaaaattgagataaatggacttcaagaagtcacagggagatagatctcaagaaaggactttcttagctctccctaagatttttgtttttgttkttgtttttgagacaaggtctggctctgttgcccaggctggagtgcagtggtgcgatctccaa

SEQ ID NO: 318123 - DNA, 620 bp, Homo sapiens
taacttcggactgaaatttagtatttctttaaattatgagtgtggggaagacactgcacagtagtgtgagcagtagctgtgactatcacaatagaattcataaatacctttacatcttatggtgatctcaaaataccatttattctgaacatcactaatagactttctactagatcttttacttaatatgttaataaaatacatgataytgctgcatcacaaattggtattttaaaaatgctgataactatttcaatataattgggttcattgataatcccctgtattttattttatacatttgaaatcattaatctgagaaggggttcataggcctcgccagattgccaaggagggctcgtgggtgagagatttcctgatggttgcttcaattttgggttcgactaatgaagcttgtgctttaaaatcaaactacattttaaggattcaatgatagcagatcacactgtgagcagatatatttagtagggtattagtttgctaggactgctgtaacgaagtgctaaaaactgagtggcttaaaacaacaaaaatgtatgatctcacagttccagaggctagaaatccaaaatcaagatatgggcagggccatgctccct

SEQ ID NO: 318124 - DNA, 536 bp, Homo sapiens
  misc_feature (1)...(536): n = A,T,C or G
tttcccggcatccttcaacactcagcttagatgaatacctctcagaaacccttcatagctctcctaagtagaattattcctttgctttcacacatagaccctatcatctcttttgcctcttaccccttgtattatagttccatgtttagacatctttctcttccrcttcactggaaaatgcttgagcacacaaagccagtcattgcaaagttaaaacttaaatccagatctcttacttgaatcatttttagtgatatacagttgtaaccaatatgagcattttcttatctcatcactctcagaaaaatttactagtgagtgaagaaaagttatcctgggattcctcaggccttgatttgggccacctcaataaggggatcaaacaaatggctatcatgcaagaccttctgaaaatgagtccacaaagagtttgcctttcccacctaagaatttttaaagtcaggaaagataccattgtacataaatccagtgaagattctgcannnnnnnnnnnnnnnnnnnnnnnnnnnnnnnnn

SEQ ID NO: 318125 - DNA, 612 bp, Homo sapiens
attgagcacctactctgtgccaagcactgttccaggtctcacctcgaaatcacacctgactgtggattattttcatcagtcaaggagtttccatctggctgactggggaatgttttggatggagatgagaggagatgagaccgttcagatttccctcggtctaaaacacctccatcccaccactctttcaagccccctacaatgcaaacaaaaacattaaacaatgtttgatacccactgcctcaatttaatgatccagtctccttagaccccaaaagtgctaattgagaaactgggcaagggtcctagctcagtcatcatcttcttttaaaaccattaatcatatcatttcttgtttcagwtatcgccttcctttgctttctcagtattctggggttcctttcacttacaggaacctgcagtgcttctcacccctttttatctggcctagcacgatgggcagacggcagagggggggacacagtacatatattactaggagacatcaagtaggggtgggagacaatggcagtggccaagagggtgctgcccttaggacagtgtgcatgtggatgttgagaatgtccccagtggccaggcaatccatgctcg

SEQ ID NO: 318126 - DNA, 506 bp, Homo sapiens
tcaagccaataaatatttacatagttttctgacgatttgaatgaactaagttgtctcttttggtggcctggattggaaataccaacrtggagaaaacctcccttatcttgagaattactgtacttttctttctttttgttttctggttattttgtaaattttaattatatgatttttaaagcattgatatagccttagtgccttggtatagatatgaattacaaatattatcaaaagcaaatctaattattaaatttaaaaaatatatgaaataaagcaatttgatatccatatgctctatttgttaataaaaatgtatatggttgtatcactaaggttcctattgaatatggtatgtacacaataaatataatctgaggatatgggtagctagattaaacaaaaagcaagtataatagcacctgctctttagtttggccgagatcttgtttggggttaccctcatgctttagtgtggcaggggacagaacataagactatggatt

SEQ ID NO: 318127 - DNA, 506 bp, Homo sapiens
tcaagccaataaatatttacatagttttctgacgatttgaatgaactaagttgtctcttttggtggcctggattggaaataccaacatggagaaaacctcccttatcttgagaattactgtacttttctttctttttgttttctggttattttgtaaattttaattatatgatttttaaagcattgatatagccttagtgccttggtatagatatgaattacaaatattatcaaaagcaaatctaattattaaatttaaaaaatatatgaaataaagcaatttgatatccatatgctctatttgttaataaaaatgtatatggttgtatcaytaaggttcctattgaatatggtatgtacacaataaatataatctgaggatatgggtagctagattaaacaaaaagcaagtataatagcacctgctctttagtttggccgagatcttgtttggggttaccctcatgctttagtgtggcaggggacagaacataagactatggatt

SEQ ID NO: 318128 - DNA, 638 bp, Homo sapiens
aaaagcactctgtagttattcatatattctacaatatttacttagaagcaactaggtgttgggtgctagtcttggctctgtgaatatacaggtaaagaagacagacatggtttctgccttcatagagcttctattcatttctagacttaaaataaaactctgggatatggctttaagttcctaacaacaataattaaccaactacttaagtccattaccaagttgtgtttctctttgcaacactactgtttatgttgaataaataaaatggaaacacattgcttacttttcgtaggcataaagctgacttgagaaaaagaawctctagccaggtaattttacttaattctgtaaaatatgtatacagtagcagcaataatgtgactgagataatgtaaatgaaataaacttattttcaaggcttaatccttttgaaaggaaataattgtagtgtttcttgcctatcttttgctcctttatgaataaaactattgtagaatttaagtcatctcagataacctcttacctagttctctcattttctggacaatgaatctagaaatagagaggttaaatgaccacaaccagctagttgtggtacaaagccttgaacccattgttcagatacgctagccagt

SEQ ID NO: 318129 - DNA, 463 bp, Homo sapiens
aacatgtcatatatattgggaagatgatatgttttcttctcaatctattaatgtgtatattacatggattgattttctaatgttaacctaatcttgcattgttggtaacaaattcaaatttggtcactagtacttttggtatattcctggattcagtctgtgactattttgtttaggaattttccatccatgttcatcacaaccaagataagggacgtatccattttccctaaaagtttccccatgcaactttataattmttccttcccaccctacccagctaccgtattcccaggcaacactaatatgttttctatcactagagattaatttactttttatgaaattatatgttatgttatatatttattaaggtatagtttattttttatatatggggctacacagtgtgttcattttttgcttgacatttgtcactcagcacaattattttgcgattcat

SEQ ID NO: 318130 - DNA, 567 bp, Homo sapiens
ttcctttggagcatgtattcagaaccctttaggacaaggaatgaatggtgctaaatttgaagtgattcaattgctgtggtgtaaatctttatccaggagataatcccagcaaaatttcactaaagtctactacactaattgtattagtctgttttcatactgctgatagagacatacccaagatgggcaatttacaaaagaaagagatttaactggacatacagttccatgtggctggggaagcctcataatcatggcagaaggcaaggaggagcaagtcacatcttacggggatggcagcaggyaaagagagcttgtgaagagcaattccgatttttaaaaccatcagatcttgtaagacccattcgctattaggagaacagcacacgaaagaactgcccccataattcaaccgtctcccactgggtccctcccacaacacgtgggaattatgggcactataagatgagatttgggtgggaacggagagccaagccatatcgctcatgaatgctttgtataacgtagtttcctattttgttttgtgaaaaatgagaaatggctcaa

SEQ ID NO: 318131 - DNA, 573 bp, Homo sapiens
cacacacactcagagttctttctcccccttccctgccacccaacttagaaccagcagaaccacagtccagaagtcactcatccttacctttgactaaaaactgagcagaagatgagattattggtgtattgcatgtctcagggtgctgtatagacaagacactagaataaacaaaaggacaccacattgtgattctaagcacagggattgtgttttctataggggagaaaaatgtggtgcttgaaagggagagtattgaggagtgacagaaagagtgggggtagttaggaatcaagagaatgttcttaccttctgaagatattagcagtgaaaacctgcctactagtgaacagaacaggcaatcaacaacttatttctyttcctgcacaagatatcagatttttaaactagagtcactcgaattgtagatcttacccaggatcaagctttaccaataatttttaagatacaagcaattgaaaggcacagagtacacagggagaggttagacacaatgaatgcatctcttcagttttttccttactatattggactcacacttttgcttcgggg

SEQ ID NO: 318132 - DNA, 650 bp, Homo sapiens
gaaagccagctggaaacatgataacacctgtcccactaaccttcccctcctctgtggtacaaagagaggtgattctactaccaagattgcagtattaaatggtattgctatcaccaaagtcaaactkaataatgatgcctagcctaataggacacaacatgaaatcatccattcaagtatttattgagcatagacggagtgtatggtaacccaggtctaagaatattcattgctaaagaatagaaggggcagaaattctatcatgctatatattaatatgatttttccacttgtggaacatttaaggataaatatatgataagaaatacagtatctgaaaaaaagttaggccacaacttttgagagcattagatttcattagtctacaagaggcatacacctgcatttacttttttttatgtgctatcttacacataattctacagtaaaatgttatttacttaaaaatataatggcatatatctcaattacattggtttaaaaatatgatgaagatcatttaaatctggattttcaaatgtatgtaccacagttgttccttgagtaatgcaggggttagggtcacaactccacatcagttgaaaatacacttataaagtttgactccccaaaacacttaactactaata

SEQ ID NO: 318133 - DNA, 650 bp, Homo sapiens
gaaagccagctggaaacatgataacacctgtcccactaaccttcccctcctctgtggtacaaagagaggtgattctactaccaagattgcagtattaaatggtattgctatcaccaaagtcaaacttaataatgatgcctagcctaataggacacaacatgaaatcatccattcaagtatttattgagcatagacggagtgtatggtaacccaggtctaagaatattcattgctaaagaatagaaggrgcagaaattctatcatgctatatattaatatgatttttccacttgtggaacatttaaggataaatatatgataagaaatacagtatctgaaaaaaagttaggccacaacttttgagagcattagatttcattagtctacaagaggcatacacctgcatttacttttttttatgtgctatcttacacataattctacagtaaaatgttatttacttaaaaatataatggcatatatctcaattacattggtttaaaaatatgatgaagatcatttaaatctggattttcaaatgtatgtaccacagttgttccttgagtaatgcaggggttagggtcacaactccacatcagttgaaaatacacttataaagtttgactccccaaaacacttaactactaata

SEQ ID NO: 318134 - DNA, 523 bp, Homo sapiens
atattaaaaccctggagatcaggaggcaaatggcttcaacaaagatctgggcatttgcctgatgcaagagatcttagattttgggctttccatagtcccagtctcattttgtactgagacttttagagatacacaaaatagagggaagacaaagtttaactcttagcaatagtgttattaatatatgatacttaaaatgaaatgcaaagtcgtccctcttcaggcccacaccatcacaaacctcaagtaatattcaggattcattactaagtcgcttcatgacctattttttcccacagcaatactgtgtaacaacctaacaaaacactccaatggcatatgacaataaacatttcttttcgtttatgagtctrggttagctgagtggtgctactgatctgctccatttagtttattgtggctaagcttgttcatttgtctgtgggcagcttgcagatcaattgagggtttgctaatttaggatgatcttggcctcactttctcatttgtgatctatacagtc

SEQ ID NO: 318135 - DNA, 358 bp, Homo sapiens
aggggctgaacagagacaatagaagtgtgtgggctcttttgaggccctggctcagaaatggaatttcaacacttgtgcttcattctggtggtcacagtaaaatctatcctgaattctaaatgggaggcaattaaaagttgcaggggaaatgttggatgcagggaggctataaattagaaccattaagtaatcaatctaccacagtggccatgtaggaaagtacaaaaattaacataagcctcataatacataaccagagatcagatctatacatgattattttcctccttgagaagtcctgctgtataacattgtcttagtctatttggygtgctataacaaaaattccatagacggc

SEQ ID NO: 318136 - DNA, 616 bp, Homo sapiens
gtcctgcattgatacattttatctatactcttccactaactgcaaatagggaggccactggtcaatatcttgaatatagtgggtagcaatttagtgtaatgcttaaaaatagaaggcttttgtcaagactcttcatgtgcaaaccctgcatttgcttcttaatagatttgtggtcctgagcaagtcttagtttccttttctgtgaagtggtcattatgctattaatacttcagaagtgtgccatgggcattacattaaatgactcaagtgaaacacctggcaagctgaaagtgtttaatgaatgttaactgacataataaatagccactggatattttagtgaatgcacttacctgtagaaataaaaactcaattgagctttattttcacttaaattatattggatattataaaatcttaatactaattttgctttaatgagccaatttaaatgaatacagataatgttaactgtaacagattgratattttagaaagtcactttatgaattgtggagttaaatttactaattatattaaaacaaaacaaaacactgactgggtgttaaatcaagtctagcctaaagctgctttcttatatattttaatttcagcc

SEQ ID NO: 318137 - DNA, 572 bp, Homo sapiens
taaatagccactggatattttagtgaatgcacttacctgtagaaataaaaactcaattgagctttattttcacttaaattatattggatattataaaatcttaatactaattttgctttaatgagccaatttaaatgaatacagataatgttaactgtaacagattgaatattttagaaagtcactttatgaattgtggagttaaatttactaattatattaaaacaaaacaaaacactgactgggtgttaaatcaagtctagcctaaagctgctttcttatatattttaatttcagcctaaaggtttctctgtacatagtgaactgtaayctaaatggaggtataaataaactgtatcctacttttgtgccaatcaccaagttttggacaatcaaagggggccaactgttcaaaccatgttcaaataaggcaaacaccagcagtcaccaatccagctgattctgcacctcacttccattttctgtagtcactttcccttttctgtctctaaatcttcttccaccacatggctgagctggaatctctttgactctactctggctcgagaagc

SEQ ID NO: 318138 - DNA, 503 bp, Homo sapiens
ggccaatataacgaaaatccatctccactaaaaatacaaaaattagctaggcttgatggcgctcacctgtaatcccagctactcgggaggctgaggtgggagaatcacttgaacccggrtggcagcggttgcaatgagccaagatcaccctactgcactctagcaccctgggcaacaagcaagacttcatctcaaaaaacaaacaaaaaaagtgagctgtaggatacaaagacagtttgtgcttagtctttattagctgggtgaaactagcttgaggtctgcagttgcctatcaggaaagaatgtttccaaggctagccctctgtccagtcaaatttgtaatggtctgggctgttaatcagagttaggaggagtctgacaatttgcatgatagctccttatagttaggttgttagagagtttagcaagagtgttataagagtattgtttttgtttttgttttcttgtggtcatagatatttagaaagttgacatgccaggcca

SEQ ID NO: 318139 - DNA, 503 bp, Homo sapiens
ggccaatataacgaaaatccatctccactaaaaatacaaaaattagctaggcttgatggcgctcacctgtaatcccagctactcgggaggctgaggtgggagaatcacttgaacccggawggcagcggttgcaatgagccaagatcaccctactgcactctagcaccctgggcaacaagcaagacttcatctcaaaaaacaaacaaaaaaagtgagctgtaggatacaaagacagtttgtgcttagtctttattagctgggtgaaactagcttgaggtctgcagttgcctatcaggaaagaatgtttccaaggctagccctctgtccagtcaaatttgtaatggtctgggctgttaatcagagttaggaggagtctgacaatttgcatgatagctccttatagttaggttgttagagagtttagcaagagtgttataagagtattgtttttgtttttgttttcttgtggtcatagatatttagaaagttgacatgccaggcca

SEQ ID NO: 318140 - DNA, 584 bp, Homo sapiens
ttagtacaggagtgagagtttattaaaaagctttacagctggagaaaaaggaagaaaagtacacttggaagaagaccaagcagatgacttgaaagatccaastgcccttttcagcactggatttgaggttttgtacattggcatggttccagggtttgcatttctcctcctctgatttttcctttggggtgggcagttgctcaactgctgcatgtgcagcgtcagtcagtacttgggagagtgatcacatgtgtagtgcatttactgaggttgtgtgcacgctttctagggtctattttcatttactggttgaacatcccaagaggaaggtcatacatctgctattttacctcttggtgcccatgcttgagctcgctcgcccaactcctgaaatcttatcgggaaattacttatcaccatctccaggcattttctatctattgggagactgtcttaccctgacactggctgtgaccaattatcatttcagagagccagtttaacaactgcctgaccatcacctgatggtcacctgtcatttcttggagaggccctctcctgccctgcttatgtctgcctaacta

SEQ ID NO: 318141 - DNA, 507 bp, Homo sapiens
accattattgttatccttcatcatcatcagtttgttttatgactagtgtaagcctaacatattagtctttcttaatctgagttctaagttgaactgtgaaattgtcatactgttcatttgttcttgtttataatagcattttcttttttatgtaatataaacagtgatgtgtgcctatctaaatgtctaattaaactgatatgggttttttgttttgttttgttttgttttgtttaataagataaaggggtacatgtttaaggtctttattcaacacatttggcattctttaaactaagctagaagacaaaataattcaattactaagaatatattcaacaagtgtttgtatagcaattgcagtaagtatctctgaaaagtataaggattagaggatctgaaattcccttttaaggtgtacatatatgctagggttctcmaaaatggaaagttctaatatcagtgctttcttttcttttttttttggggggggggtcgggtgcacgc

SEQ ID NO: 318142 - DNA, 503 bp, Homo sapiens
aaaatggataaatgagatcacatcaagttaaaaaatttctttaactttgttagcaaaggaaacaatcaataaagtgaagagacaacccacagaatgggagaaaatatttgcaaactatccatctgacaagggattaataaccagaatatgtaaggcagtgaaacaactcaataggaaaaaaatctaataatcctactaaagtatgggcaaaagatctgaatagatatttttcaaaagaaatatacaaataacaaacaggtatatgaaaaggtgctaaacatcatttatcatcagagaactgcaaatcaaatcagtactacaatcaaatcagtagtttcacaatgtggttttgaaccattcttcagggaagctgactgatgtggtatttgaaacttttataggaataaagattactttgagtatactccattaggaaataaagctcacttctctttttgcatcactctcagcacaatktttgcaaagaaaaatattcgaaaaat

SEQ ID NO: 318143 - DNA, 283 bp, Homo sapiens
gaacttcatgttgcttattaaacatggtttaagtaatcataaacatagtttaacaatgacaagggaaagaaaaatmctgtttacctccttttagttcatattaggcaagaggataattaatataccttaaagtatataatttaggcagacagagcttctactcttaaacttccaagaaaatgtaatacttcagaaatccaagcagaggtgatgatgttctgaataataaagagttgatcactgaaatatgacaaatatcaaaagtttgcactaagtatatggt

SEQ ID NO: 318144 - DNA, 581 bp, Homo sapiens
gatatattaaaattgagagttttctgtggtagccataagaaatttaacagtcacttcagaattaaacctttatgactgtattgtctaatactgtacccactagccacgtgtggccatttaaatttaaaatttggtttcttagctgcactaaccacatagtacgtgctcaaaagccacatatacttagtggatactctgaacagtgtggatagaaacaatttctaacattatagaaagttctattaaccagcgctactgtagaattaaggatgrgttcaaaagaagagatttagtagagcatatcattgacagagatgcacttgaaacattaaaaaacaaaaaatctgaaagtattctcaaacaagagagccaatgaaaaatgtttttgaatttcatatatcagtaaaagtactttgtaaaaatgttaaaaagctatatatacgtaaactgtatatatataaattattactctcacttatacttaaagggtgttagagaaagaggagtcaagaagaaggagaaaaaatacctttttcaagttaaatctaattaaaatagacataagatgatgcaagatctaa

SEQ ID NO: 318145 - DNA, 555 bp, Homo sapiens
ttagctgcactaaccacatagtacgtgctcaaaagccacatatacttagtggatactctgaacagtgtggatagaaacaatttctaacattatagaaagttctattaaccagcgctactgtagaattaaggatgggttcaraagaagagatttagtagagcatatcattgacagagatgcacttgaaacattaaaaaacaaaaaatctgaaagtattctcaaacaagagagccaatgaaaaatgtttttgaatttcatatatcagtaaaagtactttgtaaaaatgttaaaaagctatatatacgtaaactgtatatatataaattattactctcacttatacttaaagggtgttagagaaagaggagtcaagaagaaggagaaaaaatacctttttcaagttaaatctaattaaaatagacataagatgatgcaagatctaatcaaattaaatgatatttttagaggtcttattttgtagaagtttaaatttgtactattactcagaaaattcagaatggacttgaaactcttgattgaaaataaaattacata

SEQ ID NO: 318146 - DNA, 581 bp, Homo sapiens
gatatattaaaattgagagttttctgtggtagccataagaaatttaacagtcacttcagaattaaacctttatgactgtattgtctaatactgtacccactagccacgtgtggccatttaaatttaaaatttggtttcttagctgcactaaccacatagtacgtgctcaaaagccacatatacttagtggatactctgaacagtgtggatagaaacaatttctaacattatagaaagttctattaaccagcgctactgtagaattaaggatgggttcaaaagaagagatttagtagagcatatcattgacagagatgcacttgaaacattaaaaaacaaaaaatctgaaagtattctcaaacaagagagccaatgaaaaatgtttttgaatttcatatatcagtaaaagtactttgtaaaaatgytaaaaagctatatatacgtaaactgtatatatataaattattactctcacttatacttaaagggtgttagagaaagaggagtcaagaagaaggagaaaaaatacctttttcaagttaaatctaattaaaatagacataagatgatgcaagatctaa

SEQ ID NO: 318147 - DNA, 555 bp, Homo sapiens
ttagctgcactaaccacatagtacgtgctcaaaagccacatatacttagtggatactctgaacagtgtggatagaaacaatttctaacattatagaaagttctattaaccagcgctactgtagaattaaggatgggttcaaaagaagagatttagtagagcatatcattgacagagatgcacttgaaacattaaaaaacaaaaaatctgaaagtattctcaaacaagagagccaatgaaaaatgtttttgaatttcatatatcagtaaaagtactttgtaaaaatgttaaaaagctatatatacgtaaactgtatatatataaattattactctcacttatrcttaaagggtgttagagaaagaggagtcaagaagaaggagaaaaaatacctttttcaagttaaatctaattaaaatagacataagatgatgcaagatctaatcaaattaaatgatatttttagaggtcttattttgtagaagtttaaatttgtactattactcagaaaattcagaatggacttgaaactcttgattgaaaataaaattacata

SEQ ID NO: 318148 - DNA, 615 bp, Homo sapiens
tgggtatatacccaaaggaatataaagtgttctactataaagacacatgcatgtatatgttcactgcagcactattcacaataacagagacatggaatcaacctaaatgcccaataatagactggataaagaaaatgtggtacatgcacaycatggaatactatacagtcataaaaaggaatgagatcatgtccttttcagggacatggatggagctagaggctattatctttagcaaagtaatgcaggaacaaacaacaaaataccacaggttcttacttataagtgggagttaaatgatgagaacacaaggacacatagaggggaaacacacactggggcctactagagggtggaggatgggattagggaaaggatcaggaaaaataattggaggatactgggtttaatatctgggtgatgggctgggtgttgtggctcacgcctgtaatcccaactctttggaagaccaaggcgggtggatgacctcaggtcaggagttcaagaccagcctggccaacatggtgaaacctcgtctctactaaaagtacaaaaattagccgagtgtggcaggtgcctgtaatcccagctactcaggtggctgaggcaggagaa

SEQ ID NO: 318149 - DNA, 612 bp, Homo sapiens
ccggccccactattaagttttatataacctacaacacatttttttcggaaaagacaaaacatttcaggatgtgattccccagtcatataagcaaattgttacattgatggatagctccactagacagcgccttcttatattgaaatgaaagttcacctttcattcgatagtttgagmccatttctgtagttctgtggaacataattctaattcctcctccaggttccacattttcaaaaagagaaatcatgtttccaatttctctagagctgaattcttcagcacttgcaaatattcctcaatgacaagagttacaaacactgtttacactgctattaatttgtcttcattctctgtgtcctatacagaattgtaccaacggcagtaaatatcaccctcagtacactgaaaaaaaggatctttcttgattcaaacactattatatattagtacaacccaagtttataattagtttttaaaccaagagtaggcaccacgtaagaatctgtttagttcaataatacactacttctcatttgtttaaatgaaaactaggttcatgtctcctcatacattctgtccctcatttaggcaacatatattggaagaatg

SEQ ID NO: 318150 - DNA, 563 bp, Homo sapiens
gtgaaaaactatctaccagttactatacaaacttggcaagatatgtaatctaatttaactagtttccctattatgcacatgaaatagacataattctatttgtccacaaaactcgtatacataaaaacagtacgtgaaaaaagattattcataacaattaaatctgcaagttttcaaattagacaattttagattaaaaatatagctctgttattactctctctgaccatgagtaagtttcttaacctccataaccttcagttacattgcttataaatattttatcggtacctaacttgaatgtttttgaggaagatgaaatgagataatctacatggtatttagcataggtcctggcatatagtaagcagctactaagatatatctgtaatatttacccctcataaagggcctaattaagaacaaattttaattattatatattctaattracttaggcgaagcaaaacatggtacattttagaaaaatttcaatttaaaacaaattttttaagattgactgaaagaataaggtttgattactttaaaaaaattaagtagct

SEQ ID NO: 318151 - DNA, 552 bp, Homo sapiens
agcaatttatccttagcattcagccttcaggctgatatagttaggactcaaaaagttcttgtttaataaatgaatgaacaaatcattttaaaaaatagttaccctaataatatctaccacttataaagtatttgatayatgccaggcactgtatagacctatgtatataataaattatgtaaaaactttccataaataaataatattattcccctcatttaaaaattaaaatacagtagttacaaggaatcaaatagttttccagttatacatagtaagtatgggcaaagcaatttaaaccatagtaatctggttctagattatacactcctaatgactttactatgtactctttctaacttagtgggagttaatccattattgttttcttctatatattctttctaactttttacaaaactatatgtactgagacaccacttctgcattcatatatatatatgtatatgtatatatatgaaatatttaaaggaatatatttaccaaccactatgcatccattcaaaaactacccagaagaactagaaaacc

SEQ ID NO: 318152 - DNA, 552 bp, Homo sapiens
agcaatttatccttagcattcagccttcaggctgatatagttaggactcaaaaagttcttgtttaataaatgaatgaacaaatcattttaaaaaatagttaccctaataatatctaccacttataaagtatttgatacatgccaggcactgtatagacctatgtatataataaattatgtaaaaactttccataaataaataatattattcccctcatttaaaaattaaaatacagtagttacaaggaatcaaatagttttccagttatacatagtaagtatgggmaaagcaatttaaaccatagtaatctggttctagattatacactcctaatgactttactatgtactctttctaacttagtgggagttaatccattattgttttcttctatatattctttctaactttttacaaaactatatgtactgagacaccacttctgcattcatatatatatatgtatatgtatatatatgaaatatttaaaggaatatatttaccaaccactatgcatccattcaaaaactacccagaagaactagaaaacc

SEQ ID NO: 318153 - DNA, 513 bp, Homo sapiens
ggagttaatccattattgttttcttctatatattctttctaactttttacaaaactatatgtactgagacaccacttctgcattcatatatatatatgtatatgtatatatatgaaatatttaaaggaatatatttacyaaccactatgcatccattcaaaaactacccagaagaactagaaaaccatgttacaagttggtgaggaggtggagggaaaaaatgaggagttttacctcaggagatagtatttggacaagcacaacaccagtcatagtgtttgaaaaggtatcataaaaatagagaagtttctatttaatggtgttttatacaaaaaaactatgacccatgtatccatgtatgtaagaaatgattttatccctccagtgaagcattccataatgaactagcccattccctaatgtagtgagtttcctgttatctggaatatggaaacagatgcttaaccagcacctcccaagattattacaagaggagtttctatagttcataaa

SEQ ID NO: 318154 - DNA, 589 bp, Homo sapiens
gttgttaagtgtctagaaatttgtccgtgtcttctagatttttcaattcactggcatatagttgctcatagaaaccactaataatcattcaaattttggagtatctgttgtgatgtctcctttttcatttctgattgcaattatttgtatcttctttccttttttcctagtctgcctaagatttgtcaattttgtttcactttaaaaaacccaactttttgttttatttatctctcatattgttttttcatttcaattttatttatttttgctctgatctttatcattccttctactaattttggatttggtttgttcccgcttttctagttctttaagaagcactgttagagtgcttaargtttttcttcttttttaatgtatcacacttacagggataaacttccctctgagtactacttttctgtatcccttaggttttggtatgttgtgtttcaattatctgtttcaataaatttttcaattttcttcttaatttcttcattgacccgctggttattcaggagaatattgtttaattttcatgtatttgtatcgtttctacatggtttgggtctgtgtctccacc

SEQ ID NO: 318155 - DNA, 513 bp, Homo sapiens
acttcctgcctctctcctcttcctcctgctccagcaacataagacatgctgcttccccttcacctcttgccattattgcaagttttctgaggtctccccagccatgcttcctggacagcctgtgaaaccatgggacaattaaacctcttttttttatgaattacccaggctcaggtatttctttatagcagtgtgagaatggactaatacagtttcccatatttctctcattattaatttctatttttattccattgtggtcagagaagatgctttgtgttatttcaattttttgaaygttttaacagttgttttatgacttaatttatggtctatccttgaaaatgatccatgtactgaagaaaaaatgtgtattctgcagtccttggacgaaatgttttgaaaatatctaagggaatttggattccctttggtttggtctattgtaccgattaagtccaatgtttgttgattttctgtctgaaagtcctgcccagtgttgcaaatgcgatg

SEQ ID NO: 318156 - DNA, 586 bp, Homo sapiens
ctaaacgagctcaggagcttatatttatcttgagccttcaaacacaaactcaacccacccaatactatttcaaccttgtgaaacacagtaaagattatcaccatattgtactagatccacaatatttgagctaacgagtgagtgttatacacattttgtggtaatttgttacacagcaataaaaactaatacactgtacaactcccagtccacaacctgccgttcattttatatatatataataattatatatatttatatatataattatatataatatagataatatatatatactttaagttctgggatacatgtgcagaatctggaggtttgttacataggtatatatgtgccacggtggtttgctgcaygcatcagcccatcatctaggttttaagccccacatgcattaggtatttctcctaatgctgtccttccctttgtctcccaccccctgacaggccccagtatgtgatgttcccctccctgtgtccatgtgttctcattgttcaactcccacttatgagtgagaacatgtgctttttggttttctcttcctgtgttagtttactgagaatgatgg

SEQ ID NO: 318157 - DNA, 598 bp, Homo sapiens
tggttctctggtttttctattattggtgtataggagtgcttgtgatttttgcatattgactttgtatcttaaaacttcactgaagttgcctatcagcttgagattttgggctgagatgatggggttttctaaacatacaatcatgtcatctgcaaacagagacaatttgacttcctctcttccyatttgaatacgctttatttatttctcttgtgtgattgcccttgtgtaacatacatcaagttgttttctgcagaaaagtcttgtccatgatgtccattgtctcacatgaatctcaatatgggcatatctctttagattcttcaattttcaaaagagatattaacctaaacatccttccagttgatttttatgtgctcataattctgcgtttaaatagaagcatagaatatctgcattcaaagacttatccagaaaaaaatcataaaatctctgactcccaacattcaacaaaagatgagttgagagaactagtactccagaaatcttgaccatccttctctacttttgagtttcttaaaggtgtttacaaactaagccaaacattcattcattacatagccagactatatgattc

SEQ ID NO: 318158 - DNA, 522 bp, Homo sapiens
tttttgcatattgactttgtatcttaaaacttcactgaagttgcctatcagcttgagattttgggctgagatgatggggttttctaaacatacaatcatgtcatctgcaaacagagacaatttgacttcctctcttcctatttgaatacgctttatttatttctcttgtgtgattgcccttgtgtaacatacatcaagttgttttctgcagaaaagtcttgtccatgwtgtccattgtctcacatgaatctcaatatgggcatatctctttagattcttcaattttcaaaagagatattaacctaaacatccttccagttgatttttatgtgctcataattctgcgtttaaatagaagcatagaatatctgcattcaaagacttatccagaaaaaaatcataaaatctctgactcccaacattcaacaaaagatgagttgagagaactagtactccagaaatcttgaccatccttctctacttttgagtttcttaaaggtgtttacaaactaagccaaacat

SEQ ID NO: 318159 - DNA, 563 bp, Homo sapiens
ggtggctcacacctataatcccagtacttcaataggccaacataggcaaatcactggacccaggacatcaagagcagcccaggaaacatgatgaaaccccatctctaccaaaaattataaaaaattagtcaggtgtgatagaatgtccctgcagttccagctactcaggaggctgaggtgacaggaaaacttgagcctgggaaaatggggctacagtgagccatgattgtgccactccactccagccttggtgacagagcaagaccctgtcttagaaaaagaaagagaaagaaagaaagaaagaaagaaagaaagaaagaaagaaagaaagaaagaaagaaagagagaaagmaagagagaaattaagaaatttcttcctccagatattttaaattatcactcttaaattcaaagttccacacatcctgagggcatggacacaagacagcaaagctctttgctaatggataaccagggtgacctttgatccagttctcaataagttccccatttccatctgagaccccatcaacctagacatcaccatttgtatcactatcagc

SEQ ID NO: 318160 - DNA, 442 bp, Homo sapiens
tattactgaaattaatctttattttctgacatatagtatttaaactcaatattcatgtaatatcaattagcaaaaaaaaaaaaaagccagattgtaactaaattatgtatgggattactaattgcattttgacttacaatactgtatcactagcatgctacaacttttctcatggccactttcgttaaaaaaaaaaaaacctctgaaaaaaacataaagttattttrtagggtgtataaataaaagataagtaaataacctacacccccaagctcccaaaacgaatttggacaagtaagaagaataaactctctattgaaaggatgagatgaagagaagtggagggataagagattgaaaaatatatcattgttttcataatgaagtcataaatatcccaaagtatctctattgtattcgttttcctggtttaaacataagc

SEQ ID NO: 318161 - DNA, 504 bp, Homo sapiens
aacttacaattatggaggaaggggaagcaaacatatacttctttataaggcagcaggaaggagaagaataagagcccagcaaagggaaaagctccttataaaactatcagatcttgtgagaactaattcactagtatgagaacagcatggaggtaactgcccccatgattcaattatgtcccactgggtcctactcatggggattatgagaactacaattcaagatgagatttgrgtgagaacatggccagactatatcaatatattttatactctctggaaagagtaattcatttatatccattttcatgtactttgaattatttttggccatgtttgtcactgtgtacatgttgaccatttttacatgccataacataggagtgaattctttagaatatgagttctggaatatgagtgcctgagtctgaattcaatttctgctgcagagctcttaggtacagggaagtcatttgatctgttcagtaacattggattagtttt

SEQ ID NO: 318162 - DNA, 590 bp, Homo sapiens
  misc_feature (1)...(590): n = A,T,C or G
ntaatccaatagcacattatttgtatataatacttaactttgtgcttggcattgtgctaggtcacttgtgtaccttcatgtgaaccttagatcaatcatctgatgcagttactacgtttattttacagaggaaagaactggaatatagagaggctatagccagactgtttgaaaaagatagaagaaaaataaaactttataaaatgaggccattaaaacacaccttgtttgaagaaaaatgatgagtatatattcttttcagtgtctaaagtttacccaggggttgaatcaggactttgagaagcaaagggcaataataattcactctactgaacacactgatttaatacacttggtagtgagagaataaaattcttggtactcagggacaaaaaaaaatttaaactcagtaagtaagagctagaggttatattaaattctaatataggcataggtgtccaaaagaatcaagtttaacgccagtgacatcttactaaacacaaacctaacaacatttttgaatgtttcatagtctttttgctaaattcaatayaatagcataatattatgccatgaaagcagtctgtttt

SEQ ID NO: 318163 - DNA, 590 bp, Homo sapiens
  misc_feature (1)...(590): n = A,T,C or G
ntaatccaatagcacattatttgtatataatacttaactttgtgcttggcattgtgctaggtcacttgtgtaccttcatgtgaaccttagatcaatcatctgatgcagttactacgtttattttacagaggaaagaactggaatatagagaggctatagccagactgtttgaaaaagatagaagaaaaataaaactttataaaatgaggccattaaaacacaccttgtttgaagaaaaatgatgagtatatattcttttcagtgtctaaagtttacccaggggttgaatcaggactttgagaagcaaagggcaataataattcactctactgaacacactgatttaatacacttggtagtgagagaataaaattcttggtactcagggacaaaaaaaaatttaaactcagtaagtaagagctagaggttatattaaattctaatataggcataggtgtccaaaagaatcaagtttaacgccagtgacatcttactaaacacaaacctaacaacatttttgaatgtttcatagtctttttgctaaattcaatataatagmataatattatgccatgaaagcagtctgtttt

SEQ ID NO: 318164 - DNA, 578 bp, Homo sapiens
ggtacttacctatatgctgaagtatgacaaatcattgaataaactatgatgcatacacacaatagagtataatgcagctataaataaaagctaaccaagacagcattgtaatgatataaaaatagacacatagattaatagaacagaaaaagcaaccagcaataacgccacatacctacaacctacttatctttgacaatgacaccaaaaatttacactggggaaagaacactctatttaataaatagtgctaggaaaattggataaccatatgcagaataatgaaactgaaacatacctctcattctgtacaaaaattaaggtgaattgataacttaaatgtaagacccaaaaytataaaaatcttagaaggtaaaactcttctggactttggtctaggcaaagaatttatgaccaagtcctcagaagcaaatgcaacagaaatgacaaacagacaaattggacttaattaaactcaaaatcttctgcacagcaaaagaaacaatcagcagagtaaacacacaacctacagaatgggaaaaaatatttgcaaactctgcatttggaaaaagggtaac

SEQ ID NO: 318165 - DNA, 639 bp, Homo sapiens
taaacaatgggtacacataaacatacagagtggaataatagacattggggacttcaaaacgtgggaagggagtgaagattgaaaaattacctactagttacaatgttcactatttgggtagtgggtacactaaaagcccacacttccccactgtgtgatatatacatgtaagaaatctgtactgtacccactaaatgtataaaaataaaataaaacaaattaaaaaaagaataaggaacatatctaggaaatcatgtaaaatgacttacaggagatattattaaatttttaaaaagcaaagtccaaaagagcatatttaatatgctaccatttgcataacaaagaaagggatataagaagacatcaatatatctgttaatatttgcaaaaagaagtacaggaataataagctaaatgacaatgaaattggatgcacacaagtgatgagggaagtaggtatgagagaggtgggaacatcactgttctgagtatctttctatttagattttattttggaatcctaataaggttctacatgyccaaacaataaaataagattaataaagataagaaagggaaaaataaaactaaaataaaggaaggcaattatgtttcctaaggaaaaataaagaaaataaa

SEQ ID NO: 318166 - DNA, 605 bp, Homo sapiens
cagactttcaatgctaatgatgtgtcaatgtgagttcatcctttataataaatatgtgattctggtatggtatgctgatagtgggagaagctacgcatgtgtggagactggggatatatgagaactctgtattttctattcagttttgctatgaatctagagctgtgctaaaactaaactctattaaaaatcaaatgctctaaaacttgtatgaaatagatatgttaatgtataattgcttcaattcactaaycttagagccttaagcaaacctaagtataaattttgccatctttgactatgatttatcacactcaaattcagttagcaaataaactgcagccgcaacagccaaacaatatcatgctattatcttagcataatattcaaagcaatgttgtatttttaattaagtgtaaacaaaatctaagaagaactttttattatggaataatcttttaaatttcatataaattagaattattctcaaaatgatttttaagatgagagaggttttcaaaaatgttttgaaagaaaacttggataaagactgttacaaaacattttttgttttgtgtgatttgttcacaatactttctttttat

SEQ ID NO: 318167 - DNA, 575 bp, Homo sapiens
atattgaacctttctatccatgaatatgaaatatctctccatttatttagattttctttgatttcttttatcagagatttgtattttctacaaatcagatttgtatacaatttgttggaattatatgtaaatatttcatttttgggaagtgctaatgtaaatgatattgtrtttttaatttcaaattgttcttgcttattgttggtatatagaaaagtgatacactttcatacatttacattatattttgcaattctgctataatcatttattaattctaggagatttttgtcaattcttttggactttctacataactgattatgtcatctgtgaacagttatatgtatttcttcccaacctgtacaacttgtatttccttttcttgtcttactgcactagttaggacttccagtatgacattaaaaagcagtagtgagaagaaacaccctttctttgttcttgattttattggaaagcttctagtttctcaccattaaatgggatgttacctacaggttttctgtagatactccttgtcaagttgaggaacttgtatgttctgaatttttaat

SEQ ID NO: 318168 - DNA, 504 bp, Homo sapiens
gctttttatgcatctattgatatgatcatatactttttcttcttttgatttttggtgatggattatattaattttgaatgttcaactatcctggcatacctgagataaataatattgtttgtggtrcataattctttttatatgtttttggattcaatttgctttttttttttgagatggagtttcgctctgtggcccaggctgcagtgcagtggaatgatcttagctagctgcaacatctgcctcctggattcaagcgattctcctgcctcagcctcctgagtagctgggattacagccgccaccaccatgcccagctaatttttgtattttcagtggagacagggttttgccaggttggccaaggtggtctcaagctccttacctcaggtgatccgcctgcattgtcattacaaagtgctgggattacgggcaggagccacggcacccggcctgcaattttctttagttgaggatttttgtgtctgtttcatgatagatatt

SEQ ID NO: 318169 - DNA, 504 bp, Homo sapiens
gctttttatgcatctattgatatgatcatatactttttcttcttttgatttttggtgatggattatattaattttgaatgttcaactatcctggcatacctgagataaataatattgtttgtggtacataattctttttatatgtttttggattcaatttgctttttttttttgagatggagtttcgctctgtggcccaggctgcagtgcagtggaatgatcttagctagctgcaacatctgcctcctggattcaagcgattctcctgcctcagcctcctgagtagctgggattacagccrccaccaccatgcccagctaatttttgtattttcagtggagacagggttttgccaggttggccaaggtggtctcaagctccttacctcaggtgatccgcctgcattgtcattacaaagtgctgggattacgggcaggagccacggcacccggcctgcaattttctttagttgaggatttttgtgtctgtttcatgatagatatt

SEQ ID NO: 318170 - DNA, 629 bp, Homo sapiens
caggtgcatgatgaagatggtatggactagtggcaacagtggtggtggtgaggagtggtcaaataataaaaatgttctggagggaaaaccaacctgattttctaatggcttgaatataaggcatgataagtgtgaagaagctaaaggataatgctatgtgtttctgcctgagcaaatgcaataacagaattgtctataatgaataaaggaaatgttgaaagagaaggacatttaggtagagatactatgagtttgtttttatgtattataattaaaatacctgttgaatatttagataaagatacagtcgagagttggttatatgccatttgaattttagggcaccatccaggattgagttaaatagaaaagggtttcaaggaccctrccatgaagcattttaagaggttcagaagaggaactgagaaagaaaatagggatgcaatagctagtgagataatgggacattcattaaattttactgagactttttaagtttgttgaaaggccaagtagtgatgtcatggttaaaataatctaatttccagttgctttcagaatcagtgtttattatttatcctaagagtccagaaaactctctcccctacacaactttatcctacctaatt

SEQ ID NO: 318171 - DNA, 558 bp, Homo sapiens
gtcatttttgcacaaatccaagttgagttcagcttatgctgtactctcttccttgttgcaatagtaattactgcataaatctatccttaccaccttagtgtytggctctgtttatctctgacattgtttgaaggacaaaataactgtaaggaagtaagcattgcattagacacaacaagaagctgatgaggtagtctaagaaagactgataaaagttataatagtacaagtggtggaaaggctctagatcttgatgtatgttaaagaaaaaacggacagaatttgatgatgaattggataagaaaaaagttcatgcttttattttttacatatttttattgtccatagaatttttgcactgaatagaaaatattacttttaattttgttaaagtataatttacatgactttttttttttccttttttttttagacagaatcttgccctgtcaccaggctggagtgcactggcatgatctcggctcactgcaacctccgactccctggttcaagcaattctcctgtctcagcctccagagtagctgagattacaggcat

SEQ ID NO: 318172 - DNA, 583 bp, Homo sapiens
cgattgcaacaaaaacaaaaattgacaagtgggacctaattatacataaaagcttctgcacaggaaaagaaagtatcaacagagtaaacagacaacctacagtaaaggagaaaatattcacaaactatgcagctgacraggtctaatatctagaatctataaagaacttaaacaactgaacaagcaaaaaccaaataaccccattaaaaatgggctcaagacatgaacagacacttctcaaaagaagacatacaaatggccaacaaacatgaaaatgctggggattttgagttgaattggttctgctctctatgtctcatcctgaagcaggctagcctaaggatattctaacagagaaggcagtggagaaagagaggatgacagcatgccagccctccttctagtattatctagtacctacttgtatcaagtgggctaccattccatcagtcatagctattcacgtggctgagcacagagtcaatttgagatggcaacctctaaagggagaggacataggaaagcatgagaaatcagtactattcgtgaaaataatttttcacagtcctaatcatattttcct

SEQ ID NO: 318173 - DNA, 634 bp, Homo sapiens
tcgtgaaaataatttttcacagtcctaatcatattttcctacaggatttttatttcttctgttttactcaatagtacctttcatatattaatattttggatatttgccgcctataaacgtcatgttgaaatgtaatctccagtgttggaggtggggcctaggtggaggtatttggaccatgggggctgatccctcatgtatggcttagtgcactcctcatggtaatgagttacaagatctgattgttcaaaaaagcctagcatctcctcctctctttcttgctccttctctcatcatatgacatgcctgctctccctttgccttccaccatgagtaaagccttcttgaggcctcaccaaaagtagatgctggtaccatgcttcttgtatagtctgcagaattaccagccaaaaaaatctcttttctttgtaaattccccagcctcaggcatgtctttatagcaatgcaaaatggactaatacaagctatttgcagggaaaaaaataaaattattgaaattgattcagtcaattaacrtatattcatcaagcacctaataatatgtgccagtgtagagtgtacattctaatggtggaacaggcaaaaaaaaaaaaaaaaaaggcgtaaatgagtg

SEQ ID NO: 318174 - DNA, 521 bp, Homo sapiens
cattttacccagctcctattcaagatggagttgctttgtttcaaatgcctctgacaatgtgagtggaaaattagaatgaaataaaaacatttcttgggaatttgcaacaggatttaaattggttttgttattgactccattgtcactttctggtgtctccttactaccattggtgagtattccaattattaaaatgtttaaagggaggaattatscctgtaaagaaggttcaaaaggcaaataaacaaaaaaatttaggaaacagataccaagggccttcataaaatcacaaaatcaacccagcaaatatctcactattttggtgagttttttacctgttttaggaaaggaagttctttgctagataatgaggggtttgtgccctgcattttctattttctggaattctctaatatgctagatttcaagaaaatgactcaccaattcagccacctttacagttgttgatgttcataacaatgtaaaatatgagatcttaacttagtcaaaaattgaatcaa

SEQ ID NO: 318175 - DNA, 521 bp, Homo sapiens
cattttacccagctcctattcaagatggagttgctttgtttcaaatgcctctgacaatgtgagtggaaaattagaatgaaataaaaacatttcttgggaatttgcaacaggatttaaattggttttgttattgactccattgtcactttctggtgtctccttactaccattggtgagtattccaattattaaaatgtttaaagggaggaattatccctgtaaagaaggttcaaaaggcaaataaacaaaaaaatttaggaaacagataccaagggccttcataaaatcacaaaatcaacccagcaaatatctcactattttggtgagtkttttacctgttttaggaaaggaagttctttgctagataatgaggggtttgtgccctgcattttctattttctggaattctctaatatgctagatttcaagaaaatgactcaccaattcagccacctttacagttgttgatgttcataacaatgtaaaatatgagatcttaacttagtcaaaaattgaatcaa

SEQ ID NO: 318176 - DNA, 521 bp, Homo sapiens
cattttacccagctcctattcaagatggagttgctttgtttcaaatgcctctgacaatgtgagtggaaaattagaatgaaataaaaacatttcttgggaatttgcaacaggatttaaattggttttgttattgactccattgtcactttctggtgtctccttactaccattggtgagtattccaattattaaaatgtttaaagggaggaattatccctgtaaagaaggttcaaaaggcaaataaacaaaaaaatttaggaaacagataccaagggccttcataaaatcacaaaatcaacccagcaaatatctcactattttggtgagttttttacctgttttaggaaaggaagttctttgctagataatgaggggtttgtgccctgcattttctattttctggaattctctaakatgctagatttcaagaaaatgactcaccaattcagccacctttacagttgttgatgttcataacaatgtaaaatatgagatcttaacttagtcaaaaattgaatcaa

SEQ ID NO: 318177 - DNA, 643 bp, Homo sapiens
cacacatatagtagctcctgttccatcacagtgtctacaggacaatatacaaaaatggctggtctcactacctttcctcttgttttcaaaatgggaaaaaagtccttgtaacaccaatagaactttccacttgcatttaaattccatttacctcactctcaggarggctttgtcccttcagttctttgctgtgcttcctgtgctatcattctctccctctctactgatatcatcctcatccatgtcaaaatcttttacagttttgcctgcctgtcttaaaaaattctttttttacactactgttgctcttttcctagctcaaatttgcttctcctcaacaaaacccttcacaaaataattttctagcctgatatttcagcttctttacctctcattcaccattttttaaaatttatttaattttgaagttttaaaatataataatttaaaaattatttaatatatacatgtaattttatgtaactgcataaatataatcatatacttggtttatttcccccataagtgttcttttcctggattctttccccttgtctccttcatccacattagctcattaaaaaagaaagcacagctgtgcctgtgggtctatgtgtgtatatatacgtatatatacacacac

SEQ ID NO: 318178 - DNA, 524 bp, Homo sapiens
cttctttacctctcattcaccattttttaaaatttatttaattttgargttttaaaatataataatttaaaaattatttaatatatacatgtaattttatgtaactgcataaatataatcatatacttggtttatttcccccataagtgttcttttcctggattctttccccttgtctccttcatccacattagctcattaaaaaagaaagcacagctgtgcctgtgggtctatgtgtgtatatatacgtatatatacacacacatatactttatatataaatatatatttgctgtatttgctgtagactaaatttccaggaataggattgtgatggaaggtattgaagatatatgcattttttctttttttttttaattatactttaagttctagggtacatgtgcacaaacctctgcagacttaaatgtccctgtctgacagctttgaagagagtagtggttctcccagcacgtagtttgagatctgagaacggacagactgcctcctcaagtgggtccctg

SEQ ID NO: 318179 - DNA, 524 bp, Homo sapiens
cttctttacctctcattcaccattttttaaaatttatttaattttgaagttttaaaatataataatttaaaaattatttaatatatacatgtaattttatgtaactgcataaatataatcatatacttggtttatttcccccataagtgttcttttcctggattctttccccttgtctccttcatccacattagctcattaaaaaagaaagcacagctgtgcctgtgggtctatgtgtgtatatatacgtatatatacacacacatatactttatatataaatatatatttgctgtatttgctgtagactaaatttccaggaataggattgtgatggaaggtattgaagatatatgcattttttctttttttttttaattatactttaagttctagggtacatgtgcacaaacctctgyagacttaaatgtccctgtctgacagctttgaagagagtagtggttctcccagcacgtagtttgagatctgagaacggacagactgcctcctcaagtgggtccctg

SEQ ID NO: 318180 - DNA, 518 bp, Homo sapiens
aaccacaaagatgtggataaaacagagcagaaaagctgaaaattctaaaaatcagagcacttctccctttccaaaggaatgcagctcctcgccagcaatggaacaaagctggacagagaatgactttgacaagttgagagaagatatacgcatttttttgtagacatttctagattacttcctgaagagtctatgatactgtatttccactagcaacatatgagccctttcccacacatcactttcaagaaaaggtgacatagcacttgtcgatttttactagtctgatggatacaaagatttatacaactatttttcctttcacattttcttgagtagggtgaacattttttctcatacatttatttttcaaatatttattgttctaaagagttatttagttttatgttttgcccacttttatttrtcaacttggtgctttgtcaattatagatattaatacattatcttctgtattacatttttctagctttattggtagtctaatggttttgtaa

SEQ ID NO: 318181 - DNA, 372 bp, Homo sapiens
tttttctagctttattggtagtctaatggttttgtaattgactcttgtacacattaacaatttttattatagttgaatatatctaactttacctttgtaggattaagagtaaacttgtaaccttaaaatttagagatttcaaatttagctaaggtttccccttcccacagccattggtaccataaaattttatgaaatgtcctatttattttcttcctgaattgacctatcaagaataccatatattgtgttctcataaattcaagaatttatttatagmttcttcattctattcctctggactacttatttattttgagacacagagtaaatgatttgattgcatagattcatgataatagtatgatgtga

SEQ ID NO: 318182 - DNA, 538 bp, Homo sapiens
tgagattcacttgattggggagatttaagtctttgtcccaccctgactcaatcactgcagytgggggataaactctcctaacctgagctatgtgctccatccctgcaactgggaatagagtcagaatccctggatcctcaaacagaaatgagtactgttgggaaggaggaaatggaaaccagggaagcagtcaacattgactttagcatggaagctgggtcactccattgaactcctatgcatggaaagtactcgatttctcaacaaccctctttccaaggattgaattcaggggcttctcttaggcctgaggcaaagccaaaagcccccacagttgctcctgctgcagactgtcacacagaaggttaggttggtcactgggcacctctttgccgagtgccttcaggaccaccctactctggtgcagtagggcagtccaggacatcttagacctcaaggaatcatgacactacaacattggccacaccaggcagcagggattacaagccagtttatgtgagaaaggccagggtaatca

SEQ ID NO: 318183 - DNA, 593 bp, Homo sapiens
aggttaggttggtcactgggcacctctttgccgagtgccttcaggaccaccctactctggtgcagtagggcagtccaggacatctyagacctcaaggaatcatgacactacaacattggccacaccaggcagcagggattacaagccagtttatgtgagaaaggccagggtaatcaccgacggcttcctggagcaggtgggaatttatgctggattttaaagggatgatctccagggtggggtacacacaccacagggactatgctggactgtatactgcagtacagaaataaaataaatgtgagttctatttaggtttatattttatctgaaaaaaatagaattactaacatttaatatacagtttattaaaattggacagtttatgctggtataatttacatatacacttacacataattaggggtacatatcatcttttttcttacaggagattgaattttaaaagtttagagaccaaaactgcctggaagaatggagctgaggataagcagaattcaggatgagtccccaaagagccttgttggagagggtgtgaggtagagtcaggtgggagggcactggagccaggg

SEQ ID NO: 318184 - DNA, 593 bp, Homo sapiens
aggttaggttggtcactgggcacctctttgccgagtgccttcaggaccaccctactctggtgcagtagggcagtccaggacatcttagacctcaaggaatcatgacactacracattggccacaccaggcagcagggattacaagccagtttatgtgagaaaggccagggtaatcaccgacggcttcctggagcaggtgggaatttatgctggattttaaagggatgatctccagggtggggtacacacaccacagggactatgctggactgtatactgcagtacagaaataaaataaatgtgagttctatttaggtttatattttatctgaaaaaaatagaattactaacatttaatatacagtttattaaaattggacagtttatgctggtataatttacatatacacttacacataattaggggtacatatcatcttttttcttacaggagattgaattttaaaagtttagagaccaaaactgcctggaagaatggagctgaggataagcagaattcaggatgagtccccaaagagccttgttggagagggtgtgaggtagagtcaggtgggagggcactggagccaggg

SEQ ID NO: 318185 - DNA, 593 bp, Homo sapiens
aggttaggttggtcactgggcacctctttgccgagtgccttcaggaccaccctactctggtgcagtagggcagtccaggacatcttagacctcaaggaatcatgacactacaacattggccacaccaggcagcagggattacaagccagtttatgtgagaaaggccagggtaatcaccgasggcttcctggagcaggtgggaatttatgctggattttaaagggatgatctccagggtggggtacacacaccacagggactatgctggactgtatactgcagtacagaaataaaataaatgtgagttctatttaggtttatattttatctgaaaaaaatagaattactaacatttaatatacagtttattaaaattggacagtttatgctggtataatttacatatacacttacacataattaggggtacatatcatcttttttcttacaggagattgaattttaaaagtttagagaccaaaactgcctggaagaatggagctgaggataagcagaattcaggatgagtccccaaagagccttgttggagagggtgtgaggtagagtcaggtgggagggcactggagccaggg

SEQ ID NO: 318186 - DNA, 593 bp, Homo sapiens
aggttaggttggtcactgggcacctctttgccgagtgccttcaggaccaccctactctggtgcagtagggcagtccaggacatcttagacctcaaggaatcatgacactacaacattggccacaccaggcagcagggattacaagccagtttatgtgagaaaggccagggtaatcaccgacggcttcctggagcaggtgggaatttatgctggattttaaagggatgatctccagggtggggtacacacaccacagggactatgctggactgtatactgsagtacagaaataaaataaatgtgagttctatttaggtttatattttatctgaaaaaaatagaattactaacatttaatatacagtttattaaaattggacagtttatgctggtataatttacatatacacttacacataattaggggtacatatcatcttttttcttacaggagattgaattttaaaagtttagagaccaaaactgcctggaagaatggagctgaggataagcagaattcaggatgagtccccaaagagccttgttggagagggtgtgaggtagagtcaggtgggagggcactggagccaggg

SEQ ID NO: 318187 - DNA, 624 bp, Homo sapiens
gtgttagttccttacggccgccataacagatgatcacaacctgcgtggcttaaaacaacagaaacgcattccctcagagtcctgaaggacacgagcctgaaaggaagcagcaccaggtccgcactccctccgcaggctctgggggagaatccttccttggttcttccagcttctggtggtcccgggcgctccttggcttggggcagcatctcctaactctgcctctgtcttctcgtgtctctcttctccccatgtctctcctctgtgtttcctcttcaggacacttgccattgaatttagggtccacccagataatccaggatgatctcaacccaagaaccttaacttagttacatctgcaaagacactttttccaaagaaggttgcaaaggcattggctcaaggcaggagccccagctgcatggcagcttccgcccactggctgccttgtccaccctgacccactctggggcaccagctttaaggcttccctrtaagatgaagaatgagggccctttcaggtaatgacagatggtcaagactctgtggctccagaaacatcattcctttgtcagaatgacttccattaccactctctcgtcatttgacaaactcatattcatc

SEQ ID NO: 318188 - DNA, 580 bp, Homo sapiens
gcttactttaaaagtaagtactaaaataagtactcagacttactttgcttgatcaacaggtttttctgttacccaggaggcggaggttgcagtgagccaggatcacaccactgcactccagcctgggggaccctgtctcaaaaaaaattagattaaattaaaattttaaagacctaagtaaacagagggatagataacatttatactttggaaaacacaatattgtaaaaatgtcagttcttcccaaattattcgttaggttcaatgcaatgtcactcaaaatcctttttttttttcttttggtagaagtaaaaaagctcagtagaatttatatggaaattacaaaggatgaagaacagcaaagacaatcttgagaaggaakaagaacatggaggatacacactattgagagaaaacatttattttatatacaatttgtttatataatatataataatgtaaatatttattttatacgtgtgtgtgtgttgtgtatctcacaaaggactcggatccaaaatatataaaaactcctacaaatcactatgaaaatgactgccaagggggaaaatgaacaaaa

SEQ ID NO: 318189 - DNA, 602 bp, Homo sapiens
agtactcacaagatatttgtaaagtaaaagaaaacaaaagataggaaaccaccgacatttctatcaaaagatgataaacaaatgttaaaactttgaaacaaaggaacattgaatagttatgtaaaagaatgggttrgttctgctttggtagtgaaagggaggaatctccatactgagagctgggggaacaaaagagaaaaaaaaacagtaggtatatgatactacaatattttacaattatatgaaaatattattaaactaaatacaaatatatgtgttcatagatgcacagaatttgtcagtacaaatatagaacaaattgatagcaggagtgacttctggggagagaaattaagtgctagaagacagggatgtgaggaagactcaaggttttttgctgttttcgttgtttttttttttaatatatgtataggcagcaatattttattgaatggtactgctccttgcagaccagtgctaactcataggcagtgaaccccaagtcagcctctcagtttttactctacattcttgtgtaccccttttctggcttctttttgtagtacaatgcatataacataaaacttaccattgtaatcatt

SEQ ID NO: 318190 - DNA, 636 bp, Homo sapiens
gctggattgagaaggggaaggagaaggctttcaagttttacttcgggccaggcgcagtggctcacgcctgtaatcccagcaccttgggaggctgaggagggcagatcacctgaggtcaggagtttgagaccagcctggccaaatggtgaaaccctgtctctactaataatacaaaaattagccaggcattgtggcgcatgcctgtaatcccagctactcgggaggctgaggcaggagaattgcttgaacccagcgggggtggaggttgcagtgagctgagatcccrccactgcactccagccggggcaacagagcgatactctgtctcaaaaaaacaaaacaaaagtattagtttgcacagttctgcaacatgaacactagataacaaatgtgtattttacctttaatacacaaagaatcacagtttttaaataagtgaattttttgaaccaattaaaggattatttattacatattttcttatgaccgaaagaagtaaaacaaatttttcaaaaataaatagataaaatcaatctgggtgcgctagatggtcagagatggctgtggtcatgatccccagatacagtgaaagttcccagggtagaagtgctgctttacttggccagagggcctcct

SEQ ID NO: 318191 - DNA, 636 bp, Homo sapiens
gctggattgagaaggggaaggagaaggctttcaagttttacttcgggccaggcgcagtggctcacgcctgtaatcccagcaccttgggaggctgaggagggcagatcacctgaggtcaggagtttgagaccagcctggccaaatggtgaaaccctgtctctactaataatacaaaaattagccaggcattgtggcgcatgcctgtaatcccagctactcgggaggctgaggcaggagaattgcttgaacccagcgggggtggaggttgcagtgagctgagatcccaccactgcactccagcckgggcaacagagcgatactctgtctcaaaaaaacaaaacaaaagtattagtttgcacagttctgcaacatgaacactagataacaaatgtgtattttacctttaatacacaaagaatcacagtttttaaataagtgaattttttgaaccaattaaaggattatttattacatattttcttatgaccgaaagaagtaaaacaaatttttcaaaaataaatagataaaatcaatctgggtgcgctagatggtcagagatggctgtggtcatgatccccagatacagtgaaagttcccagggtagaagtgctgctttacttggccagagggcctcct

SEQ ID NO: 318192 - DNA, 617 bp, Homo sapiens
tcccagggtagaagtgctgctttacttggccagagggcctcctacctgcttccttagcagatccttcaaacagggcttcccatcctgcctgtacaccccagaggatctgcagattcctgggtcrtgtcccacactggctgagtcagaaccttctggaggtggggttcaggaacctgcatttgtacctcccctggtgatcctgatgaccagcaagtgtggaaaccactgcccctcaaaaccctgaagggtgagcagaccaggtataatattcagtccctttgggtagatgagaacactgaggcccaaggcagttaatgaccttgccttcccctgccagagcttgctctattcatccagttgggtcaacccatgttggaagacaaaagcaagcagctggcagtcagtggtcccaagctgcagcctactgggtcacaggcatcccactaagccaggtgattcaccagctcatacaaaaactgcatttcaggatctactctgtgccagatgctgttctgggtgctgggatatttgtggctgcccacctgaccagcaagatcctagctcccttggggcttaaatcctatagggaaataaggacaatgaaaagttattcaaag

SEQ ID NO: 318193 - DNA, 537 bp, Homo sapiens
gtcttggccaggtgtgatggttcacacctgtaatctcagcacttcggaaggctcaggttgaagaattacttgacaccagamgtttgagaccagccctagcaacataccaagatcccatctacttaaaaaaatttaaaaaattaaaaagctggctgggcatggtggtgtttgctgtagtcccagctgctctggagactgaggcaggaggattgcttaaatacaacagtttgaggcttcagtgagctataattgagccactgctccctaaccagggcaacagtgtgagacccagtgtcaaaaaaataaaagtcttacatagtaaaataaattgtttgatttacataaccataagatttgagatagcactgtcttcagataatgattgatttagagactcaatagtcaatgatatttccaaggaagatgcttcctctactttccactttgccttcaaatctgttggtgtcatcctaaagctttttcccatcatggtatgaatatggcttttagcacctcatgagactgcatgtttgcttc

SEQ ID NO: 318194 - DNA, 537 bp, Homo sapiens
gtcttggccaggtgtgatggttcacacctgtaatctcagcacttcggaaggctcaggttgaagaattacttgacaccagaagtttgagaccagccctagcaacataccaagatcccatctacttaaaaaaatttaaaaaattaaaaagctggctgggcatggtggtgtttgctgtagtcccagctgctctggagactgaggcaggaggattgcttaaatacaacagtttgaggcttcagtgagctataattgagccactgctcyctaaccagggcaacagtgtgagacccagtgtcaaaaaaataaaagtcttacatagtaaaataaattgtttgatttacataaccataagatttgagatagcactgtcttcagataatgattgatttagagactcaatagtcaatgatatttccaaggaagatgcttcctctactttccactttgccttcaaatctgttggtgtcatcctaaagctttttcccatcatggtatgaatatggcttttagcacctcatgagactgcatgtttgcttc

SEQ ID NO: 318195 - DNA, 537 bp, Homo sapiens
gtcttggccaggtgtgatggttcacacctgtaatctcagcacttcggaaggctcaggttgaagaattacttgacaccagaagtttgagaccagccctagcaacataccaagatcccatctacttaaaaaaatttaaaaaattaaaaagctggctgggcatggtggtgtttgctgtagtcccagctgctctggagactgaggcaggaggattgcttaaatacaacagtttgaggcttcagtgagctataattgagccactgctccctaaccagggcaacagtgtgagacccagtgtcaaaaaaataaaagtctyacatagtaaaataaattgtttgatttacataaccataagatttgagatagcactgtcttcagataatgattgatttagagactcaatagtcaatgatatttccaaggaagatgcttcctctactttccactttgccttcaaatctgttggtgtcatcctaaagctttttcccatcatggtatgaatatggcttttagcacctcatgagactgcatgtttgcttc

SEQ ID NO: 318196 - DNA, 554 bp, Homo sapiens
acagcacagctgcttctgtaaaactgagattgtaaaccattatttaggacattatatttaacgtcaattctggtgacccaatagaaggtctcatgacctcgtcttttttataccctcagatacatgaggtttgcacctctacttccttagtcactcttatgactcagttttcttattacctccttctttttgtgtgcctttttctctaactccacatcctcctcaaatgattcattcattgctaactctgaacttaaagctatttatctctttgcattcaaagatgcccaaaaatgttgcaatcaagtaaatgagataatgagatagtatcctatatggagcctatattcaatagaggtctcagatttgtttaggttcttcagcaagaatcatattccagtcytgctttaagactgcatgcctcaatatttcttcacatgttattaatggacagtcactcaagtaatttcagcacatgatgaattttaccaatttcattttgatttttttctaaagtccatctcaaaattatgaatacttgactgttaaacaca

SEQ ID NO: 318197 - DNA, 586 bp, Homo sapiens
agtcaggtttctataacagagatatggggagatgcttaaccaatggttaagtgctagttgttcatagttagaagttgtccttttagactcatcaatttatttcaaagtggattcctacaaatgtcagttaaattagctggccaggacaaagaaaatcaaatccaaatggttggattctctttattttattaaaatagctgttttctatagaaaaaaaaaatcatacattgtatttyatggtcactcccgaagcattttggagatgtcacatatacatgatctcaggagaatttccttcctggttcaggcaacctctgtagttggctgtgccgtcttatattactttaaggctgtaacttttgagtcagaggtgcctatggcatgaaaagcctgggttgccctcaggggatttgtcacactttatttagctcaagcatggactcagaaacctggaaaatgtactctacttggcagcccagcactttttacaagtagtaaagttcaagctatcaaagaacttttcaagctgacaattatataacacaatatgtgacctttacaacaagatttaggctcagaaatttgt

SEQ ID NO: 318198 - DNA, 575 bp, Homo sapiens
ctactatatgtttaatttgtgtatggtactagtcattatgcaagaacttttggaaacttgaaactatttgaacatagcactgactgagatttttttcataaaaatatatttaaaaaattgaaatactactaaaacgtatggtaagaaatctgccatgtttactcagataatacaggtggatggggctctttgattgggagagggactgctctttacaaaagctgttgcaagctgaaatgctgcagcttcacctggctgcacacctttgctgctccaattgctccacattgggtcagtcttcctcctgatattatttcccagtcttctgcagccatgcttccattacttgaaattgttcttcaatgtgtctgtggcatgttccttcagcctgccctatttgagatctcctcagttcagctcaccatacaacagctggccaggtgtcctcctgctgtcatccattttttatacttgtttagtccagtggagcwgtattgtagcaaagaataacttcactgctgttgcactggctgtgttccaggacttcctgttggtgaatatgtttctacttgtga

SEQ ID NO: 318199 - DNA, 561 bp, Homo sapiens
aaatgattccagctaacttaatattcagtttccacacactttcacataaaatactcataaattatagttaacatgaaatggtcgmatacataacgtgcgatcattagcatttccctttcatattcagtaaataataaacattattggttttcttatatgataagatgtggtaataaaaccagaatgagattaatattgctatgttagaaacttaagtggatcatacgcaagtactatgagaagaagtactgccagaaggaaattatgaagaaaatagatagagttacaaatttactgacagtattaggcagatcatactggtatggaatatatcacttagagtacatcgtatagctttttgtcataaagtgaatcctcatttatcattgataggacatatttaattctgcatctgcgtctaaatctatactaaagagaaatacactgtggtaactgcagtttgttttcttttaaattcatttgttttgttttgctttatttttaatggtggtcaggatctgtaggaatcagtgaaattgcattccggacatccatattttg

SEQ ID NO: 318200 - DNA, 561 bp, Homo sapiens
aaatgattccagctaacttaatattcagtttccacacactttcacataaaatactcataaattatagttaacatgaaatggtcgcatacataacgtgcgatcattagcatttccctttcatattcagtaaataataaacattattggttttcttatatgataagatgtggtaataaaaccagaatgagattaatattgctatgttagaaacttaagtggatcatacgcaagtactatgagaagaagtactgccagaaggaaattatgaagaaaatagatagagttacaaatttactgacagtattaggcagatcatactggtatggaatatatcacttagagtayatcgtatagctttttgtcataaagtgaatcctcatttatcattgataggacatatttaattctgcatctgcgtctaaatctatactaaagagaaatacactgtggtaactgcagtttgttttcttttaaattcatttgttttgttttgctttatttttaatggtggtcaggatctgtaggaatcagtgaaattgcattccggacatccatattttg

SEQ ID NO: 318201 - DNA, 515 bp, Homo sapiens
tggaaattttgaagtttcagttggttttaaatctttggggagttttgtttaatgaaaatacattggtaatatgatgcctctacaaatttctatttaggaaattaatagaatttaaaaaggactagacgttttccaaagaaataactcttaaacatgtacattaatcacagcaaaagaagtgttaagacctaagaaacccaactttagaaggttattcttagcaattcacaaaagtaacatttaaactgcttttactaacttcaaatttagaagatgaaactatgagtttttgttgctgttgttgttgtcattgttgttctattactttgtagataataktaaaggactattttaatgtaatttattccaactataataaaatttgtccaactggatgtagagtttagctacctttggcagcacatcaactagaattgaaagaattagcacggtaaaaaggtcggtgttaatctctgcatgggtgaaagtcatacttgccaaatatttacttgata

SEQ ID NO: 318202 - DNA, 515 bp, Homo sapiens
tggaaattttgaagtttcagttggttttaaatctttggggagttttgtttaatgaaaatacattggtaatatgatgcctctacaaatttctatttaggaaattaatagaatttaaaaaggactagacgttttccaaagaaataactcttaaacatgtacattaatcacagcaaaagaagtgttaagacctaagaaacccaactttagaaggttattcttagcaattcacaaaagtaacatttaaactgcttttactaacttcaaatttagaagatgaaactatgagtttttgttgctgttgttgttgtcattgttgttctattactttgtagataatagtaaaggactattttaatgtaatttattccaactrtaataaaatttgtccaactggatgtagagtttagctacctttggcagcacatcaactagaattgaaagaattagcacggtaaaaaggtcggtgttaatctctgcatgggtgaaagtcatacttgccaaatatttacttgata

SEQ ID NO: 318203 - DNA, 560 bp, Homo sapiens
tggaccttgggtaaagtctattgaactctaagaaatgtaaataatgcaatttaaaaacaatatccaggaccaaagaaatgtttgtttgtttgtttgtttgtttcttcaatctggcacacaatacatgggtgaaatgaatagatagaagtggacttgtgtaataggcttactcatggtagtagggaccatattcccatacactggcttttagattatttggctgtctttttaaatgttagcctytttgaagttcttggcagaaagaagataacttttcaaaatgccttttaaatcaaaacaacacttgggaattttatttttaatataaatttattatttcatctcttctcttgtgttaggacttactccttatttgttttaaactttagcttttatattttgcactatttctaggtacctaagttagtcttacatttgattattttacagttaatttgtgtttagtttgtgttttgcatttgggcagttttagaaaataatgagacaaaacataacaaaattaacatattgccacataatgagctaagagagaaaaatta

SEQ ID NO: 318204 - DNA, 335 bp, Homo sapiens
tttctaggtacctaagttagtcttacatttgattattttacagttaatttgtgtttagtttgtgttttgcatttgggcagttttagaaaataatgagacaaaacataacaaaattaacatattgccacataatgagctaagagagraaaattatatatagccaaacagtttcaataattcacacttgccaaaattatacaggtttctaggacttagttttcatattctccagttgcataaaattcaattagaaaataaaaactaattcaagtaaacccaaagtaggtagtaaaatgatagcaaagcctcaaatgataaattaaactaactggtag

SEQ ID NO: 318205 - DNA, 547 bp, Homo sapiens
atgtccttaatgctacagcacctattaatattcctggtttgctattacaatgaaacaatgctcccaaattccttttttctagtactcaatattgtgcaatacaaacacgatgatcttcctagtagctctattttcatttcttctgagagtcttattgcatgtttcccagacactaagtttctgtgcctcctcttggccataaacttttcttttattgtgctctttctctyttctccttcccccaatctaagttgacatgctctagacccatctgtgctccagtggttactctagactagtggacactgtgaccttatttagccaatgttgagcactaaaattggccttgtattctgatgttctttccagattcaactcactagaactttgctttacaacgtttcttcctctctgagtaactgacttgggtttattggaagaatattccagataagttgagggattccacatcatttcactctcaagaacatttgtcataaaaatcctttaatcttggactaagttcagaataagttctcattcagct

SEQ ID NO: 318206 - DNA, 503 bp, Homo sapiens
gaaacaagacacatatgcgcattctccgtactcctagtcaacatggtaccagaagttctagccaaagcaatcaggcaagagaaagacaaaaaaggcatccaatttggaaaataaattaaacaatccatcttcactgataatatgattctatacctagataaccctaacctcattaaaaaatggggaaaaaccgtaaacagattatccttaaaagtaggcatacaatcagtcaacaaacatgaaaaaaatgcttatgatcactaatcattagagaaatgcaaataaaaaccacaataagatagtatcccacacctgtcagaatggcttttattaaaatgcmaagaaataacagatgttgatgaaggtgtggaaaagataaaatgcttatataatattggggagaatgtaaattagttcaactgctatggaaagcagtttagcgatttctcaaggaacttagaactaccattcaacccagcaatcccattactaggtattcgccc

SEQ ID NO: 318207 - DNA, 557 bp, Homo sapiens
ttttacaaggtgagccaatatccctgataaacatagatgcaaaaatcctcaacaacaacagcaaaaactagcaaaccaaattcaaaagcacattacaaagatcattcaccatggtccagtgggactcatcccaggaatgcaagaacggttcaatatataaaactcagtaaatgtggtatatcactttaacagaatgaagagcaaaaaccataaaagaatttaaaaaagagtaaaaccacttaagcatttcattagatatagaaaaagcatttgacaaaattctacatcccttcatgatacaacatttcaacatattaggtatagaaagaataaacctcaacataataaaggctacatctgacaagcccacaggtaacatcatrtttaatggggaaaagttgaaaattttcttctaaaaccttgaacaagacatggatgcccattattgccatttctattcaatagagtgttggaggttctagcccgagggcttaggggaaagaatgcaattaaagacatccaaattggaagggaagaagttgaactgtttctgtttg

SEQ ID NO: 318208 - DNA, 348 bp, Homo sapiens
tttctttgtatgctcttctttcctccattactttgttttgcatcttagaaatagaaccagtaagttgaagcaggagaaaaaaattggagataacaatttatatcactcctcttcaaactatgtaatgtgaatatttaatatttccagaattccttaaagttagaaaaaaattaactggacaatcatattattgaaaaatcagataacttcttccatcctgctttagtcacattcaataataactgaataccttctttttcaaaatctacagtttgaactgagatattawgtcatttagggggtcaaggctgcagtgagccgtgatcatgccactgcactccaaccagg

SEQ ID NO: 318209 - DNA, 556 bp, Homo sapiens
tacagtggcaaatgcaatagttgtgactctgttcttcacagaatttagagtctaaagtgggaggcagacagctatcaaatttgcatacaaaaaactctacaattttgtacattgtaaattatataatattatggtaagtacgacagagccaatggccaaatattttgaaatagattaatagtaatagcaaatacagtaacagcattagatagggtaaaaaaggcttctctaagaaagtagcacttaaattgatacttgaataatgatgaatagacatccataaaaaagaatgtgggtatgggggagaatgattcacgcaagaggacaacataaacaaacagaatcaaatactccaataagtgaaagatgagcagtgtggatagatggttgtaagaagaagagtgaaatgacttgaagttgcagaaataggcataggccmtatcaggcaagtcttgcaatctaaattaaagcatttgaattctagtctaagtgcaatggagaacaactgaaatgctaggaaaaggagttataagatctattttatattcattttaaa

SEQ ID NO: 318210 - DNA, 474 bp, Homo sapiens
aatattgaagttgaaaaaggctacttttctgatacaataattactctctcttgtcaaagtaccaagrtaattgaacacaaaagaacataaacactatttgggtgctgtttgagtctgtttttgccactgtaatagaacacctgagactgggtaattcataaagagcagaaacgtatttttcatagagtgaaggctgaaaagtccaagatcaaggtgctggtaggttctgttgtctggtaagggctgctatctgcttcccaggaagacagaatggtaagctaactgaaggtggcctgtagcctctctaataagggcctttgagacatccacgagggagaagccctcctggtctaattaccgctcaacatctcacttcttaatgcaatcacattgacaatatctgaattttgaaacatattcaaaccacaacaattgctttatagactaaaattataatatgtagtagagaaggga

SEQ ID NO: 318211 - DNA, 606 bp, Homo sapiens
gccatttgcaattttgttactgtaactctcaagaacacacattttttgtctttcttttttttttcctggctatttgttcttaaaaaaaamatccagctgctcttttccttgtggcatgtcattgcttccattggttaacctcctacctctgccatcttcaaggcaaaactattgtgtcttttactatacaatttatactatttatgatctatactggctccacactgaccattacatctttccattctaatacatcctgtaagacctgatttagtcctcagagcaatgtgatgaggtaagcctctgacttataagcactaacgtttggattcactcacttctcttttccaactacattctgagtattggaacgaaacggatgttttctacgaagaatgacaccaggatacctttcagtatctcttccttagggcacaggatattacattcagaataatacacagaatattttcaaatgcagaatagaaaaatttggttaatatgtaaatattgaaaaatattcaaaattagaatacacagcaaattatatgttaacctaaatagtaagatatacatcaaatatactaaaacgagagtttattatac

SEQ ID NO: 318212 - DNA, 625 bp, Homo sapiens
ctctctgccctgttttctgtataactccaccagtccttcatctgtcaataaatttctgattctacaactgagtttctaagcattaaygaagaaaatcagttggctgtgtaggttggtgataatataacataccttatctttatcctcaataatgccagtacattattctgtttccattatctgttccttctccaattctttcctgcagtaatttcaaattttaccaatgtcttcaacttgcctttcttcttttctgagaaaactaacttctatttcgcataaaaaacagacatcaaggtaataataccttttttgtcttatctgtccctgccctacctaaacaggtatttgtatccactatttttacattttttccttcaataccattgggaaaatgtttcttctcttacccaagtcacaggtggaatatgtagctacttgtggcctgaatgcgttttgcttcttcatctttctcgatctttcctttattttgaaatcctactctccttttccatttgcccaacagctgtatgtgaccaagactcttcttctatagtcaatcaagttaaaacgttcacctccataagtctatactcagtgctttagtggtattacatttctattt

SEQ ID NO: 318213 - DNA, 619 bp, Homo sapiens
catgatatgaactttatcattttgataataccaaaagagatgtctctggaagcatgtagctgtgcatgtatgtgtgtgtgtgtgtgtgtgtgtacacaatctcacacatacatcataatataaaatgtgttaatattaagtaatgactgattattttaaataataacactctttacaaatacatacgtcttctgcccttcaaagcacacttggcctcctgcttggaaagtgctttctgtctaatagcactttcttctgatcatctttaattttggcarcacttatcactttaaaaagaatatatatatatgtgtgtgtgtgtgtgtgtatgtgtatatatatatatacacatacatacataaacacaggtatatgatttgggaaaatagctaaatgtcactgggagccaggcctagtaaatgagatactgttagaattgattcaataaaattgataatatttggtctcaaaaccaaattgtaagtataaaataaaactagtgtgcttgtgtgttcctaactaggactatatgtgtaatgtgataatctacataaggcagtttcgcccacacttctcacttctttaccgttcccaactctgctttatatagcaatgaaac

SEQ ID NO: 318214 - DNA, 636 bp, Homo sapiens
gatactgttagaattgattcaataaaattgataatatttggtctcaaaaccaaattgtaagtataaaataaaactagtgtgcttgtgtgttcctaactaggactatatgtgtaatgtgataatctacataaggcagtttcgcccacacttctcacttctttaccgttcccaactctgctttatatagcaatgaaacttcaggtatgttgttgcactgctcatcaaagtaccacttttagaagattgtacttgaagagtttttaaatagcactagaaagactctgccatgccacagaaaagcttttcgccacattaagtgtacatttaatcaacattatggcaattatagctctactagaagtccttcaccctctgttttgtggcragaactttgtctaggataaaactgtcatgagtagaggtaatttaaaattcatcctccttttatttatgtcagaatatgacagggtgggatgatggatacccatctttttctaattgtagcaatctattctaaacttcaaagataacttgttagaattctcattatttaaaaaaatgttatgacaccatttctcagtcattgcttttgtactatttcaataatctccttggatatactgattgagaaactgt

SEQ ID NO: 318215 - DNA, 520 bp, Homo sapiens
acgtttgaacaattccattcctttgccttttcttgcactataattggccacaagacaaatgtttgaactgaaagttttcttgattagtcttaccacattcctaccacaaatacacgctcatatgcacactaatacacaccaacactaacagggcatcagcagctagagcttcatgctactatgcagcaaaaatctctagcattatcttatggattgcccaggtatttacacgtccaatcaaaggtgaagttcatagtcaatcctatgagagagaagagcaatgctctcagtggcattttggaacttccacaacctcatgaaaagctgtgagcacagcttactgtrtgttactgtcaggaggtaaagggactctctgctgtctcacatcgtctacaccctgattttgatgaggaaatgttgcctagaaaagtaatattatatcaatggaagacagtgaatacaaagatgtttatatggcagatggctaaatatttgttgattttaactgaggcagagaaag

SEQ ID NO: 318216 - DNA, 606 bp, Homo sapiens
aactggccatttatttgcagtgtgtcaaaaaaattctttcattttcaataaacaataatataggtacaatctctctctcttgctccgtgtttgtgtgtgtgtgtgtgtgtgtgtgtgtgtgtgtgaattgaaaggcagaattttgggacttgtaagcttctaagtggtacccccaaataatttctaagttcagttgatttcaataaaacactagctcttgtatatctcaaaagaaagacacatacatttattttttattgagagttaaaatttatagctttttctgaaccatttgtttattctagtttatcaatgactcaagaaaaacagcagatatgctgattaatcragttctatcgatcagtagcatatgtcaatatttcacacaaacatctgcagaatagtttcttccaatcaaaaatttataaatcaatttaaattcctggtaattaaatttatttgctcttcaacaatgaacacagtactttataaagagtagtatgtgaaatctgcactcaagaatatattgatcaaaggtaaaatagcacctttctatttctattaaaccaaggttctaagaactagaaagttcaaaccttaaaagcc

SEQ ID NO: 318217 - DNA, 421 bp, Homo sapiens
aagttctatcgatcagtagcatatgtcaatatttcacacaaacatctgcagaatagtttcttccaatcaaaaatttataaatcaatttaaattcctggtaattaaatttatttgctcttcaacaatgaacacagtactttataaagagtagtatgtgaaatctgcactcaagaatrtattgatcaaaggtaaaatagcacctttctatttctattaaaccaaggttctaagaactagaaagttcaaaccttaaaagcctgcaattgtttcaaatacatctagtaattctgttgattttgggccactaaaagtgattacttaattaggcaatcattcaaggcatccaaacactcacacagacaaaaacagggaagtattagcatggctgtcttcaccttgacatgaacattctgaaaaacag

SEQ ID NO: 318218 - DNA, 601 bp, Homo sapiens
tcattcaaggcatccaaacactcacacagacaaaaacagggaagtattagcatggctgtcttcaccttgacatgaacattctgaaaaacagtgcagactctcaaactttgtggatctgtccctatgaatgtcctgagtaagatactaaattctaaaaggtgacaaccagaagctcaggaaaaaataattaacctataatgaaattacccatttatcttttcaggtggtttatatcttaaactatcttagaaatgcaaagtaataatacagatggtctctatagattcttggaaatactacctattttcttctctctggttacactcttatattatcatctaaaagtaattaatgaaatytctgcactcttgtatatctatcagaagtaactacctacaaaaaggttttcaaagttcctgcctaacatgaataaaaacaaaaacaaaaaatattttctatttatgggaaggaaaaaaatatcagccctggaaactcagctacaggagtcttaaatataactaaagaataaaaccccctattttcactcagaagatatcagatactgttttaagaatcttactgatgaaatacagccaggaga

SEQ ID NO: 318219 - DNA, 633 bp, Homo sapiens
acagcctatattttctttgcactctagattgaaccccaagacacgattatttttatagaaataaaccctcaccctgtgtcctatgaattcagattaatgatggccttgcctcatagctagattagctttagtagtgcttccatataatctcattgtattatcagaaatgcattttttatcacagttctagatattgcaaatacggtggacaagacagagactctttattagcataatcatgaagcagagagaattagtataattaagttgcatcagcatagaataaaagtttttgagagaatgggctgaagctcttgagaacaargcttggtgagtaggagtggacctatccagacagctggatgctcagccacaggcacgagcctttgtttcacctgctgggttggcaataataagccaacatagacttgaaggcttgacgagttataatatttcatattcctattttaaaacaatatttcagaattatttattactttctattgagcttggtggaaataacctttgtcctggattttgagcactaacaggcattttcatatcagactaacatcaacatttgaaatatatcccaaaccaaatattctcaagattagaaacagcaacctgtta

SEQ ID NO: 318220 - DNA, 584 bp, Homo sapiens
agtaaagtaaaaaataatagccacctgttgtgccacaaatgtactgggaaaaatatagatggttacagggatgtggggggtgggaggaaataggaaagtctagactctacaataattactttgaaaattgtccaacagcttatttagtgagagcactcaatatttycaggcagtggccaaacaagaacattataataatagaacatttaataatgttaattctcaagggacactttcttctatttgtggacaggagagaaaggaagaaaaaggaagaaaggagaatggaaggtagaaggaaaggaaagagagaaagaatgaagaaagagaaaaaagtagacagagagatagatggatagatagacagatataaaatatctatttatttgacagccaaataatttgggtgaaaatgagaatggatccaataaacattttcaattaatatgacacataaataatataaacatgtagctacagatttcatatagtaaaacatctgttttgttaaaagagtaatctcaatatgttaaactgctgaggaaatacccctaagaaaactacaactaccaggaatcatagta

SEQ ID NO: 318221 - DNA, 662 bp, Homo sapiens
tatttatttgacagccaaataatttgggtgaaaatgagaatggatccaataaacattttcaattaatatgacacataaataatataaacatgtagctacagatttcatatagtaaaacatctgttttgttaaaagagtaatctcaatatgttaaactgctgaggaaatacccctaagaaaactacaactaccaggaatcatagtagctacattttagtgggcaattgttatgtgcctcaactgcactaaacagtttaagtgctttatccaatttaattaatataaaaacactgtaatatagttatcacttcttcccattttaccggtgaggaaagtgagtatcaaagacattttgtcccttaaccccagtcacacagctcaatcaagcccaagcctgtctgactctaaacatgtggctctgtgttggcagcttactaactgtaggctccagaaagcatgtttcattccctttctcaaaaaagatmatcactaaaagagagagaatttgtcaaattagtagatatttattgaacacttttgatattccagacactgtgctagaccctattaaagattcaggaaaatatttgactattctgacgtcaaaaattatggtagttaaacagtctccccgatataacacttatctcattgtcaaaaac

SEQ ID NO: 318222 - DNA, 509 bp, Homo sapiens
gcttccacctcggacctaactttagaggatcaatgtgacaaggcagtccctgatagatgtttctcttgataaacgacttgttcaaaagagacattgtagctttcatttcctgaccacaacacacttttaatttgcaacagcagagctgccagagtgtgagcacttgcccactttctagtcttttaggtttgtagctctggttcctttaggccgcacatttgagacaaacaaaatctaaaaataatcagagtaaagaattagaaaacaagagccagtaacgccactttatacatatacacaagtgtctactttatatayatgtatgtaaactttcacccctagaattctaatatatgataacaaggctcctaagttaacatcatttgcacatcggacatttaaacatagggaaatgaattatgtgactattatttaatagtaagcagagacttaagaggggggcaatttacacactcaaatctgctgttaaatgtcatgaattatataat

SEQ ID NO: 318223 - DNA, 509 bp, Homo sapiens
gcttccacctcggacctaactttagaggatcaatgtgacaaggcagtccctgatagatgtttctcttgataaacgacttgttcaaaagagacattgtagctttcatttcctgaccacaacacacttttaatttgcaacagcagagctgccagagtgtgagcacttgcccactttctagtcttttaggtttgtagctctggttcctttaggccgcacatttgagacaaacaaaatctaaaaataatcagagtaaagaattagaaaacaagagccagtaacgccactttatacatatacacaagtgtctactttatatatatgtatgtaaactttcacccctagaattctaatatatgataacaaggctcctaagttaacatcatttgcacatcggacatttaaacatagggaaatgaattatrtgactattatttaatagtaagcagagacttaagaggggggcaatttacacactcaaatctgctgttaaatgtcatgaattatataat

SEQ ID NO: 318224 - DNA, 625 bp, Homo sapiens
atacattttatgaacattcaaatgaatatctctgactaatctcaagtgcatttgaataaaaaatagaacaattttgatgttccaagttgaattaytaagtaaaaatattcagttatcagatagttaattaagtggaactgactgtattcattaaaatatttgttccaaacaaatgtatttaacattcagatattatgcagaataggtgacaattgcatatctccatggagatcaataatgggattcagatcattgtgtaaagagtctgcaagtttaatgcagagagaatgtcattattatttctctcttaatgatggtcattatgcgcaaacactgattgaattccatttgttacctgcatttgagctgagaggaataattacaatttaagtgtctccattaaaattcataaaagaatatgaatgcaaaaattatacttgaaactgacaaaatgtactttgaggatataaattgtgttttctgataggcctcttaaaagtattaaaaatagcttcattttaataagatgacatataaagatcatgtgttatcctcacctttatgtaattttaatgctgcaatacatgactaataataaaaagtaaaggaattaacttttgaaaag

SEQ ID NO: 318225 - DNA, 508 bp, Homo sapiens
aggcttgaaatagcaaatggaaagtactaactgttttggcaagtttatatttaaaaattattccgaagcacttatcagaataaaaggggactgggatttagatttttcaatggaaacaaatagctgtttatgaccagaccttacatatcaagaaacaattcaacaatttatgcttctcccaagatgagtaacaggcaccagatttaccctccaactgaaaaaataataataatccaacaatgtatatgaaaaaatagattttggtttggggattttttttttcatttttrttttagacttgagggtacatgtgtaggtttgttacctgggtatattgtatgatgttgtttggtaacaacagttttggacattggatatcaggcagcacagaaaagtgatcaccaagagacaggaatcaaggtgaaccctgtgattgctctagctcactgccttgacagagtttgcaggctgcggcacagggagaggagagccagatgatgcccagtag

SEQ ID NO: 318226 - DNA, 553 bp, Homo sapiens
cttctggtcatggcaccaccacccttcatgttatcctgttttgtacccttaaatcacatttgattctcttctcactccctcttcagcctagcaaagtagaacacacctgagatctggagttaggaagacctgagttcaaacctagtctccatttactagccaggtgaacctgggtatggtcattaacattgcagctccaaatccatcaattattcagtggtgacaacatttcccagctatgggaattaaataaaagcatgtgtctaaaatatctgatatgtagcaggtgtttcccttaaacttctccataaaattaattgttctacgtcaatgacactgcctacatctttcaaatctacattaaatattcrttttaaatttttctcagtggagatatttcacctcactgagccttaaagaatattgtttgcactcatctcatagcattaactccattttgaaattcttggtacttaacatcacaagctgaactttttggatttttcaaatttgctctgcccaatatggtagctattcaaatttaaatttgtga

SEQ ID NO: 318227 - DNA, 562 bp, Homo sapiens
aaactaatactagttacagacccagtgcctagatggaaaaacaatgttttaaaaaattagagttcttctataaaaagtgtttttaattggaaatttctctatcaaagaaaacttttatgtttattcgtacaaaatgtattttaattcactaaaatgaaaatatataattaaaacatctcatggattcctggaatatatatatatatatatatatatatatatatatatatatatatatatawctagagtctgtgcacccgaatctgagaaacatagttttatactaatctaaaccatacctctgaattctaaaaagcatctaaagtaaaagtgaaatgtgtgaccaagaatattaaaataataaatgtcattttgtaacaactatcagaaaacttgaaaagtatttcagttcatattttgaagctgataaatatcagctctgtggttaagtttgtcttaaaactcaaatacccaattttatttacacagatagccaaagtcatctgttagcctgaaacatatctgaacagtacctgaagtcatccttttgagagccctttac

SEQ ID NO: 318228 - DNA, 556 bp, Homo sapiens
ttgatttttaaaactcacaaataagtgagaatatgcaatgtttgtctttctgtgtctggcttatttcacttaacataatgatctctggttccatccatgttgttgcaaatgaatggatctcaatattttttatggctgagtaataccccattgtgtatatatataccccattttctttatctatttatttatctgttgatggacacttaggttgcttccaaatcttagctattgtgaacagtgctgcaacaaacaggaytgcaaatacctgttcaatatactgatttcctttcttttgggtatgtacccaacagtatgattgttggatcatatggtagctcaatttttagtttttgtggaaactccaaactgttctccatagtggttgtactaatttacatttccaccaacagcatacaagagttcgcttttctccacatccttgtcagcatttgttattgactgtcttttggatgtaagccattttaactggggtgagatggtatcacattgtagttctgctttgcaattctctgatggtcagtgatgttgagca

SEQ ID NO: 318229 - DNA, 579 bp, Homo sapiens
gcaaatacctgttcaatatactgatttcctttcttttgggtatgtacccaacagtatgattgttggatcatatggtagctcaatttttagtttttgtggaaactccaaactgttctccatagtggttgtactaatttacatttccaccaacagcatacaagagttcgcttttctccacatccttgtcagcatttgttattgactgtcttttggatgtaagccattttaactggggtgagatggtatcacattgtagttctgctttgcaattctctgatggtcagtgatgttgagcacattttcatatgcctctttggcatttgtatgtcttcttttgagaaatgtctattcaaatcttttacccatttattgatcagattaytctgttttttcctatagagttgtttgaactctttatgtattctggttattaattaatcctatgtcagatggacagtttgtcaatattttctcccattctgtgggttatctctttattttgttgatggtatcctttgctgtgcagaagctttttaattcaatgtgatcccatttgtttatttttactttgattgtggg

SEQ ID NO: 318230 - DNA, 583 bp, Homo sapiens
tcttttcgttggtcttttcaggttttggatttcttcctggttcattcttggtaggttgtatgatatgtgtctaggaatttgtccatttcttctaggttttccaatttattggcatatagttgctcatggtagctactaatgagcctttgactttctacagtatcagtttgtaatgtctccgttttcatttatgattttattttattctttctttctttctttttttttagaagaagtgtcactctgttgccaggctggagtgcagtggtgcaacctcagctaactgcaacctatacctcccggattcaagcaattctcctgcctcagcctcctgagtagctgggactacaggcacacgccaccatgcccagmtaatttttgtatttttagtagagacagggtttcaccatgttggctaggatgaccttgatctcttgtcctcatgatccgcccccctcagcctcccaaagtgctgggattacaggtgtgagtcaccgcgcccagccatgtttattttcttctactaattttgggtttcgtttgctcttgcttttcttattctttaagatgcatcactagactg

SEQ ID NO: 318231 - DNA, 622 bp, Homo sapiens
cacgtatatttaaaattgttatatcttcctgctgaattgactgctttttcattgtatagtgacattgtttgtgtcttataatttttgtcttgaaatccattctgtccactataaatatagctactcttgttcttttttggtttccattggcatggaatatctttttccatccctttattttcagcctatatgtgtctttataggtgaagtgcatttcctgtaggcaacagatcaatgagtcctgtttattcatccattcagccaggctatgtcttttgataagatagtttagtctatttacattcaatgttattactgataagtaaggactgactactgccattttgttattcgttttctggtcttctcttccttccttctttccttcctgtcttcctctagtgaaggtggaaggtggaaatcatatcatcatatcatcataaatcatatcatctctcatgatatgatttagtttcttgattttatttttttgatatccattgtatattttttgatttgaggctaccatgaggcttgagagtactaccttataatccaatgctataayttgttaataacacaatgctatttgcataatcaaatgagcaagcaaaaggaaaac

SEQ ID NO: 318232 - DNA, 602 bp, Homo sapiens
agttaagtctttatttaaaatttccagaatcaataactgagcctggtaacatggcccaatatttcagttcttttctggtgcaacattgcctataccatatcctttctgctgcattttaaaatattatttcttatctccaaggagctaaaaatggctagctggagtatcaggaaataccttgctttttcctctttagctgtttcttcttcaggtagacttaactccattcattcatttagtcattcattattgtgtctaccatatatgccagttcaaatgatttattattttaattttttgaaagtttatgttgaaatatttattttactattatatgtggccagagtctctatgatttgcttaaattggaagcatttaaacactttaatcaattttgagagtaatagtttccacatcccaaggtcctgattgcttctgaaatgatgggctcatagctatgctatgagccacagaaacatgcaaagtaggttctcaaaattaagayataaattagattattaaaaaagctcagagctagacagtgggctaaaaagtattatgagtattctgataggctctatttgttactcagatgcaagtcg

SEQ ID NO: 318233 - DNA, 554 bp, Homo sapiens
atagtttccacatcccaaggtcctgattgcttctgaaatgatgggctcatagctatgctatgagccacagaaacatgcaaagtaggttctcaaaattaagatataaattagattattaaaaaagctcagagctagacagtgggctaaaaagtattatgagtattctgataggctctatttgttactcagatgcaagtcgaatggtacaatcattttcatggtgtggtgcaacaattccagagggtaacattcacaacaaccatggcaaaaatggaattcctggtattatgcataataatgattctacacagccattctgcaaactccaccactaccacttccaccacctctgtcccttctttcktcaaatatatttgtgtgcttactaataggtgatccctttcccagtattcatcaggccagtcttggtggtctcactccccttgccatcacagtttaaaaatgtgacccaacaagggtgagaataaatcccctgatggcttctggataatggtttcccttacaaaaaaagagacatagagcaagacaacact

SEQ ID NO: 318234 - DNA, 534 bp, Homo sapiens
ctcagaggtgatacagcccagaccttgtcacttttggaaatgataataataaacacactcgaagcagggcacttatttttatttatttatttcataatttcaactttcattttagattcaggagctacatgtgcaggtttgttacatggttatatttcatgatgctgaggtttgggatacaaatgatgctgtcacccaggtagtgagcatagtccctaacatttagtttttcaaccttgcccctttcccgtcctcctcctcttatagtcccctgcatctattattgccatatttatgtccatgagttccccatgtttagctcctacttataactgactacatatagtatttggttttctgttcagcagggcatgttagatagcagacagattgtacttaaatatgcctttttctgattacctgtaaacctatgctaatgaggatggacgcctaacactgcaatctatttgtttgtttaatttaggttgagagtcattattcctatytgttgccaactaataggaaagagtacaa

SEQ ID NO: 318235 - DNA, 529 bp, Homo sapiens
tgttggtaaaataaagacctatggcattagctaaagagacacaattacaagattacacagagtcagtgttcacctgtacacaatggcttgtctgactgcaaagaaccattcatttaaaatcttttcaattaatataaactttttattacttcactaaaactaaaatctacatgcacacatgcactcacacacacatagacacacaacataagaaaaaaagcattcatttttaaccacagagctgcaataaaatcaaatctcctttttactccaaaggcattccctgtattagaagacgcttgcagcttctcaaagcaagtccagttaccataacaaatgtacatttyaccagccttggaattctaattgtgtttaatacagtttcatgttgcatcaaagtacaaaatcaataccatttgtccagcatacaggaaaaatggaatctataaatggctcttattgagtaattaaacacctattattgtcatgggtagtgaaacaatgaatatgataagataaatttttgcaa

SEQ ID NO: 318236 - DNA, 573 bp, Homo sapiens
tatcctcttaattaattcaaactacttctcatgatctaagtatcatattccagtggctgaaatgaaatttgattttccagatgatcaagtaataaccagtcttgcagacaaatatcaaaaattttttaaaaagaaagaaaagaaaagaaaaaaacagctcttcaaaacggtacacagctaggtaggtaggaagatggcttagacagcaaggttcttggtgagtatgccaatagcaaaatagcagaaaacattttccccttagccctaagcaaaggacaccaacaagctgttagaaaataaagacaatttttttaaaaattatgtatttaagtatacatgtgcattccaatcatatatcagcaacacctcccatcttagtgactgtggcattttgctgtagtagggtaaaatttcaaggaactaycattacatggtggtaaaattgtagattttttacccatgattatgaacaaacctatattatatgttgtactgtccttactagatatctttaaaaataaatagtacaaaatagtttacctataagttctttttactttatgctaaaacaaa

SEQ ID NO: 318237 - DNA, 551 bp, Homo sapiens
aaatgtgaattgtggctaactacctactaaaatatttcaagtttgcaatggcttakttaaaaaaaaaaaaaatattcctaaactgtggggtaaatttttacttaaatgggacactgttataatagttatttcccagctttctttcattaaagtgcctatcagtgtggagagcaatgccttgttattacacagggcaaagatttttcttcttagaaagtctcatatgtagcatttctcccgacaaagtctaacaaggcattcaaaataagttcaatttttttcttcctcaaaaatatctttaaagccccccactttcaccccagtcttggattacataaaagaatagttactttttccaagctctttgatatttcccttcctggcagagtcatctgatgtgagaaatatcttttgaaaataaatggtgcaacttcaagtgcactcagatccatacttgctggacattccatcatatctcagttttgatttgaaaaagccacttgacttcaaaattcagttttaggtatcgcaatatgaagtttgatctcatt

SEQ ID NO: 318238 - DNA, 551 bp, Homo sapiens
aaatgtgaattgtggctaactacctactaaaatatttcaagtttgcaatggcttagttaaaaaaaaaaaaaatattcctaaactgtggggtaaatttttacttaaatgggacactgttataatagttatttcccagctttctttcattaaagtgcctatcagtgtggagagcaatgccttgttattacacagggcaaagatttttcttcttagaaagtctcatatgtagcatttctcccgacaaagtctaacaaggcattcaaaataagttcaatttttttcttcctcaaaaatatctttaaagccccccactttcacccsagtcttggattacataaaagaatagttactttttccaagctctttgatatttcccttcctggcagagtcatctgatgtgagaaatatcttttgaaaataaatggtgcaacttcaagtgcactcagatccatacttgctggacattccatcatatctcagttttgatttgaaaaagccacttgacttcaaaattcagttttaggtatcgcaatatgaagtttgatctcatt

SEQ ID NO: 318239 - DNA, 467 bp, Homo sapiens
taatttgtaactgctgttaattaaaatatagttctctaaaatagaacccatttagaaataataatagttggaaataaacaacatggaaaactagatgatttgtggttcaaatttactgatagataagttaaacattagagccataaagtgtaaatttgcgtagcatttaacaagctttagaagagcattaaaagtaacctatatgtaatatgcaatacgaatagagcttcacagagccccagaggaagctgaaaatgtagttcaggatgcttcaggctgtctgagatgttgagattatgttccacaaagaccaaaataaggtttcagcaaggttttcttgcaacatgtaagttttccagatgaagagaaatggacatatattaaatttccagcagcttaaaaatgcagycatttgtaagtgattaaaatggacgttgtttttagtttttctgtagtagttggcattc

SEQ ID NO: 318240 - DNA, 623 bp, Homo sapiens
ctgttgactcaaaagtaactggttttcgttttaaaatagaaaatgaaaaatgtatcattgaaagaaatcactgttttaattcctctcccctacaaatttgcatgttcaaccttccttttaaagtaaccatttttaaatgttccctagcacttaaattttaaggaaatatgcttagaaatcacattattcagttgcacagtttcagttgcccagcagtatcattaaatcctctggagtgattccagtcccacaaaaattagggacccctttacattgtttccatattcaaatggaaatctttttgcaagttagtaattaaagtatttaacctctctctccctccatttattagaaaactcttttttctttattttttcaattacraaaaaactgctaaagccaatcaagcatttattttgataaaccgcttgtaacagtctcagctaaattctgcaaataccaaaaaaaaaaaaaaagctaaataatcaccctgagcagattttgcggagaccttgctcaacctgttcagggataattatgccgagcttttagtatggggcaaaggaaaacataaaattaaggcatgaaagaaagtctacctattttgagaaaatactgggata

SEQ ID NO: 318241 - DNA, 553 bp, Homo sapiens
tgagaacccgtctcaaaaaaaaaaaaaaaaraaagaaaagaaaagaaaaaaaattatgacacaatgtgcttagtgctgtgtcagggaaagcatagccctttaataagcgcttaaattctgttaatcctctgtatctatatcctagtctccaaaatggggatcatggctgggcgctgtggctcatacctggaatattagcactttagggaaccaaggtgtggggattgcttgagcccaggagttcgagaccagcctgggcaacatagtgagaccttgtctcttaaaaaaaaaaaaaaaaaattagccagacacggtggtgtgcaaatgtagtcctagctacttgggaggctgagatgggaagattgatgtagccagggagattgaggctgcagtgagctgagactggaccacaggactccagcctgggcaacagagctagactttttcttaaaaaaacaaaacaaaacaaaacaagacaacacaaaaacaataaaacaaaatgaggatcataacactatctcacaggattataagaaggaataagtgacacagt

SEQ ID NO: 318242 - DNA, 587 bp, Homo sapiens
ttcttgatgtgtaggaaaatgagccttagaaaaggcccaactgtgctaagctagcagggactgctattttgttgggttatttccaataaaaagcttatgcaaacagcagtgcataaatgtctatgatactactgcagtagattatacccacacaaaagagggctgaggagaaggactatagagtgcaatcacttctaaatacgactctgccaagttaccacttcatgaaatggaataatatacaaatagcatactacatttccatctcagcatttgtacttcatccaaggatttcagaggcttgaaatgactgagttaaattcttcctaattagcacactgtaaaccactctaaagtaagtcgcctttaaaaatgyatttactccttgaagtcagtggagtatcactaggttaaaactgaaattcttaagtcatctgttaaccagagttaatgagaaccctaatggtctatccaggttataccttataaaccttgggcttccaaaaatgccaaaggctcagagaaagatcccaagaatttgattcagtattaatccagctctttgagatcagtattactcccaaata

SEQ ID NO: 318243 - DNA, 627 bp, Homo sapiens
tatcacttactatgagtcataagattccttcaaggagtaaatctaaagagatttagatttaaattgyctctcaaattctccccttaaatctgtaactggaactcttgaccctcttactagcaaatataggttccttctttgtaataccactccaaaaaaatttaataggagaaaactataaaaatatgatggtgaagtcaaaagctcttcacacatacactttctacaaatccatggggactctttcattcatggatcattagtatgtcaattgcacccaaaaccaaaaaaggacggaagcctattgtggaatatttcatacaaaagcgacttgtaattcaactcattaggtctttaacactcatgttgttgactgctaaaaaagagcttctgcacagcaaaagaaactaccatcagagtgaaaaggcaacctacagaacaggaaaaaatttttgcaatgtactcatctgacaaagggctaatatccagaatctacaatgaactccaacaaacttacaagaaaaaaacaaacaaccccgtcaaaaagtgggcaaaggatataaacagacacttctcaaaagaagacatttctgcagccaacagacacatgaaaaaattctcatcatc

SEQ ID NO: 318244 - DNA, 612 bp, Homo sapiens
tttctttcctactagtgcctaatctggaatagacccttgcttccttgagtgctctcctatgtcatttattattggctcacaccttataatatcctctccttaaagagacatctcttgactcctccaattatattgctatagcaaaataatcaatttaattgtgattgatcacagctgtggttttatgggtatttggccctgggcattattaatgtcaatgactaattgaacaagaggtcactaaaaatataacatatgaatattctggttaggtgatacttaatcaagtctggttggcagaagcctaagtcaaytcatactcatttttcagacctaagcaaatttgcaaagataaactcaagtgacaccttatgttatgaatgttattctctactttctgcatcctgttctatgactgaaaggtggatttttattggccacatcaatggattgattcctttcaattttatgatgagattttcacaaaaagagatgctgacaggggatacagagaatgggaaaagagagagttagaggtatttagtcccccaactctctcctattctgccatatctctctgcattggttgtgttaatcttatgaaggagagag

SEQ ID NO: 318245 - DNA, 518 bp, Homo sapiens
agggcagaattcaggagaaaaaaaacacaagttttcagttttcccctcccattgaaattaagataggccttaacttctcccagtaatgctaagcaacaatacatattaattactgccaaccatggaaggcttgtgtccagagtttttattgggtgttagacatgtaggcatgaaaatcttgcaackgctattcttagtaacttagtctccagcccctccagaggtcaaattggtactgtgtacgccaatcccccccaccataaatcacatgttagcgtaaactatctggcatggcccaaggccccaggtgaacaaagataggatcaggcaggatattccaatggtttagaggctatctcccaggaggaggtcaagggccaaaactttctttggaatgcacaaggtttgaacaatcaagtcctgctacattaaccctttacattaatgcaaatcctttaatactctgtaaaagccaacctaaaacttagtggcttagaacaatacacatgaatttaact

SEQ ID NO: 318246 - DNA, 506 bp, Homo sapiens
gttcacaaattacggtggacttgattggacagtcttctgatctcacatatattgggggattggctgcagatcagctgatctaggatgttgtagcctgggatgactctgctccttatgcctccatcaggctagtttaggcaaaatcttgtggataaggcacacaagcaagagtgtttaaaatgcagtagatcttttgaaagctacttgatgcatcacacctaataatatctcattagctaaggctagccatatgatcaaacttagaaacaagggcagagacatagaattctgtctcttcagtgaaagaaactgtraaattacatggaagccttggatacaggaaggagtaaagaactaagttctatgttgcaatctgcaacacaaaaattgagacaagtttttaaagatttttaaaacagaaaatgcttctatggattgactgtatttaatcatcacaaggttacaaattaaaaacagattaaaattttctcaagaatgcatgaatt

SEQ ID NO: 318247 - DNA, 506 bp, Homo sapiens
gttcacaaattacggtggacttgattggacagtcttctgatctcacatatattgggggattggctgcagatcagctgatctaggatgttgtagcctgggatgactctgctccttatgcctccatcaggctagtttaggcaaaatcttgtggataaggcacacaagcaagagtgtttaaaatgcagtagatcttttgaaagctacttgatgcatcacacctaataatatctcattagctaaggctagccatatgatcaaacttagaaacaagggcagagacatagaattctgtctcttcagtgaaagaaactgtaaaattacatggaagycttggatacaggaaggagtaaagaactaagttctatgttgcaatctgcaacacaaaaattgagacaagtttttaaagatttttaaaacagaaaatgcttctatggattgactgtatttaatcatcacaaggttacaaattaaaaacagattaaaattttctcaagaatgcatgaatt

SEQ ID NO: 318248 - DNA, 506 bp, Homo sapiens
gttcacaaattacggtggacttgattggacagtcttctgatctcacatatattgggggattggctgcagatcagctgatctaggatgttgtagcctgggatgactctgctccttatgcctccatcaggctagtttaggcaaaatcttgtggataaggcacacaagcaagagtgtttaaaatgcagtagatcttttgaaagctacttgatgcatcacacctaataatatctcattagctaaggctagccatatgatcaaacttagaaacaagggcagagacatagaattctgtctcttcagtgaaagaaactgtaaaattacatggaagccttggatacaggaaggagtaaagaactaagttctatgttgcaatctgcaacacaaaaattgagacaagtttttaargatttttaaaacagaaaatgcttctatggattgactgtatttaatcatcacaaggttacaaattaaaaacagattaaaattttctcaagaatgcatgaatt

SEQ ID NO: 318249 - DNA, 535 bp, Homo sapiens
ctcccaagtatcatgtcgttttcacattgcaaaatacaatcatgcctccccaacagtcctccaaagtcttaactaattctgtcatcaaatcactcaaaagtcccacattcaaagtttcatctggaaatgagtttcttccacctataaaatcaaaacaaattatttacttccacaatggaggtagagtcattgggtaaacattttcattccraaaggaagaaatcagccaaaagaaggaggctacaggccccatgcaagcctaaaagccagctgagaagtcattatatcttaaagctccaaaataatctcctttgactccaaatcccacttccagggcacattaccacaaaggatgggctccaaggcatggggcagctttgcctgggtgccttttccagggccaggatacagattgctgatgcttctaccattctgggtctggagggcagtggcccccatcccacagcaccactagggcgtgcttctgtggggactctgcataggaccttcaaccccacatttctcctctgccctg

SEQ ID NO: 318250 - DNA, 535 bp, Homo sapiens
ctcccaagtatcatgtcgttttcacattgcaaaatacaatcatgcctccccaacagtcctccaaagtcttaactaattctgtcatcaaatcactcaaaagtcccacattcaaagtttcatctggaaatgagtttcttccacctataaaatcaaaacaaattatttacttccacaatggaggtagagtcattgggtaaacattttcattccaaaaggaagaaatcagccaaaagaaggaggctacaggccccatgcaagcctaaaagccagctgagaagtcattatatcttaaagctccaaaataatctcctttgactccaaatcccacttccagggcacattaccacaaaggatgggctccaaggcatggggcagctttgcctgggtgccttttccagggccaggatacagattgctgatgcttctaccattctgggtctggagggcagtggcccccatcccacagcaccactagggcgtgcttctgtggggactctgcataggacsttcaaccccacatttctcctctgccctg

SEQ ID NO: 318251 - DNA, 577 bp, Homo sapiens
attttctgaatcacgctattcttgcaktgctataaagaaatacctaagactggacaatttataacaaaaagaggtttaattggctaacagttctgcaggctgtacaagcatggcactggcattggctcagcttctggggaggcttcagggagcattattcatggcagaaggtgaagggggagcaagcacatcacagggtaaaagtgggagcaagagagtggggaatgggtaccatacacttttaaacaaccaggtctcataagaactcactatcaagagaacagcatttcccacaaggccccaccttcaacattggaaattaaattttaacatgagattacggaggaacaaataaccaagctatatcaccctgttttacttttccatagtactaccatctcctcaaataaatgtatgtattttacatgtatggttttcctccccctaataaaatgtatgctctggaagaatataaatatttgcctttttgtttaaagctaatatatttgagttatgtattccttggcacctaaaagagtttctggaatgtagcacaaactaaatgaatatttgttgg

SEQ ID NO: 318252 - DNA, 522 bp, Homo sapiens
tcgcttcctaaaatctatgccaccttccctgccaattctacagtttctccagggtcactctgggggtaaggaagcagcatgctacaactcttcactcttgcaacactaactagaaagtctgaaatgtagttgttattcaagcaaccatgtgtgcacgagtttgtaaagggaaaattagtcattggtttaagatatatattggtaattctttgaggaaaaggaaagaattttgcacttaatgaaatataacttctgtagatagaactcaatctccttttaagcttcagcataccaattggcacaaatcaccccatgtgatagcaaaggcaaatattttcaatctattttggcattgactttcactatacaacttaagagttgttcttaaagggaaacaattttctcctaaagcatgtacataatgatacttggaatgtcacttgtaaaagaaattactcgaagcatttataattytagtatttaaatatgcaatacactgtaagatctgaactaaaatgtaaa

SEQ ID NO: 318253 - DNA, 538 bp, Homo sapiens
tataatcttatgtctgttcttatttgtatttcctgacttttattatattgtaaaccacaaaagtgcagaacatatgtctattttttcaacaacaatataacctgagtacatacctcactggaaggtacatgatgaagtcataaatatttagtaactaaacaactgtctatttcttctagctgccatcaatatttgtcaattctattaactcccatctctgtcttgctgaattacaaacttataatttataggggagaaaattctgtccagcttgaatcagatatgtgtgccctgatatcaatatgccatggccaaaggggcattttacatagaagggttatggccctcctttatgtgttaggttctttcagggaagaaagatatgttcttgactacaatatatccacaaagmctaattattacataagaccaaatataatctggaaaggttctatagtaaaagatcaaacattggcaataccaatgctgttgttaaaataaatattggtttggacaatattcttctaaatgtgaagag

SEQ ID NO: 318254 - DNA, 604 bp, Homo sapiens
tttcaaactatttaaaaagagctcatgtgaaaggacttattgagataattgcatattcaatagataattaaatgttaactaaagacatttagtttttagcaataatttaaaaatatatttattaacctaggttgtaatttgcatttgcaagttaaaattattgacaattaacttggkttgctttacttcaaagcatcttaaagtgtattttacacttgaactttccagataggaagagtccaatacaataatatgtatgctgtatgccttctcattgttggaaatagtatgtatttaaacagactgaagtagaaaaagttcaaaaatctatattgaattaacacctgtgttgaaaaccttattgaagaaaaacagcagaaggaatgaaagtgagaggtcaaatttataaacaaaaggcacttccagacctagaaactatggtttgttttaagatcagtaaagcaagaatttaaccttgccaccactgcagtttaagttatataattacattctttaaagctgacattttcaccttagtaggtataataaggccatgcagatgcaggctaaaaccagtaatttcagcgttctgcttcttctatgt

SEQ ID NO: 318255 - DNA, 600 bp, Homo sapiens
caaatttagaattgcaaagtttacagccttgtgatatttactgtgtcacagtaaggagataacacattagagtgtgtcattaagctacatataggtataatgagatgataatctctaaatgtttaagaaataacagtggaaaaagcagtatcgaaaactatccttatctttgacaaggaattgatatcacaagcttagaggggcagaaattaatggcctacttaatggttaagaagcttctttatctatgtggttcttagaacatgcagacttaaaggataaaaaacagcaacaaaagcawcaagaacaaaaagaagaaaaataaaaccactacttttttggaaaccacggcaacatctcctaaaagtcattggaaaattaggccacggtttcttggaaagaaggtcagtgttgtaagacatagaatcctcatgaagctaatttagaaatgtcttgcttttctgaaacattttactaagaaacgacagagagtatgccaagatttatcaaatccatcaacctctacccccttctgaccagtgcaagagcaagtgatattgctaaaagaaacctgcagttttatctagtaaattgaattta

SEQ ID NO: 318256 - DNA, 600 bp, Homo sapiens
caaatttagaattgcaaagtttacagccttgtgatatttactgtgtcacagtaaggagataacacattagagtgtgtcattaagctacatataggtataatgagatgataatctctaaatgtttaagaaataacagtggaaaaagcagtatcgaaaactatccttatctttgacaaggaattgatatcacaagcttagaggggcagaaattaatggcctacttaatggttaagaagcttctttatctatgtggttcttagaacatgcagacttaaaggataaaaaacagcaacaaaagcatcaagaacaaaaagaagaaaaataaaaccactacttttttggaaaccacggcaacatctcctaaaagtcattggaaaattaggccacggtttcttggaaagaaggtcagtgttgtaagacatagaatcctcatgaagctaatttagaaatgtcttgcttttctgaaacattttactaagaaacgacagagagtatgccaagatttatcaaayccatcaacctctacccccttctgaccagtgcaagagcaagtgatattgctaaaagaaacctgcagttttatctagtaaattgaattta

SEQ ID NO: 318257 - DNA, 613 bp, Homo sapiens
tgctccctacactggtaaagtgtcctaagaatgaatcttatgaaactacgcttacctattagcctattagtggccaacaaattacaacaaattttagccaggtacttatccattagttttaccttttactgcatattaaaaaaaatacacatatttggaacattaaaaaaaataaagaaagctcttaggttctttgatgggggagagatagagggtaacagtgatatgagaattgaaggcaatagtataaaaacttataaaagtgaaggacaagtttgtataaatttggaaatattcatgaaataataaattgaacatgagatgaaayagaaaatcactcaaagaatatcaaatgcacgaaacatttttaagagaggtagagattaatgtctgatgtaccaagtgttctttcaactggaattaagggacatcttggatagatctcaatggcattgattatttcctactcatctttgaatcctcaacactttatcgtcttcttacacataattgaccttcataactgtgtgactgatgaaagagtaagcccaatcattatggagaaaagcaacagaattcagtggaattaaactaactgtttctctattaaact

SEQ ID NO: 318258 - DNA, 575 bp, Homo sapiens
attcaagaagttctaaaaaattcaaggtatgaaaaattagcaatgcatattttgatataagctcattttttaatgatgtcagacttatgattagaaaagattagcaatattaacatttttcaagagaaactgtatgtataaaagtgttactagaaagtcatttcagaaataaactttacgttgctagaaaaagatttagtggtagtggcagtaaaagacagttgatagttaaagtgttggtaacacctgagaaaacagttgttgaaaaagcagctgaagaaagtcatatcttgatcatcctatatrtagcaagcattgtaatagctggttttatatatgttatgacatttaatactaccacaaccttatattctagctattattcttattctacaaatgaagaatctgaacctcatattttaagtaacttgcttatgattacatagctagaaagttgtatgtaggatttcttatcgtgtccttagctttaaagattccatataatagtcgcattacattagtattaattagaagtcttaaacataacctgcacattatgaaatatttagggatta

SEQ ID NO: 318259 - DNA, 587 bp, Homo sapiens
ttcgctacacattttagatgtccctgaaacctaaacccagcacagtgcagttttgatttaggtttgttttttgtgttgtagtttttctgttttgttattgttgttgttttgttttgttatgagaaacttattagagtgtctcaaacctatataccctaaggatctgagtctttaattgacttgtccttgttagattgtgggtgctgccatttgcccacttgcccttatcactggcattaaaccaaaaagaaatgtcttaacacatactctgagatccgttcatatttcccctggtcttcattgtgaagcataagacttatctcttcagggttgattattccaccagaatatttccttcttcttttacttattgatcccctggaaggaggagctaatgtgatmattgagcgtctgcatgtttctcttgccagaagagttatcttctaggagccaagatttctacccagaataatcccctacttggtttccacatatcaggcatagattttgcacaggtcttagcttgagaaaagtctcaagtagaaatacattatttaagaaatgaaggaaatattggtagagaagtg

SEQ ID NO: 318260 - DNA, 563 bp, Homo sapiens
atatcaggcatagattttgcacaggtcttagcttgagaaaagtctcaagtagaaatacattatttaagaaatgaaggaaatattggtagagaagtgatgaactgatcagggaaaagaaggcagacaccaaaggatrtattatcaagccattaattgaacttaatcccaacagaaaaacacttggaaatataggcaagtatatcgtgatgttaatctaccaaattctcctctatcagtgactgaggatgcttgtaggggttaagtgttaattcacaggcattataagcctgcctttcacatagctttgtagaaagccttcaggcaacaagatgcagatactgacagaattcctgttggagttcactggagtcttaaggcttaaaaaggaatcctcagaatctcggcagcacctgcttaagtggatttactatagcctagcatacagcacccagacacataaaatgctgttgctaagctggcactttaagtgtgtgtttagcagatgattctttcatactattctgttggatgcacaggtatacggtaagaagactggattccat

SEQ ID NO: 318261 - DNA, 568 bp, Homo sapiens
accatttttaattctaagcagatgtcaattcatttattgacatgcaatgtacacaccataaaatttacccatttgaagtgtacaatttaatagttaataatagttttttaaagtattcatgtatttgtgtaaccaccactactatttaattttaggatatttttataatctcacaaaaaaaatctcaaacccactggcagtcacttcctgttcccctgaccccacctttgccactmccaatcaattttctgtctctataaacaaataaaataaaacatgcctattctggatatttcatataaataagatgataaatatgtagctttatctacctggcatttttcacttagcaaaatattttcaaagtccattcacgttgtatcacttttctgtactttattcatttttatggctgaataatatgctacaataatctggtttatccattaattagttgatggagatacaggtagtttttagtttttgactgctttgcaaaatgttgctataaacatttgtgtacaggtttctgtgtggccgtgttatatgtacttaggaagggaattaa

SEQ ID NO: 318262 - DNA, 510 bp, Homo sapiens
tgagtctttagatgactagagctgtagtcatctgaaaaccctactgagatggataactcagaaggcccactcatatggctggtttttggaacctctgttgtagactaaaagccctaaagtggtttctttatatggcctggcttcctcactgtgtggcagtacaggactcaaggcacaaatgctctagtgtgcaaggaagatgctccattgctttttacaaaatagtatcagaaattacatatcatcacttctgacatatctattagtctcaacagtctctaaaagrtagtttcaaggtaaggggatgtaattcccacatttcaatgaaataagttttaaaaacaagaagtatttagtaaatcagttaaagatgtgtttgcagcaacatgatacacagaaaagacatatttttttttctaagcaaatgtttatgagagtcaggaagaattactctactctccctgaaaaatcaaatgtagtaattctgctattaggtggtcgactgaatcc

SEQ ID NO: 318263 - DNA, 585 bp, Homo sapiens
agagaatcatagcacataccatgggagttttcaaactatgacttcttttgttgttaaattatctttagaaaattattaatagcttaggtatcattcctggcctctgtagagactttacactttaattgcaactccaaataatatttcatcaaagcaggctcttatgaagtgttttctttctttttccacaaacttgggtatgagtagcaactctacattatgaaatagaagtgagatttcacacaagtaggacttaagcaagttgtatgagcagatgactgagactcttacaacacctactacaggtacgtagctgctcttgcctttaccaggtttagaacctcactaagagttcattatgaacagttcaaaggggaacakaatatttcacgcgtcagtatgaaattctgtcattgggcataagtgggctccttctgcacttcagtccctttagtggctagccctgaaagacaacggggaaaggaaatacttctttgggcagaatttaggcaagacgcctgattgtgccttttttatggaaagagaaatgataagagtttaagatttatgttaatcatgtgcaaa

SEQ ID NO: 318264 - DNA, 609 bp, Homo sapiens
ggaaggagggtttctgactgcagtttggacctttctttgaggatacactttttatcttttttctagatgtactaattggagatctagagtggaatgtagaaaaaagatgttggtgtctaaattaaagatttactaaatgcactgaaataattatttacctaacacatatttaatgcctgataattatcttgttgatgaataattatattttaaatatttcaatgctagtagctaaaagataatttagagtaaggaagagaaacataaatgctttatatgaatctttaacctttttgaggactgacaatcttcatcaaaatggagatgaacggattcagtgaatactacgtctrtctgccctctgtaagatagtaatgtatcaaatcattgatgagaccataaaactcatacacattgaaaaatttgttagtctactcatgatatgcaaatttataaatgcctattgatatttctacaaattcaattgaactctatgcttgtgtagaaaactttgaatgctggaaagacaactaaacataaaaatattatttaaatattctaatttttatgtatctgcttacaataatttatattaccacctcttcaaat

SEQ ID NO: 318265 - DNA, 575 bp, Homo sapiens
tattagtataaacatttacattttatagataaaaaataaataatgactatcaattagatggttccctacacctcagaaaatctttacagttgaaagctcagtttcataattactttaaaatttatattttatgacttaatcataaataccacagtcaataaagaagtatataataagtttttgcattcctttcaactatgattactgtgcttgttaaatatatttgtctataacatcctattacattatgattagcttctagctaagaaaaataaatccttgtcaaaatttaaattggtaaaataatttagcagaagcttcaaagattaatgttgaataaaacccgaggtttaaatatcactgacatttgttatatttaatttcataggataatatgaacatatttgaaaagaatattccamaatttatcttttagcatgaaaaatgccattatttctgggctaaactttacaaaattatgacactcaaacactaatttgttttaaaattaattaaataataaatccaatcctggttttctataaaaataaaatcagaatgatacaaatagtaca

SEQ ID NO: 318266 - DNA, 548 bp, Homo sapiens
tgatgtgcttcatatcatagagaattattgtaattttgcatgggtaatgttgtttaattattttcttttctcataaagaaggaagaataaaatattaatatttcttggctcaagagcacaagcagccacactttatttttcaaatcaagttggaaactcttttacaaatgagcagtagcaaaatatgattaatgtattttgtgagagattcataagattacctcaaataaaatttatatgtcatgtgtaggcacaaattacaatttctatcatttgtatttgttttccacttaccaatgattattaagtaatccataaaacaatgactagtcactttcttcctgtcacacatgtgagttcaatgtattctcctataaagactaaaatatggcaaaggaatctacaagaaaataaactttccaaatactatgagacttactctttatggtgacagaccaggacgtccctattagagtgagactagcmtttgagaaataagggactggaaagccaccttgacattttcaccaattgcatccagccccgta

SEQ ID NO: 318267 - DNA, 566 bp, Homo sapiens
ttcttgtatatggtgaagataggggtccagtttcattcttctgcatatggctagccagttgccccagaaccatttactgaatagaaactcctttttccattgcttatttttgttgactttgtcaaagatcagatagatgtaggtttgtrgctttatatctggattctctattctgtttcattggtccacaagtattaccatgctgttttagttactatagccttacagtatagtttgaagtcatgtaatgttatgcatccagctttttttatgtttgattaggattgctttggctattcaggctgtttttcagttccatatgagtttttgaatagatttttctagttgtgttgaaaaatgacattggcagtttgataggaatagcatttaatctgtgattagctttgagcactatggccattttaatggtattgattcttccaatccatgataatggaatatttttttcatttatttgtgtcattcctaatttattttagcagtgttttgtgattcttcttggagagctcttttacctccttgattagatatattactaggttttt

SEQ ID NO: 318268 - DNA, 544 bp, Homo sapiens
  misc_feature (1)...(544): n = A,T,C or G
ttaaagtaaagacaggcataggaaatcacaaggatattgattggggaagtgataagtgtccatgaaatcatcacaatttatgttcagagattgcagtaaagacaggcgtaagaaattataaaagtattaatttggggaactaataaatgtctatgaaatcttcacaatttatgttcttctgccgtggcttcagccggtccctccgttcagggttcctgacttcccgcaacaccttagacttctctttttcatctaaattcatgcccttggtgrtgtcatcccttatcatggcaatacatatcatccatatggtgacccctcccacatacacaaagacacatacaccccacatatctaagccttgaactccatattcacattgtcaactgcctacctgacacctccactttgagaactagcaggcatctcaaactcaacatgtccanaactgagttcccaatcactccncctccatctaccccatctcagttaaagacaacttcacgccttacagataatcagaccaaaaatactgaagccatcc

SEQ ID NO: 318269 - DNA, 453 bp, Homo sapiens
cctgtactcctttctggttgtctaccctacacaatgtctgtaaagacattccgttggcttcaccttcaaattgttttcagaagcagacctatttcttaccacttcatcatcatccccagtccctttctcccctgagtaactacggccttcaatttgtcttcctgtttcaacccttgttgcctcaaagcctattcttcacacagcagccagaatgtttccttaaaaaatgtaaatcagatcgtgacacttttctgcccaaaatccttccatggttctccattgttgtagccaacaaggtcttgcacgatatatcctttatctcttgttcactctactgtagtcacaccrgcctcctctttgccctttgagcatgccaggtctgctcccagttcaggatgtttgtattcattttcctgctgcctggaatgctcataactgcaccaccacataatt

SEQ ID NO: 318270 - DNA, 601 bp, Homo sapiens
atggtgctgaataagggagaataagagagccatgaatggggaaggtagctcaatgaattttgtggtgaagctaaactattatcaccatcaagaaaagaccatctcaagaactgctgtcagcccaactaaataacagaggaaagccagtatcatctttaagtcctactattatctgttgtgctgaacttcaaagcaacttgcagactcacaattatgtgacttccaattatatcaacaacaaatgtrcggcaacaacacacagaaagtgtgtggatattattcatttatatgaataccctaagttatcaagctcattttattaaaaaaatccttatttctactctataaagcaaaggtgaaataacatgaaaaacaaatcgtgcatcatctgctttttatatgttgccatcctcttttctcagtaatcataaagtatcaaaaatacatatgtaatactgattaaaaatatatggtataacattacataaatatatgagaagctcagtagtgcaggtaagatagttaatgtttctaaatagataaagggaagataaatgaaaaaatacaaaattgttgtgattaggattcatttatcattgaa

SEQ ID NO: 318271 - DNA, 601 bp, Homo sapiens
atggtgctgaataagggagaataagagagccatgaatggggaaggtagctcaatgaattttgtggtgaagctaaactattatcaccatcaagaaaagaccatctcaagaactgctgtcagcccaactaaataacagaggaaagccagtatcatctttaagtcctactattatctgttgtgctgaacttcaaagcaacttgcagactcacaattatgtgacttccaattatatcaacaacaaatgtgcggcaacaacacacagaaagtgtgtggatattattcatttatatgaataccctaagttatcaagctcattttattaaaaaaatccttatttctactctataaagcaaaggtgaaataacatgaaaaacaaatcgtgcatcatctgctttttatatgttgccatcctcttttctcagtaatcataaagtatcaaaaatacatwtgtaatactgattaaaaatatatggtataacattacataaatatatgagaagctcagtagtgcaggtaagatagttaatgtttctaaatagataaagggaagataaatgaaaaaatacaaaattgttgtgattaggattcatttatcattgaa

SEQ ID NO: 318272 - DNA, 546 bp, Homo sapiens
ctcacacctgtaaatcagcactttgggaggtggaggtgggtggatcacttgaggttaggagtttgagaccagcatggccaacatggtgaaaccccgtctctactaaagatataaaaattagccgagtgtggtggcacacacctgtagttccagatacttgggaggatgaggcaggagaattgcttgaacccgggaggtggaggttgcagtgagctgagatartgccactgcactccatcctgggtgacagagtgagactccatcttaaaaataaataatatattcatgattctactcatatatcattctggaaaaggcaaaactatagcaatagaaaataggtcagtgattaccaatggttggaggtaagaggaggggttgacttcattgaagcatggggaaatttgggaggtgagggaggagttctatattttgattgtggtgatggttatatgactgggtacctttttcaaaatgcaaagaattgtacattaaaagggtgctgtttactgaatgcacattaaattatacaagaaaaagtggaaa

SEQ ID NO: 318273 - DNA, 546 bp, Homo sapiens
ctcacacctgtaaatcagcactttgggaggtggaggtgggtggatcacttgaggttaggagtttgagaccagcatggccaacatggtgaaaccccgtctctactaaagatataaaaattagccgagtgtggtggcacacacctgtagttccagatacttgggaggatgaggcaggagaattgcttgaacccgggaggtggaggttgcagtgagctgagataatgccactgcactccatcctgggtgacagagtgagactccatcttaaaaataaataatatattcatgattctactcatatatcattctggaaaaggcaaaactatagcaatagaaaataggtcagtgattaccaatggttggaggtaagaggaggggttgacttcattgaagcatggggaaatttgggaggtgagggaggagttctmtattttgattgtggtgatggttatatgactgggtacctttttcaaaatgcaaagaattgtacattaaaagggtgctgtttactgaatgcacattaaattatacaagaaaaagtggaaa

SEQ ID NO: 318274 - DNA, 583 bp, Homo sapiens
ctagttaaaatgtagaaacacccctagattgctagactcctaaatgacaagacaggatgaaaactgggaattctcttaagaatataaaatatttgatttcaagaacagtctataccaacagcttaatagattcacactttctttttttgtaagtaattattttaaaatataaatgataaatacatacaggattaacaatgaacaaatttttttgtagagatttttgacatccagtgattttcttggagcggacattcttcctccatacactaaaagccttccatttccggaacagtgaaaatatgggaatcttagtgagttctctgtgatayagatattcctgttcccatcgatcaatttcgataaattcaatgtcttcattataaatgtgtgttactgccctttggctaatagtatagtagtcatttttattgatgttctcataacttacaactctataaacaaataaaaattgggactaataaataaagtattcaatacaaaatgaagcaattgcattgcttttttattctacagagataaaacatttctggaaagcaaatattatttaaagttaaaaaat

SEQ ID NO: 318275 - DNA, 614 bp, Homo sapiens
cttcattctcaagcccccaagtcttttccttctttacacatctgtactgttcattgaacaactgaacacacgagagccctttcaaaggttggatcatcagcatcaaaatcatcyggggtgcttattaagaatctagatttctgagtccatcgcagaatgagaatctttatgtattccaagactcaaggatagtgagatgcctgggtgattgcgatacacaataatgtttgtgaaccaccaaactttatttcaaagcaaataacaaaaaaaatgtgaagacaaggcaagctccctctcacatcttcacttgaagttcaacataccatgttttttccccctgattgtttctctcatgctttcctccaaatggagatggagaggtttcacctcacttttctctaactctccctagttttttggtttcttttcctccacatctaaaagtgtgcagaatgtccctttagcacatagaaaatcttttcttgaccctgccacctacttaactaaaatcccacacttttcttcttcttttaagtttcctttataatggtgtgtgtcaatggccacatccaccttatccattccttcttagagttccagaaaaacggttttgt

SEQ ID NO: 318276 - DNA, 596 bp, Homo sapiens
ttgggggaaggctccgccatacaatctgaactatctgttagattttaatagctttaaacttgacattgcacagagaatgaaatcatagaattgaaagatgggagcatcagacattattctgaatttcctactgcaaatcacaaaacaatatcaaatagaaaagtctttaatctatacctcaattttcttatctttccactacatataatgccattctaatgggatgtttatgaggaagaaagaagaytaatgtacagaaagcacttggcacaatgcctaacacagtgtgtgtgacacaaatgcaggagtagttgtcattatgaggatgagtatattaagtggcgtgcatgaggacttgggttctaaaatccaaataatctgaatctcagctccatgactcactagctatgtgaacttaattctgtgactttcatcatttgtaaaatgggtatatcaatcctacctaccttaaagagttgctgtggagattaaatgagctaatacatataaaacatttagaacaagatttggcatatactatagttggtgttaatactatcatgttgcagtactcacccattaacatcacaaagact

SEQ ID NO: 318277 - DNA, 613 bp, Homo sapiens
tgaggacttgggttctaaaatccaaataatctgaatctcagctccatgactcactagctatgtgaacttaattctgtgactttcatcatttgtaaaatgggtatatcaatcctacctaccttaaagagttgctgtggagattaaatgagctaatacatataaaacatttagaacaagatttggcatatactatagttggtgttaatactatcatgttgcagtactcacccattaacatcrcaaagacttagtaccccactatgccttataaaagcacccacagttccttatcagtgtgagcaagtttatatttcaatggccaaaacaaaaaacagcaaaatgtgaatttatataattgaaataatggtgaggtgaagggttacgtagatatgaaaaacacctaccatctactagggagagaactttttaatatcaacagtgggtccttttataccaacctgaaaaaggaatacttaaaaattgcctcaccaggggtcttcttagatacaactaaatgttaaaactcacaagactttcatatacttctatttggcatccatctactcagaaaaacccggaaccacttattgccttcagggcagcatcagacatt

SEQ ID NO: 318278 - DNA, 613 bp, Homo sapiens
tgaggacttgggttctaaaatccaaataatctgaatctcagctccatgactcactagctatgtgaacttaattctgtgactttcatcatttgtaaaatgggtatatcaatcctacctaccttaaagagttgctgtggagattaaatgagctaatacatataaaacatttagaacaagatttggcatatactatagttggtgttaatactatcatgttgcagtactcacccattaacatcacaaagacttagtaccccactatgccttataaaagcacccacagttccttatcagtgtgagcaagtttatatttcaatggccaaaacaaaaaacagcaaaatgtgaatttatataattgaaataatggtgaggtgaagggttacgtagatatgaaaaacacctaccatctactagggagagaaytttttaatatcaacagtgggtccttttataccaacctgaaaaaggaatacttaaaaattgcctcaccaggggtcttcttagatacaactaaatgttaaaactcacaagactttcatatacttctatttggcatccatctactcagaaaaacccggaaccacttattgccttcagggcagcatcagacatt

SEQ ID NO: 318279 - DNA, 524 bp, Homo sapiens
atgctcagaaaaaaagaatctgaactatgggaagtcaaaagctatgactccccataaggtatttataattatttcttagttcctcctaatgcagctataatttactaattgatgtcatttttatcataagcaatgttgcctataaacaatattttacgttttttaggttattgagggtacacagctgcaggattagccaaaggtcagattcttatgcaggagaaaatcattctacaatcctctagcacaatgcttctcaaactttgaatgttataaaacccatgcaatrataacattttataaggcacactgatataaactgcaggggcttggtgaagacattaattacaatttctttatataatatgacaaaacacaatgcacataatatgtgagattatataatttttaatttgggacataattatcccaaattagggatataatatttgataaaacttccaattatgtctagctcataagcaaccacagctgtgaccataacttttttgaagtagctacat

SEQ ID NO: 318280 - DNA, 598 bp, Homo sapiens
atatacgccatttctatacacacatttctaagacagatggtgtaaaactgtcattaccttaaaattcttctgataggacttatactgaaatgcacgtttctgaagatcagccagaacagattgcagattattcaatatgagccttattttgtcttggtcagcagagatatctaaaatctgtggatcctataaatttaagacagtttttggttagccattcctgctttttgataaagaccaattaaattaaatgaattaataaacatttttaaaaagattcctttctcttttctttttgatttttagaaatgatgtttaaaattattgttttcctgaattttaaagcaatgcatagacattataaaaagtacacatttatataaagtgycatggagataaaattgttttaaaacattatctaatatattttccctcatctgctttcatttcctacacttcttcaaccaacatgaccttagataaggagaggtgaatgaaacagggaagagaaggaaggggatatgatatacggtaaatttccactttacaataaaggaatggaaagtcctttgtattctaaaatgacagaagagagaaa

SEQ ID NO: 318281 - DNA, 598 bp, Homo sapiens
atatacgccatttctatacacacatttctaagacagatggtgtaaaactgtcattaccttaaaattcttctgataggacttatactgaaatgcacgtttctgaagatcagccagaacagattgcagattattcaatatgagccttattttgtcttggtcagcagagatatctaaaatctgtggatcctataaatttaagacagtttttggttagccattcctgctttttgataaagaccaattaaattaaatgaattaataaacatttttaaaaagattcctttctcttttctttttgatttttagaaatgatgtttaaaattattgttttcctgaattttaaagcaatgcatagacattataaaaagtacacatttatataaagtgccatggagataaaattgttttaaaacattatctaatatattttccctcatctgctttcatttcctacacttcttcaaccaacatgaccttagataaggagaggtgaatgaaacagggaagagaaggaaggggatatgatatamggtaaatttccactttacaataaaggaatggaaagtcctttgtattctaaaatgacagaagagagaaa

SEQ ID NO: 318282 - DNA, 596 bp, Homo sapiens
ggcgcccgcgggttattggccccgccggacccaacctcctggcccaggccgcggctgggccctcagggctggacctcggcgggggcctgggagccgcttgggattccggcttcgagtcggggacccctacggtggaaggagctttgctggatacgtggggcggggggcatgacttaggccgctggcagatggagatattgggtggctgagccaggattcgggtccgggagccctgcaaatttgggagcttgctctcggccccgcggtgacaaatgacaggatgggggtggcgtctagactggccttatttggagttggggatgaagaggtccaaggtgaacttggtggggaaggtaagggtctgggttgagaggtagaggargagtgtctcagtaggaagttgggggatgaggctgtccctagtacggaaaggtcctgcacttcgaattccccctctgcaggattgtatgtcagggaaagatggtttctgcacacggagtggggtcggcatagccgcatagactactagaagcttatggttggctgggacctaaaccagcttatttgcagtgtctccaccaggcgatttgtggaca

SEQ ID NO: 318283 - DNA, 556 bp, Homo sapiens
attctacactaaaaatggctcttgggactgaaagtgggattttcgatgtgatgtgacataatgagtacagtaggaaaatgattccccttcatctagaaattctgctaatgtctcctttttgcttcctgaaaatcaggatattagtcatggtcttcgtcaaatgctacattatagagaacctgtatccggcaaacaaatcaacattgatggtcccagggcctcagatgattcatatgctaccactaatagtgtcctgagctctcagagagagaccaacgtgtgagtcctgggctgaggttttttggacctttgtctccagtgcagccagactcttgtccccratccccttctcctaggaccacatcctttcacaaagacagcccttccctcagtgtggctgacagggaaaacctgcaaaacgcaactgctgcctctgatctcactctgtccattctgtcttgcctttgactccaaactcaaactaatgacaaccactcctgttcttactgtggccttagttcctcgtgcttgaccataatacaccttgtgtgccttg

SEQ ID NO: 318284 - DNA, 530 bp, Homo sapiens
ctaaatagtgctgttgtctagcagttactaatgtctayagattcatcaatatgcaattaaatattgcaataaaactttaataatgtcttggattatgatcatctatatcatctaatatgttggtctactaatgatgttactgatttttttttttttttgcttttctggttccaagtagtataaaaaacttccacacaagctggtaaaatcacaattctacaatagtgattcattctgatgttagatattatgtgttcttgcactcctagcttcttgagcttctttatctgatactaatctaaaaacagaaatttgtttcatattttgttcttgtaatgcttttaaaagctcaaacccttttctgggtggggtggatatctctgaaaaggtgttgaaataacttgtttgacaccactggttaatttgataacatttttatacaaataagatatttaggcaaaaggacaggtctattactgtagtttacaaatctaagtttgagataatcctaattatgctgcctaatttct

SEQ ID NO: 318285 - DNA, 576 bp, Homo sapiens
gactgttccagaatttggatttcccatcattctaaaaccgcatgtctttggaactataaaatactgattattgttattcagtgctcactgacttaatccaacttttgcaattatgtaatacatcttaactatatctcagtttatatatgaaaatgtctgtgtagcaacagaaatcagtgaagcggtctctgaggctaccatagtggacctagaagtattagaggccttagagctccacttgagcagaatagwactattctaaatgtcttgctgactcagtctgcattctaagtaagcactcaagtaaggaaacgtaaaattcaaacctttgggttagcaattgccatcaacatttattcaatagcaaagattttacacttttactattagaatgcaagttacagatgttgtatgcatcgatttctcctttaaagcatcttttaaaaaatattatggcccttttagctagataaactagatgcattttccctaacagctatatcactcattaaatattctattgaaaagttagaatatctaactgaattaatgctacatatttgaatatatttgtgt

SEQ ID NO: 318286 - DNA, 586 bp, Homo sapiens
caacaatataacaccaggcttggatgatatttgaggatgactctcctgtgggtacctccttcacttcatcccatcactggaaacctgtcaccagcagatgcctggttggaggagacatactcttctctgagccactgcttaaccttccccagctgctaggaattgccagaaacaaaccagatagtattgcagaggccttccctaccctgttttgaaattaaagttctcaaatattgaaacgtcattaattcagccattatgaagatgccttactttccataatatcagaatactaatgatctaaaaagttattaaaaggtagaactcctttatttgaataaaagttatgggtggcaggaagggagagcatcwggaagaatagctaatggattccgggcttaatacctaggtaatgggttgatctgtgcagcaaaccaccatggcataggtttgttacctatgtaacaaacctgcacatcctgtacatgtaccatagaaattcagataaaagttgaaggaaaaaagattcaaaacaaaataaacgaaaataaaaactaaaagaaaaagaaaaagaaaaagaaaaccc

SEQ ID NO: 318287 - DNA, 582 bp, Homo sapiens
aaaaacttacaaccgcacaattaccatcaggactctgggaaactatacagtgtgagtcctggactctccagggacgctgcattggtccagcctcctgacctctcccctctcaggtcccaggcccttcacatcctgggctccagggtgctcatctgcagctgcaaccctcacttcctgaacagtcctaaagctatctttacttgtctcatgggtcactcaagaaacctaataccatggtatacttccctgcaaatgcccttttatcttctgagagcacagcaaatattaacattttttttttcctggagaataccccttagtatagggtgtaatgycaaattccaccaagaacttccatggaggcatcaggtattgtcccaaatgtgccccacactaacctcccacagtatctaacatctagtttctccccaaattcccccaaaaatggacctgctgctacactggccatgatgttggccaagtgtgagagtcagggtagatgacttgcaattgggatttttccagtcagccctctggatccattttccacccttctctgccctgccatgtacccccagaaga

SEQ ID NO: 318288 - DNA, 576 bp, Homo sapiens
ctatgtcaccattattgtatactaatgcrtactaagtgtgtgacctatgcataaacacatcttctcactatgaatttgggcacacaataacttcaggttctacataccaaattcaaagtcaaattcaaagaatggtgtgtacgtaacttagtcattgctaagcagaccctacagaacactgtcagattgctcttttagatgcatttcactagacagtgacaactaaatcctcgacgatgcctcacttcacgtggaactctgctctaactcgccagcccagcagagtcccagcttccctctccagacttgtttcttactatttccctacctagtgaaactgggttattcctcattgatatttcatgctctcctatcttttcatatttgttctgcttaagatggagtgtttcacctccaccatctgacaaaacttctaatcatccttcaaggtccacattaaatgctactttctctttgaggtctttcctgatcacccccaaagagaagtgagatataatttccttctctaaatctcctcaatgctttcatatttcctactgccctcattactaagaa

SEQ ID NO: 318289 - DNA, 510 bp, Homo sapiens
ttcacaacctgctcatctgacaaagggctaatatccagaatctacaatgaactcaaacaaatttacaagaaaaaaacaaacaaccccatcaaaaagtgggcaaaggatatgaacagacatttctcaaaagaagacatttatgcagccaaaagacacatgaaaaaatgctgatcatcactggccatcagagaaatgcaaatcaaaaccacaatgagatacaaaaatagttttcaacatgcaagaacccagggaatttggtgcttattaggaacctactacaggatgagtttcatctagstaagaaataactttgggggaaaaaagctgatgctgatggggaatatttaacatatttaattgtagatctatataagcctaaaaaaagatagatacaagaataggaaactagtatataaatgtatgttctaatgaagtagaaatagtgcaactgtaaaaatagagaaggaggagaataagagaaaagtagaataaggttattgattgaggtac

SEQ ID NO: 318290 - DNA, 560 bp, Homo sapiens
ttggagtcaacttcttccaaactccaaatattttcaatggcatctagaataatgagtcctttctagagggtttttaaattcacttttcccggatccatcagaggaattactatctatggcagatatagccttacaaaatgtatttcttaaataataagactttcaagttgaaagtactccttaatccatgggctgcagaacggatgttgtgttagcaggcatgaaagcaacattaaactccttgtacatctccataagagctcttgggttaccaggtccattgtcaatgagcagtaatattttgaaagaagccttttcttctaagcagtaggtctcaacagtaggcttaaaataatcagtaaatcatgctgtaaacagatgtgctgtcacacaggctttgttgtttcatttttagagcacagkcagagtagatttggcataattcttaagggccttgagattttttgaatggtaaatgagcattggttctaactcaaagtcaccagctgcatttatccctaacatgagtcagcctgtcctttgaatctttgaagccaggc

SEQ ID NO: 318291 - DNA, 605 bp, Homo sapiens
caggcatggtttaactgaggcctcttgctcagggtctcacaaggttgcaatcaagatgtcagccagactgggttctcatcagaagtttagctggggaatgatccacttccaagctcactccagttgttggcagaaattattttcttggaattcttgggctaagggcttcaatctcttgcwggcactcagctagaggccatcctcagctcctagatgttgccaacagctttttctttatgtgtgggcttccccaacatgaccattggctgcatcaatctagcaaggaagaaaaaggatcctagcaagatgactattacagtcttatataacataaacataattatgtacattctgttacctttgccacatcccatagcacctgggagcaagtcacagatggcacccacactcaaggggagaggattacacagggatgtgaatgccacatcttgggggccaccttatgagtcttgctacaacgactatatttactggaagaatgctcattgttgcttgaagtctccttggaatctttccttgtggtgcacatgtccttttgattttattccacctttgattgtcccatagcaaaacaaagaacccac

SEQ ID NO: 318292 - DNA, 605 bp, Homo sapiens
caggcatggtttaactgaggcctcttgctcagggtctcacaaggttgcaatcaagatgtcagccagactgggttctcatcagaagtttagctggggaatgatccacttccaagctcactccagttgttggcagaaattattttcttggaattcttgggctaagggcttcaatctcttgctggcactcagctagaggccatcctcagctcctagatgttgccaacagctttttctttatgtgtgggcttccccaacatgaccattggctgcatcaatctagcaaggaagaaaaaggatcctagcaagatgactattacagtcttatataacataaacataattatgtacattctgttacctttgccacatcccatagcacctgggagcaagtcacagatggcacccacactcaaggggagaggattacacagggatgtgaatgccacatcttgggggccaccttatgagtcttgctacaacgactatatttactggaagaatgctcattgttgcttgaagtctccttggaatctttccttgtggtgcacatgtycttttgattttattccacctttgattgtcccatagcaaaacaaagaacccac

SEQ ID NO: 318293 - DNA, 585 bp, Homo sapiens
actttcctcttcccttcagatttccttgagtaggcatcrtgctgccccctgaatctctcctgtgggtattttaatcatgtttctctggatccattctggtaaccatatggaagacccattagaactctgctcagtagacagtgggatgaaatcagactaaggtgaatcttggaccttgtaaggaatttaatttcaaaggacctgtgaggagtcataacaccaccctcaaggaaaaagatacagtgattccctgtgtcatgatttttactgtaaccatatgtttttaattggggaattaaaatttgacagtgtccatatttttctcctaggaagagtggctgacctgccagagaaactggctctacctagaaagtattttcaatgctccagacattcagaggcaattgcctgcagaggccaagatgttccttcaggtggataagtcatggaaagaaatcatgagaaaggtgaatcggctgcctaatgctcttcgagccgctactcagccaggtatgaaacaaaattccaaacaagcaaaaagactacaatcttttagtagtctgggactttagtcccagactaaaa

SEQ ID NO: 318294 - DNA, 586 bp, Homo sapiens
attttttatatagaaatttgtcatctatgaatagggtaagttttacttattttccaatcttcatgcctgttttgaagattgctagaagctgctagcttaaagatgttcatagatgtcctttaacatgtgaggtaaatccccctttattctaagttaactaaatgtccttgttgttgttgtggrgcttttttgttgttgtttccttttctttttcttttttatggggaaggggtttcactatgcttcccaggctagtcccaaactcctggctcaagtgatcctcctaccttggcctccgaaagtacaggcatgagccactatgcacagccttgtttacttttaaaatcatgaatggctgatgaattttttccagtgatttttctgagtctattgagatgaccatgtatagtttttactttattttgttaatatggtcaatttaaatgtttgatttttaaatgttagcttgcattcctgtttgtaattgccacttggtcatgatcttatccttgtcgtacattgatggatcaacttgctaatagtttgttaagaatttttatgaacatgatcatgaggggtattgatc

SEQ ID NO: 318295 - DNA, 575 bp, Homo sapiens
acctttttaagaattgcttctaaggcagcttctccagaagcctgtccagatatgtcctggatttcttgaccaaagtcaaaaacatgcaactgggagagcctctccaaggttaatggaatttcagcatccactagagtggcatcaactgtttgttcaatagctgcccaatgtcttgccttcaaagtcgggttcctcaagtcaatgataactggaagctgaaaaacaaacactctcagagacatgaagctttttatcttaaaaatataacccacaggttctggtttcaatttgtgcatgtagagagctggaaaagagcaccacttaccctctttccacagagcaaaatctggatgactgcaaattaatgactctaattgagcctattagaaaaccaagtttgcgggggcagaacmaactccaaatttggagagagattgataccgacaggtttctccacaaggagaaacagcaactgaaaattttcctacctggggcagattccttgggatgacatacaaactattaagaagattcagctaaattttaaaaatagagcgctaaatattaagtgcggg

SEQ ID NO: 318296 - DNA, 608 bp, Homo sapiens
gctggcttggggagggaaacagcgtccattatagtagctccaacaaatttatctgccttagctcccttgtggaacaaatcccttgatgtacagggaaaagwgtaacaaactgtgccaccttaaggcactagtgataactcattgaagatatctcttcctataactggaggaatagaacatggaaaaaaacaatttacccttgagggagggacaaaaataagtgctaggctcagcactatagctggaaaagggggaggagcacctgtgataggaattctgagaaaaagagttacagtgcctcgtaagatgaaggtttaatgagaacatgagggaatgttccttctcacctctgccaccatgttatcaaatactgagtaaaaatagcagtgggatacagagtggaaagctgcgggtgacagattctcagtgagcacaacacaaagggaagacccaaggtcagaggaaaatagaaattgagaaaataacctttggtaaaccagccccacccgaaattcgaggtatcactagaaaaatctgaagcctgtggtgcactgagggtaaccatagcaacatcaacccttaaacctagcccaattcctaattagatt

SEQ ID NO: 318297 - DNA, 608 bp, Homo sapiens
gctggcttggggagggaaacagcgtccattatagtagctccaacaaatttatctgccttagctcccttgtggaacaaatcccttgatgtacagggaaaagagtaacaaactgtgccaccttaaggcactagtgataactcattgaagatatctcttcctataactggagraatagaacatggaaaaaaacaatttacccttgagggagggacaaaaataagtgctaggctcagcactatagctggaaaagggggaggagcacctgtgataggaattctgagaaaaagagttacagtgcctcgtaagatgaaggtttaatgagaacatgagggaatgttccttctcacctctgccaccatgttatcaaatactgagtaaaaatagcagtgggatacagagtggaaagctgcgggtgacagattctcagtgagcacaacacaaagggaagacccaaggtcagaggaaaatagaaattgagaaaataacctttggtaaaccagccccacccgaaattcgaggtatcactagaaaaatctgaagcctgtggtgcactgagggtaaccatagcaacatcaacccttaaacctagcccaattcctaattagatt

SEQ ID NO: 318298 - DNA, 496 bp, Homo sapiens
cctgtggatccaaaaaataatctatatactactatttctcctatatatatcaattcaattcaacgatgagttatttgtgtaaggcattgttctaggtgctggggatactccaggatacaaaacaaacaaaaatccccgtcttcatggaaatacaaattttcattaaaagtgtactgaaattatattttttgtcatcatgcattttatcaattaaatraaactaaacatataacttatcaagcgacagctcaggaataattttgctatttaaaatagcaagggattttctatttatttgccataaaaatgtccattttgttataatggatatatctggaaaccactgatactatttaactctgaggaatttagttatcacaagaacatgatccatgagggaggagtttatttgcagtgaagtccaacctgttaatgacaatatttggatcataaaggaagtattgggcaatctcctggggtaatcccactcatccat

SEQ ID NO: 318299 - DNA, 618 bp, Homo sapiens
actgtgcagtttaaacttatcttcatatttcataaacttggcacatttttattactcattattttgtttcggttttcaagttaatgtacgtccattttaaagtgtaaaactaatgtttttgttcacaaaaaattaaatcacttttaatactaataggtacaaatgtcyttatttttcttaaattgaaatctcttacacacttccatcataaaattatttttgtgtctcatataccagcattcatttgacaatttgcaaatgaaatcaatataaggcaaatattctctgttttgcccatttttaagacattctggtttgatatgccatattgatcagtgaaaacaagctgaatgaagatatgcttttcttacagaaatagacacattgactattactgttgtggagatgttttaacatgaactctttcagaagttgccaaattgattgcaaggtgtaagaaaatattttacaagcatagtgaagtatgaggtaaagtgtattatttaattgtcccatatacttcatgatttaataactaattatcaaagttcatataagccataggctaatttcaccagcaaaatgcaaaatcactaattgcaaagtcaaatgttcttc

SEQ ID NO: 318300 - DNA, 594 bp, Homo sapiens
attaatttgttcacaaaagcaactcctggattcactgatttttttgtatgatttttttcacttctcaatttcgtttagttcaggttcaattttggtcatttcttgtccttcactagctttcaggttggattgctcttgtatctctagtacttctagttgtgaaatttggttgttaatttgagatctctctgactttttgacatgrgcatgaaattccctcttaatatagccttaagtgtgtcttagatattctggtatgttgtatctttgttctcgttagtttgaaaaaatgtcttgatttccaacttattctcattattttcccaaaagtcattcagaaacaggttgtttaatttccatgtaattatatggcattggacaattctctttgcattggtttttatttttttattgcactgtggtctgagagtgtggttggtatgaatttcccttttttgaacatgatgagaattgttttatgtccaattatgtggtctattttagaatatgtgccatgtgcagatgagaaaaatctatattctgttgttctttggtggagttttctgtagataactatttgatccatttgatcaa

SEQ ID NO: 318301 - DNA, 374 bp, Homo sapiens
gccaaggctcagctcagccgttctgggatgtgtgctcaaactcggggaaggtggtattgagccctcggctttgttctctggcttctcaaagtttgaaacctgccaactgaaggagcccaggtattctcagaccctagccataacactacaaagggtagtgccagccaaagcgcttcaccaagcagtggtagcagaatctgtgcgcattcccacacgccagcagaagtggggatgtgagaattggcagtrcaaggaggtgcatgattgtcagctggggaggggagctagctggcttaaggctgccagcctccatagggccattggcagctgtggtgatggtggcacagggagtggaaaaggaggagtggggatga

SEQ ID NO: 318302 - DNA, 602 bp, Homo sapiens
ttggctttttaattacaggattttttatgacaaatattacaatggaaaaaagtggaacagaataattgaacttttatcattaaaatggctttaatgacaggccataaaaataagctgcatcatgaagaatgagtacataaaaatatttatattgaatggcttattactataattgtaagaaaaaaggaagtgaatcagaaacaaaagaggtgatgatcaaagaatgaggagagggaattagaattagagcttatgaagtaattcagttattgataatgacaaaccaggtgtgaccaggaaaatgaatagataggctggtggaaatgaaaattgaaggagagactcaagtaactaaagaaccacakaattggaatgattatctctgttgatagggaaatcaccaaaaaatataacaggaataaaatatttcagcaagaaagtaatattcagagacaactgcagaaatagcatattttgctgttaaatggaaattgtagaggccacagtgaatttaaggattgggaaggaatgagaaattggaactaaattggtggtgcagtgctgatgtggacagagtgtggtagaaacaattataaacaata

SEQ ID NO: 318303 - DNA, 604 bp, Homo sapiens
attatctctgttgatagggaaatcaccaaaaaatataacaggaataaaatatttcagcaagaaagtaatattcagagacaactgcagaaatagcatattttgctgttaaatggaaattgtagaggccacagtgaatttaaggattgggaaggaatgagaaattggaactaaattggtggtgcagtgctgatgtggacagagtgtggtagaaacaattataaacaatagtagaaagtatagagtacttttgttaccaacacaggtgcttgtgaagcctccctgagtgctgggggaagaggaatggtaggggtcagctgacggaggtragtggggtgcatggaagtttttcttatctaggttcttagagctctcgctattggatgatactcctgcccactcagttatcatgagtcattaatctggctatcatttccttctattaacctcttcattacatccccccttctaccatatttatttatgctcctcaaaacagagaaacaatattttcgtttggtttttatttagtctctatactatcacagtatttatcaacaaatttcacacatctggtgacaaacaaatgctgaattaaatgtgtgat

SEQ ID NO: 318304 - DNA, 631 bp, Homo sapiens
gtgtatgtatgtgtgcctatgtgcatgtatatatgtatgtatgtgtatgtatatattctatcctgaatgcaatggggatgcttctagatgtttaaacaggttatcagttttatcttatctgtgttttagaaagttaatttggtagcagcgtagcaaattaattgttggcctgagttagtgagatgtgagcatttgtgattggtttttatttaaatagcaaaattctgttttgcgctgcataatgaagtttcagtcaactacaaagcacatatacaaagacaatcctgtgagattataatgtgatgaaaaattcctatcacctaatgaattttggctatcatataatgctgtggcacawtgcatgactcgtgtgtttgctgcggtgctggtgtaaaggaacctactgagccatcatttgtataaaagtgtagcacatacaatcacggaccatacataataattgaaaatgataatataccaccatgttacttgtttatgaatttactatactatactatttgtcattgtcttagaatatattccttctacttatgtaatcttctacttatattaaaaatagtaaactataaaacagcttcaggcaagtttttcaggaagtatttcagaaggc

SEQ ID NO: 318305 - DNA, 536 bp, Homo sapiens
ggtttttatttaaatagcaaaattctgttttgcgctgcataatgaagtttcagtcaactacaaagcacatatacaaagacaatcctgtgagattataatgtgatgaaaaattcctatcacctaatgaattttggctatcatataatgctgtggcacaatgcatgactcgtgtgtttgctgcggtgctggtgtaaaggaacctactgagccatcatttgtataaaagtgtagcacatacaatcacggaccatayataataattgaaaatgataatataccaccatgttacttgtttatgaatttactatactatactatttgtcattgtcttagaatatattccttctacttatgtaatcttctacttatattaaaaatagtaaactataaaacagcttcaggcaagtttttcaggaagtatttcagaaggcacaagatgacagcttcatgtgtgtcattacccctgaagaacctgcagtgagacaaggtgtgaaagtggaagacagagatattgatgaccttgaccctgtgtgtag

SEQ ID NO: 318306 - DNA, 538 bp, Homo sapiens
tttaacaacagtgttccctttggcatattataatgcatattagctgccatctgtgcttgatgagacagcttgaccagtggtcacaggctgatccctgacctctgtcagcaattgtctatgcatggctgcctctacatcaaaggtcatgagcaaaagccttggtgaacggtccacagccgttatagacagatatagatgactaccaaagttaaatsaatatgaccttttaatatcattctcaaaaatcgtgtagtagaaaggcatgggtgtcaaatatattagaaattcaaagccagattacaaaacttacatgtattgataataagctgtgtgctaaaaacgttacatgtaattctgtattgccttagtcattttcacaagaatataggcttctgttttgataagaaatactaaggaagttgaattaaggtttataataaacacatatctttaaaatgcctttacttgggcacctaatgctttataattatttattgtcaaacataaagaacatacaatggaagttattaattgaagt

SEQ ID NO: 318307 - DNA, 618 bp, Homo sapiens
ggaatacaaacaaaacagaaaactctgcaataaaataaaacttaaaaatacctaggaggagaggtggagcaagatgacagattagaagactctatgaattgttcctcctgcaaggacaccaatttaaccactatctacacacacataaaaaaaagcaccttcatgaaaataaaaaatcagatgagcactcagagtatctggttttaccttcatgttgctgaaagaggcactgaagagatagggaaaacagtcctgaatcgccaacaccatccctctcctatcccctggcagtggcagcatgggacagagatcacttctatgcaccagggagagggagagtgcagcaattatgagtcgttgaactcaatgctacgttattatagcagaaagtaaaacaaaaccaaactcarctgatacagagggagcatttaaaccagctggggtggagttatgaatcccagcagttggaacttcagttcctacaagcttcaccactgtgagataaaattctctggggccctaaataaacttggaaggtagtctagaccacaaagattgcaactcctaggtgagtcctagtgctgaactaagcccagagacaacgcactggaatgacag

SEQ ID NO: 318308 - DNA, 596 bp, Homo sapiens
ttatcttaaattgaactattagtagagaaaattaattgcagttatgctagtctactaaaaataagagatcactggattgcatatgaaaaggaataatttccattcttcatgtagctttgctatcacctgtaacgacatagttgaactacaggtattaagatatactttacttttcaaagaatctgcgttacataacagtcattgataactctttttttttgttttttggtagtgttaatgcaagatattactatgttaaatcctaatttgcatatatcctagttcattttaaaaaacatgattcttataattaagaatgtaatgaatgttacatcttcagttaaccatgctaaaatttgtgctggtctttaggaatgagcgaaaaattgtaaattaaaatgtttggttctrtatttgctagatttggataccagagcaagttacccacatactttctatatttttatagaaattactgatttatagtatgtatttatatttttcttcatgtgtgcaaaggtattactattttcaaaatgttaatgtttataaatgaaagaatatgtatactcatttcagaatgggtggaaataaaa

SEQ ID NO: 318309 - DNA, 519 bp, Homo sapiens
tgcaattttagtctacagtcacacatcactcctggggctaccttagaggaaataattcagatatattaataagtacatatttaattaattaaattctagtttgacctaacaatgttaaagtgggcactgtatatcaatagggatagctaggttatgttgtggtaaaaaaaatgagaaattacctctggcttagaaaaccagagctcaatttctagcttatatataccatgtcttttttcataccttagctgcagtgattctcccatgttttatttactccagaatccaccctgaaacagcaaactgtaactagatggaaggataaaaataaacatggcaaagcatccacccatcttgaaaacttctgctcagargtggcatccatcactatgcctgacgtcagtggaacggaaaagtgggaccctcatgtcttggaaatgcagcacttattggtaaacaatatatactatattatagacacatatagcaccatatcccactggagtatttatgtattcg

SEQ ID NO: 318310 - DNA, 519 bp, Homo sapiens
tgcaattttagtctacagtcacacatcactcctggggctaccttagaggaaataattcagatatattaataagtacatatttaattaattaaattctagtttgacctaacaatgttaaagtgggcactgtatatcaatagggatagctaggttatgttgtggtaaaaaaaatgagaaattacctctggcttagaaaaccagagctcaatttctagcttatatataccatgtcttttttcataccttagctgcagtgattctcccatgttttatttactccagaatccaccctgaaacagcaaactgtaactagatggaaggataaaaataaacatggcaaagcatccacccatcttgaaaacttctgctcagaggtggcatccatcactatgcctgacgtcagtggaacrgaaaagtgggaccctcatgtcttggaaatgcagcacttattggtaaacaatatatactatattatagacacatatagcaccatatcccactggagtatttatgtattcg

SEQ ID NO: 318311 - DNA, 494 bp, Homo sapiens
gttgcaaaacatttatgaacaatggaatttcaatgattttccctggagattgatggggaaggcttgtttttgatctggaagagatcaaagaaaaagtaagctttaaaaggtaatttatggatggtaagggagattctcagctatttgggaaggaaatttgagcacgagcaaagacagcattatgaaagtcagagcaagcttaaagaattgaaagtggcttggaatgcccagagcaaaccatgtgtgaaggaaagtatgtgtgatgaggctgaaaagctcggatgtgtcagattgtgaagccatagaagcccttcggcctttagggtgtaaatatgagatgaatacaaacttttaaaataatggttaattttaataaaagttaataatataaagawtctcaataacagacattgggaaaataatttctatacataaaagtacctaacaatatattaatttcctatttaatctccaaatcatgacaagctgtacaa

SEQ ID NO: 318312 - DNA, 553 bp, Homo sapiens
aacatttatgcctgaagagaatgatgattaccagcatttgtaaatatgcacacatataaacttttcctgaagtttacacattatgccatatattgtgcacaatatttctcttaaagtgccttgtcttggacagtcaacttgctacatgggccaataaaatgtgtatgctaaacatacagattgagtttattgctgcaataaaataaaactcatggcaaatttagtaggatatatttctaatgacatgcataattgtctttttgctacatgctaattatgtagatataaatgaaatgccatttccaaataatactaactatagtcacttaagtggaacaccaaatcatgtatttaattctctgaggtttctaatagatgttttcactaggagtgtttaattctcctgtgcatccttgtgaggcaaagtgaacaaacaccattacctgacgttaccatcttctggggcagttggatttaacactttactctgagattctctatgttcrttttctattagtgactgtctcctctacatatcatatctctaagttat

SEQ ID NO: 318313 - DNA, 588 bp, Homo sapiens
tatgttcattttctattagtgactgtctcctctacatatcatatctctaagttattatgacattgccctgcccttttataagggccaagagtgaagttatggtaaagcaacgatgcacatttagaaagaggcaatacattgtgaggaggtcagttctcacttcctgcttttacatttcacccctcctttgactctaagttctaacagttcaaattcagttatcgttctcaggcctatcctaaggaacataataaatacagaatatttttttcaaatctatctgcactaattgtgctgggtattatatgtcaaatgatagaccaagtaattccctactcagatataaaatttataatatgcaatttttataaaaattaataaatgttgaaatagaagggaaatgtaccatgtaattcacaaaatctgaaacctttttgaaagaggagggcattaggaaacaatcactgaagattggagggtgagagttttttttttttttttttttgcagkgggggagtaaaaggaacaagaagacacttaaattaaaacatctcatattttataattaattttaaactgttgccattt

SEQ ID NO: 318314 - DNA, 524 bp, Homo sapiens
ctatggtaacattatgctggcacagatttaacccagtttaaaacatccttactgtgagtcaccaataattgcttgatatatagctgatgtcagattttgaggaattaactaaagtagaacatttaaatacaaagtattaaacataaattagtatggatattacttatttagtcattaattcaaccaagatttatataggcttcactatgtgccacacagtgatgcaggtgcgggtgataccactgtggaaaacaataatagtctagattttcccttaaggattttattccattggaggaagacaaagaatatctataaagttatgtaaaagaaataaatatctccataaactacttgatgcattaaataacactttacrggcttaactatttaaatatacatatatttcactttatatataatatatacatatatagatacacacagagacacacacacacacacacacacacagagaaatgactctagattcaaaagtgcccaatagtagtgaaagcggaaga

SEQ ID NO: 318315 - DNA, 581 bp, Homo sapiens
cagtagattcaggagaatagtttgtagagatagtacatactactagtgagctatcagcattattttaacaacttaaaggctagagaaaataaacatatcctgaaatctagtatatagtgtgtattaactaaaagattagtaggaagtgattgttagatgatgatattgctgctggtaataatgaaaacattcatagatcagtgattttacaaaacactttcacataaagcatgttaacctcactamaattgaactcaactgttgtgataaaatatttgtctttttactcattaaatagacaaaatgccataattaacctatttatcttcttatacacttttggaaaattaaatgcatggttttagccaacacttgtggtcaattttaactaatttctgatagaatttatagacaataacaggatagcagtagaatatattgagtcagaaaaccaaacatttgtccccaaattttaaaaatcaagtagaaaaaatgttttaactttctccatatacaaatagcacgtgaatgttgttgagagaaatacctaacattggtattttttacagcctactgcatat

SEQ ID NO: 318316 - DNA, 581 bp, Homo sapiens
cagtagattcaggagaatagtttgtagagatagtacatactactagtgagctatcagcattattttaacaacttaaaggctagagaaaataaacatatcctgaaatctagtatatagtgtgtattaactaaaagattagtaggaagtgattgttagatgatgatattgctgctggtaataatgaaaacattcatagatcagtgattttacaaaacactttcacataaagcatgttaacctcactaaaattgaactcaactgttgtgataaaatatttgtctttttactcattaaatagacaaaatgccataattaacctatttatcttcttatacacttttggaaaattaaatgcatggttttagccaacacttgtggtcaattttaactaatttctgatagaatttatagacaataacaggatagcagtagaatatattgagtcagaaaaccaaacatttgtccccaaattttaaaaatcaagtagaaaaaatgwtttaactttctccatatacaaatagcacgtgaatgttgttgagagaaatacctaacattggtattttttacagcctactgcatat

SEQ ID NO: 318317 - DNA, 585 bp, Homo sapiens
tttagtcacactagtccaagtaacatagaacttaggattcagggagtaaaatttccaaattcatggggtrtcttcttatcaacttataagaagataatgggtgaaccccaagtgggatagaccttgatattatcgaatgtgatagtgcttaggccaggtaatttaaggttgtctgaaagttttactaaagttagttttactaactttattaactttaattttgtactgtttgcagatgataaggtttggagatgttccaactatagaataatacttgagagagttcttgaaaagtgaatcataaactcactgtttaaattttgatctcctgacctcgtgatccgcccgcctcagcctcccaaagtgctgggattacaggcatgagccaccacacccggccaacctaaaattaattattactttttactttaagtgaaaaacacatggccttttacttagacagcaatgtcctatctttcaaagtggactggatgctgtagagaataaagaagcttcaaagccagaacatgactaaaacactgatgctcataatcacaggggacttcaccgtttgggtactaaaaa

SEQ ID NO: 318318 - DNA, 599 bp, Homo sapiens
ttttggtcctgatgaggtaggggatggccatggcagcatctccataaaaaagataatccaaacagtacctctctggctattattagaaaratcagtcatgttaaaggggaatttttttttgagagggtgaagtcgtgactttattttcttttttgaggaaataaacaacatttttgaatggagtgtttatttagtaacagcaacacatagtttcttaagaagaggatgaaccgaaactcctccaaggcagaatgaaacaactttccatttttctcagtttagaccataatttataattttatattatcctttaataaatgtcaaaatacacaaaatacttggagggaaatattcacattattctaaaaccaaaataatttaaggtaaagagtggtttaagattagtattctctacatatcacagtataccatgataccttcctgcagcttataattattactcaaaaatattaatatgtttatgcaaaatgattgggagagtttaaatacctacagcctttgccagtttttgacttcaggcacaggtggaaaccaccatctccttcacagatcttctgttacagcatccgttaaaaacc

SEQ ID NO: 318319 - DNA, 561 bp, Homo sapiens
tgaatatgtgagcattttcacacacatagcaaactatagcaacatcttgtaaaaagttgtgaagagaatgtaacagtgtataytctatttaaaaaatactttgggctcatgcctgtaatcccatcaccttggaaggcccagacgagaagatcacttggacctaggggtttgagaccagcctaggtgacaaagtgagaccctgtctctacaaaataacaataataaataaataaataaataaataaatagcctggtgtggtggcatgtgtctgtggtcccagctacacaggaagctgaggcaggaggatcacttgagcccaagtcatgactttaaaatgaatacaaaatgaacacatcatgtgaaaatttgcattttgtttattaatagtgcaagagcaagcacaattttttttactgatctaaaacagaacctttaaacacccaaataaacaggagtgctgaatttgacataattccagacacaaaccaatcatagtgtttggaatcatattttatacaaaacagaaattaattttattgctatcacacaatatcaagttg

SEQ ID NO: 318320 - DNA, 561 bp, Homo sapiens
tgaatatgtgagcattttcacacacatagcaaactatagcaacatcttgtaaaaagttgtgaagagaatgtaacagtgtatactctatttaaaaaatactttgggctcatgcctgtaatcccatcaccttggaaggcccagacgagaagatcacttggacctaggggtttgagaccagcctaggtgacaaagtgagacccygtctctacaaaataacaataataaataaataaataaataaataaatagcctggtgtggtggcatgtgtctgtggtcccagctacacaggaagctgaggcaggaggatcacttgagcccaagtcatgactttaaaatgaatacaaaatgaacacatcatgtgaaaatttgcattttgtttattaatagtgcaagagcaagcacaattttttttactgatctaaaacagaacctttaaacacccaaataaacaggagtgctgaatttgacataattccagacacaaaccaatcatagtgtttggaatcatattttatacaaaacagaaattaattttattgctatcacacaatatcaagttg

SEQ ID NO: 318321 - DNA, 561 bp, Homo sapiens
tgaatatgtgagcattttcacacacatagcaaactatagcaacatcttgtaaaaagttgtgaagagaatgtaacagtgtatactctatttaaaaaatactttgggctcatgcctgtaatcccatcaccttggaaggcccagacgagaagatcacttggacctaggggtttgagaccagcctaggtgacaaagtgagaccctgtctctacaaaataacaataataaataaataaataaataaataaatagcctggtgtggtggcatgtgtctgtggtcccagctacacaggaagctgaggcaggagkatcacttgagcccaagtcatgactttaaaatgaatacaaaatgaacacatcatgtgaaaatttgcattttgtttattaatagtgcaagagcaagcacaattttttttactgatctaaaacagaacctttaaacacccaaataaacaggagtgctgaatttgacataattccagacacaaaccaatcatagtgtttggaatcatattttatacaaaacagaaattaattttattgctatcacacaatatcaagttg

SEQ ID NO: 318322 - DNA, 419 bp, Homo sapiens
ttctcaaagtcatccatgagggtcggaaccctactatatcataatccttaataggtatgttcttctttcttttttgtgtactctgaaaaccacamccacttcttccaaactcctgttaatgttgatattttgaccttctccattaaatcatgaatgttcctgatggtatctagaatggcgaatactttccagaggttttcaatttagctaatttagaaggtaatcatataatgatatgataatgctcatataattaataattaaacatctagcaatattttatatgagacacttttttaaattcctgagcaaacactctttttaactttgagaattacactgtaactgatactccttcttgcattttgcaatggtctttgtgccaaataaataaatgaaatgagctatttgataaatga

SEQ ID NO: 318323 - DNA, 599 bp, Homo sapiens
acctcttttattttgtccacccctctcttctcaacgtcaggagcaataactggtatacattagggattsataaatatttttaaattttctacataaaaacacatagtctagcatataataaatgattcacagagcacattgtagaaattttccctgctcctgcacattttacattaccactttttaatgtattaacctcttgtctctgaatgactgtacaaatacttcacttaagcatctttctctctccatgccattttcccccgggacctaaattgtattttatttgatctcctttatgtcactgttctagtgaaaaagaggatacctctttctgttagacagaaagcaaagttggctaaagtaggctacttcttatgttcattttcaaattttcaaaaaaatgtaatttttcttacttgaacatgaaaagacgagaggaagagctctcaatcatatgaaccacagaacaatcacataaaaggaaaaaaagagatgttacagattaaacatgattcctagggttaaagtcttggagctgcactgcataatttctattttgttcctttttttttcactaaatgaaggtatcatactaa

SEQ ID NO: 318324 - DNA, 599 bp, Homo sapiens
acctcttttattttgtccacccctctcttctcaacgtcaggagcaataactggtatacattagggattcataaatatttttaaattttctacataaaaacacatagtctagcatataataaatgattcacagagcacattgtagaaattttccctgctcctgcacattttacattaccactttttaatgtattamcctcttgtctctgaatgactgtacaaatacttcacttaagcatctttctctctccatgccattttcccccgggacctaaattgtattttatttgatctcctttatgtcactgttctagtgaaaaagaggatacctctttctgttagacagaaagcaaagttggctaaagtaggctacttcttatgttcattttcaaattttcaaaaaaatgtaatttttcttacttgaacatgaaaagacgagaggaagagctctcaatcatatgaaccacagaacaatcacataaaaggaaaaaaagagatgttacagattaaacatgattcctagggttaaagtcttggagctgcactgcataatttctattttgttcctttttttttcactaaatgaaggtatcatactaa

SEQ ID NO: 318325 - DNA, 599 bp, Homo sapiens
acctcttttattttgtccacccctctcttctcaacgtcaggagcaataactggtatacattagggattcataaatatttttaaattttctacataaaaacacatagtctagcatataataaatgattcacagagcacattgtagaaattttccctgctcctgcacattttacattaccactttttaatgtattaacctcttgtctctgaatgactgtacaaatacttcacttaagcatctttctctctccatgccattttcccccgggacctaaattktattttatttgatctcctttatgtcactgttctagtgaaaaagaggatacctctttctgttagacagaaagcaaagttggctaaagtaggctacttcttatgttcattttcaaattttcaaaaaaatgtaatttttcttacttgaacatgaaaagacgagaggaagagctctcaatcatatgaaccacagaacaatcacataaaaggaaaaaaagagatgttacagattaaacatgattcctagggttaaagtcttggagctgcactgcataatttctattttgttcctttttttttcactaaatgaaggtatcatactaa

SEQ ID NO: 318326 - DNA, 629 bp, Homo sapiens
tatgaacattataattactgtaaatacaacattcttagtaaatctttgtgttgcattattactgattcttatattttctctggttattggtaagcttagctagctagatggagtgaaactttctttctactgcagtcaatctaaaaatccaaagtaggcaaattcatctttcataaatctcagtgaaattttacattacttctaattttctaaattaacacatgaagattaatttctctcttttactttttgcattggtgttgaggcacataattttgactatcttttctattgtgcctgcatgtttacatacacatgtgttcatgtacattgccatgttagaaaaattactgaattgttctgattggagtttatctttcatcttaacaacaacagcaacaacaaatgcatgctgaaaaaataatgaatgcattgcagcacattgttagcagtcgttattatgaagaaaatggtttgcctctgtctttcgcraatagaacgtacaacacgctctggcccagccacactcagtatcatcccatagcggtgagtaccctgcagccagggagcacgtgatggaagcttcgtgctgctaatataaggactagtgctgtgatttgctctgacag

SEQ ID NO: 318327 - DNA, 623 bp, Homo sapiens
atgaacattataattactgtaaatacaacattcttagtaaatctttgtgttgcattattactgattcttatattttctctggttattggtaagcttagctagctagatggagtgaaactttctttctactgcagtcaatctaaaaatccaaagtaggcaaattcatctttcataaatctcagtgaaattttacattacttctaattttctaaattaacacatgaagattaatttctctcttttactttttgcattggtgttgaggcacataattttgactatcttttctattgtgcctgcatgtttacatacacatgtgttcatgtacattgccatgttagaaaaattactgaattgttctgattggagtttatctttcatcttaacaacaacagcaacaacaaatgcatgctgaaaaaataatgaatgcattgcagcacattgttagcagtcgttattatgaagaaaatggtttgcctctgtctttcgcaaatagaacgtacaacacgctctggcccagccacactcagtatcatcccatagcggtgagtaccctgcagccagggagcacgtgatggaagcttcrtgctgctaatataaggactagtgctgtgatttgctct

SEQ ID NO: 318328 - DNA, 613 bp, Homo sapiens
aatgtttattataaaacactcggagctgaccagtaagacaagtggcktgaataaaaagaaactgaatcaggcacatgattggtaggccaaattgaaataaatgtagcatgagtcaaatgaaaaagtgccgaaagatgagcccacttgggcttgctcaaagtggtattgtcagtggtgaggctagacctggaagtttatggacactaggcggggtcttgtggcctctttggccctggacaccagaaggttcgcctatgctatggaggacaatgcagagcttaaagaaaaaaaaaaaaatggggccaatgtcacatgcttagaaatatcagggatgagccagaaaaatggtgtttttattgaaagtcactatttacattcatcatagcacctagtgttagacaactttgcgcagtaggtaatcagcatggatgtcacagtagcagctttgtgtgcacattcttcctccaaggcaaagaaacctgggttcctccctgcagctgggtctcagtggtctgggctgtacacaagactgaacattcagaacgtacaggacagtatagctgtgggaccaaatatctttccagccaccaaaccaaacaggccaagccagtgt

SEQ ID NO: 318329 - DNA, 613 bp, Homo sapiens
aatgtttattataaaacactcggagctgaccagtaagacaagtggcgtgaataaaaagaaactgaatcagscacatgattggtaggccaaattgaaataaatgtagcatgagtcaaatgaaaaagtgccgaaagatgagcccacttgggcttgctcaaagtggtattgtcagtggtgaggctagacctggaagtttatggacactaggcggggtcttgtggcctctttggccctggacaccagaaggttcgcctatgctatggaggacaatgcagagcttaaagaaaaaaaaaaaaatggggccaatgtcacatgcttagaaatatcagggatgagccagaaaaatggtgtttttattgaaagtcactatttacattcatcatagcacctagtgttagacaactttgcgcagtaggtaatcagcatggatgtcacagtagcagctttgtgtgcacattcttcctccaaggcaaagaaacctgggttcctccctgcagctgggtctcagtggtctgggctgtacacaagactgaacattcagaacgtacaggacagtatagctgtgggaccaaatatctttccagccaccaaaccaaacaggccaagccagtgt

SEQ ID NO: 318330 - DNA, 613 bp, Homo sapiens
aatgtttattataaaacactcggagctgaccagtaagacaagtggcgtgaataaaaagaaactgaatcaggcacatgattggtaggccaaattgaaataaatgtagcatgagtcaaatgaaaaagtgccgaaagatgagcccacttgggcttgctcaaagtggtattgtcagtggtgaggctagacctggaagtttatggacactaggyggggtcttgtggcctctttggccctggacaccagaaggttcgcctatgctatggaggacaatgcagagcttaaagaaaaaaaaaaaaatggggccaatgtcacatgcttagaaatatcagggatgagccagaaaaatggtgtttttattgaaagtcactatttacattcatcatagcacctagtgttagacaactttgcgcagtaggtaatcagcatggatgtcacagtagcagctttgtgtgcacattcttcctccaaggcaaagaaacctgggttcctccctgcagctgggtctcagtggtctgggctgtacacaagactgaacattcagaacgtacaggacagtatagctgtgggaccaaatatctttccagccaccaaaccaaacaggccaagccagtgt

SEQ ID NO: 318331 - DNA, 565 bp, Homo sapiens
tttgttcatagtagcacactaaaggcatgggtaacttcgttgcaatgaaggaaaggtcattggaataaagattcactgcaggaaaatcaggcaagggctctcctggtataaaaagaacaatacgaaaagagaagcagaaaatagacaaagatattttaagaacaatgattatttcaataatgcccaaatcatatatctaggaagaaagatatatgaaacaaacttttagaacaatgttgcaaatgtctatgaaatgagtcaatatagtgcaaacataatgatgattttctccaatatgtgtataggctatcagtttttaatacatattataagsttattcagtattaagcttatctttatataagccagcatttacctgtaggtttttgtgtcctctttgtgattgaaatgttttaagtgtcaaattttttatttgtcttggataaagggtccaacagtagctaaattggctgcctggattcctaggggttggtcataaaggttagacattttattgcttaaaaaaaaagagtcaaaggcaaggtaacttcctgtgtttgtgtag

SEQ ID NO: 318332 - DNA, 565 bp, Homo sapiens
tttgttcatagtagcacactaaaggcatgggtaacttcgttgcaatgaaggaaaggtcattggaataaagattcactgcaggaaaatcaggcaagggctctcctggtataaaaagaacaatacgaaaagagaagcagaaaatagacaaagatattttaagaacaatgattatttcaataatgcccaaatcatatatctaggaagaaagatatatgaaacaaacttttagaacaatgttgcaaatgtctatgaaatgagtcaatatagtgcaaacataatgatgattttctccaatatgtgtataggctatcagtttttaatacatattataagcttattcagtattaagcttatctttatataagccagcatttacctgtaggtttttgtgtcctctttgtgattgaaatgttttaagtgtyaaattttttatttgtcttggataaagggtccaacagtagctaaattggctgcctggattcctaggggttggtcataaaggttagacattttattgcttaaaaaaaaagagtcaaaggcaaggtaacttcctgtgtttgtgtag

SEQ ID NO: 318333 - DNA, 570 bp, Homo sapiens
tgttcatagtagcacactaaaggcatgggtaacttcgttgcaatgaaggaaaggtcattggaataaagattcactgcaggaaaatcaggcaagggctctcctggtataaaaagaacaatacgaaaagagaagcagaaaatagacaaagatattttaagaacaatgattatttcaataatgcccaaatcatatatctaggaagaaagatatatgaaacaaacttttagaacaatgttgcaaatgtctatgaaatgagtcaatatagtgcaaacataatgatgattttctccaatatgtgtataggctatcagtttttaatacatattataagcttattcagtattaagcttatctttatataagccagcatttacctgtaggtttttgtgtcctctttgtgattgaaatgttttaagtgtcaaattttttatttstcttggataaagggtccaacagtagctaaattggctgcctggattcctaggggttggtcataaaggttagacattttattgcttaaaaaaaaagagtcaaaggcaaggtaacttcctgtgtttgtgtaggtccctc

SEQ ID NO: 318334 - DNA, 420 bp, Homo sapiens
cagaataagcagtcaataaacacagcttttgaaagtataaccagctttcttctcttccatagtgcagagtctaaagattattcactaaagtgtagtttgtagatctccaagagaaatttcagaaagattacacttctattactatttcctgtatcgtggtctttgtgaaactcttttgtaaaatgatgagtgatattaataatggtgtaattgtttaacactacatgcctcctggcatgaggatgaggcaagtaactcttttgaaacacaccatgagcactctctataatagacacccattttccaggagaaagactataytgcagtcttatcccacttccagggtatggcatttacccagtttcactccctctaggctttctgtctcacctgagatgggaagaacttgtactatgaaac

SEQ ID NO: 318335 - DNA, 598 bp, Homo sapiens
gagttcttagggaagctcagaaacaattagggagataaaaacagtagaggaatttgaagcctgtggcacctcagctatagcaaatagtaaatacagctcagctcctagacagatgatcataaaaccccaaagaaggggattttacttctgagttaccagatatgttttatctagatttcaacaaaacattacaagacatgttaaaaagttaggaaaaacactgtgaagacacaaagcaaacatcataaccagactcaggtatgacacagattttggaatgattaaacaggtaatttaaaactaaataaaataaaacaaaacaaaaaattaaataacaaaataagtgatgaataaaataaaatgrtcagtatgttaaggtctttgatagaaaaaaatatacaacatttaaaaacagatgggtatggtcagtagagatatgcaaaatctaagaatgaatcaaaataaaatactagaaataaaacccattgtaatagaaatgaagaatatctttgataagctcactgccagacttgacacagtgtagaaaagcatcagtaagcttgcgtggcaatgatgtcagcacctttaatcacgaaaa

SEQ ID NO: 318336 - DNA, 550 bp, Homo sapiens
atcataggaatgctaggcatttattattatttctacatcttaaactttgttttatcattttattttttctgaattgcaagtttatagcctctagacaatagaaatcatgtgctttaaaaaaaaactattaattttctcaaatgataatctctctcagcctttatcctacrtatgttagctcaacataactttcaataaaagacaaaaaagcatctaaatgcataaaacaacttcagccgtgcacctcaaaatgtaaaaaataagtttggaaagcttaagataatcaagagatggcatgactttgatatgaatagagactaagaagactggaatacatgttgaaagcatagagaggggatgtgatcaaagtcttcatcaaagtctttttaaacttggcagggtatgaattgcctgagtattaatcaaacactgtacaaagctgtagtctggaacaaatgacagattcagattaaatgtctgcaaaaataataacttggatcagggtctttatatctcagagaggcaatttttatctagctaaaaattaaat

SEQ ID NO: 318337 - DNA, 550 bp, Homo sapiens
atcataggaatgctaggcatttattattatttctacatcttaaactttgttttatcattttattttttctgaattgcaagtttatagcctctagacaatagaaatcatgtgctttaaaaaaaaactattaattttctcaaatgataatctctctcagcctttatcctacatatgttagctcaacataactttcaataaaagacaaaaaagcatctaaatgcataaaacaacttcagccgtgcacctcaaaatgtaaaaaataagtttggaaagcttaagataatcaagagatggcatgactttgatatgaatagagactaagaagactggaatacatgttgaaagcatagagaggggatgtgatcaaagtcttcatcaaagtctttttaaacttggcagggtatgaattgcctgagtattaatcaaayactgtacaaagctgtagtctggaacaaatgacagattcagattaaatgtctgcaaaaataataacttggatcagggtctttatatctcagagaggcaatttttatctagctaaaaattaaat

SEQ ID NO: 318338 - DNA, 455 bp, Homo sapiens
tttcacttcttcattttccatttcattataccctaactaggcctttcttcagatgccatrcacccctagccctattgtcttcccaacatatcatggatagtagtatggggaaaataaagcaaacaaaacaacagaaaactcttctctgactactggacctgtgttctttatgacagttatgtgacgaattgtgaatatgcccagaggaaccagaaggaagctctgtcctccctagttatttgcacattctttccatattaaggctggtcattttgttggagctttatgtaaatttttttgtagttgctccagatctcaaatgattgcctagtttgtttctcagtttctctttctaaagctacagtccaacattacagctgctgggtaattttctaagtctttttcacacaaacataaattttcttttacaaaaatgaagaaactttttttaattg

SEQ ID NO: 318339 - DNA, 460 bp, Homo sapiens
cctactagttgtggaagctttttccttgcaaaaagttggcgagatgcttgaagaagtggcagagagttgggaggtcagttggtgagaggtcaggtgaataargtggacgaggcaaaaatttgtagcccaatttgttcgacttttgatgcattggttgtgctacatgcggtcacgtgtagttgtggggaataattgggctttttctgtggaccagtgtcggctgcaggcattgcagttttcaggacatctcatcgatttgctgagcatacgtctcagatgtaatagtttcattaggattcagaaagctgtagtaaattaggctggcagcagagcacccaacaatgacgatgaccttttatttggtgcaagtttggctttgggaagtgctttggagcttcttctggatccagttattcagctggtcatcactggttgtcctataaaatctacatttcgtcgc

SEQ ID NO: 318340 - DNA, 460 bp, Homo sapiens
cctactagttgtggaagctttttccttgcaaaaagttggcgagatgcttgaagaagtggcagagagttgggaggtcagttggtgagaggtcaggtgaataaagtggacgaggcaaaaatttgtagcccaatttgttcgacttttgaygcattggttgtgctacatgcggtcacgtgtagttgtggggaataattgggctttttctgtggaccagtgtcggctgcaggcattgcagttttcaggacatctcatcgatttgctgagcatacgtctcagatgtaatagtttcattaggattcagaaagctgtagtaaattaggctggcagcagagcacccaacaatgacgatgaccttttatttggtgcaagtttggctttgggaagtgctttggagcttcttctggatccagttattcagctggtcatcactggttgtcctataaaatctacatttcgtcgc

SEQ ID NO: 318341 - DNA, 618 bp, Homo sapiens
gtcataattccaaggaaatgtgtaattcctgtaacaagaaagttttcccacctggaagaatgtccagaataaagttcttttatgagtatattttgtgtcatgatctgagtttgcaactaagggcaaattcaagtggctgttactgaaggcaacacgagccatgtgacaaaaggaactttggtgcctcttaaaaaaaaccacataaaggaaagtaataattagaaatgccactaaataatggtgcttaagccatcagctctaatatgtacttttgaaagyacaggacatttcagaatgtatttattgttcagaactttactataaactttgccgagtatactgaacgatttcattgaaacaatgaaaatttgcttttaaatataatacgaataagagggtttaattttaaatatgacaagaatttaacacaacgtgttactaaaatcttgggacgaaaaataataatactttgaaataaagtgagacaaaattactgatagaggtgagcatatactgcttcaattgaagcacttcatcttgattaaatgttccataccctttggcagagtgtctgaggtgggatttttcatataatttgatatgggggaattaattaca

SEQ ID NO: 318342 - DNA, 479 bp, Homo sapiens
tatgtctctgtcagtttggttaattttgggcaaatgaatttatattttgaaagtctttacagttctagggattgaaggcattgtagttaaggaaacactagaaagaactaacaaatttatatcatgaaaccattggtgatttttttattgctctgtaactttcttaagattatagcttatactcgggaaaatgttagtaagtagctgttttgttttgtttttttttttttgkgactcttaaagacaactagattaccatcttactatgaggcagggacaaagtggttttagtaacataggccgatcccaaggccaaatttcagttttctgtaaccttgtgatttgcgtgtctctttattatccattcatgagattttttttcagttcaattaattggacattcattgaatgcataatatgcatttaccagtaagccaggtgaacaagaaaggcatccctgtgtaatggaaaacacagtc

SEQ ID NO: 318343 - DNA, 482 bp, Homo sapiens
ctttggagcaaagcagaaaatctgcaggaggtcacccttggtggagtagaggccccaaaccctcagcaacttatttcatagaaagcaaaagcattcagtctctagacragggacaggaaaccctgccccctctcagggcccaggcaaagatccactgtttgtctctaggagaggtgtccaaaatgcccttgtcccatgtcccaggcaaaaaaaaaaaaaagaagaagaagaagaaacttctcactaatgaaaaggtagaaacatagaaacaaaagttgtctgcccctaacaaagagacaagaaactgcccccacaaatgccatgatcaggaatattgaactaagtaaagcccactaagggaagggtaccatcctttccactggctccaggcaaaagtacactaccactgaaggagaaatagaagtaaaacctgtatgtccctaagagagaggcataaaatctgctctggctcagatttttgt

SEQ ID NO: 318344 - DNA, 482 bp, Homo sapiens
ctttggagcaaagcagaaaatctgcaggaggtcacccttggtggagtagaggccccaaaccctcagcaacttatttcatagaaagcaaaagcattcagtctctagacaagggacaggaaaccctgccccctctcagggcccaggcaaagatccactgtttgtctctaggagaggtgtccaaaatgcccttgtcccatgtcccaggcaaaaaaaaaaaaaagaagaagaagaagaaacttctcactaatgaaaaggtagaaacatagaaacaaaagttgtctgcccctaacaaagagacaagaaactgcccccacaaatgccatgatcaggwatattgaactaagtaaagcccactaagggaagggtaccatcctttccactggctccaggcaaaagtacactaccactgaaggagaaatagaagtaaaacctgtatgtccctaagagagaggcataaaatctgctctggctcagatttttgt

SEQ ID NO: 318345 - DNA, 515 bp, Homo sapiens
tctctttaggtataaaaataacctcaccctcaagtaggtgataaaagaatcaatgagaatggatgagatctcagagacagaacaggtaggaagagaagttgtgcaaggattgaacttcagagaatgtttgcttttattggataggagaaaaagtccaggcaggctggagcaatttccragtcaggaaggtgactaattatggagtgttaggaagacacaggtaggctggtgtttggatatctgtaggaatgacagtgcagaccactacaagcaaaataacaaaccctgggcaactcaatatgtatagtaataagaaacttagtacttcaggtaattttgctaaatcttaggaatggtgtgtgacgcagtgttggctgttacctaaatcctgtcttctcttcttccagtacacatggctgcctagctagagactatgtttctctgtctctcttacagctgggtgtgtccatgtgatgaagtcttgaatataaagggaggtgatttgtgcaaccact

SEQ ID NO: 318346 - DNA, 499 bp, Homo sapiens
aaacatctactccctgccaccctccaattagggttatctgttaytaactccaggagtcacatcagcctccaaatatcttctgttattctgtagcatatgttgggacttggcctagactatgcctgggcctgtagatttaaaaaggctttaataattgcatcattttgatatcttaacatttgatgaaggtctctgcaaccaacttggctagattcagcatgcagcactccaattcagaggctgcatttagatacagcctgtgaatccaaagtaacatgagcaaagttctagtcacgccacagtttgtggctgccaaaatgtggacacggaagcagttattttaaaacttgataagcaacacagcattttgcagaactatggaataaaaggaatactgctagttgcccaactgggaaagcatttgcaggattattgacatcctgatcgttgaatcctatttacctggtcagaggatgtataatttaggtatttttttaca

SEQ ID NO: 318347 - DNA, 564 bp, Homo sapiens
ttttcaaattatgaaaaagtttctagtaattaaaaagtatttgtcatctctctttccttcactatgaaacagtcatcagggttattcaatggcagttgagaatgggtgtgtgtaattgatgcagtttgatatttctatttttagtgtagaacacacctcaacagaatgtcttaatgttcagtaacttaatggcagaattgtcaaccagatccttccacattcagctactacagtacctccatttcaaaaaagatttgaaagaatcaaagatttgatttacataaccaaacctaatcagccattctttgggactgaaacagataacattgataatataatgaaaaaatctaaaatccatgtaaaatattattaatatttttattcagtctcatatatatcattataatcagtctattcaaaatatgcaacagttcttttctctcacgtatttgaaattaagtgggaccatgaaaatagaaagtctagaagtgctttatgattgttttaaaatgtcagaggcaatggaggtgwgtttaagctattattaacaaaggctgtaggtat

SEQ ID NO: 318348 - DNA, 537 bp, Homo sapiens
tttcaattttcttaaatttatggcctatcatagggtctgtcttggagaaaattccatgtgctgtttaatagaatgtgtattctgcagttgttgaaggaaatgttctgtatatatatgttaagtccatttgttccaaggtatagtttaaatccattgtttctttgttgacttctgtcttgatgacctgtctagcactgtcagtggagtattgaagttccccactattattatgttgctgtctatctcatttcctaggtctgtcagtaattgttttataaatttgagagctccaatgttaggtgcatatatgtttaggattgtgatattttcctgttggacaaggccttttaccattatataatgyccctctttgtctattttaactgctgtagctttaaagtttgttttgtctgatataggaatagctacctctgcttgcttttggtgtccatttgtatgaaatgccttttcccacccctttactttaagtttatgtgagtcgttatgtgttaggtgggtctgctgaaggcagcagat

SEQ ID NO: 318349 - DNA, 491 bp, Homo sapiens
gccagtcaaattatgtcatcagtgaaggatcactggtttttaatgatacggtggcctccatactgagaagcagtcctagcagagcagtatgcatagccaataaaatggctgtcaccaaattacaattgacacttaacatcactaaatctgcagtgtaattccttgtgacagttgtgtaggtatattagaagaaaataatttacttcaaacccagcatgttagacacattttcytgagcgtaattcatgtcacatttacagtagccaaagcaagcagtctcgaggcaaccttaatgcaggaagagatcatagatactaacatgttcattgaagtatgattatttatgcatgcaataaacaaagctagagcagttgttcattgtaggttttaattgttattgggggttttaattgttattgggttttaaatgaatattagcctctttttctgtagggaataagaaaaactattaaaaaaaacaaagccacatt

SEQ ID NO: 318350 - DNA, 555 bp, Homo sapiens
atacagcagattctgtgcaggtggaagcaagcccctctctgctcctctccctgccagtcaaattatgtcatcagtgaaggatcactggtttttaatgatacggtggcctccatactgagaagcagtcctagcagagcagtatgcatagccaataaaatggctgtcaccaaattacaattgacacttaacatcactaaatctgcagtgtaattccttgtgacagttgtgtaggtatattagaagaaaataatttacttcaaacccagcatgttagacacattttcctgagcgtaattcatgtcacatttacagtagccaaagcaagcagtctcgaggcaaccttaatgcaggaagagatcatagatactaacatgttcattgaagtatgattatttatgcatgcaataaacaaagctagagcagttgttcattgtaggttttaattgttattgggggttttaattgttattgggttttaaatgaatattagcctcttttkctgtagggaataagaaaaactattaaaaaaaacaaagccacattttatacggaaaa

SEQ ID NO: 318351 - DNA, 524 bp, Homo sapiens
tttgaattggaagtcactttgactttgcatttttaattgtattaacagcagtgtactggagtagcttagaaaatgtttacaacttggcycagtcaacagacttatttactgaataattttcaaaaattaggttaaaatgtacagcattttctctgctatctctgccagttggtctttgagccaagccaagccaaaccaaaccaaccaaactacacaaaaaagaccaggtttgcatgttgaatctggaatgttttgaatccaaggaaataacttacttattcacgtttagttggagtaacatgtttatgggtactagattttaatgccagtagtttgaatgggtgctttcatgcatatttacttacttggttgacagagcactagatatcaaatgtggagtagactgcttagggttgcatgattcagaacgtgggcatgacatcttgtctttgggtcttgatgagcaaacactttatctcaagacagtgtcctctagctcataaatatattttactaatgatgca

SEQ ID NO: 318352 - DNA, 584 bp, Homo sapiens
ttatatataaaattttcttgagctcttttcatgctaactaatggagtgcctgcaaaacaattttaaaagttgataaaactaagtaagtagtatactgaccacacacaacctcacactgcatgacaccccacctattctgttctgtaagcagttcacatcaagctccaatttgtgttctctttctgttcctgagcattccacaatcttctttccagaataaaattgtttggaagactgaaatcttttccagggagaagggaattataaagtccacaagcaaataaaaataacatgtcctttttagtatggagatccaaattagacttctaatttggtaaaaaaaaaaaaaaaaaaaaaaaagcaatggtgggatctcttccctaaattattacccaaaaaaatgtttatatataacttcatttattgaaaaacagtwtgaaaaagaccagtaaatatatttccttgggggatgaaattcaccagcctaattcttctttaaggcttctctttaacaaaattctcctgagggtagtttggggtgtatctaaatttataatactaggtatataccactccaaaattgt

SEQ ID NO: 318353 - DNA, 572 bp, Homo sapiens
gaattctgctagacactaagaatacagaggagttgtcagtctaatgggaaagacagatattatcaatgccattttaagaaatgtaaattttcaactgtgacaaatgccggggaagaaaagtatgttaatatgttatatgaacctatcagttctaatggaatcagtcctagacagtcagaaatattaaggaagtgatatattaactgaaagcttaagaatgagtagaagtgyactaggtaaaaaaggaagggaacagagttccaggtagagggactagcaaagacacagtggcagaggaagcatagagaatgtgagagactgaaaatcagagcaaccattgaagagcttcggggtaagcatgactttatcagatttgtgttttaatgattacaccgggtcagtatgaggaatgaattaaagaaggtagatatattgacgatcaaacaccaataacccaatatcaatgctattgatttaattcacaagcatatgtataccttccctttctttgctccccaaatttaagataacataatctatgcacaagatttgataaatctgagtttgtgttt

SEQ ID NO: 318354 - DNA, 572 bp, Homo sapiens
gaattctgctagacactaagaatacagaggagttgtcagtctaatgggaaagacagatattatcaatgccattttaagaaatgtaaattttcaactgtgacaaatgccggggaagaaaagtatgttaatatgttatatgaacctatcagttctaatggaatcagtcctagacagtcagaaatattaaggaagtgatatattaactgaaagcttaagaatgagtagaagtgcactaggtaaaaaaggaagggaacagagttccaggtagagggactagcaaagacacagtggcagaggaagcatagagaatgtgagagactgaaaatcagagcaaccattgaagagcttcggggtaagcatgactttatcagatttgtgttttaatgattacaccgggtcagtatgaggaatgaattaaagaaggtagatatattgacgatcaaacaccaataacccaatatcaatgctattgatttaattcacaagcatatgtataccttccctttctttgctccccaaatttaagataacataatcwatgcacaagatttgataaatctgagtttgtgttt

SEQ ID NO: 318355 - DNA, 576 bp, Homo sapiens
tttctattatttttaaataaacaaagctactctcatattaaccacccctgtgaccctcctctagccatcaggaaggctagagtgctgagcttcaggaaaccactgaagccagttcctgatgatgccttcactctttgcagacaatgccacaagcacttgaactaacaactgctccacttgtctcctgctctggaagctccatgaaggcagagactgtctctcacagcatctcagtgccaggcatatagtagacacttaatattggttgcctatcttttattttgccattagtgtgtgatcagaattaattcagacagtcagtggatatttgctcctgaattcttggtgactggcccaratacaacttttaccatttcataaccgtcttctattatttttgttcttctttttccttgtactcaaattccaaaaacttaaagcagatcatgagaacagtggttttgattcagttctctgtagagaaccaggtaggaaagctgggaaatggtttggaaaaaaatgaggacagaaaaagtagagagcttcctgcttcttttattttccccttgaagctga

SEQ ID NO: 318356 - DNA, 558 bp, Homo sapiens
ccttgccagggactcactgagtttcatttaattcatcaaatatttattgagcactcaatgtgtgccaggctctgtgctagctgtcagaaatacaatggtgaaaacagtctaccctcaaagaacttatgctccagagagaaacacaattataacaagtctggttctcaaatgtctgatrtagggtatgatccaggcagagagtgtcccagttctccacactgagaaccactacacaaccagaactttaaaaaaatcacagtactcctcttttttaaatagcaaaaactgcttagcttttttctgtattcgaatgctttactttttttctctcattttaaatttctcagccatttcactggcatctcaggcagctgctttttctccatctcagaacaatcaatatatgaacatttttaaaagcaaaaaaaaaaatccagttgcaattttatttttctgctggcatacatgtgcacaatcttttgaatttacatgatggtgataaccagccgaagtcagcaagcctttctgaaaaagcagttgattcaatgatgacagctg

SEQ ID NO: 318357 - DNA, 557 bp, Homo sapiens
attttatttttctgctggcatacatgtgcacaatcttttgaatttacatgatggtgataaccagccgaagtcagcaagcctttctgaaaaagcagttgattcaatgatgacagctgtgctgtcatttcttatttaggcccagctgcctaataatagcaaagtaatattattaataaattactggcatagctagttagagaatgtaaccaattacatatagttttaaattcactacaggcaaaacgctcactagttttctacrtatgattcacagtcctgtcttcagtggtactgaaccacagcctttgtagactagtcattagtattcaggataagaaacaattgcttggaacaggaaacacagaagccagacatttggcaacaccacacagcattcactgctgaagtcaactggcgaagcgactctggactgacagaaactggcctctgttgccatggaaacagcagtgaactgtgttagtaaacagtttgagttctctcacctgccagggcataaattcaaattttactgctgatttttaagtctactatttgta

SEQ ID NO: 318358 - DNA, 496 bp, Homo sapiens
acatgataattgaatatctctatgcctctatttttagataaattcctgcaggccatccccmcttttgcaagtgagaatgtgtttcatgacatgatttagttaaattataaatagtccatttagatgcatctatccaagaataatacccacaaactacttactgatgaatcgtcgggcttttagcttagtttagaatagactgggggaatgatgcatctattctgctgacctagaagaaagattcccaaagctacctgggatttgaaagaaagcataccatttaaaaataaatgaccatctaccttttctgctaaatttgttaatatgaactggtattcaattgaagttattaaagctaactgttctgatatttaaattgtattcagtaaacttcatttcatttcataatactaaaaattctcaatatggtgatgaatgagttaacatataaaaagtccttagaatagctcctggcacatagtcaggtgctatttaa

SEQ ID NO: 318359 - DNA, 582 bp, Homo sapiens
tcattcttgtattgaatacaggtctttgaagggcaacattatttcaatatcctacataatgcttatttaattaagtagtgtgctactacacattttaaatattatttctgactaggcacggtggctcacccctgtaatctcagcactttgggaggccaaggcgggtagatcacctgaggtcaggagtttgagaccagcctggccaaccctgcgaaaccccatctctactaaaaatacaaaaaaaaaaaaaaaaaagctgggcatggtggtgggcacctgtaatcccagctamttgggaggcagaggcagaagaattgcttgaacccaggaggtggaggttgcagtgagccaagatcacaccactgcactccagctaggcgacagagtgagactcttgctcaaaaatagtaataataataatataaaacaaaaactatttcttataaaatcttcctatggtttgaatgcattctccaaacttcaggtgttgccactgtgatagtattaaaaggtgggtccttgaagaagtgagtaggtcatgaggactctttcctcatgaaggagattaaagcccttataaaa

SEQ ID NO: 318360 - DNA, 582 bp, Homo sapiens
tcattcttgtattgaatacaggtctttgaagggcaacattatttcaatatcctacataatgcttatttaattaagtagtgtgctactacacattttaaatattatttctgactaggcacggtggctcacccctgtaatctcagcactttgggaggccaaggcgggtagatcacctgaggtcaggagtttgagaccagcctggccaaccctgcgaaaccccatctctactaaaaatacaaaaaaaaaaaaaaaaaagctgggcatggtggtgggcacctgtaatcccagctaattgggagrcagaggcagaagaattgcttgaacccaggaggtggaggttgcagtgagccaagatcacaccactgcactccagctaggcgacagagtgagactcttgctcaaaaatagtaataataataatataaaacaaaaactatttcttataaaatcttcctatggtttgaatgcattctccaaacttcaggtgttgccactgtgatagtattaaaaggtgggtccttgaagaagtgagtaggtcatgaggactctttcctcatgaaggagattaaagcccttataaaa

SEQ ID NO: 318361 - DNA, 582 bp, Homo sapiens
tcattcttgtattgaatacaggtctttgaagggcaacattatttcaatatcctacataatgcttatttaattaagtagtgtgctactacacattttaaatattatttctgactaggcacggtggctcacccctgtaatctcagcactttgggaggccaaggcgggtagatcacctgaggtcaggagtttgagaccagcctggccaaccctgcgaaaccccatctctactaaaaatacaaaaaaaaaaaaaaaaaagctgggcatggtggtgggcacctgtaatcccagctaattgggaggcagaggcagaagaattgcttgaacccaggaggtggaggttgcagtgagccaagatcacaccactgcactccagctaggcgacagagtgagactcttgctcaaaaatagtaataataataatataaaacaaaaactatttcttataaaatcttcstatggtttgaatgcattctccaaacttcaggtgttgccactgtgatagtattaaaaggtgggtccttgaagaagtgagtaggtcatgaggactctttcctcatgaaggagattaaagcccttataaaa

SEQ ID NO: 318362 - DNA, 569 bp, Homo sapiens
gaggacacattcatagcaattcataacaaatcatagcgcaacaaatcatagcagttatattaaataattagactcacaagattatcataaattacacatggcatcaaatttgcttagaagcatatgggacaagaaccttagttgcccagcagggcaatgtcagttattactcttctgtggaactagccctcacggcagtgcatggtgaagtctttgctgcagcacaagagctatactctttgctttctctttgctatgaaagaatgattctcagagcagctgtgaaaattcccctggtttaaaaaccacatgtcccacaggagccagtatctyttgtaacaactccataggcagggcttctgtggtctctgaaaaaggcatgtccagtcacaaaagtctaaagctatagtatccctatcaggtatttatcatttatttataatttttctcactccacatacaattagccaatcagtttatttttaccccaagcaatcctgcctattagcatatttgacatacttcctttatcaggttgtcaagggaatagatctagaaagtgaattaaa

SEQ ID NO: 318363 - DNA, 587 bp, Homo sapiens
acaaagatgctgtattttctgtgtcatgaaaaatggattagcatagccattgaaatatgtgtcaaacatctcaaaggttaattgcttctcctttgtcctcttataggacactaaacttttcttattatgttgtattgtacttttttagtaaaaaattmtccccactggacagtaaaccctctgaggacaataatgatgtttatctcttcattgcatccacagcatataatgcaatgccttgcatagtaaatacttagtaaagttagttgaataaatgaatgaataaatgaaagaatgtaactataattcatattatagtggactgaaattttggataaaatatttcttataggactaactgtctttgttcaatggtattaaaatctgacttccctataattttattttctatagaaagccagtcacgtgttttcttttaagaaagatatatgaagagtgacccattgattgttagagaatgcagacagctttgatttgtagtacatttttctacagggagctactatggaaattatttgccagggtgcctaagaactctcccttgaacttcaatggacttttaatat

SEQ ID NO: 318364 - DNA, 437 bp, Homo sapiens
tcacctctactgtgaagcactcatcaagtcctccaaaccatcttagaaattccattttctgtattgtcagatcacctacacaacacacacacacacacaactacacacacagtgtttatctattatagcaccatcacctattatggtaatttgttgatttatgtgtctttctcccttctagaccttaattctatgagagtaggggctgtgactcatttatctgactaaatcatggcctaaygatgcctcagacagagtaagtgctcaataaatctttgtccaattaatgaatctcctggagaggaaaaaactcagcagtaaagattcaatgggagttaacaaaaatgtatattaacaggacctgggatcagggcagggagaaaacatgagttagattaaacaatgattgttaactatttaggatttgtaaatatggt

SEQ ID NO: 318365 - DNA, 614 bp, Homo sapiens
gtacacactttatgctacactttatgggccctttctgatgttcactggaagcatcataagccactttacaattcctacaggagcctgttttyattagggtggcttctcagctggcagttcacttattcatgctgaaggatgctattattaagaactgttttgaactgaaacactagaactcgaccttcatttgatgcatcattaaatagagacataagatcaagtaagtgttagtgagcagtgatatattttaaaatctattttaaaaattgcaggcatctcaaatgcaagaaactttacctttcatatctttactgttgcataaattttgcaaaatttagttaattctttggtttcatgttattaataaaaaatgatcttgtatgaataaggtataatttcacaaattatgaggtataaaatggttgattttttttgagtgttttcgtaagtgcctaaacactacttttctttttcctacagactttgtctctcctcctttttatgctttttcagttgtaatctaagagctataaaaacatctagaaaggtgtacatgcctttgcagcactgtggatgtgccaatgtcagcctctacttatgtgactcttgaa

SEQ ID NO: 318366 - DNA, 614 bp, Homo sapiens
gtacacactttatgctacactttatgggccctttctgatgttcactggaagcatcataagccactttacaattcctacaggagcctgttttcattagggtggcttctcagctggcagttcacttattcatgctgaaggatgctattattaagaactgttttgaactgaaacactagaactcgaccttcatttgatgcatcattaartagagacataagatcaagtaagtgttagtgagcagtgatatattttaaaatctattttaaaaattgcaggcatctcaaatgcaagaaactttacctttcatatctttactgttgcataaattttgcaaaatttagttaattctttggtttcatgttattaataaaaaatgatcttgtatgaataaggtataatttcacaaattatgaggtataaaatggttgattttttttgagtgttttcgtaagtgcctaaacactacttttctttttcctacagactttgtctctcctcctttttatgctttttcagttgtaatctaagagctataaaaacatctagaaaggtgtacatgcctttgcagcactgtggatgtgccaatgtcagcctctacttatgtgactcttgaa

SEQ ID NO: 318367 - DNA, 490 bp, Homo sapiens
aggaaagataaaattcatcagctaaacttcaggaagaacatattcaattgtttctttatataataaacctgaaatcaaaaaacaggcagtagataagatatttttagtgagtcacagaaatatgtgtcatatgacttgtatgatattaactctcaactcaataacacaagggaagaaagaaagttgaaccagtattattgcttacctactatagacatactctttattatgttaaacatgttaaagtgaacactcaaaacagatggagaaagtggcatacagagctgttcattaattggctcaaaatctcagaactattaattggtggtaccaattaatatgaattaaagtttatctgacttcaaaacaagttctcttctttttgtaagctaaaccatgtactagtttacctagacaatcttgtgtggtgatagaaagctggatattcayggatgccaagaaatttaaagggcctgattctactcatttg

SEQ ID NO: 318368 - DNA, 575 bp, Homo sapiens
ttttcattcacacaacaaagaacgttattcttaaaccctgtgtgatgtgatatggttttgatctgtatgtctaccccaatctcctgtggaattgtaatccccagtgttggaggtggggcctggtgggagatgactggatcatgggggtggtttctcatggtttaacaccatyccctttagtgctgccatctcaatagtgagttctcgtgagatctggttgtttaaaagtgtgtgacacctccctcctctctctcttcctcctgctcctgccatgtaagacgtgcctatttcccctgcaccttccaccatgattacaagtttcctgaggccactccagaagccaagcagatgcttccatgcttcctgtacagcctgcaggaccgtgaaccaattaaatctctattatttataaattacctagcctcaggtacatatttaaagcaatgcaagaacagactaatacatgaagcatatccttatcattccctcatctgcacaattatgaaaggatttaattggtacctcactttaatagttccacattctccatgatcttgtttttcatctttttgaat

SEQ ID NO: 318369 - DNA, 537 bp, Homo sapiens
taaaacagaagcatagcactaaattaacacttctgaaatttgctataactgtgttcacctgtggatacccagaaaaaacctaatgtcaagcaacattaatcattcatccataaaaacaggtagaccgttatcatgacagtacagaaatctctgtratttatttcaacatacaagatatatcacatttttataataatgtttaccttatctttgtttaataatttactcatagtcatgcaaacaaaagcatatacattgtgattttagaaaattagtgcaaaattaaatgttacatattaaagcagatgtagaagaaagagtcaggtttccttaaataatacataagaaagaacactcattaaaaggagaaggtaaagtaaaaatttctctttccccattacatgaaaaactaaaatagtttttttaaaaagggatatataggttcatatctcaaaaccacagccatttatttatgaaacaccagtgccttcaactacatccacagttcaacctgctgatccccttaagccatatgtg

SEQ ID NO: 318370 - DNA, 635 bp, Homo sapiens
ttattccaactaggatggccatccaatgaagtataaaatttttaattggatattttcaaagtctttgaaatagaaacatcatagacccatcaaatgaaatgagcaagttattttaaattcaaattgccttaaaatcaagagagctgtttttaaaaacccatataattctggaaccaagcttaatgatgttttttaaatgctctagatgctagtaatctcaacatatcatttaaaatgaaatcgctccatggacactccagacacttctttttacaaattcccttgtttactagtttccaggtttaaaaagggctcttaaaggttactgcaccccataaaacattagcaaattatcctgaaatttccaaagattgaaaaacactgtgccaaaaartaatagtaaatcaagtgatcagtaattttgctaaaggatagatattattatatatacacatatagtgcttttattatccagaggaataaaatatattttaattaactaatcaagtcatctaataatatttcatatttatttaaaagacattgctttaaccaaaaaaaggcaacatgtttaatcttggctattatatcttacaacgtaaaatgccaaaaaaagtaagaattgtttttaactg

SEQ ID NO: 318371 - DNA, 572 bp, Homo sapiens
aggaggatattgaatgttctcaaaacaaagaartgataaatgtttgagatgatggatatgttaatcaccctgatgtgattactatacattatatgtatcaaaacatcactatgtacctccataaacatgtatgattgttatgtgccaatttttttaagtaaattaaatttttaaatgggatggatattaaactaataaattagaaaaattaccaaaaactcttaaaaatatgtattgaatcgatgaatggtaaaatcaataatcaatcagtcaacgagtagataaggagccaaaaggagtttttgtgtcataagaaaaaggaagaccagtcttagctcagtcccttttacttctagtgctgcttaaatttatgatttgatgattaattaatttgtaccctctgtgtcacaggctttctcaaaatcaggaaataatttaaaattattcataactaaatcatcggtaaatgtttacagaggacactaagttgataaatgttagataaatgttaggtaaatactgatttatgattaggaaaataatgaaaacataattaaatctattaacataca

SEQ ID NO: 318372 - DNA, 572 bp, Homo sapiens
aggaggatattgaatgttctcaaaacaaagaagtgataaatgtttgagatgatggatatgttaatcaccctgatgtgattactatacattatatgtatcaaaacatcactatgtayctccataaacatgtatgattgttatgtgccaatttttttaagtaaattaaatttttaaatgggatggatattaaactaataaattagaaaaattaccaaaaactcttaaaaatatgtattgaatcgatgaatggtaaaatcaataatcaatcagtcaacgagtagataaggagccaaaaggagtttttgtgtcataagaaaaaggaagaccagtcttagctcagtcccttttacttctagtgctgcttaaatttatgatttgatgattaattaatttgtaccctctgtgtcacaggctttctcaaaatcaggaaataatttaaaattattcataactaaatcatcggtaaatgtttacagaggacactaagttgataaatgttagataaatgttaggtaaatactgatttatgattaggaaaataatgaaaacataattaaatctattaacataca

SEQ ID NO: 318373 - DNA, 557 bp, Homo sapiens
aggagttggggagccacaacacatattatttytctgtgaatatatctcctggttaaaatcctgaataatctgttcagtacaacaaagttccaaaaagaacactttcatgagttttttaaattcatagagtgaaatgtaacagttctgtacctctgttcaattgagaaaagagggctaagactacttacctattgctcaggagaatcaagaatttttcactttatattccctgtaggtttatatttttgtaattattgaattaataccagtgcaaactaaagattattcttttattgtccaacattacaaagaaaaatttctcccgagactataacaagaagcctcttgccttcaaaagctacttggttgggttaaaaaaaataataagagtaacttcttcaaaaaagtcagtgaatcccatattcttcaaataattgagttaagaattaaggtaaaaactattaaagataatgtacctattttctgttaacaaatactattcagcaatttcattttccgtatttctctgatttcttgcagacaatagtgaaaagctt

SEQ ID NO: 318374 - DNA, 560 bp, Homo sapiens
actagaacaattcttgagagtaaaagaragcactgtcaattatatatgacaacagggttaagttagaactgttttaaaaatacttgaagtttatgtaggtgccctagggagccttctccttaaagatagggtttgcatgaatacaaagaagtcaactcttatctagtccatgcacactaacaaacgttgttgccaccttcttactttcccttctaggttaagtataccattgtttgtcattattgttggttaacatttttactattataagtactggttagaattaggcatcagaaaaaaaactgactaccacctgtatattattatagtgggtttagagatactctatttcaggctaatcagttcgtatgatgagaaataataatacagtagtctccccttatattcagagaatacattttaagacccccagtggatgcctgaaaccacagatagcactgaaccctatacatatatacctatgataaagtttaatttataagttaggcacagtaagatattaacaacaataactaatataaaatagaacaattaagtaa

SEQ ID NO: 318375 - DNA, 608 bp, Homo sapiens
aaagaatgggagaaaatatttgcaaactatctatgtgacaaagtattaataacagaatatataaggagctcaaacgactctattagaaaaaaattgaaaaatctggttaaataataatttaatgttcaataataattatatacatttaaaggaaactaaaagtatttataattgcwttatttgtaacacaaaggataaatgcttgaggtgatggataccctatttaccctgatgtgatttgtatgcattgcatgcctatatcaaatatctcatgtacacctatgtctcatgtactcatgaaaattaaaaactttaaaaggaataacgttgttttcaacaaaagtcacaagtcatacaaaaaaaagggaagtatggctcagtcaaagaaaaaaatagacagaaaacgatccctgagaaaggccagatggcaaaactactagataaagactttaaaacaattctttcaaagatgctcaaagaactgaaggaagacatgcaaaaagtcaagaaaataacatattaacaataaaaatattaataaagaaaaatcctaaaaaggaaaaaaaagaaattctagagctgaaaagtacaagaagtgaagtgaaaaa

SEQ ID NO: 318376 - DNA, 463 bp, Homo sapiens
ggcttcactgatgaattctaccattctaccatacaaagaagaactaactccaattattttcaaactttccctaaaaattgaataggagggaacacttacagactcattctatgagaccaacactgccctgaaacaaaagccagacaaagatattacaagaaaataaaaccacagaccaatatccctgtgaatattgatgggaaaatcctcaayaaaatattgacaaactcttagcaacaaaatactagcaacacattaaagggattatatactatgaccaagtgagatttattgctagaatgcaaggatggttcaacatacaaaaatcaatctatgtagtatatctcattaatggaatgaaggaaaacattatgtgattatttcaattgatacagaaaaaccatttgacaaaattcaacaccctttcatgattttaaaaaacactcaacaaactaaaaataga

SEQ ID NO: 318377 - DNA, 463 bp, Homo sapiens
ggcttcactgatgaattctaccattctaccatacaaagaagaactaactccaattattttcaaactttccctaaaaattgaataggagggaacacttacagactcattctatgagaccaacactgccctgaaacaaaagccagacaaagatattacaagaaaataaaaccacagaccaatatccctgtgaatattgatgggaaaatcctcaataaaatattgacaaactcttagcaacaaaatactagcaacacattaaagggattatatactatgaccaagtgagatttattgctagaatgcaaggatggttcaacatacaaaaatcaatctatgtagtatatctcrttaatggaatgaaggaaaacattatgtgattatttcaattgatacagaaaaaccatttgacaaaattcaacaccctttcatgattttaaaaaacactcaacaaactaaaaataga

SEQ ID NO: 318378 - DNA, 595 bp, Homo sapiens
catattttccacatttatatacatatatgattaactggctgatatttagaaggaaatgtatatttttacattgaacttcacttgtgtttagagttataaaagcaagttcaaaattttacaagtaatttttaacagtaaacacaataatattttaggtttcttctaatgacgtacagcctaatatatttgtatggygtttctaactagcattttagcatttggatcaaggcaaagggcaaaagtctcttgtttattttatctcatttatttctgtcccaaactctaggctctctataacctttaaatatgttcaggagattcagttatgtctcaattgtcgaacaacataaggggcttttgaaagaatgttttgactaatgacagagaattattatttttattttctgtatcattttcctctccaatgaacatcttttggtacgttctcccttttccctagcttaaattgtcacttaggctagtccactgagctagcccacagtctcccgaatagaaggcggctgggaagtgcccatcagtcagggacagacagacagccaaggagaggtttagaaattaaaattcagtgtgaagc

SEQ ID NO: 318379 - DNA, 595 bp, Homo sapiens
catattttccacatttatatacatatatgattaactggctgatatttagaaggaaatgtatatttttacattgaacttcacttgtgtttagagttataaaagcaagttcaaaattttacaagtaatttttaacagtaaacacaataatattttaggtttcttctaatgacgtacagcctaatatatttgtatggcgtttctaactagcattttagcatttggatcaaggcaaagggcaaaagtctcttgtttattttatctcatttatttctgtcccaaactctaggctctctataacctttaaatatgttcaggagattcagttatgtctcaattgtcgaacaacataaggggcttttgaaagaatgttttgactaatgacagagaattattatttttattttctgtatcattttcctctccaatgaacatcttttggtacgttctcccttttccctagcttaaattgtcacttaggctagtccactgagctagcccacagtctcccgaatagaaggcggctgggaagtgccmatcagtcagggacagacagacagccaaggagaggtttagaaattaaaattcagtgtgaagc

SEQ ID NO: 318380 - DNA, 471 bp, Homo sapiens
cgcttggaatctccaaaatgatgtgtctttttgtatgctcataagatgcctggtatcaggcgctcctggatagtctcaggatggtgttggttacccctcctatgtgattagagggttagaacttttagccccatcccctacctccagggaggggagagggactagtattgacttaatcccccatggccagttacttaatcaattatgactctataatgaagcctccataaaacacacacacacacacacacacacacacacacacacacacacacacragaacaaggtttgaaaatcttccaggttgctgaacacgtgaaggtgctgggaaggtggcatggctggtgaaaacacagaagctctgcacctcttctcacataacttgccctatgtacctcttcatctcactgtttacctgtatcctttgtaatctcgtttatagtaaactggtaaacttaagtgtttgcctaa

SEQ ID NO: 318381 - DNA, 421 bp, Homo sapiens
tggtatacagtagttggtcatgttaatttttattagctgttactattctagcctaagccctttttatgttgatatctcagcaagctatttgaattatctgcttctatacattattacttgattcccaaaattcctctcagattacttttctaaaattttgctttcattttatcactctcctggttctggtagtggaataatttactgatattgtgtccggaattgytgggttcttggtctcgctgacttcaagaatgaagccgcagccccttgcagtgagtgttacagttcttaaagacggtgtgtctggagtttgttccttcacatgttcagatgtgtccggagtttcttccttctggtgggttcacggtctcgctggcttcacgagtgaagctgtagaccttcgtggtgagtgttacag

SEQ ID NO: 318382 - DNA, 590 bp, Homo sapiens
cgttgtgaaatgccaagcacaaaatgtggtatacagtagttggtcatgttaatttttattagctgttactattctagcctaagccctttttatgttgatatctcagcaagctatttgaattatctgcttctatacattattacttgattcccaaaattcctctcagattacttttctaaaattttgctttcattttatcactctcctggttctggtagtggaataatttactgatattgtgtccggaattgttgggttcttggtctcgctgacttcaagaatgaagccgcrgccccttgcagtgagtgttacagttcttaaagacggtgtgtctggagtttgttccttcacatgttcagatgtgtccggagtttcttccttctggtgggttcacggtctcgctggcttcacgagtgaagctgtagaccttcgtggtgagtgttacagctcataaaggtggcgtggacacaaacagtgagcagcagcaagatttattgcaaagagcagaagaacaaagcttccacagcgtggaaagggacccgagcgagttgctgctgctggcttgggtggcctgcttttattcccttatc

SEQ ID NO: 318383 - DNA, 530 bp, Homo sapiens
ggataataatgtaaatctatatcttccattgtgattacagacaamctttaaaaattgtattacccgaggaaaaaaaaattatctttctttctgagtattatggcttgtataacccctaacgattaaattaatatttattctagaacaatatatatgtttgtatatgtatgtttccttatactgttagaaatactacaaagccacaaatttggattgtcaatagcacacatattttttttttgataccatagagtactaatggtcattctgatgaaaactgaaaacatctatatccacatgccttagttgatttttttctaaaaacaaacaaaacaaacaaacaaaaaatttaaaaaacactctaacatgaaactaaaccagtaaacaactttactgttttcttcaagaaattcctacaaatcaatttatcagagataagtttgttcacctcagtaaagatcatttatcaaaggtttacttatcatgtcaacacctcacctcaatgcattcaccaaccctaaactactgtg

SEQ ID NO: 318384 - DNA, 633 bp, Homo sapiens
gaaaaggatgacagatacctccctcccctttctcacgtatgattttttaaaagtattttcacgaaaaagggcagtagaactttgggttagagttacaaagggatagttaccactttatcttttctctgaagtctcttcgtttttctgtccagtaaagaagaaacaagaaattaactgcaattcctgctgtgaacttctatctccccacaggcctgtggatgtctagaggagacactgtcattatttccaaggcaaaagcagaaaaaggaggttgatgctcaggaagaggttggtcgaaggctgctgggtggttctagagctgtaactagtaattaaagttcattaatcagctgtctcagccaggggcactaggccggctgctattttgatcaaacaattatttatcctgataaggggggaacatgtgagaagcttcttggcagcagaatttgttyctttattttaaagcaagatgataaattatcccagaaaatgggttcttgtttttttctaagaatatacatgcatataaaagtaatatgtgaagtgcaacactataatattaatacaactctttctaactaaaattaatattgatttttttaaaaacccaggattagtaagggtataaat

SEQ ID NO: 318385 - DNA, 633 bp, Homo sapiens
tttttccttttacttaatagtaaatattttaggctttgcaggccatttggtctcttgcaacatctcaattctgctcctgtattgcaaaaacagctatagacaatatgtaaatgaatgggcatggctaagttccagtaaaactttacttatgaacagtgaaatttgaattacatgtcattttcatgtgtcataaaatatattttgtttgtttgtgtcccaaccactttaaaatataaaaatgattcctagtttgtgagctgtatagaaacaggctgcaggctggatttggcccatgggccatggtttactaaccactgctctagatgcttcctaaygataaaattccctttggttttctagagtttggaaaagacaaagaataagccaattcttagatgaataattaaaatgataataaagaggcttttagagaagttgtaagagacagcgtgatgaagcgatgtttttggaagggtataacaagcaactagctgaagtgaaagattacacagaaaaaaggagtagctcaaaagaatagacttgcctggttgataaccagaatatctaagcaacacatctttgacttaaactaaaacagaaattaaaccataagaaactctagggtcaagtaga

SEQ ID NO: 318386 - DNA, 568 bp, Homo sapiens
gcttcctaatgataaaattccctttggttttctagagtttggaaaagacaaagaataagccaattcttagatgaataattaaaatgataataaagaggcttttagagaagttgtaagagacagcgtgatgaagcgatgtttttggaagggtataacaagcaactagctgaagtgaaagattacacagaaaaaaggagtagctcaaaagaatagacttgcctggttgataaccagaatatctaagcaacacatctttgacttaaactaaaacagaaattaaacyataagaaactctagggtcaagtagacatgactgtagacaggacattatgtttgtacacatgcacatttgcatgtatagtggtcattgacacacagagccacacagaaacccttgagtgactatgaagaagataagacatgcctaataacatgtgcttgtgagaaaagaggaacaaagatatgagcataggatgagtaggaataaaagcattttaagtaagcttgcaaaagagctgcctgttgtattgggataatttgcttaagaataagttacacagtaataggt

SEQ ID NO: 318387 - DNA, 658 bp, Homo sapiens
tcataaccattaatttgactccccttttactcatcaaatatactcagatgtgtaataaaaattaataagatattgttagggaaaaaytaattagatgttgttaagaaaagatttttacaatttcacatggaaaaaattgctgacaataggttttgtcttaaagtagacaaagagaattattttaatggactcaaaaatattcatcaaggagagaagtcacagactacacaataactagtcttgtattaagtaaatgcattaatttttctgttttagaactctgctagtaagatttagtggcatggtattctaggattttgtggttattattcttatttcacaataagccactcagccttacctgggtttaatatgtatgagagctcgattttgggaatgtttgtcaaggcattctttagaatccaacaaatcaaggagcacctattaagttgctgagacattagtgctctcagaagtctattactatgttaaaagttatggtgtatactaaaatcagtaagttctctgccttcagtttccgttaacaacaatgccactgcaattcctgatgctttgtaaaataatgttagctatgtttggctgacatgcagaaacttgtatttctcttctgtttttcctctccagtcatcagatattg

SEQ ID NO: 318388 - DNA, 658 bp, Homo sapiens
tcataaccattaatttgactccccttttactcatcaaatatactcagatgtgtaataaaaattaataagatattgttagggaaaaactaattagatgttgttaagaaaagatttttacaatttcacatggaaaaaattgctgacaataggttttgtcttaaagtagacaaagagaattattttaatggactcaaaaatattcatcaaggagagaagtcacagactacacaataactagtcttgtattaagtaaatgcattaatttttctgttttagaactctgctagtaagatttagtggcatggtattctaggattttgtggttattattcttatttcacaataagccactcagccttayctgggtttaatatgtatgagagctcgattttgggaatgtttgtcaaggcattctttagaatccaacaaatcaaggagcacctattaagttgctgagacattagtgctctcagaagtctattactatgttaaaagttatggtgtatactaaaatcagtaagttctctgccttcagtttccgttaacaacaatgccactgcaattcctgatgctttgtaaaataatgttagctatgtttggctgacatgcagaaacttgtatttctcttctgtttttcctctccagtcatcagatattg

SEQ ID NO: 318389 - DNA, 620 bp, Homo sapiens
ttcctgtgatatttgataaaagatgtttcacattatagtagagtgatttataacattcaagtccttaagacatttatcagatgcaaacagatgtgaaactattgccttttcattttatgtggctaagttgggtgataatttttcttgtaatatctctgtcacattttagtatcagggttataccatcctcataaaacaagytggggtgtattattgccacctttattttctgaaaaagccttatgtaagacttattttttctttaggtgatttatagatttcagtgatgagccataagggcctacagttttctttgtggaagggttttggtaataggttcaattcctttaaaagttacagagctattaaaattttctatttcctcttttgtcagatttggtaaattgtgtttttcaagatttttttcattccacttaaataatcatatttatcaggataaagttctttataatattatcttttcaatatctatgagctctgtaatcatatcaactccttcgttgctataggtaatttgtgtttctttacttatttcttgatcaatccttgttaagattaccaattttattaatcatttcaacaaaatatttgtggctttg

SEQ ID NO: 318390 - DNA, 604 bp, Homo sapiens
tatcattttgcagttttaagatkaaatttctaccctgctgagttttagatttgcttgggctggtcacttctttcttttggcctattttctccttttggaaatcaaaatgtttacccaatacgtctcctaccattttatcttcaaagtagataacttgttttgcattttacaggttcatggctggagggagcttgccttgagactcaaatgagattttgaactttaaacgatcgagttgttgctgaaacaggtaagactttgcagctatagggtgattgtatttcgtacttgaaaaagacatgagtttgaggggccaggggccgaatgctattggtttgactgtgtcccctctgaaacttatgttgaaattggattcccaatttggcagtgtttggaggtgggcctactgcgaggtgtttgaaacatgggagtactgccctcatgaatagattaatgctgtcttaaaggagtaagttcttgctcttgcagaaattaattagttcccatgagagtgggttgttataagtgagcccagcctctcatgcgtgtccctttgcactcatctgctcgccttactgcttgtctgctatgttgtgatgtagca

SEQ ID NO: 318391 - DNA, 611 bp, Homo sapiens
ttttggagaaaaatctattaagttgtaataaatgaattgcaaacattttagactaaactgtgtcaaaaaatgatattagtcaaaggaactactggttttcccattgacatgtaaaatgcttgaaagttattaatatcttcctcaaaacaagaaaaagctgaacaaactgaaaattaacttttcttagatctcagagaattgagatcataagacgtgtttaaggaaatggcccttcatttccttaatgacccttccaccacctggaatactagagacaggcaaatacagacaatactgatcagctcacttgtggcagaagctggggggccagtaactggtagaaacacttaaatggtaacttcagytcactgctgggggttaatggtgtggactagcttaatagttaaaaactcctgatgccccaatttatgatggaatctcacacctttgtggattttcccttcaggaactgcatcaagtttctatggtaaagatcagaggtaagaagaataagaaactttgtgtttggccagaaggagggggaaagaagcattttgaaagaaggaaggaaggctcacaagaaaggccttccaaaggaataaaccagcaaa

SEQ ID NO: 318392 - DNA, 505 bp, Homo sapiens
gctcatggattgaaagagtcaatatagttaaaatggccatactgcccaaagcaatctacagatttactgctattcctatcaggctactaacatcattttctatacaattagaaatattattctaaaattagtgtagaacttaaaaagaccctggcttgccaaagccatcctattcaaaaagaacaaagctggagacatcacattatcacattacccaacttcaaactatattataaggytacagtaactaaaacagcatggtactgatacaaaaacagacacatagaccaatggaacagaatagagaacccaggaataaagctgcacacctatagacatctgatcttcaaccaagtcaacaaaaataagcagtgaagaaaagactccctattcaataaatgatggctacgatagctggctagcaatatacagaataaacctggacccctacctatcactgtatgcaaaaattaactctagatgggttaaagattaaaatataaga

SEQ ID NO: 318393 - DNA, 651 bp, Homo sapiens
caccattctactctctgcttctatgaattcactttagattccactataagagagaatatgtggtatttgtcttcctgtgcctggctttttcacttagcataatgttctctaattccattccttttgtcacaaatgacagggttttctttttcgtaaggctgaatagtgtttcattgtgtctatatacattttctttatcaattcatccattgattaacacctatgtagattccatatcttggctattgtaaataatactgcaataaatgtagcagtggagacgtctctttgacaaaccaatttcaaatcttctgggtaaatatccagaagtgrgagtgctggatcatatggtaattatattttttggaacttactagttttacataatggttgtactagtttacattcccaccaacagtgtaaaagggttcactattcttcaaatcttctccaacacttgttacctttcacatttttgataccagccattccgaaaggtgagaggtgaaatttcattgtgtgtctaatttgcatttccctaatcattagcaatattgaacattctttttcatataactgctggccatttgtatgttttcttttgagaaatgcctacatgggtcctttgccaattttttaattgggttattt

SEQ ID NO: 318394 - DNA, 564 bp, Homo sapiens
aaaggctgaggcaggagaattgcttgaacccaggaggcagaggttgcagtgaactgagatgacgccattgcactccaacctgggtgacagggtgagactccatctctaaataaataaataaataaataaataaagtagctgggtttcggagatragtcaaggtttgcaaaaagaaaatagtgtggacgaagtaatcattctttatagattttagctaaagttagacacaaggcagcagtagtgagtggggtctttaaaacttttatacagagtccccagtctgtatggtaaaaaacaggacagtgttcagagtcatcataagtgttaaaaattgggatagaaatcctagaaagggaagagttagagaatggaagccccaaattctgtttacaaatgatgtacaatcttctggctgaccccagaaacatgcatggatgagaaagaccccaattatacataacagaattaaattagatgagtgctattgctcaagatgtagtttgtagtgagaatacaaccattagtatgtatgcacctaataacagagctttacattagcaaggg

SEQ ID NO: 318395 - DNA, 564 bp, Homo sapiens
aaaggctgaggcaggagaattgcttgaacccaggaggcagaggttgcagtgaactgagatgacgccattgcactccaacctgggtgacagggtgagactccatctctaaataaataaataaataaataaataaagtagctgggtttcggagataagtcaaggtttgcaaaaagaaaatagtgtggacgaagtaatcattctttatagattttagctaaagttagacacaaggcagcwgtagtgagtggggtctttaaaacttttatacagagtccccagtctgtatggtaaaaaacaggacagtgttcagagtcatcataagtgttaaaaattgggatagaaatcctagaaagggaagagttagagaatggaagccccaaattctgtttacaaatgatgtacaatcttctggctgaccccagaaacatgcatggatgagaaagaccccaattatacataacagaattaaattagatgagtgctattgctcaagatgtagtttgtagtgagaatacaaccattagtatgtatgcacctaataacagagctttacattagcaaggg

SEQ ID NO: 318396 - DNA, 582 bp, Homo sapiens
ttatttgaacaacactttcaatcacctttacctatatataggtctataaccaatgtatatctgtaaccagttactacaactttaatggcttaaaacaacactttttttwaaaaaaaaatttacagtcctgaaggtcagaagtccgaaatgaattttgctaggtcaaaaattaagaagttagcaaagctgtgcttcctctggaggctctggggaaaaatacatttacttgtcttttccaagttctaggtatcccttgaattccttagctaatggcctttccctacatcttcaaagccagcagttcagtgtactccaaccttcctctgtttttgtcatcagattgccttttgctcttccctgattctactctctccctcttataggcattctcataattccattgggcccaacaaaataattcaggatacttttccctatctcaaaatctttcatttaatcataacagcaattctcccgtgccacataaggtaacatattcacagattctgggtataagtatgtttacattttgggggtccatgattctatgtaccataagctaattgatgattatagaaaact

SEQ ID NO: 318397 - DNA, 564 bp, Homo sapiens
aaaggctgaggcaggagaattgcttgaacccaggaggcagaggttgcagtgaactgagatgacgccattgcactccaacctgggtgacagggtgagactccatctctaaataaataaataaataaataaataaagtagctgggtttcggagataagtcaaggtttgcaaaaagaaaatagtgtggacgaagtaatcattctttatagattttagctaaagttagacacaaggcagcagtagtgagtggggtctttaaaacttttatacagagtccccagtctgtatggtaaaaaacaggacagtgttcagagtcatcataagtgttaaaaattgggatagaaatcctagaaagggaagagttagagaatggaagccccaaattctgtttacaaatgatgtacaatcttctggctgaccccasaaacatgcatggatgagaaagaccccaattatacataacagaattaaattagatgagtgctattgctcaagatgtagtttgtagtgagaatacaaccattagtatgtatgcacctaataacagagctttacattagcaaggg

SEQ ID NO: 318398 - DNA, 614 bp, Homo sapiens
cgcatcttgattctttacccagcttgccrctctgtgccttttaatgtgggcatttagcctatttacaatcaaggttagtattgatatgtaaagatttcatctatacatgtcaagctgagaaaagagtctcagaacttgaagaccagttctccaaaattaactcagaccaaaataaagaaaaaacaataaaaaagaataaaaactccaagaaatatgagattatgtaatgagaccaaatttgcaactcatgacatccctgaaagagaagaaaaagcaaacaacttagaaaacatatttcaggatgtcatcaatgaaaatttcctcaccctcactagagaagctaacagtaaaatacaggaaatgcatattgcagataatccctttgaattactacacaaaaagaccgtcttcaagacacagtcatcagattcttcaaggccaaaatggaagaaaaaacgttaaaggcaagtggagagaaggaagaaatttgatctctatatatcaatactaatcttaattgtaaacaggttaaatgccctaattacaaggaacagagtggcaaattgggtaaagaagcaagacccaatggtatgctgtctttaagaggcccgtcc

SEQ ID NO: 318399 - DNA, 614 bp, Homo sapiens
cgcatcttgattctttacccagcttgccgctctgtgccttttaatgtgggcatttagcctatttacaatcaaggttagtattgatatgtaaagatttcatctatacatgtcaagctgagaaaagagtctcagaacttgaagaccagttctccaaaattaactcagaccaaaataaagaaaaaacaataaaaaagaataaaaactccaagaaatatgagattatgtaatgagaccaaatttgcaactcatgacatccctgaaagagaagaaaaagcaaacaacttagaaaacatatttcaggatgtcatcaatgaaaatttcctcaycctcactagagaagctaacagtaaaatacaggaaatgcatattgcagataatccctttgaattactacacaaaaagaccgtcttcaagacacagtcatcagattcttcaaggccaaaatggaagaaaaaacgttaaaggcaagtggagagaaggaagaaatttgatctctatatatcaatactaatcttaattgtaaacaggttaaatgccctaattacaaggaacagagtggcaaattgggtaaagaagcaagacccaatggtatgctgtctttaagaggcccgtcc

SEQ ID NO: 318400 - DNA, 549 bp, Homo sapiens
cttgacttgttttgatcttagaaaaaagtcttctaacctttcaacatggaatrtgaggttggttgtgatttttgacctttatggcatttagctacaaatcttctgtatctagtttgctgggagtttttttcatgaaggattgttgaattttgtcaaatgttttctctgcatctattaatatgatttttatccttctttcttttaatgtagtgcatcacaaaaaaagtgtatgatatttttgatttgcatatgttgaaccatccttgcttcccagggataaattctttttgatcacagtacatgatctttttaatgtgctgttgaattaggtgggctactattttgctgaggatttttctatctatttttatcacaaacattggcctgtattttcttttttgtactttttttctggcttttatatcaagccgatgcaggccttgtaaaatgagtttgaaagtgttctcatctcttccatgttttggaagagtctaagaaaatttgacattaattctttctaagtgtttggtagaattcatcaatgaagtc

SEQ ID NO: 318401 - DNA, 549 bp, Homo sapiens
cttgacttgttttgatcttagaaaaaagtcttctaacctttcaacatggaatatgaggttggttgtgatttttgacctttatggcatttagctacaaatcttctgtatctagtttgctgrgagtttttttcatgaaggattgttgaattttgtcaaatgttttctctgcatctattaatatgatttttatccttctttcttttaatgtagtgcatcacaaaaaaagtgtatgatatttttgatttgcatatgttgaaccatccttgcttcccagggataaattctttttgatcacagtacatgatctttttaatgtgctgttgaattaggtgggctactattttgctgaggatttttctatctatttttatcacaaacattggcctgtattttcttttttgtactttttttctggcttttatatcaagccgatgcaggccttgtaaaatgagtttgaaagtgttctcatctcttccatgttttggaagagtctaagaaaatttgacattaattctttctaagtgtttggtagaattcatcaatgaagtc

SEQ ID NO: 318402 - DNA, 549 bp, Homo sapiens
cttgacttgttttgatcttagaaaaaagtcttctaacctttcaacatggaatatgaggttggttgtgatttttgacctttatggcatttagctacaaatcttctgtatctagtttgctgggagtttttttcatgaaggattgttgaattttgtcaaatgttttctctgcatctattaatatgatttttatccttctttcttttaatgtagtgcatcacaaaaaaagtgtatgatatttttgatttgcatatgttgaaccatccttgcttcccagggataaattctttttgatcacagtacatgatctttttaatgtgctgttgaattaggtgggctactattttgctgaggatttttctatctatttttatcacaaacattggcytgtattttcttttttgtactttttttctggcttttatatcaagccgatgcaggccttgtaaaatgagtttgaaagtgttctcatctcttccatgttttggaagagtctaagaaaatttgacattaattctttctaagtgtttggtagaattcatcaatgaagtc

SEQ ID NO: 318403 - DNA, 673 bp, Homo sapiens
ctttacagcagcaccccactccagtgccaatttactgtattagttcatccttacactcctgtaaggacttacctgagactgtgtaatttatagaggaaagaggtttaattgactcacagttccacagggctgggagacctcaggaaacttacaatcatggtgaaagaagcaaatacatgcttcttcacatggcagcagcaaggagaagtgcagagaaaaagggggaaaagtcacttataaaaccatcagatcttggtgccaggtgcggtggctcacacctgtaatcccagcactttgggagactgaagcgggcrgtcacctgaggttgggagttcgaggtcagcctggccagcatggagaaaccccatctctactaaaaatacaaaattagccaggcatggtggtgcatgcctgtaatcccagctactcaggaggctgaggcaggagaatcgcttgaacccaggaggcagaggttgtggtgagccgagatcgtgccattgcactccagcctgggcaacaagagcgaaactccatctcaaacaacaaacaagcaagcaaacaaaaaaacacatcagatcttgtaagaactcactatcatgacaaaaacatgagggttaccaccctcatgattaaactgtctcccaccaggcccctcccgtgacacgtggggatt

SEQ ID NO: 318404 - DNA, 673 bp, Homo sapiens
ctttacagcagcaccccactccagtgccaatttactgtattagttcatccttacactcctgtaaggacttacctgagactgtgtaatttatagaggaaagaggtttaattgactcacagttccacagggctgggagacctcaggaaacttacaatcatggtgaaagaagcaaatacatgcttcttcacatggcagcagcaaggagaagtgcagagaaaaagggggaaaagtcacttataaaaccatcagatcttggtgccaggtgcggtggctcacacctgtaatcccagcactttgggagactgaagcgggcagtcacctgaggttgggagttcgaggtcagcctggccagcatggagaaaccccatctcyactaaaaatacaaaattagccaggcatggtggtgcatgcctgtaatcccagctactcaggaggctgaggcaggagaatcgcttgaacccaggaggcagaggttgtggtgagccgagatcgtgccattgcactccagcctgggcaacaagagcgaaactccatctcaaacaacaaacaagcaagcaaacaaaaaaacacatcagatcttgtaagaactcactatcatgacaaaaacatgagggttaccaccctcatgattaaactgtctcccaccaggcccctcccgtgacacgtggggatt

SEQ ID NO: 318405 - DNA, 673 bp, Homo sapiens
ctttacagcagcaccccactccagtgccaatttactgtattagttcatccttacactcctgtaaggacttacctgagactgtgtaatttatagaggaaagaggtttaattgactcacagttccacagggctgggagacctcaggaaacttacaatcatggtgaaagaagcaaatacatgcttcttcacatggcagcagcaaggagaagtgcagagaaaaagggggaaaagtcacttataaaaccatcagatcttggtgccaggtgcggtggctcacacctgtaatcccagcactttgggagactgaagcgggcagtcacctgaggttgggagttcgaggtcagcctggccagcatggagaaaccccatctctactaaaaatacaaaattagccaggcatggtggtgcatgcctgtaatcccagctactcaggaggctgaggcaggagaatcgcttgaacccaggaggcagaggttgtggtgagmcgagatcgtgccattgcactccagcctgggcaacaagagcgaaactccatctcaaacaacaaacaagcaagcaaacaaaaaaacacatcagatcttgtaagaactcactatcatgacaaaaacatgagggttaccaccctcatgattaaactgtctcccaccaggcccctcccgtgacacgtggggatt

SEQ ID NO: 318406 - DNA, 499 bp, Homo sapiens
accctcatgattaaactgtctcccaccaggcccctcccgtgacacgtggggattataataactacaattcaagatgagatttgggtagggacatagccaaaccacatcagttgtgaagcatgtggcaagtcacttcattcccaaggtgcctgcccgttctttcctttgttgctaataagcctctgtggacataatgtgccaaagagggaggcagattgtgctcaggtgtcagctctattctctacccatttccatcctgtagggctgtagtagtccctsagagctgcttgagcactccagcctagcctcagagctctccttatcatagtaaaagtaagccacatgaggctcttatcccaatcagacaggcatctttatgtagaaaaatgaaatggacagtatcattatatttctccatgtgttccacgactccttacacaggatatatgctcacacagatgaagatctaactcagctctcagaatggacttatgagtca

SEQ ID NO: 318407 - DNA, 539 bp, Homo sapiens
tacatggtaaatatggcatttgtaaggcaggcccagggaaatatcaggcataaattscagaagttagaagctccacaggcgtgagtgatactcagcttactaaagtggctacaaaggtgtacattaaccgagatcaggaggcaaagaaggaagctaattggaagcttaaggaaaggcagatttactagcagcagccctcacgggaagggaagctgactttgcaaggaggcgtgggtgcagtcatgaaagaggccagtctggacagggatttaagagctggccaaggctagaaaaagattaatgtgaatggtgcaaaaggaaaggacactgaaaggatgaatgtcaagagaataaggaaaatggtcaggaccatggtataagaaagccactggccaagggctactgcacccgggaaaaacccaaaaccttctgcacctgctgtggaaggcaggatataaagtgtcaggtaaaaaaggctcaaatctgctttaaaagtgtccagtatttaggcttctgtataagccaagggaaaagatggc

SEQ ID NO: 318408 - DNA, 539 bp, Homo sapiens
tacatggtaaatatggcatttgtaaggcaggcccagggaaatatcaggcataaattccagaagttagaagctccacaggcgtgagtgatactcagcttactaaagtggctacaaaggtgtacattaaccgagatcaggaggcaaagaaggaagctaattggaagcttaaggaaaggcagatttactagcagcagccctcacgggaagggaagctgactttgcaaggaggcgtgggtgcagtcrtgaaagaggccagtctggacagggatttaagagctggccaaggctagaaaaagattaatgtgaatggtgcaaaaggaaaggacactgaaaggatgaatgtcaagagaataaggaaaatggtcaggaccatggtataagaaagccactggccaagggctactgcacccgggaaaaacccaaaaccttctgcacctgctgtggaaggcaggatataaagtgtcaggtaaaaaaggctcaaatctgctttaaaagtgtccagtatttaggcttctgtataagccaagggaaaagatggc

SEQ ID NO: 318409 - DNA, 590 bp, Homo sapiens
  misc_feature (1)...(590): n = A,T,C or G
nnnatatataagaattgcaggggcccaggctcaaatgactcaatatttcatattgggcaggcagatgggatgaaaaagatagaatggcatttaagtgactaaacagctgtgagactgtgaggtccctaaagatggaaggaagtgaggaacaggcagaagggggaakagtgaacagcaatgacagatgattccacactctaataattttattttcaccttttattttaggttcagggagtatatccacaggtttgttacataggtaaattgcatgtcactgaggtctggtgtacaaaggatcccatcacccaggtagtgagcatggtatctaatgagtagtttttcaaccctcaccctcctggcaccctcctccttctagtagtccccagtacccagtgtctgttggttccataagatgattttattttatttttttatcattcatttaggttcagggtatatgcacaggtttgttgtataagtaaactcatgtcataggggtttgttgtacagattattttgtcacccagttactaggcctagtaaacaaatttttttatttatatatttttatttttatttatttattt

SEQ ID NO: 318410 - DNA, 590 bp, Homo sapiens
  misc_feature (1)...(590): n = A,T,C or G
nnnatatataagaattgcaggggcccaggctcaaatgactcaatatttcatattgggcaggcagatgggatgaaaaagatagaatggcatttaagtgactaaacagctgtgagactgtgaggtccctaaagatggaaggaagtgaggaacaggcagaagggggaatagtgaacagcaatgacagatgattccacactctaataattttattttcaccttttattttaggttcagggagtatatccacaggtttgttacataggtaaattgcaygtcactgaggtctggtgtacaaaggatcccatcacccaggtagtgagcatggtatctaatgagtagtttttcaaccctcaccctcctggcaccctcctccttctagtagtccccagtacccagtgtctgttggttccataagatgattttattttatttttttatcattcatttaggttcagggtatatgcacaggtttgttgtataagtaaactcatgtcataggggtttgttgtacagattattttgtcacccagttactaggcctagtaaacaaatttttttatttatatatttttatttttatttatttattt

SEQ ID NO: 318411 - DNA, 593 bp, Homo sapiens
tgtttacaaagggttatttaatagaattaacatgataaagaatataaaacactacctagtgagtagctattccaaaaatagtagctattattgttatggattgtgtaaatacatatgtaaagacaatcagggtttgaraacaaacaatatttatttaatctctacttaattagctcaacttaataccaggaactattgagtgtcaacttgattggattgagggatgcaaagtattgttcctgggtgtgtctgtgagggtgttgccagaggaaattaacatttgtcagtggaatgggagaggcagacccaccctaaatctgggtggccaccatctaatcagctgccagcaatggtaggataaaagcaggcacaggaaacatggaaagactagactggcttagttttccagcctacatctttccccggtgctggatgcttcctgtcctcaaacatcgaactccaaattcttcagctttgggactcttaagactttctaccacagactgaagcctgcactgttgacttccctacttttgaggtttgcggactcagagtggcttccttgctcctcagcttgcagacagcctattgtg

SEQ ID NO: 318412 - DNA, 520 bp, Homo sapiens
gaaatgtttaaagccgtggttgcattttagaaaaatcattttgcttacaatgtaaggaacagactggaaaagagtagaggtaaatctatcagttacctgagaaaacagtgattatgtcattggggatggacttgagagacaggaaaagaaattgataaagctttgtgactggttaaataagaaagagggagaataatgttttccaagatgacccatagctttctgcactgggaagctagatgaatcaccaagaaaagcaatgttttgtctttgattttggtaatgaagggagaaatgacagattccattttgagcataagtttaawatgcccacgggtcatatgagagatggcaaggtggaaggtggatgtaaacctctgaagttcatgagcgaaatcttggttagagatggagatttatgagctactagaatatagataataattaaagttttcactgatgcagctgaaaggacttctggagaacttgcttctcttgtcaaattcttaaaggtctctct

SEQ ID NO: 318413 - DNA, 590 bp, Homo sapiens
atgaaagtagcttatatatgtaaataggttgctgttatttcttctgaagtttaagttgtctagcttcagtttgcagggcttcaagaaaacacagcttagtgttcagtgattcaaaattaggaaaaatggggagaaagaaagaagaaaaaaattgaaaacattattttggagacttatagccaagaaaaattagaattcactctgaactgtygaaaatgataaaaaattataaaaacattaggtgagaatagaatctaacaacaggtagactatagtttttgaaacaatttttctctctccagtttctcatttttcctaaagacagatcatggtaggaccaatttgctttataatacttggcctgattatttgtataaagtgcagcaggaataatcatttttcacatgggctttttaattggctttgatgaaactttgttacatagaagaaatctcagacaagacttattttgtggatttgtaccatcaaatacctgtgagctaggtaaattcctctcctcttaaggtcccatgataacttggggctcccaggcctgtcagaaagtgacagtctttacttaccacaggtca

SEQ ID NO: 318414 - DNA, 541 bp, Homo sapiens
agactccgtcttaaaaaagaagaagaagaaaaaaagattagttctggctttctttgaccagtggctactttggaagtattcagtttctcaaggtaagtactttataggaaaacattcatgtgtatgtctaagttctggtatttttgttaaaatgatgtttcattaatttatattacttgatataggcattgagagttaaaatgtaatgattatctctgccatttcacagctcttactgccacttcrcccaagctttaacaaaatcatctgaaggtaagcattaaagcaataatggattttcaggtatttttactaattaatgaaatcaaggccaacaaatatctactgtctatatcacagtaattacagagactatcttttgtgatgttataggcactaatggtttcttttccaagagttatttttcttccatcactgttaatagaatctcgattttgttcaggcatgatgtgccagccctagtgggtgtatttcaactgtctgggtacatcatagcagtacgcttccttcatgtcagtta

SEQ ID NO: 318415 - DNA, 485 bp, Homo sapiens
agactacacaactgtcggcagagactggcacattgaagggagatcctggaaggagtccctgtgctgggggaagagtttccctctcccagcttgactgggaggaatggcaaatccttgcaacagagaaacgccttgctgcctgctttcctctgacagcctgcttcctgacctaggggttgggcccgcggatggcatgggcattggctaatcatcaatctaattgcagagtcctgcccccaacaggcttgttaaactcttctgctgccaggctttccaaagacacttttaaaaaatatatacaacggcttttttgaagtataattcacataccataaaattcactcattggcaattcattgttttttactgtattcacaaagttgtacggccattaccccagtcaattttggaacattctatcaccccaraaagaaaccccatgcctgttaagcagtcactcccatttctttgaaataccttcagcc

SEQ ID NO: 318416 - DNA, 590 bp, Homo sapiens
aaatctcaagtttcttgactgcccacatggatctcttttttagacttcattatttttkttcctgtctctgccactcaatagctgtatgacattggtaaagttacctaacttccctttgcctcactttcttcatcttaagattattatgaggatttaatgtagtgtatgtaagatcctgttacacagtaagtgttcaataaacattatctactattatgttatcctctttttttcactgcccattaagaagactttttttttttttttttttttttttttttgacggagtctcgcactgtcgcccaggctggagtgcactggtgtgatctcggctcactgcaagctccacctcccgggttcatgccattctcctacctcagcctcctgagtagctgggactacaggcacccgccaccacgcccagctaatttttttttttgtatttttagtagatacggggtttcaccgtcttagccaggatagtctcgatctcctgaccttgtgatccacctgcctcggcctcccaaagtgccgggattacaggcgtgagccaccgcgcccggccaagaagacactgttttatattaaat

SEQ ID NO: 318417 - DNA, 564 bp, Homo sapiens
gagcaaataagaggtaggcctagaactcccccaggtcctgaaactctaagttttctttctcccatggtaggctgtttcttacgaaattgaaaaactgagattgtagtaagtaggatgaagtcgggatgatgtgtatataaaatgaaactaagctccaggtacacatctcttacaaagagccccacctggaatacaatttctctgcaaactttaccaccctcgaaaaaaattgtttgggagcctcataaagtacctcctcagacagtatgttagaaagtatgatttctgaaatgggagtgagaggatgaagtatttgccttctctggggtctggaygcaagagaattattcctgagagggagattctttcctcattagtggcagcatgatgtatatggctgacccattacccgctctcatagggtatagctgggcatctctgttttagcaaagagaataattcctttgccatgaatgtccatggctgaagcacacagaaagaagagtagatctgatcaaagagcacatccatgttcacgggtagaaccatgggcccagagtggga

SEQ ID NO: 318418 - DNA, 564 bp, Homo sapiens
gagcaaataagaggtaggcctagaactcccccaggtcctgaaactctaagttttctttctcccatggtaggctgtttcttacgaaattgaaaaactgagattgtagtaagtaggatgaagtcgggatgatgtgtatataaaatgaaactaagctccaggtacacatctcttacaaagagccccacctggaatacaatttctctgcaaactttaccaccctcgaaaaaaattgtttgggagcctcataaagtacctcctcagacagtatgttagaaagtatgatttctgaaatgggagtgagaggatgaagtatttgccttctctggggtctggacgcaagagaattattcctgagagggagattctttcctcattagtggcagcatgatgtatatggctgacccattacccsctctcatagggtatagctgggcatctctgttttagcaaagagaataattcctttgccatgaatgtccatggctgaagcacacagaaagaagagtagatctgatcaaagagcacatccatgttcacgggtagaaccatgggcccagagtggga

SEQ ID NO: 318419 - DNA, 549 bp, Homo sapiens
gcaagctggtgctctgaatgccttgaaatctgtttgggcatgcagtaaagagagactcaccacacaaggtctctgcacaagagaggtagggctattcaggttggtagactatacaagtaggtgctctgaatgcctggagacctgcctagacaagtgtcagagaggacccctgcaccccatactacaatctatgtccaggaagggtkgggtggctcaggctgctggaccaggcaaatgggtgctccagatacctgcatttttgcctgcatgtgaagcagggagagacccactgcaccataatctattttgaggaagggtggagcagctcaagctgctgaactaggaaaatgggtgctccaaatgtctggagatctgcttggtcatggagcagagatagccttgctacaccacaatctatgtacttaaatggtggggtgactcaggctgttgaagcaggtgaatgagtactctgaatgcctgcagatctgctaggtgtggagcagagagaacctgactgcgccacaatctatgtccaggaaaggtggggta

SEQ ID NO: 318420 - DNA, 395 bp, Homo sapiens
gaggaacgagccaatgcctagagatcaggggaagagctgtgggcagttgcagtttggttcaagttaaataagatctccaaggtgcaagcatacctcaactaacattcctaccttcagttcagtttatgccctgattgaatgaactttgtcctagctcttccttattctctcatatcaatgtaagaactgtgacatgttcatccactatagtaactaaggtctactcttcacctgcttgttctgggccagtcactctcaggatttccttctctttcttttttctgtctctcttaagtacttctgcgctttacctctctttcccaaagagaaytacatctgaggaatttgcagtgaaaaattacttcatgaaaaatgaatgtaagtctcttatggca

SEQ ID NO: 318421 - DNA, 549 bp, Homo sapiens
catatgactcaatgaaccattgatatgtcaccattctggttactcaatccaaaaatggttgagccagcctcattcctacagccaatttagcaaagagrgttaagagtgagagaggaaagttgggggggactcatatttatggaacacttaccagattcttcagatatctggttcagttcaagttttagtgggcccctccacctttggcctggttgacagaaatcagtcacgcctagatacataaaacctttcctgcttgatcctgacttgctattagttgataactcatggctcctcctgctgtgattttgcttctcactttaacttttcaagacttaccgtcattcttcttctgcaagacagttggattaagttccattcttccagcagataacatgagggctgaatgtaagaattttcttctttagcattaaagccacagaatggaattcatatcctgagcattgagttggcaaagagctgctgaatccaccatgaggaaatattggcagggaggggtaaacaggagaatatagataaagaaggaaa

SEQ ID NO: 318422 - DNA, 623 bp, Homo sapiens
attgaatatttaacattaagtagatattagctgttaatctktagccgggctggtttcaatatttgacatttaaattaaataatcataccacatttaataataaagtcactgtatgttaaacaaatactacttagttattgaaaccatatgttagtctaaccacattgtgagggattcgcatgttttcaataaccatctgatcttatttcacgtagagcacaatgcacgtactataccatgaaaagcagagaggctatttatgtcagccctgaatgattttaaaataattgtattaagttttactttcctactgatccccctagctaataacctatctacccattgttcaggtgctgtcagtgaagtttacttgtcttcctgagttcttattgtattcctgtgttcttattgtattgtacctgcattgcccaagtgagtaccactaatgccaatcaacccttccctttgttcatatggtgccaatccactttgttgagatgattggcaggaacacaaacatttctatttttaatgtttctctcggatcataaaagacagacattgccttaaacagagtgtttccatttctattcttctctcatttaaacaaattcacagttacc

SEQ ID NO: 318423 - DNA, 623 bp, Homo sapiens
attgaatatttaacattaagtagatattagctgttaatctttagccgggctggtttcaatatttgacatttaaattaaataatcataccacatttaataataaagtcactgtatgttaaacaaatactacttagttattgaaaccatatgttagtctaaccacattgtgaggkattcgcatgttttcaataaccatctgatcttatttcacgtagagcacaatgcacgtactataccatgaaaagcagagaggctatttatgtcagccctgaatgattttaaaataattgtattaagttttactttcctactgatccccctagctaataacctatctacccattgttcaggtgctgtcagtgaagtttacttgtcttcctgagttcttattgtattcctgtgttcttattgtattgtacctgcattgcccaagtgagtaccactaatgccaatcaacccttccctttgttcatatggtgccaatccactttgttgagatgattggcaggaacacaaacatttctatttttaatgtttctctcggatcataaaagacagacattgccttaaacagagtgtttccatttctattcttctctcatttaaacaaattcacagttacc

SEQ ID NO: 318424 - DNA, 623 bp, Homo sapiens
attgaatatttaacattaagtagatattagctgttaatctttagccgggctggtttcaatatttgacatttaaattaaataatcataccacatttaataataaagtcactgtatgttaaacaaatactacttagttattgaaaccatatgttagtctaaccacattgtgagggattcgcatgttttcaataaccatctgatcttatttcacgtagagcacaatgcacgtactataccatgaaaagcagagaggctatttatgtcagccctgaatgattttaaaataattgtattaagttttactttcctactgatccccctasctaataacctatctacccattgttcaggtgctgtcagtgaagtttacttgtcttcctgagttcttattgtattcctgtgttcttattgtattgtacctgcattgcccaagtgagtaccactaatgccaatcaacccttccctttgttcatatggtgccaatccactttgttgagatgattggcaggaacacaaacatttctatttttaatgtttctctcggatcataaaagacagacattgccttaaacagagtgtttccatttctattcttctctcatttaaacaaattcacagttacc

SEQ ID NO: 318425 - DNA, 174 bp, Homo sapiens
gagaaaacgaacacttgtacactgctggtgggagtgtcaattacttcaacctttgtagtatggcaattcctcaaaaagctaaaagcagaattaccattcaacccagcaatcccattaatcccaggtggatataaatcactctacsataaagatacatgcatgcgaatgttcatt

SEQ ID NO: 318426 - DNA, 262 bp, Homo sapiens
accggccaatctagcccacttcctaccagggactccagaagcctcaagaacccattcccaggctgaaattccgcaaaagaaacagccagttcyggtggaggaatgatcatagcccaactctttgaaacaacccataccccatcattcctaccagccatcagaaaggatagtgatgattttattttaaaggagggttacagacatattttcagaccagctaacttagaggtgagaatacccaaatgacctttgggacaggaca

SEQ ID NO: 318427 - DNA, 262 bp, Homo sapiens
accggccaatctagcccacttcctaccagggactccagaagcctcaagaacccattcccaggctgaaattccgcaaaagaaacagccagttctggtggaggaatgatcatagcccaactctttgaaacaacccataccccatcattcctaccagccatcagaaaggatagtgatgattttattttaaaggagggttacagacatattttcagaccagctaacwtagaggtgagaatacccaaatgacctttgggacaggaca

SEQ ID NO: 318428 - DNA, 593 bp, Homo sapiens
taagtcaatataaattcaataatttttgcaaactaagaaatcttaactaaaggtaattagtaaaggatgagcctaacctaataataatcaagttttgaggaatggacacgaaagagaaaactagcatattatattactcctttttaagattgcatatagagttcatgtattcttcaccgtcaagattaatctggacatctgatgaatagtctcagtaagtgttgtttaataatacagaggcaagaaaaatatcttttggccagataatatgagactcaattttcttaaatactacttaataaaccatcaraagaagctaggtgggttggaatgaacctttgttttcctgtataaatttgagctaaactttgataagatattgatatttttataggcttaatatttgtgacttttaaaaagtagaggttgtttcttccctagtgtggattatgacatagacaaataaagaggaaattagtgaagaattcttatctgattgtgtagacttgttccatgtaatgcataattacagttcatcacaattgatatacataagtcaaattttatttttgctctttcttaaacttgttttc

SEQ ID NO: 318429 - DNA, 403 bp, Homo sapiens
cttttctactgaaggcctacagcaggctcacaggcagtaagcaagacaaaaaagaaactcagggggaccaatgagattccaaagggcaaaactcccaagcgtccttcagagagagaggtcaatttcacaataactcaaaatatatttatatcacgctaagctgacagctgaggcatttacactttgtcttttcacagggcatgtaagtaactgtggaaaggcttaagtttccctgccttaaatacgtttcmaacatacttgtgaaacactcaccatgataagtcatgcccattttaaagtaaatctaatctatgtatataaaaaattatggtggttctttcagtgtcttatgaaaaatgggaaagggaccgggctgagttagtgctttttttctcgtctttga

SEQ ID NO: 318430 - DNA, 667 bp, Homo sapiens
ccaacctcacaactctgctccctcctgcttttgtgctagagctgtgtgtctttcaaagacaacagttattagcaattgggtgatctttttctttctttgtgatcagtaccagtataatgaccaacaacatcatctcattttgtttctaatatttggctcatgaactattttcagcataagggctgatcaatggctttaaataataataattttttacaaccttcagtatttggatgttggaatttaccaaaaattagtattatatgtaaccaagagaaactattaaataataataagaaaaatttccaaattaactgtaatactatggaccatgctacctggctttcatattacaaataatatttttctcttttgggcttcctaatgccaaatctaaggcttttctttcctcattactttatctctgtctctcacacacacatactccaatgcagagacctacttgaagaatgatagattgaggagaaaaaataacgactggaaactatctagwtatgaagcaagagagggactaagcaggtgcattactcagttatgaattatttggcaaaatatctctgagagagatcacaattcattctaaaatgtttgcataactgcaggctgctacattacctaaactcactatttgccatcatctgctttc

SEQ ID NO: 318431 - DNA, 667 bp, Homo sapiens
ccaacctcacaactctgctccctcctgcttttgtgctagagctgtgtgtctttcaaagacaacagttattagcaattgggtgatctttttctttctttgtgatcagtaccagtataatgaccaacaacatcatctcattttgtttctaatatttggctcatgaactattttcagcataagggctgatcaatggctttaaataataataattttttacaaccttcagtatttggatgttggaatttaccaaaaattagtattatatgtaaccaagagaaactattaaataataataagaaaaatttccaaattaactgtaatactatggaccatgctacctggctttcatattacaaataatatttttctcttttgggcttcctaatgccaaatctaaggcttttctttcctcattactttatctctgtctctcacacacacatactccaatgcagagacctacttgaagaatgatagattgaggagaaaaaataacgactggaaactatctagttatgaagcaagagagggactaagcaggtgcattactcagttatgaattatttggcaaaatatctctgagagagatcacaattcattctaaaatgtttgcataactgcaggctgctacattrcctaaactcactatttgccatcatctgctttc

SEQ ID NO: 318432 - DNA, 551 bp, Homo sapiens
agctatgggaccctgtcttaggcaagcggcattagaaggggagctcttagcctgcctggtaatgcaagatcaacaggcaatcaggtatataaacccatttcttttgatgcttataaraagatttttaaaaaggcattagaggccggagccacgcagccaagtgggctatgggcggaagaaaaggctcaggggcagggaagctcacagtgcctgggcccacagggtctggccggccggcagcagccacctggcggcagtgggagagaatggcgcagacagaaagtcgcgcctaagcgagcacaatgcagctgccaccctgggacccacaccgctgtgctctgcaggtggcccacagcaaaatttcatgtgttccttgtatacaagtgacgtcccagattataattctctgctaaaatttaagtaaaatttaagaatttgaaaaacccttttctaataatggccactgttatttctcccttacccctaaggtgactctcttcaagtccaatttaagtaaaacagtaacctctgaagggagagaaattaaagag

SEQ ID NO: 318433 - DNA, 551 bp, Homo sapiens
agctatgggaccctgtcttaggcaagcggcattagaaggggagctcttagcctgcctggtaatgcaagatcaacaggcaatcaggtatataaacccatttcttttgatgcttataagaagatttttaaaaaggcattagaggccggagccacgcagccaagtgggctatgggcggaagaaaaggctcaggggcagggaagctcacagtgcctgggcccacagggtctggccggccggcagcagccacctggcggcagtgggagagaatggsgcagacagaaagtcgcgcctaagcgagcacaatgcagctgccaccctgggacccacaccgctgtgctctgcaggtggcccacagcaaaatttcatgtgttccttgtatacaagtgacgtcccagattataattctctgctaaaatttaagtaaaatttaagaatttgaaaaacccttttctaataatggccactgttatttctcccttacccctaaggtgactctcttcaagtccaatttaagtaaaacagtaacctctgaagggagagaaattaaagag

SEQ ID NO: 318434 - DNA, 551 bp, Homo sapiens
agctatgggaccctgtcttaggcaagcggcattagaaggggagctcttagcctgcctggtaatgcaagatcaacaggcaatcaggtatataaacccatttcttttgatgcttataagaagatttttaaaaaggcattagaggccggagccacgcagccaagtgggctatgggcggaagaaaaggctcaggggcagggaagctcacagtgcctgggcccacagggtctggccggccggcagcagccacctggcggcagtgggagagaatggcgcagacagaaagtcgcgcctaagcgagcacaatgcagctgccaccctgggacccacaccgctgtgctctgcaggtggcccacagcaaaatttcatgtgttccttgtatacaagtgaygtcccagattataattctctgctaaaatttaagtaaaatttaagaatttgaaaaacccttttctaataatggccactgttatttctcccttacccctaaggtgactctcttcaagtccaatttaagtaaaacagtaacctctgaagggagagaaattaaagag

SEQ ID NO: 318435 - DNA, 562 bp, Homo sapiens
ttatcttggagctccaaatgcattggctcatagattattttaaaactctgttgaggaatccgggactacagagccctgttgttcccctcacctccaatgtccttttccagacacccatgtcatgtgttttaaagctcagatcatagatcataagcgagctactagatggagccttctctgatgtcctacttgtggcacagtttttctacagcatggtttctgtcaagttttcaaagcatataatgattcatactgctgatttctaccctcaagaaagtggaatctattcggaatttcaaaataaaaacaaagttgtcttttatttctgttacttttttacttccstcacaatgcctgccaccgtgaacacaaagcatattaaataagatcactgttccttgacctggtgtcaagcagctgtttggaagttgtttgtgtgtcagttgagacataataatagaataagcatcctgacatcacttgccctctgaccaccagtagtgatagggcttgctttactcaaggaggaagtccttaacaactcgatctacccaggcaaaca

SEQ ID NO: 318436 - DNA, 605 bp, Homo sapiens
agcatcctgacatcacttgccctctgaccaccagtagtgatagggcttgctttactcaaggaggaagtccttaacaactcgatctacccaggcaaacacaacaatcattcagctttttgtttcattttttccttaacctatcaccatgaaacaaaatgtaagtattgcctatctcttctatytaaataagggctgagatttttgttctgtgtcttcactgctatattcctagcacatcaacatttgccaagggaaagaacaggagatggaaacaaaggaagttaaatgagcggaacaccaaggaagaaactgagatggggtctgaaagtgtggtgggacattggctacccttgaaattgcgaagggtcttatacttgataatgacaggatttgggaagctctcttagggccatgtaaaagaaagggctaaatataaaagggtgagtgaaggggagtttttcctctattccacttgtacaattcagccaattcatactctgagattgtaggagaatctttcactagtcaaaatagaaaatgaccaaatcacagaaaatattacgaagacaagaatgaatttgtaattaaaaattaaaacaagaaaa

SEQ ID NO: 318437 - DNA, 605 bp, Homo sapiens
agcatcctgacatcacttgccctctgaccaccagtagtgatagggcttgctttactcaaggaggaagtccttaacaactcgatctacccaggcaaacacaacaatcattcagctttttgtttcattttttccttaacctatcaccatgaaacaaaatgtaagtattgcctatctcttctatttaaataagggctgagatttttgttctgtgtcttcactgctatattcctagcacatcaacatttgccaagggaaagaacrggagatggaaacaaaggaagttaaatgagcggaacaccaaggaagaaactgagatggggtctgaaagtgtggtgggacattggctacccttgaaattgcgaagggtcttatacttgataatgacaggatttgggaagctctcttagggccatgtaaaagaaagggctaaatataaaagggtgagtgaaggggagtttttcctctattccacttgtacaattcagccaattcatactctgagattgtaggagaatctttcactagtcaaaatagaaaatgaccaaatcacagaaaatattacgaagacaagaatgaatttgtaattaaaaattaaaacaagaaaa

SEQ ID NO: 318438 - DNA, 608 bp, Homo sapiens
ggacatttagttttaaatatgtagttttagtatgtaaagctctctattgtgattagtagaaaaagacaaaggctgattaattgtaggccttgttgcacaaatttatattgaagcaaatctgtttaaatatttaaaagtaactactaaaataatggaaaacaatttcattgcattgaaaacaatttcaaattgcactgagaaaatgctgctacttttcacctgttggtttggaggcaatggaatttttatctattattttagcgattggaaatatacacaatgtaaataagtgaacaacatgcaaaatggagacaaaagaggcaaataaaaaaggcatctaaaagtgtaatatgatgggataaataattgcaaatatattaaaaatccaataaataaaagtgggtaaatctcaatattataagaaaataaaagatcagattgaatttccagctacattctgtttacaaaacaacatagaaagagcaaaataaatacataaattaaaaaaacatggtctcatgaacagcccacagtgagtgtttcatcagtggcagcacttctttcaatggkgattcaggaacctaagcttttttttatcttgagtctcc

SEQ ID NO: 318439 - DNA, 460 bp, Homo sapiens
ttctttatatgaagaaactctccaaaatcctcatgtttccacataagtgaggatcaaagtaagaattccattgtctcctgttaaattctgttcctcagactatagcctgagtagagtcatctttcattcaaattctccccacacatttctgaggtttaggsgctgtcatctacaagatttagagatttgcatgcattttatcatgttttcaaaaattaagaggcaaattccctcagagcaattaccaagacttgtgtaagagtccctcaccttaggaaaagaaatcaccagcacacttgttcaaacaaaacccacgccagttttctttattttataatcttataaaaatgttttacttacaccatgggattccgaacatgtttatgaacattttccaaatgttttgaagtccagggttgggagcccagtaattgtcaatggatgagttagagggtatgtt

SEQ ID NO: 318440 - DNA, 301 bp, Homo sapiens
aacagactttatttttaaactacttratatatgactttttagaggcctgatctgccttttctttgaggtggaaatatttgtcacaatcttgttctgctgcccaataaatcaaaatgttgagcctcttgtaataaaaatagttgctttgatgtataaccttaaatgtctaatttcctaccagcaataatgaggctttctccagccattctgggggaactgggtttccttttttctgtccttttgtttttctaacatgtgggctgtctaatgacaggattttgtattccagatgttttggcga

SEQ ID NO: 318441 - DNA, 571 bp, Homo sapiens
tagacatcaacacaaaatcacagaaattcttttatgcagctattactacacagacatccaaagagcagggaaagaatctaaaaccacacagaagttaaaacccatgtggttttaataagaagaaaagaaagagatggtttaattaagtaataagactagactccctggtggttaataaggtaatttgccacatgattaaaggtatgtatatgcaagttgaatttctgcggtaacattattgctcaaatggaggctctttggaaactgggattgttagtcacttaaatactataatcttttgaagcaatagaaggggaacaacaaagagtcacttttgagattctttcatcattatctcaatgtttcttaaaaaacagaggacgttatgcaagactacaatctagcagcgacactgtcagatttcagagtggatgtctcccctctgtgttctcrgctctgggactgcagaggcaccatgaggctcttggaaaagagagaccaggtcctgctctgatcattctctggaatggatgaacaggtgcttaaggttggatcaactaaagcctccaag

SEQ ID NO: 318442 - DNA, 559 bp, Homo sapiens
cctccaaggacaagcacagatgcaagtttcctaagggcctccagagactttggtccatgttattttttgttgcataacacaggcattttmcagtggttaggagtacagactttggggtctgatagactcaggttgaaacttgattctactgtttaccagctctgtggctatggacatgttatttaacttttaagactcagtttcttcactgtaatgggatatgaatggatttcattcagcatttgggtggggagagagatggggtaaataagataatgtttttgtaattggtacaaattgttccattgtatttaagaagtgagaacatttcaacacaaatttatcatgaaagatagtgtatatacagaaaagctcataaaatatgtatgtacatttttaaaaaataaagtgaatgctctcagtcaagtaatagcatagccatggtcaagaaatacatcatggttggtgccttaaaagcagtgttgctagattagtaaattaaaaatgtggaaattgaatttcagataaacaattaatgatttttttagtataagtttgt

SEQ ID NO: 318443 - DNA, 535 bp, Homo sapiens
tgaaaagtagactcctgggccagctgggsttaatgaaagtttggccatattgggttggaatgcaggcatgactttgattcatactgaagttggtccagagtgcgtactggccttgcatctttctagctatacttgaaattttcttcccatccgtgtctctttaaagagatttcaaacccacagacacctcagaaatttatcctccccactctaaattttcccagctcctgtccttaatctggggcacaatatcagaccaaaggtagatgcttgatccgagcaaggccagtcagatttagtctcccagggacatggaattaagacccagaaattgggtcagttacctctcgggaggggagatagaagatcatgaagaccctgggactagaatggctattcacagggggctatgaaaacctcctgtagttagagtcaagaagaaagtcttcgggtaaagaaagatgaagtgagcatgtgggaaaatggacaagagatggacttttccagagactttccagttaccagaagactttgc

SEQ ID NO: 318444 - DNA, 535 bp, Homo sapiens
tgaaaagtagactcctgggccagctggggttaatgaaagtttggccatattgggttggaatgcaggcatgactttgattcatactgaagttggtccagagtgcgtactggccttgcatctttctagctatacttgaaattttcttcccatccrtgtctctttaaagagatttcaaacccacagacacctcagaaatttatcctccccactctaaattttcccagctcctgtccttaatctggggcacaatatcagaccaaaggtagatgcttgatccgagcaaggccagtcagatttagtctcccagggacatggaattaagacccagaaattgggtcagttacctctcgggaggggagatagaagatcatgaagaccctgggactagaatggctattcacagggggctatgaaaacctcctgtagttagagtcaagaagaaagtcttcgggtaaagaaagatgaagtgagcatgtgggaaaatggacaagagatggacttttccagagactttccagttaccagaagactttgc

SEQ ID NO: 318445 - DNA, 571 bp, Homo sapiens
taatttttttaatttttaaaagcatatttatgcattaaaactggggtgkggggggtgtccatggaagctcagcctactatcttggctgaaattcctttttagctaataagtggcagagctgagtttcaaatctagatattctgactctaaagccaaggttaattttttatgataacgtgtatcttccaaggaatctcagtaaggctgaaagactatccaaagtgacttttaacaaagaatagatagaggcaaactcatggaatgattacccccaaaagctattacgggctaaaatatttgggaagttttcagaaaatggcaaaaaatgaaggtctgtcatgagttatgatattctaaagactgtctgaccttctgaatatggcagaaggcagcttgcctctcacaacactctcctatgtgaacaggggtctaactccacctggtaatttctatacccttcttggctgtagtcagaaggaatcattgcagatgctcttctcatcactcacatattcatctgcctgtgcacatacatctcgatgcaaacccaatgagatgaggttaagagcat

SEQ ID NO: 318446 - DNA, 587 bp, Homo sapiens
ttaaaatgtataaatcagtgaacatcaagtgaacagactattaagtaaattatgtaatattttcttatcttgacaaatatatcttcatagcaaactggaagagcaggcttggtcaatttagaattcctggactcctgagagttacagaatgcaataatgcaaggagggtggtcacctagctcagtctctggcccacgacctgctctcattctctttccactctggctctgtccccataccatgaagggcttcattgaaatgcataaatacacgagcccatacattcaagctccatccacacctcttgcaaacagcttctcttggtgacccctcagacctaggaggagtaccttagcaccagaggctggtataggggaagatatccatgtgggctctggaaataggatcatgccttttggatacagaattytagggtcccagtttcttggagcatggtcttgcaggggagcagactctagatagtcacaattccttggcctgtggattcttcaacccacgggaagggtaagaaaaacaggagcagattctctgaagcatgggtccaggacaaggaccatcttgcccag

SEQ ID NO: 318447 - DNA, 590 bp, Homo sapiens
ggggtgagaaaaataagatgggaaaagagaaaagccacaggccacttgtgtaggtaaactgagcctcaatcccacraggaccctctaagaaactgtttagcatgcaccctgaaattatcccaccatggttgggggaccccaggtacttatccatggacttcatagccttatgttgaggattttcactgggaatattaaatccataaaactgctgcactgctctgggagtgaggccacagaaagccctcaggcagagagaagcagagaaaagcagagggtctaggtgtttggggcgggaagctgtcagctgcagaagccatccacttctgctgcaggtgaactcagggtggcgggaaagggacctggaggtgtgttaacagcagctgctgcagaaaataccatgttgtctgaggctgctgtgccctcctgtaaagcatccttacttggtttcaaaaggaaaaagccgacagagcacggtggctcacgcctgtaatcccagcactttgggaggctgaggtgggcagatcacccgaggttgggagtttgagaccagcctgaccaacatggagaaaccccgtctctactaaaaa

SEQ ID NO: 318448 - DNA, 590 bp, Homo sapiens
ggggtgagaaaaataagatgggaaaagagaaaagccacaggccacttgtgtaggtaaactgagcctcaatcccacaaggaccctctaagaaactgtttagcatgcaccctgaaattatcccaccatggttgggggaccccaggtacttatccatggacttcatagccttatgttgaggattttcactgggaatattaaatccataaaactgctgcactgctctgggagtgaggccacagaaagccctcaggcagagagaagcagagaaaagcagagggtctaggtgtttggggcgggaagctgtcagctgcagaagccatccacttctgctgcaggtgaactcagggtggcgggaaagggacctggaggkgtgttaacagcagctgctgcagaaaataccatgttgtctgaggctgctgtgccctcctgtaaagcatccttacttggtttcaaaaggaaaaagccgacagagcacggtggctcacgcctgtaatcccagcactttgggaggctgaggtgggcagatcacccgaggttgggagtttgagaccagcctgaccaacatggagaaaccccgtctctactaaaaa

SEQ ID NO: 318449 - DNA, 610 bp, Homo sapiens
tcccttctcgtttttcacttcattgtaatattgctgacttaaagaaaaggccaggagaaaattaactgcattctgtaatcaaactgtgtagaatattgctgcttgaaatgttatgatctgaaatgtctgtgactataaatccagaccttaatgatataaagattttgactgcagatttttgtcatctatttttggttttctacccacatatctggatgtccaacagctrggcacctctgtgatacttgggcctgtagagtgatccaggaagccaaacagaaggcactcacatatttattatctaaaaaaacttcgaagcccgtaaggttgaaagactccatataactacaaattgtcatcatactacaaatatgtctggatagacaagtccaatggaagactgcattttcaccaaggactaggtcctcctgttcattgattgaacacacatttcaaatttcccaagcctggcatgtttacaccccagcatgtgcagtccatctggaacatatggacaggggaggcggacaggctctggagctgctggggaaagaggcctggatgcttggctcacttctgcctgtagcttgttgccttggacaagttctct

SEQ ID NO: 318450 - DNA, 571 bp, Homo sapiens
gaaagaccccttgtgatgctttccctgaagccagtctgaggtagacaccctctactgacctcccacagggtggatggaccaagggaggagttggaagagctccaaggaatggacctcatggckcaccaagccagccttagcattaacatttgtgtagtatttaccagttcacgaagtcctccgcatacactatctttgcagctgctagggtctgtgactgtgtctgtctacacatgagcaaggagaggttgaaggaggtcacagtggctgtagaacacatgtgattaggctattagctattgggggcaggtgtccacctggatcacaggtcttctgattccacatctgtgctgctttttgtttcccttctgaagtattaccagttcacagagaaactttggaaagcacagaacaatatgaagaaaaggggagaatttcacaccattaccattcagaagcaggcactatttacattttgctgcgtttttgatacttatatttacctatcttcatcggaaaaaaaattgcaaagtacaagtatgtatgaaggtgaaatctgagtcacacagaa

SEQ ID NO: 318451 - DNA, 596 bp, Homo sapiens
tgtctgttctatcgtctcttcctaaaccctcgataaccgtaagcatcatggacagaatacttttgttatctttytgtccagttcctgtccctcaccagacactcatcttcataggcttcatcaggcatattcatgaagccttagctttaccccagaagttgtcacctgactcaaggcagctttctcactcaaaaggattatgtgactagctcttagactaattaatcttccagcaggaaaaaataccactgcaataaacattttcatgcataagcattgtctgcatctgaatatttcttctttaagacagattcctagagctgcaactcctggatcaaaagatacggaaacactggacctctttatacccatcatctttccattcttttcccatgaggccacactgcctaatacgggctcttcgtggcttaatttgagaggctttgaaaatggaaagatacttcctgctcccaaatagctcccaaaccagctctttcatgatgactgaaattgaccctaccctaccttggttataagcacagctatgttgtaaaaatacaaaagctaccgttagccaggttggtaaatagactaat

SEQ ID NO: 318452 - DNA, 580 bp, Homo sapiens
gtcgggtctcttcttatatgttatcacaatattaggtatatttcctatcacactacttgataatttcttgtccatctttcccagttagttcaggttccctctgtggggtctctccttgtgggctagtttgcacttactcactgtggcttcagagccrtcagactcttacctggaggaccagggattcaaaggcaagtgtaccaagaggaccaggaagaagcttggtgccttctgataacccatcctctgaagtcacacagtgtcacctcctctgtaatgccaagaatgcccagattcaaggggagagagcacagaccccacttctccatgggactagggtcaaagtcacatggtaagaagaacatgtgggacggaagatattgattatctctagaatatacccatgtgccacaccgatgtttcagtgacatttatgagatacattataaagcttttattccctgtaaacacctatgtgttctggatacctgtgagtacatctgaggctcttaacactcaggatctctgtcacaattctagcagaaatctcatcattctttcaaagctatttagcacacac

SEQ ID NO: 318453 - DNA, 580 bp, Homo sapiens
gtcgggtctcttcttatatgttatcacaatattaggtatatttcctatcacactacttgataatttcttgtccatctttcccagttagttcaggttccctctgtggggtctctccttgtgggctagtttgcacttactcactgtggcttcagagccgtcagaytcttacctggaggaccagggattcaaaggcaagtgtaccaagaggaccaggaagaagcttggtgccttctgataacccatcctctgaagtcacacagtgtcacctcctctgtaatgccaagaatgcccagattcaaggggagagagcacagaccccacttctccatgggactagggtcaaagtcacatggtaagaagaacatgtgggacggaagatattgattatctctagaatatacccatgtgccacaccgatgtttcagtgacatttatgagatacattataaagcttttattccctgtaaacacctatgtgttctggatacctgtgagtacatctgaggctcttaacactcaggatctctgtcacaattctagcagaaatctcatcattctttcaaagctatttagcacacac

SEQ ID NO: 318454 - DNA, 580 bp, Homo sapiens
gtcgggtctcttcttatatgttatcacaatattaggtatatttcctatcacactacttgataatttcttgtccatctttcccagttagttcaggttccctctgtggggtctctccttgtgggctagtttgcacttactcactgtggcttcagagccgtcagactcttacctggaggaccagggattcaaaggcaagtgtaccaagaggaccaggaagaagcttggtgccttctgataacccatcctctgaagtcacacagtgtcacctcctctgtaatgccaagaatgcccagattcaaggggagagagcacagaccccacttctccatgggastagggtcaaagtcacatggtaagaagaacatgtgggacggaagatattgattatctctagaatatacccatgtgccacaccgatgtttcagtgacatttatgagatacattataaagcttttattccctgtaaacacctatgtgttctggatacctgtgagtacatctgaggctcttaacactcaggatctctgtcacaattctagcagaaatctcatcattctttcaaagctatttagcacacac

SEQ ID NO: 318455 - DNA, 567 bp, Homo sapiens
ttattttcaagaatccactacctctctgcattttaagcaatacctattgtagatatatgtaagctctaacatagtcaaataagaccataggctcttcccagacctatccaccagttctgaatccacatagatcagataatatttttaaatgctggactgactgactggccccctctgctactggaaagattatagggtggtgctaaagagcgtgagtttggagcagaggctggagtttgggtgccagctctggcgctcattcactttttccttttagcaagttccctagcctgagtctgttttctcatctataaaatgggatgataacacctatctcacagaactgtaggaggttaaaataaaatcatgcatagtaagctcttagtccagtgccaggtagggagtacccatcttataagtgtattggaacctctttcccataccacaatacagacgtcgttggtctcctgtggtttgcaaagccatcttccactcatctctgcttctygccatctttctgcagctctacgagatattccctcaggacacggaccagtcagtacatgt

SEQ ID NO: 318456 - DNA, 617 bp, Homo sapiens
gtttgctattttgcgtacagaaatatcggagagcatgtccttggacttctgacaggacatagaatggaggggtgtggaatcgatttgctataattcacaaagggcagggtttcaaacacagatggaaatggaggcccagagagggaaaataaccttccccaaaacatagagcctccttttgctgaagctggaacaggcgtccctctgtatggcagtgggatccccatgttgcctctctgggcaccttcctcagctgctctctctgaacccattactcattgttcacccattcagtccacagaatggttagttcttagatgtgtttgcactcatctctgctttgcrgtttaatctaggagaactggtctctttaagggggctggcctcatcccaggataccaacagaaggttctgtcttgtcatttggcacctgcaagcttccagtgatgcaagaagctagatgcgctgcatgttctgcatccaagtcgctcagccacgttgattctgggatgcagtcagtccctggcaaacctttggcttggcctgcagcttgattccatgttggtgccatgtaatgtttgccagtctcctgaataaagaaagattcaggacagctt

SEQ ID NO: 318457 - DNA, 567 bp, Homo sapiens
  misc_feature (1)...(567): n = A,T,C or G
nnnnnnnnnnnnnnntaaagacattgtcattcagcagatttaggtcaactccatttaaacgaaaagtttgggattttgcccattgatcctaaaggagttgatcaagttctcagaacatcattcttcctaaccctgatgcagtgtagcagagatagagacagagaagtcctcaaggacaatctcaccgggcaaattcctttgtgcctttgaggccttcttttcctggggcttccctagtctctagtttccttaaaggtagtcacaagaataacaaaggatacacatttatggaagactcattttgtgataggctctgtttgggcctcacctttactttttaaaccatgacagctactccatatagtaagtactatggttacaccattttacagatggcagaactaaggtatagagagcttaagtaactcaccttcccaagggttcayagctactaagagagacagaagagatttcactagagtctgagctcttgaccacaatgtgtgcttttatactttaatctttgaccttctggccttcttttccactcctatgaaatgaagttgc

SEQ ID NO: 318458 - DNA, 665 bp, Homo sapiens
cactttctttcagttgatatgttctaatgcctggaaggtcacctttgacatcctaatcacaaagttaaaggccttttcctgtttctcctgctctttgattcttctgcagccaatgggctattggccactgttcattcttgaaattacactattttattgtctgacatgatgctgtgttttcctggttcccttcccacckcttgacagcttgtttctttttcttcattagctccttctttatctaccttttaaaaatgagaaattatttagttcaatccttggctctggctttcctaggatataccctctcctcttatttccaacatctcctccatgcagatgactcctgaaactccacccaaaacctcattggcaatcaacacagcaaagcaatgaacattttacttgatcactgaaccttcaccaatacctcaacatctctaggtataagtttctcatctgagctcaaaactgtctttctctacagattcctccattattccagtcttttaggactgaaatctcaactttatatcttccctttcctctatggaaagtatctaagtagtgaccactagagtttggatatggttcgtttgtccccaccaaccctcatgattaaatttcattcccagtgtagcagtgttaggaggtgaggcataatg

SEQ ID NO: 318459 - DNA, 622 bp, Homo sapiens
agacaaacagtgagcattctgacatcatatacactgattggctttttaaactctggggccttttcacacagattttacccagataaaaatgcaagcatctgaaccatatgcttaagtgttttctctgtaccgctggctggagcagctggcaaaacatgatctaggactgctaaaactgttctgacaaaagcactttagtggggtctgcaggacagggtctgaaagatgtcagaatttttaaaaggtactaattgctcaaaggatgaagcaatccctctgaaaactaacccagcattttaatagaacccagaacaatactgagaatctcagagggaaaatctgcttgttttctaactcctgctgataaagaggaaaagcataaccactaagcacagggcaatgtggaagaatgtattggcttttcaggcacctatgaatccttcaagaactgtacccaaaactttagcaattgagcaagaaacaaaagagcagaagcctattaccaaatcactgttggaaakaaggctatttggcctctgcaaacctctgatgtctgtcagttcaatccttccaacagctcttgcagaggtccgccaggaagacagtgaggggactgtggcca

SEQ ID NO: 318460 - DNA, 601 bp, Homo sapiens
agcctaggattaaagtccctgatctagctttaggaggttactaccagggtaaattgataaaagaaattgataaaagataagaagataaaagataaaagaaggggtgtaattgtttattttaataataccaaccagttaaaaagtcacccagagaccattgctcttgcctccatgacataaccggtcacattatgaattcatgagggtctgtcccatctgtctgaatgcagtgtctcacagcaaccaggttcattgtgattgcacttggcttccataaggtcatgcacttgtccaggtaatgcttttataaccaagacctcatcsttagcctggtctgccttctcccgccccctcatgcctggagaacccacctccctcttccagccagcctaaccttagagaacatgggaggagaaaagattttccattctttcagtcagtcagtctgcctgtctgtcagttgctggggcctgctatgtgctagactctgggagctctgcatgtttgagtaaggacagacagaagcaacattaaaactagcataaactacattactttctaaaacactaaataaaagacatctatggcatcactaaccata

SEQ ID NO: 318461 - DNA, 574 bp, Homo sapiens
caatctgtctggcattctaattggcagctgcatatgactttacctaacaaaagtgaaaattatcaatgaactactgaaaaagtttagggttttaatagaaagatctgacaaaatatatgggagagattttaaaaagagatccctggtgatgcaaagtctcagaaccatctcccaaggtactaattggctctaccatattctatttctagcatcctccttaaagatcctgattctccagaattttctcccrtaagaggagatttaaaaatgtttcaactcattattcccctgcctcttctcaccacacaaatgctgttactagtcatgtgacactgaccacaggccgccaatcttcatacagtggcctctttctggccattgatcgtctaagatgaacagaatattaaatattaacttattctttccaaaataattatggagtctatactctgggcaaggtcttgttctagataatggaatatagcagtgaacaaaacagacaaattctctgcccttgtggagtttgtattctactagggaaagatagacaataaaccaaatcatcaaagaaata

SEQ ID NO: 318462 - DNA, 605 bp, Homo sapiens
gaggagcaatccttcaatggtgccaattaaaaagagtagttcaggctgggcatggtggctcacgaccatttgagaccagcctggccaacatggtgaaatgccatctctactaaaaatacaatagttgggcatggtggtgcatgcttgtaatctcagctacttggcaagctgaggcaggatcgcttgagcacgggaggcagaggttgcggtaaacygagatcacgggtgacagagcaagactccacctcaaaaaaaaaaaatcaaaacaacaacaacaaaaaaacctgtagttcaactaaacagaggacttaccatgacttgcagcttctctttgatttgtgttttcactgtctgtcacagaagcgataaatctatcatttttcttcagactttcatcatgattggaaaaatagcttttcacattctgcaaaaattatagtttaaaatcactagtataaaaactctcaatgcacatatagtagtagtccccccttatccatggtttcacttttggtgatttcagttatctgcaatcaacctaggtccaaaaatttttaatggaaaattccagaagtaagcaattagtaagttttaaattgtgtgtc

SEQ ID NO: 318463 - DNA, 613 bp, Homo sapiens
catttgctacatggtgatactattctggtaactgttttgtattcaccatggttgccattccaaaacaatatcacatttttcaaggctagcctttgactttacaatctacctcacataacacataatagaagagagtctgtcaagtgtggaccctctcagtgtgtcccctctaattccatcatagtactccttacctccttcaccagggaaatgtctacccatcctcttctctcaccttcacatcttcacctgaactctctactccgcctaatacctcagtctccacaggagatcccctctttcaattatcccacctcgctcccttttctctcttctacctatttataccttttttaaagtgccctttttatttagcccaaaaatcttgcctacctttgaaactcttattttctcactcacctttatctctgcctcaagctaatactcactgttacactccacagtcaaccttcttcaataggtaatgtagctattttcacttcctcaatytctactcaataaactctcatttctcccactactctacagaaactgttctcaataaagttgttaatgacctcccagatgcatgtgggatgcacgcaaactcatt

SEQ ID NO: 318464 - DNA, 613 bp, Homo sapiens
catttgctacatggtgatactattctggtaactgttttgtattcaccatggttgccattccaaaacaatatcacatttttcaaggctagcctttgactttacaatctacctcacataacacataatagaagagagtctgtcaagtgtggaccctctcagtgtgtcccctctaattccatcatagtactccttacctccttcaccagggaaatgtctacccatcctcttctctcaccttcacatcttcacctgaactctctactccgcctaatacctcagtctccacaggagatcccctctttcaattatcccacctcgctcccttttctctcttctacctatttataccttttttaaagtgccctttttatttagcccaaaaatcttgcctacctttgaaactcttattttctcactcacctttatctctgcctcaagctaatactcactgttacactccacagtcaaccttcttcaataggtaatgtagctattttcacttcctcaatctctrctcaataaactctcatttctcccactactctacagaaactgttctcaataaagttgttaatgacctcccagatgcatgtgggatgcacgcaaactcatt

SEQ ID NO: 318465 - DNA, 596 bp, Homo sapiens
cccttgtcccaccgtcccgttctaatgtttttctgtatccacattctaaaaataatcccttgagaagtctttataaacttatctgtgttttggcagctttaggttcttttgaacatgtgggaatgtccttgttttatttagtcacgaggattttcttcaagcccccttcctgctctcctgatatggcttgatttataaaattggatttagaggtatgttttctcaaaatgaggaaacaaaakatcaagaagccaagatgttaagaatttatcataaacaattgaggaatgcatagcttttaaaagcccagaataattgaactcctgctgatcgacagtagcatagccatatctgggttctttcttctgttctcaggtggattctatgcttatgacataaccagtcagtaaaaatctaagaaacttttgatatgagagaagatgaaccacagtgtactatagtagctattattttcatcacatttaatctccaaaagtcctgggtttaaattaatgagataaaatttaaataacctagcctaatgatgaaatctcctaaaagttgggaatagtatgtacccacttgttgctaataat

SEQ ID NO: 318466 - DNA, 553 bp, Homo sapiens
gtcgagaggtctgcagactttgttccctgacctccatttatgttcacttaaaccttcgactagtggtcactccagaatgaattccacaagagatggagaggttggtggaaaccaaaatcattagttggaaatgctgattttaagtcatgaagagatttttctccttttgatgtgtgcaggctgagaaaacactactaaagcagtgtccgcaaatgagtaaagtgttcttatgacacaagcaaatcacatgccttgatttatgtcctatttagtgtatgctgcacagagaactggtattactatcaccaagaagcccaaatcattgacttataatggctgtctttaaaaaagagccccaaaatatacttcccaaatatkggaaataaattgcttagaaacatggtttgttttgaacatgcgctgagaattttcctccaacatatccctcagaaagtgagttcagcagacaggtgcttgcatatgcagagacgcttcttgcatatgcaaagaataatactctttcccgttttctttttggaaactcaagcccctt

SEQ ID NO: 318467 - DNA, 607 bp, Homo sapiens
cagtggattagaatcatctggggaaacttaaacagcactggagtttgagcacagcttcagaccaattamatcaattaagacgaaggctgagcgttggggttttaagtccctgacatgatttaatgtgcatctgaaattttgagcccattacctacactctaatttttatgagagatcccagtcccggctggacaagacaggggagtatcctacttttttctcaggggctttaaatgccatatgtgtgtctttagcccagactttgctcctcaacaacagactcacacatccacctgtttactcaccatcttgtcttggatatcagacatctcaaagttaacatgtctgaagaataaatcttggtttctatctcccaaacatgcattcccgcatctcagttagtggaaactccattcctccagctgtttgggctaaactctctcccattccacgtgtcattggtaagccctgtcagctctagctctgaactatttccagaatatgcccacaactaatcatatcccttgctagtaccctagcccaagccagcatcgcctggtgactgcactgttgccacagccatctctctagtcttcctgcttctacc

SEQ ID NO: 318468 - DNA, 321 bp, Homo sapiens
cttcaccaaggcactcttttgaaacttgaaagagaatggacttctggcaattaaagacagtgcygctttatctatgaaactccctatttctgagatgcaacagggcaaaattactagaatcaaaacaggacaataaaagcatgggctattctagggaggaatgaagacattgtggtttacagcttctcctttgagaatgatgtctttagggtcatcctgcactgcctcccttttcaagccccactcttccccacctgtgttctttgtccctttgagggacaaagcattaaaaactgagcactaataaagatgaacaatgtg

SEQ ID NO: 318469 - DNA, 641 bp, Homo sapiens
gtgatcccttgtttggaggttaatagagtgcatttttatgacccttcaatgagtttgtattcactagaaatgaaatccttatcatgttctccaagcctctgtgtgacctggcactgcacccctatgacatcctgggctgcttctcacctttccttatcacagctaccctgggtgtcagttcctgaaagatgctacctctttctgagggcctttcaatggctggttcctatgcttggaaatgttcttctctcagctctcaccatgcttagctctttgtcctcctgaaatctcatcacaaaagccacctccacagggaagctttctctgacacagccccctaacacaggtctctgtattggtcaccttgtgtgtcctcacagcccactcagcccacctcttggccagccatcgtagcaacaaactttgtctgggtgacagyacctggcaacccctggcctcagctgtacctggcttctttcagtttctggcccaggatttctctggtattgcgatgggagctttgcacgcacagcctaggaacgggaggaaatgaacaactcgtgaccattgggaggtggtggacccgtgtttatctcttccttctatgggttggacagttctgaggtgcattctcctctact

SEQ ID NO: 318470 - DNA, 560 bp, Homo sapiens
tcaaggatatatttttcccctggactgtttctaggctggaggagctgcacaggattcacaattgaggctacaagataatctgctacaaaacttttattttcccaccatcccaagcacaccacccacctcaaggcaggagcccagatgaagcatatgatattaattctcaagggttaaaacacttttcagtattgaaatttgggaagcttgaatacttgaaggtcacatactttgttggtggcaaaatgagctctagatctcatcttgttattagtctgctagggctgccacagcaaaataccacagagtaggcagcttacacaagagattacttttcacatagttgtggaggctagaagtccaagatcaaggtgtcggcagggctggtttctggtgaggctttctccttggcttgcaaatgcccgccttattgctgtgttctcacctggtctttcctctgcatgcatgccctaatgaggcttcttccccttcgrtaaggaattcagttcttttgaagaacagtgccatccttatcacctcattcaagcttaattacctcc

SEQ ID NO: 318471 - DNA, 634 bp, Homo sapiens
agctctatatcctgttgtgatggataagcgttctctttccatttcctcccctgggcagggagatgatggaagtgttttgcatgaagacaggaaatatcttcagtacggctttgtgagctagatggaattatcctaaaagagcaggtccactgggtgaggagagatgtgtgggctgagttttcaactgaatgattaaacaatagtgcttgctgtggccacaccctgctagtttacacaatggaaaaaaacaacttgacaaaataaaatccatgtcgtcgtctttaaaatgtgctatcatttccttgttatagttgtgcaagattcagtaccgagaagcagatagttcttcctttgccaatatgggaaacataytgcaaacatattgggcttccaatatgtttgaatttcaatcatgaccctttagtcagtttagttaagtagatgcagtccccgcaagggcaaggttcagatttcattcaccatggtctatgaactgtcagttcctgcatgaagcacagacttcactgctagctcttcaggacacacatcacttttgtaaatatgagcactatgatcagtcagtgaccactcacatcacttctttcaaagtctgccagtgatggtcaccacaccc

SEQ ID NO: 318472 - DNA, 591 bp, Homo sapiens
agcttgagtgtagagactgtgttttattatgtttatgtctctagaatttggcccggggtcaagtagggattaggctctcactaagtaatttttaaatgaacgtcttcatattrcatgtatataagttatttcctatgctggtttgtaattggaggctctttgcactatctcctttccaggtgcacagcattgttctcatcagacaatgcatttggctgaattttacccaggaaaaatgttaggttgaacttagaggacaatctgggacagtaccagacatcctagtcatgtcatcagtccttgaagccatagttgaaaactttataaaatgagaagtttggtaaagacacaaagttgttaggtggagaaaactggagaactgaaataatttcatattagggatggtagtttcatgatgacaatgattaagtttcagagatattaaggcaacagtaagattgcaaacaaaagcagtaagatggcatctgaagcaagaagttcaccaagatgacttgtttaattttcccctttcatagggtacttgggagtttatttcttctatattatgtcttcaaacttctggttaaaaac

SEQ ID NO: 318473 - DNA, 563 bp, Homo sapiens
gtgtgggaattgtttggacagaatgctactggctggcataggatacaggagagcatttctttctcaccattataagccctggaaataccccagcacatgatatagggaaaatgtcttttctcttttagcaaggtttgggactcccagcctttggatgtcacatcgagaagatgacagatatttttaattgaatgagaggaagattagctactgaagattttttaaatgatcatgtttgattagagttacttgggaattagactaataagctcacagctggtcagaggggatcaaggtactccttcagtggtaaatattctcatattaaaaagctgaggcaggattacacaatcatggaatttttgagctgccattgatttacytggatattaaactatttggtaactttgcaaattccatggacgtgctaacattttttccctctttctttccagtggcaacaatgggcaaaaccttgaagaaagttaatgagcttaagacagcaaaagtggaaaaaaaaatctctctaggtgtttaatatttgaagctggtaaaatctttag

SEQ ID NO: 318474 - DNA, 624 bp, Homo sapiens
ggacttgggcaagttacttatgttcctaagccttaggtgtcatctcttcacagtgaggggaatagcagtgccttccttaaacgtcgtgaatattaaatgagataaatacatatatgcttggtacttggaaagcatttactaaaagggctattgttaagaagtgtgtccttgcctcccaggcagcctacagtatactgacggaggcagacatacaaatttataatctcatggaaagactgacctgttgacaggtaatgtcagatgaacattggtccttgtttttctgtatctttcatgttagggatcaatactattgttgtttactccctgtggacatttgcgacaggttggccagtgtccacagcagggtgtggtagccctttcatcatcttcctgtatgcctgccaacagggagaagagatggagaagtactttttttcccccccttaatgtggaatccactctaacagactcattttaagtggctatttcaggacacttgctttcttccaggaatgtacaagttcagttgacaggcaagataaragaaagtggcaccttctctttctaatgaacttcccagccctccgctacacctgccagttctttctgtcactgtaaacc

SEQ ID NO: 318475 - DNA, 595 bp, Homo sapiens
cccaaggactcagctcacccaggsgtgaatatgccaagaggcccatctgctaatggctgagacctaatagctgcttcacaaggctcaccagcaccttggtttccacagtgtaaggaaggaaaacccaggtgagcagaggaaggaactattatctaggaattttgccctctagaaccaatgcagactgcttgccttcctgtgacctcccgctgtgatcaaccttctcaaacgtaagggtttgaaatcatatgagagtgaggacaacttggccaccagcactaatgggtctagtgaaggcccaggcagtaggagaggcaaagggaagaggggtgagatacgtgtatgtggtgttttattttttcttgtttctagagaaataaaagaggactatttagaaaaaggagggaaagttttcacagttttattcagaccaatatgagaatgagaaatgaaaatggcaagcatcagcaaggcgatattaccattcactttcttgttgaagtgtctgcagactttgccattagccaaatataatattgtccaacctctctcctcaagttctagggaagctgaaacatgttaattgacagcaaag

SEQ ID NO: 318476 - DNA, 606 bp, Homo sapiens
tcttgcaaattaaaaaattatttggttctgtcgctaaccttattcaaaactcactcaatggtttacaaaatgccggttcctcttagttatttcttatcagtgttcttatgcagagaagtgtataaaatacactgtataaaattatgaatgctaattgcaagattttcaggttcttaatattaacaaagatacatcataagccatctttgttaatcagcaaattaaacctattacaccaagtcgacttctaagatktgtcaaagtataattatttttaagttaaaaacttaactctcataaaacatatagtgagcacatgtcaaagatttatttaactcaacgagaaaagaagcagaatgacaaagctggaataaagaagagtatgacaaccatcacgtggatagtcattggaagtaattctgaaataagagtgcaaagttagacaccaaactggttaatgtcctacagggcaataaagccataaccatcggggttaccctttttttttctggacagatgtctttagcaatgtaacattttctatgggataacatcaaactttacagagtctgggtcctaattagtaagacacacaatgttacctcc

SEQ ID NO: 318477 - DNA, 606 bp, Homo sapiens
tcttgcaaattaaaaaattatttggttctgtcgctaaccttattcaaaactcactcaatggtttacaaaatgccggttcctcttagttatttcttatcagtgttcttatgcagagaagtgtataaaatacactgtataaaattatgaatgctaattgcaagattttcaggttcttaatattaacaaagatacatcataagccatctttgttaatcagcaaattaaacctattacaccaagtcgacttctaagatttgtcaaagtataattatttttaagttaaaaacttaactctcataaaacatatagtgagcacatgtcaaagatttatttaactcaacgagaraagaagcagaatgacaaagctggaataaagaagagtatgacaaccatcacgtggatagtcattggaagtaattctgaaataagagtgcaaagttagacaccaaactggttaatgtcctacagggcaataaagccataaccatcggggttaccctttttttttctggacagatgtctttagcaatgtaacattttctatgggataacatcaaactttacagagtctgggtcctaattagtaagacacacaatgttacctcc

SEQ ID NO: 318478 - DNA, 622 bp, Homo sapiens
ggtggtggtgtgtggctgtggagcttgtggcctatgggggcgagtgagggctgccatccatccaatcatctgtcaacccaagggactgtgtcatcccagagctggcccttactctaatatacacaaaggcaccaacaggatggaagggctctactgcttccagttctcccataaactgcctcctaatcccctactctactccgattctggacttagaagctgcctccaaccaaagagaggagtgactgcagagcaagagacattgagatgttgactcaagtttggtagacctgagccacatgtggcatccagcacttggaacacgactaatccaagctgacatgtgctgaaagtgcaaaccacacagtggatttcaaagacttagtttaaaaagagttttaaaatgtgaaatatctcattatttttacactttatgtgttgaaatgataatatttagaatataytgagctagagaaaatgcattattaaaattaatttcatacatttcagtttactttttttaaatgtggctatgagataatttaaaattatatatgtatctcacattatattcctttaggctaatgccactctaaagctagaccacatgggctcaagccaa

SEQ ID NO: 318479 - DNA, 575 bp, Homo sapiens
tgacttaggaggttgggaacaagggatggagggttttcctagcttcaggatttttgcatacatcatttaagagttgtggagacactccaagcattaaatgtgtatgtgtgtgggkgtgtaagttttcttttgggggtgaacagaaaagagggcagggtagaagacaagtttttaggacagaagatctggtctaataggtaataggggaaggggaatacaaaagaaaggatggttcaagatccccactttaagaagcgggccccccaaactaatgtttcagatctttttgcctggtgcagaaccttctgtcaaagatgctttggctatttttctctcaatacaaaaagaactttgtaaacaaaacccccaaagaacacggaggaagaccaatacattatatttacacaaactaggccacctagcaatcaacttagtgaagtcctacaaagcccagacaaatacagtaacttggggggcagcatttaggggagacaagaacccaggatcagacacacaccacccagtgcgttctattgtatttgtcccgtttcaacacagtgaggtaggtttgcggt

SEQ ID NO: 318480 - DNA, 575 bp, Homo sapiens
tgacttaggaggttgggaacaagggatggagggttttcctagcttcaggatttttgcatacatcatttaagagttgtggagacactccaagcattaaatgtgtatgtgtgtgggtgtgtaagttttcttttgggggtgaacagaaaagagggcagggtagaagacaagtttttaggacagaagatctggtctaataggtaataggggaaggggaatacaaaagaaaggatggttcaagatccccactttaagaagcgggccccccaaactaatgtttcagatctttttgcctggtgcagaaccttctgtcaaagatgctttggctatttttctctcaatacaaaaagaactttgtaaacaaaacccccaaagaacacggaggaagaccaatacattatatttacacaaactaggccacctagcaatcaacttagtgaagtcctacaaagcccagacaaatacagtaacttggggggcagcatttaggggagacaagaacccaggatcagacacacaccacccartgcgttctattgtatttgtcccgtttcaacacagtgaggtaggtttgcggt

SEQ ID NO: 318481 - DNA, 661 bp, Homo sapiens
tcttggcagttcaaaaatcagactgttttaatctgaatccattttttacttggcaactttatttatttatctaccccgcccccacccaagtaaggaaaagatacttggcaactttagcttagggttctctaaaaccttcagaataagagtaacctgagtctgctccctggtggagcaatcttcataactgttctttggattcttaaatttctgctttattcctgttgtggataggagaaattgggttacttacaaatggtctttaagcttactacattgattcctgtactgatctgatgatggcccaaggctttaaggaggtgtgttgattcatctaaattaggtggagtaatatggacttaaaaaaagcacatatctttcctgttggtatgatgggagacacaaaatgcagtcaaaccttgtaaactaggattcaggacaaactcctcctacaaaaagaaaattaaaactagttgctaacctttggagatctcagagactaggacttaactccttgaaatattaatgcygtttctactacaattttcttaagaactcttcatattaaattagatgattgcacattacaattgtattggcatgcaagattacttacatagacttgtacatttatttacgttgacttttaggtcaatttttg

SEQ ID NO: 318482 - DNA, 508 bp, Homo sapiens
gtttctgaattaaatgccctttatattttttatatctgtttattcaatgagcagtgacagagtttctataaactacaagggagcgattgtactgtttttaaaattcatctttctattctttttatacctttgtctctagacaaatgatacttttcccaggagagagatgggctaggtagtaggtttacatctggttttacttttttaaaattatttttattgttttagagatatgctttcactatgttgcccgggctggagagcaggggctagtcacaggtgcaataacagcacactatagycttgaactcctgacctcaagtgatcctcctgcctcagtctcctgagtaactgggactatagatgtgcattaatgcacttattttaaaaaactgaaatctaaaatctctgtctcctaagagacttaagaaaagcttaataaattaacttaaatattcttaagaaaatattccccaaagagcaaaataattacaatgtcaggacagag

SEQ ID NO: 318483 - DNA, 575 bp, Homo sapiens
ggtgtcttgctatgttgatcagactgatctcaaactcctgtccttaagtgatccccccacctcagcctcccaaagtgctgggattacaggtgtgagtcattgtgcattgcctagcaacactttttaaataaggaagtaacatggtcaaatttgaacttcagaatgacatactcttgtgacaatgtagaggatgatttgggggagaaagaaaaaatagacacagagactccagcttcttgtcctaagcttctgaaatttgggaactcccagttcatatcttaaatttgatatctagcacattctctctcatccttctgaactaattctgttatgtacacgaagcattctctctaaacactttgttgttagttgcttttttcctgggaatttgtttgtttgagacasggtctcactctgttacccaggctgaaatgcagtggcatgatcatggctcactgcagccttgaactcttgggctcaagttatcctcccgtctcagccacccaagtagctgggactttaggtgtgtgtcatcatacctggctagtttttattttaattatttatttttaaac

SEQ ID NO: 318484 - DNA, 661 bp, Homo sapiens
ttaagagtggtgaaaggcaattaattttatagagcctctctgaatcgtttcactctgaaaactccaaaayatttgattcctgcattacccttgaagttggaacgtggagagtctcgttctctgtttccacaggaagccttggtattttaagcctactagccacaaaatcgaactttttgatcaactttaataagacatgacatgggttctcataagtgatacccttaggactaaaagaaccctggaatgcaaattttgctagcatgttaagaagaaaagtttagcatgttccctaacatgaaaagccctctttgattcttaaattgtctcaatatataatttgttctattaaattataaaaaaatacaggaatccccattgcaggcaattgtgctgtacaatggacatttttacattttaggagtcatatctgtatttctccaagtgttttctgaggaataactgcattgtaattaactagaatatttataaaaatgcacattcctagataccacaccattatacatctagtagcatttttggctctttaaaatttgacaaataaaaattgtgcctctgtataatgtacactatgatgttttgaaatatgtagacattgaatgcctacatcaagctaattaacctgtgtgttacctcacac

SEQ ID NO: 318485 - DNA, 661 bp, Homo sapiens
ttaagagtggtgaaaggcaattaattttatagagcctctctgaatcgtttcactctgaaaactccaaaacatttgattcctgcattacccttgaagttggaacgtggagagtctcgttctctgtttccacaggaagccttggtattttaagcctactagccacaaaatcgaactttttgatcaactttaataagacatgacatgggttctcataagtgatacccttaggactaaaagaaccctggaatgcaaattttgctagcatgttaagaagaaaagtttagcatgttccctaacatgaaaagccctctttgattcttaaattgtctcaatatataatttgttctattaaattataaaaaaatacaggaatccccattgcaggcaattgtgctgtacaatggacatttttacattttaggagtcatatctgtatttctccaagtgttttctgaggaataaytgcattgtaattaactagaatatttataaaaatgcacattcctagataccacaccattatacatctagtagcatttttggctctttaaaatttgacaaataaaaattgtgcctctgtataatgtacactatgatgttttgaaatatgtagacattgaatgcctacatcaagctaattaacctgtgtgttacctcacac

SEQ ID NO: 318486 - DNA, 583 bp, Homo sapiens
taataatgtattatatatttcaaaattgcttttaaagagtaaatattgaatgctctcaccaaggaaaaatgacaagtatgtgagatgatggatatcctaatgtgcttgatttaatcattctacaatgcacacatgtactaaaccatcagrgtgggtgtgctggctcatgcttataatcccagcactttgggagaccaaggcagatggatagcttgagcccaggagttcaagagcagcctgggcaacatggtgaaaccccgtttctgtgaaaaatatgaaaattagccacacatgatggcatgcacctatagtcccagctcctcaggaggctgaggtgggaggatgacctgagcctgggaagtagtggctgcagtgagccatgatcgtgccactgcactccagcctaggcaacagagtgagaccccttctcaaaaaaaaaaaaaaaagtacattgtacaccataagtatatacagttattatgtgtcaataataaaaaagtataaaagtaagtcagaacaaaaaccacaccaaacttcttcaacaacaaaaaagaaagaaatgaagcaaacctagcctcagaaa

SEQ ID NO: 318487 - DNA, 367 bp, Homo sapiens
aggttctttcaaagaggccactgagggtgtttctccaattccatttaggaaaccatcgcactcatttcagttgatcacagctattcaggttttcatatacctataaatattaacacatctcttttacctattttcatgaatcmccagaatgagcacagaagaggaggaaccacataagtatggtaaccgagagggaactgactttctttgaagaaagacaccaattttccaattctagctggtccaagcagccaaatagcaaatgaaggaaatagcaaaaaaaaaaaaaaaaaaaaaatctataactaggagcagttgcagacaaaagtttgatgtcttatcatttctctcagctacattcacactc

SEQ ID NO: 318488 - DNA, 563 bp, Homo sapiens
acgtgatgcctgctccgatctggccatgtgacagtctggcagtgtcccctgcatctgtccygtatccccggctttattcttgtcagtgggacatctcgatcagcctgcaagatagcactcccatcaccctacaaggaaacctcacccttatttacatcaccctcattgccctacttctctgcacccattcatggcagggcagggaggaacacccaaaagtgagtcctaatgtcctcaccatccatttcctgttttctctcgaccagacttccaccacgttctcacctccatcacccactaagattgctgtggtaggtaatgttgatggcacagtgtcaaatccagtgctgggcatggtgagtcactgtccttccctgagtgctccttcccaggcccctgcctggaggctccctcgcctccatacatgtgtggcctcctcggagaccatctcccggctgtctgtgtgccgcagccccaccctctctgtcctcctttgtgctggcttgtttcctgtccctacccctagccccacctgatgttgacactgcgtcagctccatgagg

SEQ ID NO: 318489 - DNA, 570 bp, Homo sapiens
taagctagaaacatcacatagttcttttggtgtccatcacacctctctgtgggtcacaacttgtacttcaccttaggatctactgggacttgagcctcacgataggtctctaggtccagaggaggatcagcagtgcctayagggtcactaggtcagaaaagctcatcataagtcttcagtaaaggggggataacctcaggcagggggaagaagctgcttctactgttgtactgggggtccccaagaccactccccacctcagtgattatctaggaggactcagcatacagttgtactcactgttataatgtattacctcaaaaggataaaaaagcaaaatcagcaaagaaaaaaggtcaataggacaaagtctggaggaaactaggcacagcttcatagagtcctctccctgcagagtcacagagcctggactaatttctccagcatctagttgtgacaactcgtgtaaaatatcatctaccagagagacagaccagggtttttattgagggctgttcacacaccctgtgtctgcttagcacataccaaaattccagagtcccagaagga

SEQ ID NO: 318490 - DNA, 529 bp, Homo sapiens
gagggatgtgctttcatcagacaggaatgtggtactccttcatggtctcaggagcatttaattagaaaactaaaaaatacattttcaagactcctttgcagctaggattctggaggtcaattagtgtcatttagattcactagagtgaagattggctaactatggcccagggaccaagtctatttttgtaaacaggtgcacagaatactcattcatttacttattactttggctgtttcaacactgtaatggcagagtggagtggctgtgacagagagtctatggcccacaaagccacaaatctggactctctggccctttctagygcatgtttgctggcccctgatgtggagcaagaggtgagccagggctgaagctgggcctccctacagcttctgtctttcactgtgggttcaggagagtcatggatttcttctaagtttttccagtgtttatctttgatttcctgagtctcagggacagtcacatctcgatgttttgggtgttagtccctagagcttccaaccta

SEQ ID NO: 318491 - DNA, 570 bp, Homo sapiens
ttttctattgtgttcctctgatctattttttaaagaagtccaaacacatggtaagcaaatcttcccaccttgatcagtcctgattattctttaccatttcttctwccatgtgagtttttgattagcttgttacatttccaaaagttatttgttggacattgtttgaagtttcaatgaattcttggaaaaatttgaggaaatggacgtctttgtgctgtgagtctcttcatccatgaacatcttcattgcctcatctattttttgtgtactcctcttatgtaatccaataacattttgaaattttcttcataaatacctttcatggcttttgttagctatattcctagttactatatttttttgttgccactataaatggtatgtttcttaaattgcattttatgttatctgctgcaatggatagcacattgattttcatatatattacacatatccagcgagatagctaaacatcctcactgattctatacattcgtctgtagatacccttggattttctatgtaaacaatcttaccaactacggatcatttcagttttgcttccccttt

SEQ ID NO: 318492 - DNA, 561 bp, Homo sapiens
  misc_feature (1)...(561): n = A,T,C or G
nnnnnnnnnnnnnnnnnnggtaaaatatgtaacatataaatgtgtgtgtgtgtgtgtgtgtgtgtgtgtgtgtgtgwgagagagagagagagagagagagagagagaaatactgaattcccatgatccatttgtttgtttgaaggtccaatatccgtatttttaatatttcttctatttaggggtatcatacagtttttagttttcttaccatataatacatgttggacatgcatgtctaagattttaagctgctttcctctccagttggtgacaatagaagccctgaatccctattgggacattttgcaaactaagcctgacatgaggtaggtaaaaagtcaatcaatcttatttgtgggtcttctggactttctgacttctgttccattggtatgtctgccccttttccaatgttccactgtcttaattattagggctaaataatatcttaaaattgagtagtgtgattcctccatctttatttgttttcaaaacagttttagctattctggttcctttgtttttccacatacgttttagaagaagcttgttcatatct

SEQ ID NO: 318493 - DNA, 456 bp, Homo sapiens
aaagttagtttctctgacctccaagatgggagaactttctaatattttcttttaggaaagttgtccattgcataactgatacacgagtacatatcctttagtacaggattcagatacagsgagcaacagaaaagcccttcttaacctccaccctcagtcccagccctgcccccagtcccactgttggggagcagttggagctctaacctctcttctttcgtcctgtgcattcatgtgtgcatgtgtgcacgtcttcagaagatataatggtgggctgtgtatgtcttcttaatacctttatcactctggaactttctttttattaatatgttggggtgcggggaggtctccatattcagtgattattgtaatttttatgacagtccagaataggcatgtcgattttttttaatttttgatattataaacagtgctgcaatgaatgcactttttctt

SEQ ID NO: 318494 - DNA, 456 bp, Homo sapiens
aaagttagtttctctgacctccaagatgggagaactttctaatattttcttttaggaaagttgtccattgcataactgatacacgagtacatatcctttagtacaggattcagatacagcgagcaacagaaaagcccttcttaacctccaccctcagtcccagccctgcccccagtcccactgttggggagcagttggagctctaacctctcttctttcgtcctgtgcattcatgtgtgcatgtgtgcaygtcttcagaagatataatggtgggctgtgtatgtcttcttaatacctttatcactctggaactttctttttattaatatgttggggtgcggggaggtctccatattcagtgattattgtaatttttatgacagtccagaataggcatgtcgattttttttaatttttgatattataaacagtgctgcaatgaatgcactttttctt

SEQ ID NO: 318495 - DNA, 510 bp, Homo sapiens
atctcactccttttagctaataggccccaaaccatcacatcacctttgagtgctccccaaaccgtcttccccacacatccacccctcccaaacyaagcccacccatcctggaacagctcaaaggttctcaaatcccaggtcactttcaacctcccttttcccacagaaagaatcaaaagtttgtgactgatatggtttggatctgtgtccacaccaaatctcagattaaattgtaatctccagtattggacatggggcctggttcaaagtgattggatggtgggggtgaatttctcatgaatggtttagtatcagccctcttggttctgtcctcctgatagtgagttatcctgagatctggtcatttagaagtgtgtggcacctctccctcagtctctctcactcctcttcccaagatctctgctccctctttgccttctctcatgattggaagcttcctgaggcctccttagaagctgagtagatgttgacatcatgcttgttgtacag

SEQ ID NO: 318496 - DNA, 510 bp, Homo sapiens
atctcactccttttagctaataggccccaaaccatcacatcacctttgagtgctccccaaaccgtcttccccacacatccacccctcccaaaccaagcccacccatcctggaacagctcaaaggttctcaaatcccaggtcactttcaacctcccttttcccacagaaagaatcaaaagtttgtgactgatatggtttggatctgtgtccacaccaaatctcagattaaattgtaatctccagtattggacatggggcctggttcaaagtgattggatggtgggggtgaatttctcatgaatggtttagtatcagccctcttggttctgtcctcctgatagtgagttatcctgagatctggtcatttagaagtgtgtggcacctctccctcagtctctctcactcctcttcycaagatctctgctccctctttgccttctctcatgattggaagcttcctgaggcctccttagaagctgagtagatgttgacatcatgcttgttgtacag

SEQ ID NO: 318497 - DNA, 538 bp, Homo sapiens
ctcagactctttctctttttactttttaggtgcaaacaaaattataatcactcaaggtttttatgaagaataaatgaatcgacatatccaaagcactctagacatgagtgtctcctgttcgtttatcatgcaggtgtttaaggaggtagattccctaatcagtcgaggctatcctggtagaaaagagcactcagtagtctcaaaaacagaactttcccacatcatgaagaagaccactgcctttattttgagattcacacatgctcaagagataagctaagcttagactaaaaacatacttttatttctgtctttgtggccttaaatagtcttttcaagtaatttagctctcccatcctcaattcctgtttgcayagagcacagtctccaagcaggactccagcagccacccccctaagcatctccaaacaaggcatgtcttcagagaaggagattccattgaattaaaagctcctaaggaaagagagaacttgtatgaagaagagctccactgggtggctgcccggggccccttctc

SEQ ID NO: 318498 - DNA, 618 bp, Homo sapiens
tttcaactctcaaatttcaggattatggcaggatgccatgaacaaccctccaaatgaaacaactaaatacaaaataaaatgcatactttatgaaacattttcttaaattaatttcaaggcacraaagaaggaatttgcagagccaaaggaaaggaagggtggtgaggaggaatgaggggacacgaatcctgaaaggagaacagcaaagaaaacttcctcaaggccacctgcaattccctggagacctcaagtttctacacaaagggcatcaggtgtgtggaaaaggagaggtagaacagaggagacagtgcacacagatagctggaggccccagtgatgtggctcccagtgtgggtgaagaagaaatcacctatgcctggtgaagaacttgatcatctctaccttgacaattgaaggaagtaaaattgccgctgataatttgtaagcccaaggtacccccaagctgtttttggactgaatcatactatttttgtggtacaaaagctttaagtaaacaaattacagtggcttctggtaggtagcaccaccatggtacccacaggagtgaatgcaaaccctctgaaggataaaattacacccaggacctcacatggtgct

SEQ ID NO: 318499 - DNA, 591 bp, Homo sapiens
tgacatctgttctctgtaatctcagagagtttctcatccctgccttatatgaggttgacctagttttcttggcctactcaaaatattagtgagcatgaacagatgattatatgtataaaatgtaactctgtgcactaacattgctctgtgcattcctggatccaactcatctcactcctctccttccctcctccccagaccttccactatatcctctggaatgcctatgtcctattcatcaaaytccttggaaatttaaacttctttggggaaggactgttctccaggtccctgcttctggtcacatctcaagcagaagttctccttcctctggatacatgatcttttctgggccatatcttcccctctcagctgcaaaatcttgcatctttttggatgatgtcattctcttcccttcatcctgtcggcatctgccatccttttggcctggtggtcttcctctctacctggctgcctgaaagattcgccccatgtctggcctctattgtcatggttctccttttcctcattgacatttcctgcaccacagtccagctgtcccaccaatagtcatatcctgctccctggcat

SEQ ID NO: 318500 - DNA, 556 bp, Homo sapiens
ctcagactctttctctttttactttttaggtgcaaacaaaattataatcactcaaggtttttatgaagaataaatgaatcgacatatccaaagcactctagacatgagtgtctcctgttcgtttatcatgcaggtgtttaaggaggtagattccctaatcagtcgaggctatcctggtagaaaagagcactcagtagtctcaaaaacagaactttcccacatcatgaagaagaccactgcctttattttgagattcacacatgctcaagagataagctaagcttagactaaaaacatacttttatttctgtctttgtggccttaaatagtcttttcaagtaatttagctctcccatcctcaattcctgtttgcacagagcacagtctccaagcaggactccagcagccacccccctaascatctccaaacaaggcatgtcttcagagaaggagattccattgaattaaaagctcctaaggaaagagagaacttgtatgaagaagagctccactgggtggctgcccggggccccttctctgaagctgtagctttcag

SEQ ID NO: 318501 - DNA, 582 bp, Homo sapiens
atagtagttaggaagtttcaatggcaagtgaaaacgacctttgagttttatagaaaatgaatttttctttttacatcactcaaaatgagtatcttcactttctatttcaaagaagttgtagtaaatacaaataataataataagggaatgacaacaggtaggcaacagaggaacctagagaaaatagagaggagttgtttgtgaactttgaatcttcgcttcaccaaattctgtggatctagttaagaaatggatctatgggcatctgtcccattctacacacagtttaggtggaggaacccccagggttagagtggatgatgcccgtgttatgaatgaaaggcaagaagattgagtcttggttgggcatggcaactcatccytgtaatcccaacactgagaggcggaggcaggtggatagcttgagctctggagtttgagataagtctgggcaacatagtcacactccatctctacaaaaaatgcaaaacttagctgggcgtggtgatgcatgcctgtagtgtcagctactcaggaggctgaggtgggaggattgcttgagccagggaggttgaggctgcg

SEQ ID NO: 318502 - DNA, 559 bp, Homo sapiens
cacaaactaagtggcttaaaacaacacattcattatcttacagttctggagatcagaagttcaaaatgggttttatgggctaagactaaggtgttggcagagctgcyctccttctggaggctcaaggagagatccatcttctcgcagtttcctgcttctccttgcttgtcaccccttcctcatcacatttcctgtttgtctctctcttctaacaaccctgtgtttacgctgggccctactggataatccagaataacctccgcatcttaagcacaactgcaaagtcccttttaccatgtaaactagcattcacagattccagggattaggatgtggacatctttgggggccattattcagcctaccatgggtgccaagtgagttttccaatccttatgaaaatgtttaaagggagaaataagataatgttttgaataaaatgcatgtgaaaatacaacatcaaaatttgtgagatgtaacaagagtagtgtttagaaagacatttataaacataaggcttatattacagaagaagaaaggcatcaagtcaataataagc

SEQ ID NO: 318503 - DNA, 559 bp, Homo sapiens
cacaaactaagtggcttaaaacaacacattcattatcttacagttctggagatcagaagttcaaaatgggttttatgggctaagactaaggtgttggcagagctgctctccttctggaggctcaaggagagatccatcttctcgcagtttcctgcttctccttgcttgtcaccccttcctcatcacatttcctgtttgtctctctcttctaacaaccctgtgtttacgctgggccctactggataatccagaataacctccrcatcttaagcacaactgcaaagtcccttttaccatgtaaactagcattcacagattccagggattaggatgtggacatctttgggggccattattcagcctaccatgggtgccaagtgagttttccaatccttatgaaaatgtttaaagggagaaataagataatgttttgaataaaatgcatgtgaaaatacaacatcaaaatttgtgagatgtaacaagagtagtgtttagaaagacatttataaacataaggcttatattacagaagaagaaaggcatcaagtcaataataagc

SEQ ID NO: 318504 - DNA, 590 bp, Homo sapiens
atatttgtgtacaagtgtctgcataaaagtaagttttcaattckctgtgataattcccaaaagtgcaattgctgggtcttaggggaagtctatttcatattctttagcatataaaaaatttcatatatgttgctggcaccaggtcttcacaaggtaaactcaaaaagatgcaataaagaaatatctttgttttaggatgcacgttggcacctctgcataaggtatgaggtttttatccgcatccatagactttacagagagggtcttcccctcccttctaacaaggtgtttggtgttggtgggaggacagggaaagaaacaaagagagggaagagttttctccttgttgaaatagggattgttgcatatgtgctttcagaaataaggctgaaaagcccatcagtctcagcttgacacaaagaagatgctctcatattttgtgagactgtaagccttctttcctgcaggtggcctcaggtctgtggagggtctcattactcaatgcatcctgactccatcaggttcaatctgatgggtttctcctggggaaataaatgagacttatctttttgctcttatttttttaaaac

SEQ ID NO: 318505 - DNA, 590 bp, Homo sapiens
atatttgtgtacaagtgtctgcataaaagtaagttttcaattcgctgtgataattcccaaaagtgcaattgctgggtcttaggggaagtctatttcatattctttrgcatataaaaaatttcatatatgttgctggcaccaggtcttcacaaggtaaactcaaaaagatgcaataaagaaatatctttgttttaggatgcacgttggcacctctgcataaggtatgaggtttttatccgcatccatagactttacagagagggtcttcccctcccttctaacaaggtgtttggtgttggtgggaggacagggaaagaaacaaagagagggaagagttttctccttgttgaaatagggattgttgcatatgtgctttcagaaataaggctgaaaagcccatcagtctcagcttgacacaaagaagatgctctcatattttgtgagactgtaagccttctttcctgcaggtggcctcaggtctgtggagggtctcattactcaatgcatcctgactccatcaggttcaatctgatgggtttctcctggggaaataaatgagacttatctttttgctcttatttttttaaaac

SEQ ID NO: 318506 - DNA, 547 bp, Homo sapiens
ggtccagtgatcctcagctagagcctcatttcttcctggaggatgagagaagtttgattcctaccagaattcaaatggaatctattcaatttgaccaaaaaatggcacagataattctgaaacaacacctacaacatttcccctgctgtcccctgttgctgcttaatggagactataaacccagatagaatgctgggatgctgtgtggccattawtttctccacttgagtcaataaattttggtgttaaattatatcgcaaaatagtaaaaatgtacttctactaagagactgataagttccttactgccatacatagggtcagattttccagtgtgctaaactctcttaaactctcctgagacttcactcttgataagtgaataggctttttttccttctcagatcacttatgccatgctttgctcatacttcatacacaattaagatgatgaatcagttagggtttatacagggacagaacaaatggaatatatatatatatatatatatatatataatataaaggggagtttattaattattaa

SEQ ID NO: 318507 - DNA, 547 bp, Homo sapiens
ggtccagtgatcctcagctagagcctcatttcttcctggaggatgagagaagtttgattcctaccagaattcaaatggaatctattcaatttgaccaaaaaatggcacagataattctgaaacaacacctacaacatttcccctgctgtcccctgttgctgcttaatggagactataaacccagatagaatgctgggatgctgtgtggccattaatttctccacttgagtcaataaattttggtgttaaattatatmgcaaaatagtaaaaatgtacttctactaagagactgataagttccttactgccatacatagggtcagattttccagtgtgctaaactctcttaaactctcctgagacttcactcttgataagtgaataggctttttttccttctcagatcacttatgccatgctttgctcatacttcatacacaattaagatgatgaatcagttagggtttatacagggacagaacaaatggaatatatatatatatatatatatatatataatataaaggggagtttattaattattaa

SEQ ID NO: 318508 - DNA, 520 bp, Homo sapiens
tcagcaagcgctgcatttggacatactaagtaacattaagtacacgtaatatagatctccacccaaggttcacaatctttttttttttttccaaagttaccagttcattactcaaagtagagaagtgctgtttgggaggaaatatttcagatactgggcagctgctaagggtaagggaataagggggtgaagtccagaggcaarcccccttctgtggatggggtggggtttcatgaagagttgacggagacattctgacaaaggcagcaaccaagccaggctaggaaatgaggacgctttctatgaaacaatctcctttagttgccccaattgttcaataatgtctgatatggaatcaaaacacacagttgtgtcagggattatgtcaacaatgaagggacaaggcagtggtggccccttcccctttcctgccagaataccaatttcacaagctgtggcaatgtgcccagctcacagctgaccctctcccttcccattcctctacaaattaaggctacaa

SEQ ID NO: 318509 - DNA, 631 bp, Homo sapiens
gctctcatcttttcataaggttgtcacatctcattgcctagtcacagtcttttattggtcctattaatatatgcctaccaaattagaagctcctaagtcaaaggaagaatggctcattatgagtgacagtcagtggttgattattttggcaggcagttctgggcactatgattaaaaatggacccagaaagggggaaagacctctcaktggaccctgttttcagtgtttacctaatggtagccaaagagcatgacatacccaaaagccagaggttaaaatttcaacgaaaagatggcagcaaatggattcttactctagtcacttatttcatttggctttagaaagtgtctcctcatgctctttttttcagcgtttggatacactcttaaattattcacaatatggcattgtttcatttctctaacaaatttggaaaaatcgtaaaatattagggaaatgctgatgattgaaccattttaccttctcatgaaatcttgatgtcctatctaagacagagatcggcagtttactaatcatgcttttttattttctgtatttctgatgctttgatatctggatgaccctggaggcatcctatgcagattagcctacttttaaaagcagtaaatg

SEQ ID NO: 318510 - DNA, 608 bp, Homo sapiens
gaaggctctcaggtaactcccttccttgacattatcttctaccaaagacagccaacttgcccaagattacattcctaaggagtgaggagagacagcacacagaaaatgactgatccagagtggctttcttgcctcaatgtgggctatctttgaagggccaccccaacttcagagctcttatgtttggaccagtaaactcatggacaagaatgaaaagaaaattttattttmttcttcctttttggggggaagcctttatgtgcttcctttctccacaatctgcagagcgttttgcacttcagggctgtgaccttagtttccaggatttggcccctccagagattaggatggagtgaccctgttgaggagggcatggtgactggggcttgaagtacagagagacctaggccagtcctggaggtggacatcctggctggtgccaagactgctgggaaatggagtgtcctctgggcagcagaagaatgtgccccacccttgcatggtagaactttagaagggacagctgggaagaaaccaatgttgtgatgtcaggaaaatctgctgagtcttcactaccagaaacatcacagcagatggggtgcattgtt

SEQ ID NO: 318511 - DNA, 608 bp, Homo sapiens
gaaggctctcaggtaactcccttccttgacattatcttctaccaaagacagccaacttgcccaagattacattcctaaggagtgaggagagacagcacacagaaaatgactgatccagagtggctttcttgcctcaatgtgggctatctttgaagggccaccccaacttcagagctcttatgtttggaccagtaaactcatggacaagaatgaaaagaaaattttattttattcttcctttttggggggaagcctttatgtgcttcctttctccacaatctgcagagcgttttgcacttcagggctgtgaccttagtttccaggatttggcccctccagagattaggatggagtgaccctgttgaggagggcatggtgactggggyttgaagtacagagagacctaggccagtcctggaggtggacatcctggctggtgccaagactgctgggaaatggagtgtcctctgggcagcagaagaatgtgccccacccttgcatggtagaactttagaagggacagctgggaagaaaccaatgttgtgatgtcaggaaaatctgctgagtcttcactaccagaaacatcacagcagatggggtgcattgtt

SEQ ID NO: 318512 - DNA, 569 bp, Homo sapiens
actgccatattattttccacagtagctgcaccgtttgacattcctaccaacagttctctacatcattgacatctcttattattttcygttttgttttttatattagccatcctaacaaatgtgatatctcattgctgttttggtttgtatttccctaattattagtgatgtcaaacatcttttcatgtgcttaatggccatttatatatcttacttgtagaagtgtctcttgaagttctttgcccatttataaacaattttcttgtcattgagttgtaggatttctttgtataatctggttatcatcttttatcctttatcaaatgcatgatttgcaaatgttttctcattctgtgtgttgtctttttactctgttgatactggcctttgagaaacaaaaggttttcatttttatgaaattcaatttatctacatttttattgcctgttttggtgttgtacctaagagatcattgcctaattcaagattacaaggatttatttctatattttctcctatgagttttgttttgttttgttttgtttgtttttgtttttgtttttatatgg

SEQ ID NO: 318513 - DNA, 557 bp, Homo sapiens
atacagtctaactatattatcagagagaaagtaaggctggtaaacagtctctatcacatctatgaagagctaggatagtaagaggggatttctctttctttctttctttctttctttctttctttctttctttctttttttcgttctttctttctttctctctctctctttctctttcttctttctttctttcctctgtctctttctttctttctttctttmtttctttcttcatttctttcttctttctttctttattttctttctcattttctcctttctttattagtttatacagaggaaaatgtgcaaactgtcccttgtataaacctgaatgctgactgctacttattcttaagtaataagctgaaagccaaattgtaaggcatatgcatgaagccgtcacatgttatgtttgctgggaacaagaacccaagaaaaaggtctccctagtatgacccagagggccctgggatcctcagaaaaatttttaaaatgtccatgaatctacatgaaatcgaagtaatcattgtctgcagagtatttaaatgacatgt

SEQ ID NO: 318514 - DNA, 620 bp, Homo sapiens
gatatcaagtttgtttttatgaagttcaaaatgcagtatattaaaaaaatcacaaaatagttcatgaccaccagacatgaacccccttaaaaaagttgaaaattttaaaaatcttccaactccaactcctccaggagccgcggctgctgatatcattaacttgcccgcttgactctaagtgaattactctggcatgaaagctgattttgttgcctgagtggaaatgagaaaatgcaaaatcatcaatgacaactcttaataacaaaatgctaaaatgcaatgtctcctaacaccctcactaaattacctcttcaaagtcattacaagtattcttctcttccaagtgctgggttcccttttgtgtctccaaatagattatgggggaaaaaaatctgccagcattgctgtcactgttaattagtgtctcctgagcagggcttcctgcctgaggtgctcaccagaccttgccaagccctacagggacttccagaaaaaccttgtttatgacccagccccagcgtgcctctcctgcttgtaatattttatgrcattatagagaaggactcatcaacaatctctctgtaggagtggaagtcaattttatatgaggtgagaacttc

SEQ ID NO: 318515 - DNA, 563 bp, Homo sapiens
ctttaaggcacaaaggtgaaagtacccagaaacatctgactctgcygtggaacccaggagtaagctgggttagctaaggagcggggccgttggcagaggctggggtccaggctgaactttggaggaggcatgtcccagcatgggctcctgactatgtcctcctgggacaaacccaaacccactctttgaatatgggagggactttgctggccctggccctgaccgcagcacttggaaactaaggagtggtcgcctcccccctgtcacagctgcccgttcaccatcatagaagcaactctgtcacctccatgggcccctctgtggctgctgcctgggtccaagctgagcccagctgcccaggcccagaaggaaagcccaggccaggcgcccagcacagaggcagtcacgtaccccagggagagccacagcaagcagccaatgttgcccaggagaggagtagctgacaaggcagaacgtgagctgccatcggcttgagaggctttgctggtcctcctgggctgtggacatgacctggaggagcgagggaagaagtcgtatggtgg

SEQ ID NO: 318516 - DNA, 563 bp, Homo sapiens
ctttaaggcacaaaggtgaaagtacccagaaacatctgactctgctgtggaacccaggagtaagctgggttagctaaggagcggggccgttggcagaggctggggtccaggctgaactttggaggaggcatgtcccagcatgggctcctgactatgtcctcctgggacaaacccaaacccactctttgaatatgggagggactttgctggccctggccctgaccgcagcacttggaaactaaggagtggtcgcctcccccstgtcacagctgcccgttcaccatcatagaagcaactctgtcacctccatgggcccctctgtggctgctgcctgggtccaagctgagcccagctgcccaggcccagaaggaaagcccaggccaggcgcccagcacagaggcagtcacgtaccccagggagagccacagcaagcagccaatgttgcccaggagaggagtagctgacaaggcagaacgtgagctgccatcggcttgagaggctttgctggtcctcctgggctgtggacatgacctggaggagcgagggaagaagtcgtatggtgg

SEQ ID NO: 318517 - DNA, 497 bp, Homo sapiens
ctgcctcttcctccctttgctctcctctcttcgcctctgtgggaaatccgggactcagcagtaaccctcaggaagcagggccgaggwgccgtttaataggaggcttcgtcacaatgaaactcttagaaagacttgactacgatgatgaccgtggcgtggctgtgaacactgtcagctcccacagttgccgcagcaaaaaatgtccatagacagggtgggggcccggggtcatctgctgtcctgctcagcccacagcatgcatggaaaatctgaggtgccacacctgacacccagaccagaacatgcctccctccagggtgacctgccatgtcctgcattgctggagggacaggggcagcctgtgaggatctggggccaggagatgaatcccattaacccagaggaaaacaagcaggacctgagcaccctccccattgaagctgacctgcgcagaggggcctgggcccaccccacacactggggcggaatgtgtgcag

SEQ ID NO: 318518 - DNA, 497 bp, Homo sapiens
ctgcctcttcctccctttgctctcctctcttcgcctctgtgggaaatccgggactcagcagtaaccctcaggaagcagggccgaggtgccgtttaataggaggcttcgtcacaatgaaactcttagaaagacttgactacgatgatgaccgtggcgtggctgtgaacactgtcagctcccacagttgccgcagcaaaaaatgtccatagacagggtgggggcccggggtcrtctgctgtcctgctcagcccacagcatgcatggaaaatctgaggtgccacacctgacacccagaccagaacatgcctccctccagggtgacctgccatgtcctgcattgctggagggacaggggcagcctgtgaggatctggggccaggagatgaatcccattaacccagaggaaaacaagcaggacctgagcaccctccccattgaagctgacctgcgcagaggggcctgggcccaccccacacactggggcggaatgtgtgcag

SEQ ID NO: 318519 - DNA, 497 bp, Homo sapiens
ctgcctcttcctccctttgctctcctctcttcgcctctgtgggaaatccgggactcagcagtaaccctcaggaagcagggccgaggtgccgtttaataggaggcttcgtcacaatgaaactcttagaaagacttgactacgatgatgaccgtggcgtggctgtgaacactgtcagctcccacagttgccgcagcaaaaaatgtccatagacagggtgggggcccggggtcatctgctgtcctgctcagcccacagcatgcatggaaaatctgaggtgccacacctgacacccagaccagaacatgcctccctccagggtgacctgccatgtcctgcattgctggagggacaggggcagcctgtgaggatctggggccaggagatgaatcccattaacccagaggaaaacaagcaggacctgagcaccctccccattgaagctgacctgcrcagaggggcctgggcccaccccacacactggggcggaatgtgtgcag

SEQ ID NO: 318520 - DNA, 557 bp, Homo sapiens
actcccagggtttatgcacacttctcggctcagagttctccaggataagaagagccaggcccaaggatttctgcccagaccctcggcctctagggacaccttggccatgaaagcccatgggctggtgccccacacttcatctgccttcaaacaagggcttcagagggctctgaggtgacctcactcatgaccacaggtgcctgccagctgcaccgaaccctgtcccaacagctgccacagttccaacagccaattcctagggccgggaattgctgtagacaccagccttgttccagcasctcctgccaattgcctggattcccatcctggctggaatcaagagggcagcatccgccaggctcccaataggcaggactcccacacaccctcctctgagaggccactatgtttcgtagggccaggccctggacagtctccctcacctgccactagagaaacacctgcctttgacgtccccatatggcaaagaccactcatggagcccccagccccaggtacagctgtagagacagtccccgagggatctaagaaggagc

SEQ ID NO: 318521 - DNA, 546 bp, Homo sapiens
gctgtagacaccagccttgttccagcacctcctgccaattgcctggattcccatcctggctggaatcaagagggcagcatccgccaggctcccaataggcaggactcccacacaccctcctctgagaggccactatgtttcgtagggccaggccctggacagtctccctcacctgccactagagaaacacctgcctttgacgtccccatatggcaaagaccactcatggagcccccagccccaggtacagctgtagagacagtccccgagggatctaagaaggagccatgcccagttctgcccagaccctcggccaggctgacaggagcggacgctggagctgggcctgcactgggccacataggagctcaccagtgagggcaggagagcacatgtcrgggagcacccagcctcctgctgactggaggcccgtcccagagcccaggaggctgcagaggcctctccagggggacactgtgcatgtctggtccctgagcagccccccacgtccccagtcctgggggcccctggcacagctgtctggac

SEQ ID NO: 318522 - DNA, 546 bp, Homo sapiens
gctgtagacaccagccttgttccagcacctcctgccaattgcctggattcccatcctggctggaatcaagagggcagcatccgccaggctcccaataggcaggactcccacacaccctcctctgagaggccactatgtttcgtagggccaggccctggacagtctccctcacctgccactagagaaacacctgcctttgacgtccccatatggcaaagaccactcatggagcccccagccccaggtacagctgtagagacagtccccgagggatctaagaaggagccatgcccagttctgcccagaccctcggccaggctgacaggagcggacgctggagctgggcctgcactgggccacataggagctcaccagtgagggcaggagagcacatgtcgggragcacccagcctcctgctgactggaggcccgtcccagagcccaggaggctgcagaggcctctccagggggacactgtgcatgtctggtccctgagcagccccccacgtccccagtcctgggggcccctggcacagctgtctggac

SEQ ID NO: 318523 - DNA, 540 bp, Homo sapiens
tggaattgggttatgtgtaaaaggatgggtacctttgacatatatgaagaaatttgtatgttgagggtcatgctgatagacagaaatgagtagagtggttttggaaaatggagcaatagtcatccttatcataaagtttttaaaaaaatcttggctggacagtgatayaatatttagtgaaagagaagttgcgagtagtgagaacttgtgagtagctgagaatagttctaagtaaagtgttgaagatattttgcttggttcctcctgagtgcttataacaagtgaggtagataaattaaaatcagaaaaaaatataaatgaaaaagaataaaaaacctgagcacttagaaaattctcaacctatccatattgccaaaatcagaaactgtattctacaaagaacactgagtatatgactgaaatatcactcagtaagaagcctaagatactctatgaaaagaaatatttcaggttttaaagaatgagaattgacctgagacaaatctgatgaaaactgttagatttttcagatttaatggc

SEQ ID NO: 318524 - DNA, 540 bp, Homo sapiens
tggaattgggttatgtgtaaaaggatgggtacctttgacatatatgaagaaatttgtatgttgagggtcatgctgatagacagaaatgagtagagtggttttggaaaatggagcaatagtcatccttatcataaagtttttaaaaaaatcttggctggacagtgatacaatatttagtgaaagagaagttgcgagtagtgagaacttgtgagtagctgagaatagttctaagtaaagtgttgaagatattttgcttggttcctcctgagtgcttataacaagtgaggtagataaattaaaatcagaaaaaaatataaaygaaaaagaataaaaaacctgagcacttagaaaattctcaacctatccatattgccaaaatcagaaactgtattctacaaagaacactgagtatatgactgaaatatcactcagtaagaagcctaagatactctatgaaaagaaatatttcaggttttaaagaatgagaattgacctgagacaaatctgatgaaaactgttagatttttcagatttaatggc

SEQ ID NO: 318525 - DNA, 573 bp, Homo sapiens
aaagaacacagcacatatgcacaattcaatactagtcaaccacaataagaaatgaaactgtgtcttttgcagcaagatgcctagaactggggacaatataattagtgaactaactcacaaacagaaagtcatatgccacacgttattatttgtaagtgggaggtaacaatgtgtccacaaggatatggagagagaaatgatggacaccggagacttagaaggatgggaggtggaaggtgggagcatgaggagacattacctagtgggtacaatgtacattatttgggtgatattacactaaaagccaagaccactatggaatatatccatgtgcaaaagttgcactcatagcccttaaatttatcaaataaatgtacacacaaaaaagttaaaaatataaaataattaacagttgaccaatgatcttaaaattaaaatttagaccgggcatagtgtctcacgcttgtaatcccagcactttgggaggtcgaagcagrtggatcatgaggtcaggagtttgagaccagcctggccaacatggtgaaaccccatctactaaaaatacaaaaatta

SEQ ID NO: 318526 - DNA, 604 bp, Homo sapiens
tattacatgtgtgtgtgttagaaatgaaaaataacataaatgtctcaaaatttgagtaggtgaaaaaactaggaagcatctataaattgaatccatcagcaataaaaaatatcaaatgatcgattcacaaaccattacagttgaactccaggcattatgctaagtgagagaaaccagtctcaaagatcaaaggaacacatctgtaagcagcactgtcaaccccaggtgtcagtggtttgggctgggctctctctgtctctctcctgaccagacccagatgttgagctctgccacttgcagatggaaaattgtactattttcaatcatgcactgaggtttgaattacttcacagactgaaccaaacaaacatgggctccattgaagagtgtctggcatttatttcaaccacaagagaactttccccagctctccctygtcctcggttctctcctgcaagccagcagccctgcagtgtagcctgcatctcccatgcatccacccgtctccttccaagggctttccaccacaccatccactgtttttgagagcactggcaggctttcaatttgtccacaatctgctgttactgaagttaggattttt

SEQ ID NO: 318527 - DNA, 245 bp, Homo sapiens
tgccccctctctcctgggacagagctcctaaacaaggttctgcaggtgtagacaaagttgagctgttttattcctcagcctaggagctgagctctcagtggagggtcgggcaggagcttcccaccttctcagcacttcggttattgtggggtggaacctctgccataggacagagctagaaaccagagacccagtgttcccagtggcactggacccgggrcagagcctccatccatgagtggggc

SEQ ID NO: 318528 - DNA, 609 bp, Homo sapiens
gtctgctgagagcagcacaggcctctcaagaaattccaaactggaatttcttcaatggaasaggaaaggaggctggctcagggctttataatgatttggtggtggggttgggggtaggggcacgtttctactcaggagaaggagcttgtgtgatttaaacctcacactggcatcagataagggagcttctacgatttcttactagatttcccatatgtgggggacaaggaagaagaagaataaaccttaattcatcagcagtgagcaccaaaataggacctgacactttattctccctagcagtttaagaaaatgagtgaaaaagagagataagagtccactatgtgtgaaaagcaaacagatctaaagacaataaaaatttttattatggtaagcacataataaaaagaaagagaagaaggaatgagacaggcaggggtgctcaatcaatgtcctgggtggggccttttcattatccacagtgatcagtttattctgaaggtctcaggtcagcttcctgcttcaaaatatcacaggcccttatagggtatataaaaattattataggatatccacagtttgtcatactttactaaagtagtctaataa

SEQ ID NO: 318529 - DNA, 609 bp, Homo sapiens
gtctgctgagagcagcacaggcctctcaagaaattccaaactggaatttcttcaatggaacaggaaaggaggctggctcagggctttataatgatttggtggtggggttgggggtaggggcacgtttctactcaggagaaggagcttgtgtgatttaaacctcacactggcatcagataagggagcttctacgatttcttactagatttcccatatgtgggggacaaggamgaagaagaataaaccttaattcatcagcagtgagcaccaaaataggacctgacactttattctccctagcagtttaagaaaatgagtgaaaaagagagataagagtccactatgtgtgaaaagcaaacagatctaaagacaataaaaatttttattatggtaagcacataataaaaagaaagagaagaaggaatgagacaggcaggggtgctcaatcaatgtcctgggtggggccttttcattatccacagtgatcagtttattctgaaggtctcaggtcagcttcctgcttcaaaatatcacaggcccttatagggtatataaaaattattataggatatccacagtttgtcatactttactaaagtagtctaataa

SEQ ID NO: 318530 - DNA, 566 bp, Homo sapiens
atgttaaatttaaaaattgtttgttttgatgtactcatctttatatgtatttctatttacttattttttttacttcttttartttatatttttacttatttctttatttatagacaagtctcattctgtagcctaggctggaatgcagtggtgcattcacagttcacttcagccttgagcaaacctcccacctcagcctcccaggtagctgggaccacaggtacgcaccaccacacctggttaatatcttattatttgtagagatggagtcttgctatgttgcccaggctggtctcaaactcctggctcaagcaatcctcctgccttggcatcccaaaatgctgggattacagacatgagccacagtgcccaacctatttatttatttatttaagacaaggtctcaccatgttgcccaggctggtcttgaactcctggtctcaagtgattctccaaccttggcctctcaaaatgttgggattacaggtatgacccaccatgcctggcctaaaaatagtattatatttttgtattatataattttcaattaggtaatatgaatattc

SEQ ID NO: 318531 - DNA, 471 bp, Homo sapiens
gctcccatttatagcaagttttcataattatcattcttagaaagcataatattttattgaactaacatgccatgaattgtgaatttttatgtggggagatgaacattgtcctagacgaagggccttctttccaagaagctaagagctgactagyaaaagggaattttcagaagggatattaggagaaaaatgaatgcctctactacacaagaatgacttctcacagaatttgtactgtggcattctggggtaaggttactgaacactccaacaccttccttccttctaccaccaatttttttgatgaacattacagttatcccattttttgttataaaataatatctcaataaaatctccataaagatttgccttgataatattttgcaaacctgaattaggactcatcatctaatctgaaacagactgtcccagaaaatacagaatataagaatatgatgtatgtgcaac

SEQ ID NO: 318532 - DNA, 566 bp, Homo sapiens
atgttaaatttaaaaattgtttgttttgatgtactcatctttatatgtatttctatttacttattttttttacttcttttagtttatatttttacttatttctttatttatagacaagtctcattctgtagcctaggctggaatrcagtggtgcattcacagttcacttcagccttgagcaaacctcccacctcagcctcccaggtagctgggaccacaggtacgcaccaccacacctggttaatatcttattatttgtagagatggagtcttgctatgttgcccaggctggtctcaaactcctggctcaagcaatcctcctgccttggcatcccaaaatgctgggattacagacatgagccacagtgcccaacctatttatttatttatttaagacaaggtctcaccatgttgcccaggctggtcttgaactcctggtctcaagtgattctccaaccttggcctctcaaaatgttgggattacaggtatgacccaccatgcctggcctaaaaatagtattatatttttgtattatataattttcaattaggtaatatgaatattc

SEQ ID NO: 318533 - DNA, 593 bp, Homo sapiens
tctgcatccgtcctgagcatcgatcttccaattccatcctcttctcttctgctgtgtctaagctgctgtgaagccacctgctgtaatttactgttttatatttaatattgtaccgtacatctgttctgtttccttcrtcataaacgcttcatttcacactcagcatctgggaacacaaggccttgtcagctgtcacctccttccattctctgtttccttcctcctctccccatgtttgctcatcatggccagtctcctgccatcctgaatgcttctgatggaaggtccaagatgtctcatgagcattgtgaagattctttgtaatgcgaccttgttccaggcaggaattctccctcacccacccctggaagccaagtatagggagattgccatgtttaatcaaagactgagctaacttaacactggctttggttttaaggtttctccaatcccccagggcacaggatttcagggagttcaggtgacagtctgggtgttacccttcaggaggttgtaaagaccatttcacatagtttacaccacagactatggaaactatatatatatatatctagtgctgtccctctagagaa

SEQ ID NO: 318534 - DNA, 593 bp, Homo sapiens
tctgcatccgtcctgagcatcgatcttccaattccatcctcttctcttctgctgtgtctaagctgctgtgaagccacctgctgtaatttactgttttatatttaatattgtaccgtacatctgttctgtttccttcatcataaacgcttcatttcacactcagcatctgggaacacaaggccttgtcagctgtcacctccttccattctctgtttccttcctcctctccccatgtttgctcatcatgkccagtctcctgccatcctgaatgcttctgatggaaggtccaagatgtctcatgagcattgtgaagattctttgtaatgcgaccttgttccaggcaggaattctccctcacccacccctggaagccaagtatagggagattgccatgtttaatcaaagactgagctaacttaacactggctttggttttaaggtttctccaatcccccagggcacaggatttcagggagttcaggtgacagtctgggtgttacccttcaggaggttgtaaagaccatttcacatagtttacaccacagactatggaaactatatatatatatatctagtgctgtccctctagagaa

SEQ ID NO: 318535 - DNA, 593 bp, Homo sapiens
tctgcatccgtcctgagcatcgatcttccaattccatcctcttctcttctgctgtgtctaagctgctgtgaagccacctgctgtaatttactgttttatatttaatattgtaccgtacatctgttctgtttccttcatcataaacgcttcatttcacactcagcatctgggaacacaaggccttgtcagctgtcacctccttccattctctgtttccttcctcctctccccatgtttgctcatcatggccagtctcctgccatcctgaatgcttctgatggaaggtccaagatgtctcatgagcattgtgaagattctttgtaatgcgaccttgttccaggcaggaattctccctcacccacccctggaagccaagtatagggagattgccatgtttaatcaaagactgagctaacttaacactggctttggttttaaggtttctccaatcccccagggcacaggatttcagggagttcaggtgacagtctgggtgttacccttcaggaggttgtaaagwccatttcacatagtttacaccacagactatggaaactatatatatatatatctagtgctgtccctctagagaa

SEQ ID NO: 318536 - DNA, 593 bp, Homo sapiens
tctgcatccgtcctgagcatcgatcttccaattccatcctcttctcttctgctgtgtctaagctgctgtgaagccacctgctgtaatttactgttttatatttaatattgtaccgtacatctgttctgtttccttcatcataaacgcttcatttcacactcagcatctgggaacacaaggccttgtcagctgtcacctccttccattctctgtttccttcctcctctccccatgtttgctcatcatggccagtctcctgccatcctgaatgcttctgatggaaggtccaagatgtctcatgagcattgtgaagattctttgtaatgcgaccttgttccaggcaggaattctccctcacccacccctggaagccaagtatagggagattgccatgtttaatcaaagactgagctaacttaacactggctttggttttaaggtttctccaatcccccagggcacaggatttcagggagttcaggtgacagtctgggtgttacccttcaggaggttgtaaagaccatttcacatagtttrcaccacagactatggaaactatatatatatatatctagtgctgtccctctagagaa

SEQ ID NO: 318537 - DNA, 529 bp, Homo sapiens
acaaccagaaatgcaccaatctcccaacccaagtgctattatgtaaagttaagaacacttaaatgctgayatgaagtcaataaattttatgtcacatgataaaggaaaaaagaaataaaatgaaggaattttcttagtacaagtgtgtacatgcacaaacatgtttttaacaaaagaagaaggaaatactgatgacaattacagtcctcatttctgcaacagatcacgtggttgtagctggtattgatgactacttcttctactaccgattctgtattccctttgccttcagcaagcatcacagcaggtagagttttttctcctagtggagtgatgcaaaccttcattcctgaagggtctgggccatttgtagtcctgcctggattgggctgttgtagtttcccgttgaccttaatgacagggcagggtaatgttaagagatgccctaatggatctcctgtattccatacatattcttccttacctccattgtggagtaatagactgattgcatcttgatagttcaggt

SEQ ID NO: 318538 - DNA, 529 bp, Homo sapiens
acaaccagaaatgcaccaatctcccaacccaagtgctattatgtaaagttaagaacacttaaatgctgatatgaagtcaataaattttatgtcacatgataaaggaaaaaagaaataaaatgaaggaattttcttagtacaagtgtgtacatgcacaaamatgtttttaacaaaagaagaaggaaatactgatgacaattacagtcctcatttctgcaacagatcacgtggttgtagctggtattgatgactacttcttctactaccgattctgtattccctttgccttcagcaagcatcacagcaggtagagttttttctcctagtggagtgatgcaaaccttcattcctgaagggtctgggccatttgtagtcctgcctggattgggctgttgtagtttcccgttgaccttaatgacagggcagggtaatgttaagagatgccctaatggatctcctgtattccatacatattcttccttacctccattgtggagtaatagactgattgcatcttgatagttcaggt

SEQ ID NO: 318539 - DNA, 529 bp, Homo sapiens
acaaccagaaatgcaccaatctcccaacccaagtgctattatgtaaagttaagaacacttaaatgctgatatgaagtcaataaattttatgtcacatgataaaggaaaaaagaaataaaatgaaggaattttcttagtacaagtgtgtacatgcacaaacatgtttttaacaaaagaagaaggaaatactgatgacaattacagtcctcatttctgcaacagatcacgtggttgtagctggtattgatgactacttcttctactaccsattctgtattccctttgccttcagcaagcatcacagcaggtagagttttttctcctagtggagtgatgcaaaccttcattcctgaagggtctgggccatttgtagtcctgcctggattgggctgttgtagtttcccgttgaccttaatgacagggcagggtaatgttaagagatgccctaatggatctcctgtattccatacatattcttccttacctccattgtggagtaatagactgattgcatcttgatagttcaggt

SEQ ID NO: 318540 - DNA, 494 bp, Homo sapiens
attacaggcatgcaccaccacacccggctaattctgtattttyagtagacacagggtttctccatgttggtgaggctggtctcgaactcccaacctcaggtgatccgcccacctcagcctctcaaagtgctgggattacaggcatgagccaccatgcccggcctgcagggccatctcagagtatggcaaagaaacatgttttggggtaaaatattttgattttcttatttgtctcataatgttatgccagagtcagtttggaaagtaaatcatgatatataggtttaaataaaacctatctgatgagaatttatgatttgtagagcatgcctccccagactctttacataggaatttgggcaagataaaaaaaaaaccagagtttagtcctcaccatctaagaccagctcagcttggacttcgctgttcatgtcactatcagcattttagtcaaaaccactcaataagtctctaggaagttccaaactttccca

SEQ ID NO: 318541 - DNA, 615 bp, Homo sapiens
gttgtcatgtataatatcttgcagaggttctttgcatttcttgaatttgaatgttggcctctctggtgaggttggagaaattttcatggaggatagcctgaaatgtttttcaagttgctttgtttctctttctctttttaagggataccaatgtgtcatagrtctgatctttttacataatcacccatttctctgaggttttatgccttcttttttgttctcttttcctttatttttgtctgactgagttaattcagagaatcagtttttaagctctgtgattctttcctcagcttggtctattctgcggttaatacttgtagttgtattctgaaattcttgaagtgagttttttagctctatcaaatcattttgattctttcttaaaatggccacttcatctttcagcttctgtatcattttactttatttcttagctcccttggattgggtttcaacattctcctgaatctcagttatcttctttcctatccatattctgaattctatgtctgtcatttcagccatttcagtcaggttaagaaccattgctgggaaaccagtgtggtcgtttggaggtaagaagacactctggattttagagttgcagagttt

SEQ ID NO: 318542 - DNA, 607 bp, Homo sapiens
caaacttgatttcctgaaagcaaaggaccactgcatagctcagaattctatattcctaggatctctacctcaaaaccattgcgtcttcttggtctgagatttaccccagcctctgaaatctccctgaatrctagaacagagagggaagcccaagaataacagggcatgctatttgacacagtcagggctcaagaaacagactttgaaaaatgtgaggaaatagccatggaaataggatgatggagcaccaaatgtattgaatgatatccacaatgaggtggatggctttgcaaggttgagtcatctagatgattcattcccaggaccttcttctcaggcctcctctgaacttttcactgaaatctgaggcatgtacactactcatgctccagctccctttgaagagacattattactcaaggaaaggcagcttctgtgcttccagagccagctttctgtggtcacccagcaatgttatctcaagagaaagacacagaaatccatgtcctttgatagaaaatcctcctttgctcaagggcatgagttactgaataagtccaaggagggtgacacttttcattcttgtttgatgtctgtcattctcaga

SEQ ID NO: 318543 - DNA, 607 bp, Homo sapiens
caaacttgatttcctgaaagcaaaggaccactgcatagctcagaattctatattcctaggatctctacctcaaaaccattgcgtcttcttggtctgagatttaccccagcctctgaaatctccctgaatactagaayagagagggaagcccaagaataacagggcatgctatttgacacagtcagggctcaagaaacagactttgaaaaatgtgaggaaatagccatggaaataggatgatggagcaccaaatgtattgaatgatatccacaatgaggtggatggctttgcaaggttgagtcatctagatgattcattcccaggaccttcttctcaggcctcctctgaacttttcactgaaatctgaggcatgtacactactcatgctccagctccctttgaagagacattattactcaaggaaaggcagcttctgtgcttccagagccagctttctgtggtcacccagcaatgttatctcaagagaaagacacagaaatccatgtcctttgatagaaaatcctcctttgctcaagggcatgagttactgaataagtccaaggagggtgacacttttcattcttgtttgatgtctgtcattctcaga

SEQ ID NO: 318544 - DNA, 427 bp, Homo sapiens
tgagctacttgtcagtgttctaaagctaaattgcaaattcagagtttctctaattcatgaggttctcacaatagtagtattgcatgagtgagaacaatagttgtgatcctgtattacatatgaggaatccaagcacataaaggttaggtgacttaccactgtggcacagcaaactggatctggtgctcatcctctgagtcacagtccagggctctgtactctctactgtcttcygcttacctccaactgatgacagcttaccttgctatggagttaaatgggcaaaaacgaggtaaacatcttaaaaatacacacacgttatctatttctgagaatattttcacaaatttacagagattttgcataaaattataagtgcccccagacagaaggataaagtacattgataaaaatggactataatgtt

SEQ ID NO: 318545 - DNA, 427 bp, Homo sapiens
tgagctacttgtcagtgttctaaagctaaattgcaaattcagagtttctctaattcatgaggttctcacaatagtagtattgcatgagtgagaacaatagttgtgatcctgtattacatatgaggaatccaagcacataaaggttaggtgacttaccactgtggcacagcaaactggatctggtgctcatcctctgagtcacagtccagggctctgtactctctactgtcttctgcttacctccaactgatgacagcttaccttgctayggagttaaatgggcaaaaacgaggtaaacatcttaaaaatacacacacgttatctatttctgagaatattttcacaaatttacagagattttgcataaaattataagtgcccccagacagaaggataaagtacattgataaaaatggactataatgtt

SEQ ID NO: 318546 - DNA, 638 bp, Homo sapiens
acacacacgttatctatttctgagaatattttcacaaatttacagagattttgcataaaattataagtgcccccaracagaaggataaagtacattgataaaaatggactataatgttctcattaagaatcatgtttcaaagaacacgtagtgctatggggaaagacacatgatatattaaacaaaagtattaacaaaactgcatgcactacgattccaattttgaaaataattacatagatatctaatatacgaaatacagagaaacagaggaggctagaaatggtcttagaaatggtattgtggatgatttaaacttcctatactttcctgtgttattatttttttctaaaataagcacatgttgttttcataatattaaaataaattctcttttgtaaatggaaaccttagtgtagactaattagtttaattctctactttttgttggcatgacatgagcttgagagaaagtataaatgtctaaatctggaaaaacacagcaaaaaaaaaaaaggtaaaaagtcactgcaaacaatttcagagaccatctgttagacaaatgggccaaagagggcttctttatatagccccctagggtgtttacttctttacagtaagctgaatcctgttaactc

SEQ ID NO: 318547 - DNA, 517 bp, Homo sapiens
gtagtgctatggggaaagacacatgatatattaaacaaaagtattaacaaaactgcatgcactacgattccaattttgaaaataattacatagatatctaatatacgaaatacagagaaacagaggaggctagaaatggtcttagaaatggtattgtggatgatttaaacttcctatactttcctgtgttattatttttttctaaaataagcacatgttgttttcataatattaaaataaattctcttttgtaawtggaaaccttagtgtagactaattagtttaattctctactttttgttggcatgacatgagcttgagagaaagtataaatgtctaaatctggaaaaacacagcaaaaaaaaaaaaggtaaaaagtcactgcaaacaatttcagagaccatctgttagacaaatgggccaaagagggcttctttatatagccccctagggtgtttacttctttacagtaagctgaatcctgttaactcaaatgccatagataagataaattctg

SEQ ID NO: 318548 - DNA, 627 bp, Homo sapiens
attttgaaaataattacatagatatctaatatacgaaatacagagaaacagaggaggctagaaatggtcttagaaatggtattgtggatgatttaaacttcctatactttcctgtgttattatttttttctaaaataagcacatgttgttttcataatattaaaataaattctcttttgtaaatggaaacyttagtgtagactaattagtttaattctctactttttgttggcatgacatgagcttgagagaaagtataaatgtctaaatctggaaaaacacagcaaaaaaaaaaaaggtaaaaagtcactgcaaacaatttcagagaccatctgttagacaaatgggccaaagagggcttctttatatagccccctagggtgtttacttctttacagtaagctgaatcctgttaactcaaatgccatagataagataaattctggggctgtaaagaccccaagttgctgctgtactttggagctctctgacacagagtccacactgggctactcagcaacatcacctagacaagcaaatctctctcttatcgccctctcccctgagcgctctctagtcctcctccccttctggatagaggcctgatgccatagcctctgaaaggta

SEQ ID NO: 318549 - DNA, 602 bp, Homo sapiens
catgaaaagctatctaagcagctcccccaggaaaactgccacctcagggtcagctcctcaagttttggctcagaaagtgaaagacttccacacacattgcttcaggggraaaaaaaaaattagcaatttcttccttaatagagttggagtacttgtagtcctgtggcataaccctggggctttgctgaccacaattccagtatttcatcccccctccctttgtctgctgtcaactagtgttccttagaaaatattattattatcaatgttaataaaacttcacgttctaattagccttaatattttccattacagttttttatgttgttgaaatcaacctgaatggtttttttcttgaaatatcttagatcgtatcatggaatttcaagattgaaagaaatttgcatctgatgcttagataccctctcccactttcccaacctatatctgacaaaagcaactgatagaaagtattgttcttcagctcgttccatcattgcatatatttctctgttaaaaagtaagtctccatgatgaattaaaatgtgtcaccctatagaattatagtaattctgtactttagagattaaatgggacaaatt

SEQ ID NO: 318550 - DNA, 602 bp, Homo sapiens
catgaaaagctatctaagcagctcccccaggaaaactgccacctcagggtcagctcctcaagttttggctcagaaagtgaaagacttccacacacattgcttcaggggaaaaaaaaaaattagcaatttmttccttaatagagttggagtacttgtagtcctgtggcataaccctggggctttgctgaccacaattccagtatttcatcccccctccctttgtctgctgtcaactagtgttccttagaaaatattattattatcaatgttaataaaacttcacgttctaattagccttaatattttccattacagttttttatgttgttgaaatcaacctgaatggtttttttcttgaaatatcttagatcgtatcatggaatttcaagattgaaagaaatttgcatctgatgcttagataccctctcccactttcccaacctatatctgacaaaagcaactgatagaaagtattgttcttcagctcgttccatcattgcatatatttctctgttaaaaagtaagtctccatgatgaattaaaatgtgtcaccctatagaattatagtaattctgtactttagagattaaatgggacaaatt

SEQ ID NO: 318551 - DNA, 602 bp, Homo sapiens
catgaaaagctatctaagcagctcccccaggaaaactgccacctcagggtcagctcctcaagttttggctcagaaagtgaaagacttccacacacattgcttcaggggaaaaaaaaaaattagcaatttcttccttaatagagttggagtacttgtagtcctgtggcataaccctgggrctttgctgaccacaattccagtatttcatcccccctccctttgtctgctgtcaactagtgttccttagaaaatattattattatcaatgttaataaaacttcacgttctaattagccttaatattttccattacagttttttatgttgttgaaatcaacctgaatggtttttttcttgaaatatcttagatcgtatcatggaatttcaagattgaaagaaatttgcatctgatgcttagataccctctcccactttcccaacctatatctgacaaaagcaactgatagaaagtattgttcttcagctcgttccatcattgcatatatttctctgttaaaaagtaagtctccatgatgaattaaaatgtgtcaccctatagaattatagtaattctgtactttagagattaaatgggacaaatt

SEQ ID NO: 318552 - DNA, 602 bp, Homo sapiens
catgaaaagctatctaagcagctcccccaggaaaactgccacctcagggtcagctcctcaagttttggctcagaaagtgaaagacttccacacacattgcttcaggggaaaaaaaaaaattagcaatttcttccttaatagagttggagtacttgtagtcctgtggcataaccctggggctttgctgaccacaaktccagtatttcatcccccctccctttgtctgctgtcaactagtgttccttagaaaatattattattatcaatgttaataaaacttcacgttctaattagccttaatattttccattacagttttttatgttgttgaaatcaacctgaatggtttttttcttgaaatatcttagatcgtatcatggaatttcaagattgaaagaaatttgcatctgatgcttagataccctctcccactttcccaacctatatctgacaaaagcaactgatagaaagtattgttcttcagctcgttccatcattgcatatatttctctgttaaaaagtaagtctccatgatgaattaaaatgtgtcaccctatagaattatagtaattctgtactttagagattaaatgggacaaatt

SEQ ID NO: 318553 - DNA, 546 bp, Homo sapiens
accacaacagtcacctaaagaaccaagatctcaagaaataatgttttaaatgtttctgtagtactgtaaggtgaatatagttaactataatttattgtgyatttttacaaagctagaagagaggattttgaatgttcacaagacaaagaagtgctaaatgcatgaggcgatgtgctaattaccttgatttgatcatcccgtattgtctatgtgtattggactagtactctatatctcataaatataattattacatgtcaactaaaaataaaaggaaaaatatatttttaaaatgttaactcaaaaatcttagcttaatagttgtaaagaaagaagactctcccatcagagtgaagtgggagggatcttgcttcaggaaatgaagctgcatcagcataacaggactttgacctgaagtcctagctgctggctgaagcagccactgaggagcctttgacagcaaaatctgtaaaaaacattgcgtgataggcatacctaatcgttaaagataaaaacaatacataggtacacgaagacattcgttgt

SEQ ID NO: 318554 - DNA, 546 bp, Homo sapiens
accacaacagtcacctaaagaaccaagatctcaagaaataatgttttaaatgtttctgtagtactgtaaggtgaatatagttaactataatttattgtgcatttttacaaagctagaagagaggattttgaatgttcacaagacaaagaagtgctaaatgcatgaggcgatgtgctaattaccttgatttgatcaycccgtattgtctatgtgtattggactagtactctatatctcataaatataattattacatgtcaactaaaaataaaaggaaaaatatatttttaaaatgttaactcaaaaatcttagcttaatagttgtaaagaaagaagactctcccatcagagtgaagtgggagggatcttgcttcaggaaatgaagctgcatcagcataacaggactttgacctgaagtcctagctgctggctgaagcagccactgaggagcctttgacagcaaaatctgtaaaaaacattgcgtgataggcatacctaatcgttaaagataaaaacaatacataggtacacgaagacattcgttgt

SEQ ID NO: 318555 - DNA, 546 bp, Homo sapiens
accacaacagtcacctaaagaaccaagatctcaagaaataatgttttaaatgtttctgtagtactgtaaggtgaatatagttaactataatttattgtgcatttttacaaagctagaagagaggattttgaatgttcacaagacaaagaagtgctaaatgcatgaggcgatgtgctaattaccttgatttgatcatcccrtattgtctatgtgtattggactagtactctatatctcataaatataattattacatgtcaactaaaaataaaaggaaaaatatatttttaaaatgttaactcaaaaatcttagcttaatagttgtaaagaaagaagactctcccatcagagtgaagtgggagggatcttgcttcaggaaatgaagctgcatcagcataacaggactttgacctgaagtcctagctgctggctgaagcagccactgaggagcctttgacagcaaaatctgtaaaaaacattgcgtgataggcatacctaatcgttaaagataaaaacaatacataggtacacgaagacattcgttgt

SEQ ID NO: 318556 - DNA, 531 bp, Homo sapiens
gagaggattttgaatgttcacaagacaaagaagtgctaaatgcatgaggcgatgtgctaattaccttgatttgatcatcccgtattgtctatgtgtattggactagtactctatatctcataaatataattattacatgtcaactaaaaataaaaggaaaaatatatttttaaaatgttaactcaaaaatcttagcttaatagttgtaaagaaagwagactctcccatcagagtgaagtgggagggatcttgcttcaggaaatgaagctgcatcagcataacaggactttgacctgaagtcctagctgctggctgaagcagccactgaggagcctttgacagcaaaatctgtaaaaaacattgcgtgataggcatacctaatcgttaaagataaaaacaatacataggtacacgaagacattcgttgtatctcatattttctataaatgttctaaggaaaagtacttgttgcctagagctcatttaagaaacaaggttctcttcagtgcagcatgtgctgttttagggacc

SEQ ID NO: 318557 - DNA, 531 bp, Homo sapiens
gagaggattttgaatgttcacaagacaaagaagtgctaaatgcatgaggcgatgtgctaattaccttgatttgatcatcccgtattgtctatgtgtattggactagtactctatatctcataaatataattattacatgtcaactaaaaataaaaggaaaaatatatttttaaaatgttaactcaaaaatcttagcttaatagttgtaaagaaagaagactctcccatcagagtgaagtgggagggatcttgcttcaggaaatgaagctgcatcagcataacaggactttgacctgaagtcctagctgctggctgaagcagccactgaggagcctttgacagcaaaatctgtaaaaaacattgcgtgataggcatacctaatcgttaaagataaaaacaatacataggtacacgaagacattcgttgtatctcatattttctataaatgttctaaggaaawgtacttgttgcctagagctcatttaagaaacaaggttctcttcagtgcagcatgtgctgttttagggacc

SEQ ID NO: 318558 - DNA, 551 bp, Homo sapiens
agtattagtaacaatttgatgtaaatgaactgtgccattaataatttttctatatttttcatatttgtccattttttgtttcattttctaaatagttaaattgtgcaaaattttctctacagtwtaaatgtctaccaacaactcagagagaaaatgtcctacagtggcatgtaacttcaaatgatccagacctttacataagtgctaaaaagtgttaatggtgtcatttctgggaaggaggtgccctagaagagggaaacagactggattctcaggcctttaaggttgtcttcttgagacagtctcagtgtcctaactatcagcaccgtgtatggagccgagacccaatttgcatatttcaacaagcttaattttctcaacagttatggctttcactttcccccatcttcttccagccatctctatttatacacccaagaaactttcagattttccttagtttcctctcataacacaaacgtgcctgagatgttatcaggcacatttatcattcacatgtctcttgaaggcgttcagaagaaatgaatggt

SEQ ID NO: 318559 - DNA, 527 bp, Homo sapiens
aagtgataaaaatagaataaaaagtagaattcaaaattagtcataatatgattcaaagtagaaaaaatagtaatgcagcaaagtattagtaacaatttgatgtaaatgaactgtgccattaataatttttctatatttttcatatttgtccattttttgtttcattttctaaatagttaaattgtgcaaaattttctctacagtataaatrtctaccaacaactcagagagaaaatgtcctacagtggcatgtaacttcaaatgatccagacctttacataagtgctaaaaagtgttaatggtgtcatttctgggaaggaggtgccctagaagagggaaacagactggattctcaggcctttaaggttgtcttcttgagacagtctcagtgtcctaactatcagcaccgtgtatggagccgagacccaatttgcatatttcaacaagcttaattttctcaacagttatggctttcactttcccccatcttcttccagccatctctatttatacacccaagaaacttt

SEQ ID NO: 318560 - DNA, 537 bp, Homo sapiens
taactatcagcaccgtgtatggagccgagacccaatttgcatatttcaacaagcttaattttctcaacagttatggctttcactttcccccatcttcttccagccatctctatttatacacccaagaaactttcagattttccttastttcctctcataacacaaacgtgcctgagatgttatcaggcacatttatcattcacatgtctcttgaaggcgttcagaagaaatgaatggtatcctttctcctggaactgcatcccaccctggaaaccaaatgctgtttacattactcttataggatttttccagacatatgataaaagaaaaaacttcagctgaattaaatttaaaggagttgaattgagcaatgaatgattcacaaatcaggcagcccccagaatcacagcagattcacagaggctccagcacagccatgtggtggtaaatttatagacaaacaaaagggaaatgacatacagaaatcagcagtgagttacaggaacagctgcattggttacagattggcatttgcct

SEQ ID NO: 318561 - DNA, 537 bp, Homo sapiens
taactatcagcaccgtgtatggagccgagacccaatttgcatatttcaacaagcttaattttctcaacagttatggctttcactttcccccatcttcttccagccatctctatttatacacccaagaaactttcagattttccttagtttcctctcataacacaaacgtgcctgagatgttatcaggcayatttatcattcacatgtctcttgaaggcgttcagaagaaatgaatggtatcctttctcctggaactgcatcccaccctggaaaccaaatgctgtttacattactcttataggatttttccagacatatgataaaagaaaaaacttcagctgaattaaatttaaaggagttgaattgagcaatgaatgattcacaaatcaggcagcccccagaatcacagcagattcacagaggctccagcacagccatgtggtggtaaatttatagacaaacaaaagggaaatgacatacagaaatcagcagtgagttacaggaacagctgcattggttacagattggcatttgcct

SEQ ID NO: 318562 - DNA, 496 bp, Homo sapiens
tctagtgatgacctagttaaaatgtccaaggagacaagttccggaacaaaaaagcctcagaaatatctctacctcacccacataatgatgagaaaaagtcagaattgggagtgattcttaaaaatcagtgtttctctctcaaagtcaggttaaggagtagacattgcctgatttctattaaatcctactaagattctgccagatagtagaaaacattgtaatacaaattgaaaaacatctttgttcctgtcatttattgatttatataacatgttatttgttgagaaccatggtgcactgggatgtgtggtactaatcagggatacatggtgacctaaactagacctggaacactcttgaggagcttacaatctagtataaatcctaaacactgaataaaatagccaggtaaataaatgccaaattaatcattcagtaagtgttataaagraaaggtacattaaggcctaacatgattcaatggaggtggcgcagg

SEQ ID NO: 318563 - DNA, 469 bp, Homo sapiens
cttgagttgagaccctttaaaatgaataacatactttaaataaagggagatgagggtgaaaagtggatttcaggcacagagaatagaatatgacatgatttcatctccctttttgaaacagtaactgtggccacggtagtgaagagtttagagaaggacaagggtaaatgtgaaactaattatgaggcaagtatatttgtttttgtatttttgtgtatttttgcaagacaggatgaattttattctgtttttaaaataagtaaatttatctttgttctttggaagacctctagtaaagaataaatgtcatgacatgttaatcctkaaaattgttatagttgctcaaaaaagaaactcaaaaactaaaattggatcctatcaacccagataaaacactgaaaattatgaaactttcactcaaaatacagtgatgactgcagaaaagcagcaactatttaatcatgcccac

SEQ ID NO: 318564 - DNA, 469 bp, Homo sapiens
cttgagttgagaccctttaaaatgaataacatactttaaataaagggagatgagggtgaaaagtggatttcaggcacagagaatagaatatgacatgatttcatctccctttttgaaacagtaactgtggccacggtagtgaagagtttagagaaggacaagggtaaatgtgaaactaattatgaggcaagtatatttgtttttgtatttttgtgtatttttgcaagacaggatgaattttattctgtttttaaaataagtaaatttatctttgttctttggaagacctctagtaaagaataaatgtcatgacatgttaatccttaaaattgttatagttgctcaaaaaagaaactcaaraactaaaattggatcctatcaacccagataaaacactgaaaattatgaaactttcactcaaaatacagtgatgactgcagaaaagcagcaactatttaatcatgcccac

SEQ ID NO: 318565 - DNA, 554 bp, Homo sapiens
aattgaaggaaatgcatattattacatatttgggaagtaaaatgtatttaaagattggaaatggaggtgaacggttagaaagatggtcagataccttgccatggcgcctcaccctaatacttcactgcatgccagcctgacttccagcattcacccctgcatttccttacctgagggctttctctgatcacagaagccgcttttgctgtccctgctgcaggttgggcatgctgaggaatcaatgccgctaggagacagtccataactaatgactatcagaaactgttgtacgaataccctttatctctcagcatgtttctgagatgagttatctacactggatctcagagttattccaagtttaatccacagttatccattctggtaactgcttcatagttcactctttataagggtctttgccccacttcccagttctcctaccagagattmtgatacctaccaaatgaatcacctgcaggtgaatcttagtctctggatctgctttcagggtagcactgtagtcagatgaatgggaatccattctctcagaa

SEQ ID NO: 318566 - DNA, 590 bp, Homo sapiens
tgtagcagttgtcatctggaactctgaggatgcaatttgtattaacaatttgatatactcattggcaaataagtaataaccaaagctttggagaagaaaatgacctagacaatagtatagcattgaaagatgtgaaggcctggaactcagcctcacagagcttcagaatttaatggccaaataaaggaaaagaagcccacaaatcaaatagaggagttgtagccagaaatgtgggagttttctgggcaatcaggaggcaaagtagaatagagttgacactgaagccacaaaggaaaaatgtgttggaacagcagtgctgaattctgctgagaagagatacatcttgaaaaaaaaatgtccataagacttagacacatgaatgttattggtgatttctgcaatggccattgcagggttaygatggggaaggaaccatatttaaatatattgaatgtgaggcaggcatgaagaagagatgaggctttcttgctgtgtgttaagcatgccagccatccccctgccttgtggcgcctatacataccatctcctctgcctgtaatgctcttttgctagatatttatatttcttgc

SEQ ID NO: 318567 - DNA, 590 bp, Homo sapiens
tgtagcagttgtcatctggaactctgaggatgcaatttgtattaacaatttgatatactcattggcaaataagtaataaccaaagctttggagaagaaaatgacctagacaatagtatagcattgaaagatgtgaaggcctggaactcagcctcacagagcttcagaatttaatggccaaataaaggaaaagaagcccacaaatcaaatagaggagttgtagccagaaatgtgggagttttctgggcaatcaggaggcaaagtagaatagagttgacactgaagccacaaaggaaaaatgtgttggaacagcagtgctgaattctgctgagaagagatacatcttgaaaaaaaaatgtccataagacttagacacatgaatgttattggtgatttctgcaatggccattgcagggttatgatggggarggaaccatatttaaatatattgaatgtgaggcaggcatgaagaagagatgaggctttcttgctgtgtgttaagcatgccagccatccccctgccttgtggcgcctatacataccatctcctctgcctgtaatgctcttttgctagatatttatatttcttgc

SEQ ID NO: 318568 - DNA, 591 bp, Homo sapiens
tagcctgttaggtcaaagccagtattaaaactttgttccttttaactttctttgggccctcagtctgccagaatatgaatcctgtgctgacattcactctctttccaacatggcttgtcattcagcaatataccttttaaactccaattttccctaaaagaataaaagtcagtaacaattacaatgatgataaactggaagagagagttgtacaaggctagcttagatgataaggatcaattagattcacactgcatgaaaagcagaattccagacataaatttacaaagcactttcttatgaattatctcattttttctctctaaaaacaactcaggcaaagagtttatccycactttacagataaaccaataactcagagaaataaagtgaaataactggttatggaaatccagcagaaaagttttctaaaatcataaagttcagttacgcatgtacaaaatcttacgtgtttgcattacttggtttaaagaataacattttagtttagatacacttccaaatttaagtatcacaaatattctgataccaataaaaaccttattaaacattcttatgcattatcaatac

SEQ ID NO: 318569 - DNA, 587 bp, Homo sapiens
gttttatccttatattctttttgccaatatgttttcccacatttctctacaataaacttctacacctttataatattgagagtaaatayttcttaagaaaaattaaccttaagagagagctcaaaaaaataaataattcacaaaaaactgctgtgaaggctatgcatggaaagggcagaagggagatggagggactgcagagacctgtgggctgagtctgagcctcaaggctttttcagcatgaaactcagcaaagacaggtgttaaaaaggcctgcctcccaccgcccctgctgttcactaagcttaggcaatcaaagtgtaccagtgttttttcactgcccagcatatactgatttaaggactcaacactctgacttgagaaaacctaaaacatgaagttatctcaaaggtgggtgagattctaaggaggctcaaatatatagtcctcaattaattctcacctcaacttagttacaatctgatacaacatattaggagacaggaacagcacagtggtaaaaatcaaacctcacctcaaaagatcgtaaattattgctctcagattagtattaactgacacaatat

SEQ ID NO: 318570 - DNA, 587 bp, Homo sapiens
gttttatccttatattctttttgccaatatgttttcccacatttctctacaataaacttctacacctttataatattgagagtaaatacttcttaagaaaaattawccttaagagagagctcaaaaaaataaataattcacaaaaaactgctgtgaaggctatgcatggaaagggcagaagggagatggagggactgcagagacctgtgggctgagtctgagcctcaaggctttttcagcatgaaactcagcaaagacaggtgttaaaaaggcctgcctcccaccgcccctgctgttcactaagcttaggcaatcaaagtgtaccagtgttttttcactgcccagcatatactgatttaaggactcaacactctgacttgagaaaacctaaaacatgaagttatctcaaaggtgggtgagattctaaggaggctcaaatatatagtcctcaattaattctcacctcaacttagttacaatctgatacaacatattaggagacaggaacagcacagtggtaaaaatcaaacctcacctcaaaagatcgtaaattattgctctcagattagtattaactgacacaatat

SEQ ID NO: 318571 - DNA, 586 bp, Homo sapiens
tttgggccctcagtctgccagaatatgaatcctgtgctgacattcactctctttccaacatggcttgtcattcagcaatataccttttaaactccaattttccctaaaagaataaaagtcagtaacaattacaatgatgataaactggaagagagagttgtacaaggctagcttagatgataaggatcaattagattcacactgcatgaaaagcagaattccagacataaatttacaaagcactttcttatgaattatctcattttttctctctaaaaacaactcaggcaaagagtttatccccactttacagataaaccaataactcagagaaataaagtgaaataactggttatggaaatccagcagaaaagttttctaaaatcataaagttcagttackcatgtacaaaatcttacgtgtttgcattacttggtttaaagaataacattttagtttagatacacttccaaatttaagtatcacaaatattctgataccaataaaaaccttattaaacattcttatgcattatcaataccaatttggttttagttttaaataaaaggaatcctatttcttcctt

SEQ ID NO: 318572 - DNA, 584 bp, Homo sapiens
ttttatccttatattctttttgccaatatgttttcccacatttctctacaataaacttctacacctttataatattgagagtaaatacttcttaagaaaaattaaccttaagagagagctcaaaaaaataaataattcacaaaaaactgctgtgaaggctatgcatggaaagggcagaagggagatggagggastgcagagacctgtgggctgagtctgagcctcaaggctttttcagcatgaaactcagcaaagacaggtgttaaaaaggcctgcctcccaccgcccctgctgttcactaagcttaggcaatcaaagtgtaccagtgttttttcactgcccagcatatactgatttaaggactcaacactctgacttgagaaaacctaaaacatgaagttatctcaaaggtgggtgagattctaaggaggctcaaatatatagtcctcaattaattctcacctcaacttagttacaatctgatacaacatattaggagacaggaacagcacagtggtaaaaatcaaacctcacctcaaaagatcgtaaattattgctctcagattagtattaactgacacaat

SEQ ID NO: 318573 - DNA, 586 bp, Homo sapiens
tttgggccctcagtctgccagaatatgaatcctgtgctgacattcactctctttccaacatggcttgtcattcagcaatataccttttaaactccaattttccctaaaagaataaaagtcagtaacaattacaatgatgataaactggaagagagagttgtacaaggctagcttagatgataaggatcaattagattcacactgcatgaaaagcagaattccagacataaatttacaaagcactttcttatgaattatctcattttttctctctaaaaacaactcaggcaaagagtttatccccactttacagataaaccaataactcagagaaataaagtgaaataactggttatggaaatccagcagaaaagttttctaaaatcataaagttcagttacgcatgwacaaaatcttacgtgtttgcattacttggtttaaagaataacattttagtttagatacacttccaaatttaagtatcacaaatattctgataccaataaaaaccttattaaacattcttatgcattatcaataccaatttggttttagttttaaataaaaggaatcctatttcttcctt

SEQ ID NO: 318574 - DNA, 587 bp, Homo sapiens
gttttatccttatattctttttgccaatatgttttcccacatttctctacaataaacttctacacctttataatattgagagtaaatacttcttaagaaaaattaaccttaagagagagctcaaaaaaataaataattcacaaaaaactgctgtgaaggctatgcatggaaagggcagaagggagatggagggactgcagagacctgtgggctgagtctgagcctcaaggctttttcagcatgaaactcagcaaagacaggtgttaaaaaggcctgcctcccaccgcccctgctgktcactaagcttaggcaatcaaagtgtaccagtgttttttcactgcccagcatatactgatttaaggactcaacactctgacttgagaaaacctaaaacatgaagttatctcaaaggtgggtgagattctaaggaggctcaaatatatagtcctcaattaattctcacctcaacttagttacaatctgatacaacatattaggagacaggaacagcacagtggtaaaaatcaaacctcacctcaaaagatcgtaaattattgctctcagattagtattaactgacacaatat

SEQ ID NO: 318575 - DNA, 545 bp, Homo sapiens
tttgctctaaattgctcccagcatcagtatgtggaaggtggacagtgtgtgtgaacttcaaagcccccgcagggcttcagttggcttgaataaaatgttactggttatcctgccaccttgtggctatgggccaacatgccagggtgtggaggaggaagggaggaaattaatgaatcacagagttgcctgactgaagaaggaaagctcagaaacacatcctcttctctcttccctatagatgtcaacttgcccatcacttgattagctaaaagtgaatagggcttaaagttcagtccttgagtgagattttgcttatatagccctcctaggacttttgtcctatcagagtagcttgttgcacagtgtgctccttgtgatcaacggttagttaatcttgkctctccaaaatctaaagtttaaatccttattcattaaatcagactgtttatcaagtatagtgctttactaacgagattatttcagaaataagcgaacaaaacaataagacgtatgctgtttgttttttgagacagggtcttgctctg

SEQ ID NO: 318576 - DNA, 615 bp, Homo sapiens
tgtctgtttgtttgttttattttgcagagatggaggtctccccaggttgtccaggctggtctcaaactcctgggctcaagtgaacctcccgccttggcttctcaaagtgctgrgattatgggcgtgagccactacacctgcccaatattgttgatcagagtaaagaaatgacataaacacccagtaacagttagaagccgtattcagattagctataattttcactagaaccatcccaatctcttgaaagataaaacatcaaattaaatgtagccaaatctaattgcttcacctctgatttttttttaatcacttgaaaagggtaatggttccctcacattttgtatataaaatctactggctaggggaaggctcagaaacttgaatgttaaataggatcccaggtgattcttacacacactgaagtataaaggtcactggaccattctagtggccatgggtcccctctggttggcctgtagttgaaatctatgggaacaactttcaaactaccacatctgaggaatcagtggaggttaggaggttacttttagaaggtgattgggaatgtactcgaatttgagatttgttaaagttcattatagttatcacata

SEQ ID NO: 318577 - DNA, 615 bp, Homo sapiens
tgtctgtttgtttgttttattttgcagagatggaggtctccccaggttgtccaggctggtctcaaactcctgggctcaagtgaacctcccgccttggcttctcaaagtgctgagattatgggcgtgagccactacacctgcccaatattgttgatcagagtaaagaaawgacataaacacccagtaacagttagaagccgtattcagattagctataattttcactagaaccatcccaatctcttgaaagataaaacatcaaattaaatgtagccaaatctaattgcttcacctctgatttttttttaatcacttgaaaagggtaatggttccctcacattttgtatataaaatctactggctaggggaaggctcagaaacttgaatgttaaataggatcccaggtgattcttacacacactgaagtataaaggtcactggaccattctagtggccatgggtcccctctggttggcctgtagttgaaatctatgggaacaactttcaaactaccacatctgaggaatcagtggaggttaggaggttacttttagaaggtgattgggaatgtactcgaatttgagatttgttaaagttcattatagttatcacata

SEQ ID NO: 318578 - DNA, 615 bp, Homo sapiens
tgtctgtttgtttgttttattttgcagagatggaggtctccccaggttgtccaggctggtctcaaactcctgggctcaagtgaacctcccgccttggcttctcaaagtgctgagattatgggcgtgagccactacacctgcccaatattgttgatcagagtaaagaaatgacataaacacccagtaacagttagaagccrtattcagattagctataattttcactagaaccatcccaatctcttgaaagataaaacatcaaattaaatgtagccaaatctaattgcttcacctctgatttttttttaatcacttgaaaagggtaatggttccctcacattttgtatataaaatctactggctaggggaaggctcagaaacttgaatgttaaataggatcccaggtgattcttacacacactgaagtataaaggtcactggaccattctagtggccatgggtcccctctggttggcctgtagttgaaatctatgggaacaactttcaaactaccacatctgaggaatcagtggaggttaggaggttacttttagaaggtgattgggaatgtactcgaatttgagatttgttaaagttcattatagttatcacata

SEQ ID NO: 318579 - DNA, 616 bp, Homo sapiens
ggaagtccacacaaagacatattataattatatgtcaaaagtcaaaaagagtgaattttgaagaagcaagacaatgctgaaagagagaaattctcaaccaagaatgcaatttctggaaaaaaawtttcttcaaaaatgaagaatagataaagactttctcaagcaaaagctgagagaaacaacttcatcaccactagatttgtcataaaataaatgacaggtgagctctttaactcaaacaaaataatactaaatagcaaaactaagcataactaagcatattaaaatataaaacttactggaaaagctaattatttaaacaaatacaaaattgtgcaacattgtaatggtggtgcacctttttctaatatgaaagtcaaaagacaacaaagtagaaattactataactacagaagtataatagtagatatacacatataaaagatgtaattgtgacatcaataacaaagtgggagaagtgcagaattttttatgtgattaaagttgagttgttattagcttagaataaactttgcctccatatatatgatgttttacataagccccaaggtaaccaaaaaaataaaatactacagaaaatatacaaaagaaaaag

SEQ ID NO: 318580 - DNA, 616 bp, Homo sapiens
ggaagtccacacaaagacatattataattatatgtcaaaagtcaaaaagagtgaattttgaagaagcaagacaatgctgaaagagagaaattctcaaccaagaatgcaatttctggaaaaaaaatttcttcaaaaatgaagaatagataaagactttctcaagcaaaagctgagagaracaacttcatcaccactagatttgtcataaaataaatgacaggtgagctctttaactcaaacaaaataatactaaatagcaaaactaagcataactaagcatattaaaatataaaacttactggaaaagctaattatttaaacaaatacaaaattgtgcaacattgtaatggtggtgcacctttttctaatatgaaagtcaaaagacaacaaagtagaaattactataactacagaagtataatagtagatatacacatataaaagatgtaattgtgacatcaataacaaagtgggagaagtgcagaattttttatgtgattaaagttgagttgttattagcttagaataaactttgcctccatatatatgatgttttacataagccccaaggtaaccaaaaaaataaaatactacagaaaatatacaaaagaaaaag

SEQ ID NO: 318581 - DNA, 616 bp, Homo sapiens
ggaagtccacacaaagacatattataattatatgtcaaaagtcaaaaagagtgaattttgaagaagcaagacaatgctgaaagagagaaattctcaaccaagaatgcaatttctggaaaaaaaatttcttcaaaaatgaagaatagataaagactttctcaagcaaaagctgagagaaacaacttcatcaccactagatttgtcataaaataaatgacaggtgagctctttaactcaaacaaaataatactaaatagcaaaactaagcataactaagcatattaaaatataaaacttactggaaaagctaattwtttaaacaaatacaaaattgtgcaacattgtaatggtggtgcacctttttctaatatgaaagtcaaaagacaacaaagtagaaattactataactacagaagtataatagtagatatacacatataaaagatgtaattgtgacatcaataacaaagtgggagaagtgcagaattttttatgtgattaaagttgagttgttattagcttagaataaactttgcctccatatatatgatgttttacataagccccaaggtaaccaaaaaaataaaatactacagaaaatatacaaaagaaaaag

SEQ ID NO: 318582 - DNA, 437 bp, Homo sapiens
taaactttgcctccatatatatgatgttttacataagccccaaggtaaccaaaaaaataaaatactacagaaaatatacaaaagaaaaaggaaataaatacatatcaatacaaaaatatcaatgaacacaaaagaaaacagcaagagaaaaaagaaagaagaattataacacagacagaaaaaataaaatgaagtgccatagcaagtccttacttattaatacaactttgtaaatacagttgtcccacagtatccatgaaagatgggtttcaagatcgcctgtggatwccaaaatttatggatgctaaagtcctttatattaagtgatatagtatttgcatataacccatgcacaccatcccctatactttaaaccttctctagattacttatcatatctaatagaatgtaaacagtatataaatacctgttacacc

SEQ ID NO: 318583 - DNA, 437 bp, Homo sapiens
taaactttgcctccatatatatgatgttttacataagccccaaggtaaccaaaaaaataaaatactacagaaaatatacaaaagaaaaaggaaataaatacatatcaatacaaaaatatcaatgaacacaaaagaaaacagcaagagaaaaaagaaagaagaattataacacagacagaaaaaataaaatgaagtgccatagcaagtccttacttattaatacaactttgtaaatacagttgtcccacagtatccatgaaagatgggtttcaagatcgcctgtggataccaaaatttatggatgctaaagtcctttatattaagtgatatagtatttgcatataacccatgcacaccatcccctatactttaaaccwtctctagattacttatcatatctaatagaatgtaaacagtatataaatacctgttacacc

SEQ ID NO: 318584 - DNA, 578 bp, Homo sapiens
attattccattttttatcattgttatttttatgggggtgtgtgattttttttatgcatggttggttgactctgtggatgtggaacctacatccagctgactgtaaatggattaaaaattccccagtcaaaagacaaagaacgtccaaatgcattaaaaaataaaatcaaactataggctgtcaacaagagactatagattcaaggatgcccaaaggctgaaagtgaagggagggaaaaaaatattccatgcaaatcataacgaaaagacagcaggagtggctaaatttataccagrccaaatagactttaggttaaaaacagtcacatgaaataaaaaaggtcattatataatgataaaaaggtcaattatcaggatgttagaacaactataaatgtataggcacccaagatcagagtacctaactatatataaggcaaacattgacagatttgaagggagaaatagacagcaataaaataacaatgagacacaacattacgccactttcaataatgggaatgaatctctagcagaaaaccagtagggaaatagcaatcttaaacatcctataaaaca

SEQ ID NO: 318585 - DNA, 578 bp, Homo sapiens
attattccattttttatcattgttatttttatgggggtgtgtgattttttttatgcatggttggttgactctgtggatgtggaacctacatccagctgactgtaaatggattaaaaattccccagtcaaaagacaaagaacgtccaaatgcattaaaaaataaaatcaaactataggctgtcaacaagagactatagattcaaggatgcccaaaggctgaaagtgaagggagggaaaaaaatattccatgcaaatcataacgaaaagacagcaggagtggctaaatttataccaggccaaatagactttaggttaaaaacwgtcacatgaaataaaaaaggtcattatataatgataaaaaggtcaattatcaggatgttagaacaactataaatgtataggcacccaagatcagagtacctaactatatataaggcaaacattgacagatttgaagggagaaatagacagcaataaaataacaatgagacacaacattacgccactttcaataatgggaatgaatctctagcagaaaaccagtagggaaatagcaatcttaaacatcctataaaaca

SEQ ID NO: 318586 - DNA, 578 bp, Homo sapiens
attattccattttttatcattgttatttttatgggggtgtgtgattttttttatgcatggttggttgactctgtggatgtggaacctacatccagctgactgtaaatggattaaaaattccccagtcaaaagacaaagaacgtccaaatgcattaaaaaataaaatcaaactataggctgtcaacaagagactatagattcaaggatgcccaaaggctgaaagtgaagggagggaaaaaaatattccatgcaaatcataacgaaaagacagcaggagtggctaaatttataccaggccaaatagactttaggttaaaaacagtcacatgaaataaaaaaggtcattatataatgataaaaaggtcaattatcaggatgttagaacaactataaatgtataggcacccaagatcagagtacctaactatatataaggcaaacattgacagatttgaagggagaaatagacagcaataaaataacaatgagacacaacattacgccactttcaataatgggaatgamtctctagcagaaaaccagtagggaaatagcaatcttaaacatcctataaaaca

SEQ ID NO: 318587 - DNA, 578 bp, Homo sapiens
attattccattttttatcattgttatttttatgggggtgtgtgattttttttatgcatggttggttgactctgtggatgtggaacctacatccagctgactgtaaatggattaaaaattccccagtcaaaagacaaagaacgtccaaatgcattaaaaaataaaatcaaactataggctgtcaacaagagactatagattcaaggatgcccaaaggctgaaagtgaagggagggaaaaaaatattccatgcaaatcataacgaaaagacagcaggagtggctaaatttataccaggccaaatagactttaggttaaaaacagtcacatgaaataaaaaaggtcattatataatgataaaaaggtcaattatcaggatgttagaacaactataaatgtataggcacccaagatcagagtacctaactatatataaggcaaacattgacagatttgaagggagaaatagacagcaataaaataacaatgagacacaacattacgccactttcaataatgggaatgaatctctagcagaaaaccagtagggaaayagcaatcttaaacatcctataaaaca

SEQ ID NO: 318588 - DNA, 575 bp, Homo sapiens
tgcttactatcttagaagtcaaatgttctttaaagaaagtgtccaaaagtagatttatgccataaatgrtgccaagaattagggcaaagggcaggtcaaaggtgaataggggatatgatgtagcaattgtcagctttggttagtaacctggttaatgtcctcctttattataaatagggatctaattcaaaggaaggaacagtataatacatacacaatatacttttgcaaccatctgagctgacaaaaaaagcagggtcccacaatagcagaggcttatgagaaaaagtctgaactgaatatatgaacacctaagttttaggcctctttcttctaacagccaacataactttggatcattctaacctctctggtctcagtttctgtgatacgaggaaattgagcttaataagactagaggtcctttctgacactaacattctacactggtgtattcctctcacatttttaaagttaaatttatggtttattttttaatataagataattcatcaccagtatagtaacaagatgagaaggcatctgagctaaggaaatagatgtttttccatctg

SEQ ID NO: 318589 - DNA, 602 bp, Homo sapiens
taacctcagttcctaacacagatgtccagaggcaaatctttcaaattcacaagcaaaaattagatagaagcaagttacatgtgaacaaatggaatcagatgcaatgagagaaaacagctagcacattatatacatagctgaaagctggacagaataaaaacttgaattttagattcaatgtatttagaagcacaatagaattcaaatggtacatttaaacatgtgagagtgtttttctactctaaaactggagaggagaggggaggaggatttaatgagataatgaacattatgtaactgtcacaataaacatttaatacatgacagtggttgttgttatgcttactatcttagaagtcaaatgttctttaaagaaagtgtccaaaagtagatttatgccataaatggtgccaagaattagggcaaagggcaggtcaaaggtgaataggggatatgatgtagcaattgtcagctttggttagtaacctggttaatgtcctcctttattataaatagggatctaattcaaaggaargaacagtataatacatacacaatatacttttgcaaccatctgagctgacaaaaaaagcagggtccca

SEQ ID NO: 318590 - DNA, 582 bp, Homo sapiens
tagatttatgccataaatggtgccaagaattagggcaaagggcaggtcaaaggtgaataggggatatgatgtagcaattgtcagctttggttagtaacctggttaatgtcctcctttattataaatagggatctaattcaaaggaaggaacagtataatacatacacaatatacttttgcaaccatctgagctgacaaaaaaagcagggtcccacaatagcagaggcttatgagaaaaagtctgaactgaatatatgaacacctaagttttaggcctctttcttctaacagccaacataactttggatcattctaacctctctggtctcagtttctgtgatacgaggaaattgagcttaataagactagaggtcctttctgacactaacattctacactggtgtattcctctcacatttttamagttaaatttatggtttattttttaatataagataattcatcaccagtatagtaacaagatgagaaggcatctgagctaaggaaatagatgtttttccatctgcctcttgctgtttttctatcatagagcaagatcttcctagtaaagggttgaaggca

SEQ ID NO: 318591 - DNA, 574 bp, Homo sapiens
atagtaacaagatgagaaggcatctgagctaaggaaatagatgtttttccatctgcctcttgctgtttttctatcatagagcaagatcttcctagtaaagggttgaaggcaacttttctgtgtcaaattagctgttgctcagcaaatagaagttaaatgccactatacggagcaaacaaacacgtgctagcatgaaatctgtggcagcatcctcagtaccctacttcagtcaacagaactatccaggacagatctcctaaaaacataatttattgacaacataatgaggttctctttttgtactgacctaattcaattttagattatgtttaaactgatttttcttagaatttttcaaaatacaatacaaaattttctaatagggagaaattatatgtataaatatttgaatatgtgtattacaaaacattacatcaaagcagaattaatttaaatgcaaatagagaaagtcrtttggaccctatgttatgtgatgtcaatgaaacttacactctgaaaaacagagatatgatatagtggaggctgtgggatcacgtagtaacatgttgagcca

SEQ ID NO: 318592 - DNA, 576 bp, Homo sapiens
ctatgttatgtgatgtcaatgaaacttacactctgaaaaacagagatatgatatagtggaggctgtgggatcacgtagtaacatgttgagccacattctcccataaccctgatttcattgaactaagacaaagatgggaggtgagttattgaattgagaactatatggaacttttcacaaaagtgcattaaaagattgtcttggagtcaaaagaaataaatataacactttaagagagagaaaatggctattgtagtggtccctatcgttcatttccttcatagattagaagaatgagtgtcrtagaagccaataacatttctgggcctgtgagtgaatttatcctcctgggcttcccctgcctgctgcagggagaccaagatcctcctctttgtggtcttctccctcatctaccttctgaccctcatgggtaacacatccatcatctgcgctgtgtggtcaagccagaaactccacacacctatgtacatcctcttggctaatttctctttcctggagatctgctgcattagttctgatgtcccaaaatgttggccaatctcatctcccatatca

SEQ ID NO: 318593 - DNA, 566 bp, Homo sapiens
ttctgggcctgtgagtgaatttatcctcctgggcttcccctgcctgctgcagggagaccaagatcctcctctttgtggtcttctccctcatctaccttctgaccctcatgggtaacacatccatcatctgcgctgtgtggtcaagccagaaactccacacacctatgtacatcctcttggctaatttctctttcctggagatctgctgcattagttctgatgtcccaaaatgttggccaatctcatctcccatatcaagagcatctcctatgctggctgcctgctccagttcttctacttctccatgtgtgctgcagarggctactttctgtctgtgatgtcctttgatcggttccttaccatctgtcgacctttgcattatcccacagtcatgactcaccacctgtgtgtctgattagtggccttctgcagggcaggtggttttctatccatactgatgcctgcagtgcttatgtcccgagtgcctttctgtggccctaacatcactgaccattttttctgtaacctgggaccattgctggcactgtcctgtgccccagttccca

SEQ ID NO: 318594 - DNA, 566 bp, Homo sapiens
ttctgggcctgtgagtgaatttatcctcctgggcttcccctgcctgctgcagggagaccaagatcctcctctttgtggtcttctccctcatctaccttctgaccctcatgggtaacacatccatcatctgcgctgtgtggtcaagccagaaactccacacacctatgtacatcctcttggctaatttctctttcctggagatctgctgcattagttctgatgtcccaaaatgttggccaatctcatctcccatatcaagagcatctcctatgctggctgcctgctccagttcttctacttctccatgtgtgctgcagaaggctactttctgtctgtgatgtcctttgatcggttccttaccatctgtcgacctttgcattatcccacagtcatgactcaccacctgtgtgtcygattagtggccttctgcagggcaggtggttttctatccatactgatgcctgcagtgcttatgtcccgagtgcctttctgtggccctaacatcactgaccattttttctgtaacctgggaccattgctggcactgtcctgtgccccagttccca

SEQ ID NO: 318595 - DNA, 530 bp, Homo sapiens
agctaggggtggtggcaggcccctgtagtcccagctactcgggaggctgaggcaggagaatggggtgaacccggaaggtggagcttgcagtgagccgagatcgcgccactgcactcgagacttggcgacagagcgagactctgtctcaaaaaaaaaaaaaaagtatagcacatttaagtatacatagtacataaaagttgataatgaacaactatgttactggtttatgtgtttagtatactatgatttttgacattattttagaatgcattccttctacttacaaacmaaaaagttaactaaaatagcctgaggcaggtccttcaggagctgtttcagaagaaggcattgttaccatgggagatgacagctccatgtgtggtattgcttcggaagaccttccagtgggacgagatgtggagatggaagactgatgttgatgatcctgacccagtgtaggcctaggctagtgtgtgtgtatttgtgtgttagcttttaccaaaacgaagtttaagaaatctgtatgctta

SEQ ID NO: 318596 - DNA, 391 bp, Homo sapiens
tgatttatagcatgaacttgaaatcttgacagtagaattccttaccatctcattcccacttctaatctgtcattaaacagattaggcatcttccctgggatcatttgtcatctttacgctcgtcttttctgtgcaggttcctagcactccatatctgtgatggcataatcacttcataaatggtctgtctctgttatytcccatgtcaaattccagaattatgttcttgaacctccatcacttattttctctctacctaaacacaggaaaaaatcccaaattctttagcttgtaaatgtttttaggttctgaatttcttcttaaactttatttttaccttaatatatgtctcatcactcccatttgactcactctctctaattcacagagt

SEQ ID NO: 318597 - DNA, 600 bp, Homo sapiens
gggaggcttcataagccatgggattttcttgccatttgtatgaagtaaacaaacacaagacggtgctaggtgtgtaacaaatgctttacaattatcaggaaatatttctgctcgagtgagtttgtatcttcatataagagattaaaaacacccagagtgaagaagtggcattggttttgcatggtgagagaggaaatctgtagtcaggctgcacaactaactctaaatttagacagataaattctgcttcttttattttctaattatcttcagtttttctttcactgtctttttatcttcacccccaaatacatatgcattacagcccttctctttctttgcctgtcttatggcaacatcttgctcactgttctccccaccccatgttatttcacacagtactctgcaggttctgaggacaagttagaattatttttaatgtgcctaaaaattctttgtagctggagaatttgaggtcatttatagattacaaatgcaacattcttgtcacttaatttagataagataacgcagtatccatggattagatcrttggacagatagcattgttaatcattattatattataacacaaagaat

SEQ ID NO: 318598 - DNA, 260 bp, Homo sapiens
ctgcaggttctgaggacaagttagaattatttttaatgtgcctaaaaattctttgtagctggagaatttgaggtcatttatagattacaaatgcaacattcttgtcacttaatttagataagataacgcagtatccatggattagatcgttggacagatagcattgttaawcattattatattataacacaaagaatggtaaatatcaaattagactaagtgaagtattaataccagtgggccatgtattattagtgcta

SEQ ID NO: 318599 - DNA, 525 bp, Homo sapiens
tagatcgttggacagatagcattgttaatcattattatattataacacaaagaatggtaaatatcaaattagactaagtgaagtattaataccagtgggccatgtattattagtgctacataagaaaacaaatcaaaatttggatatcccattagagacatgtcttagaaataaaattgtattaaggagagttagtggtaagtaaaatattttaaattcaaatttctatgaaatatttatcccaccgcttatgtttccatgcagaatcttctgttgttgagtgggtataataagttttggacaaaaataaaataacctttgtgggtttaaaatttggaataatcttttttgyggattcgtattgccatcttgggaaatttctcactcatattattataacttcttttatttgaatgggcacagttacagtccacagtttttattctcagacacctaattacagccaaattctaggtcattctctttagagaaatctcaaagacaatggcaggcttttggattaaa

SEQ ID NO: 318600 - DNA, 443 bp, Homo sapiens
ttatgtttccatgcagaatcttctgttgttgagtgggtataataagttttggacaaaaataaaataacctttgtgggtttaaaatttggaataatcttttttgcggattcgtattgccatcttgggaaatttctcactcatattattataacttcttttatttgaatgggcacagttacagtccacagtttttattctcagacacctaattacagccaaattctaggtcattctctttagagaaatctcaaagacaatggcaggcttttggattaaaacattttctcagtgattttggawgcaaacttgttttcagtgtttacagaagggccagaggtgaaaccattagcagcacctgcctttttagtgtcttctataccaggaattccaggtacctggagctcaaagtaaaagctctaaagtacataggattctcccaggca

SEQ ID NO: 318601 - DNA, 443 bp, Homo sapiens
ttatgtttccatgcagaatcttctgttgttgagtgggtataataagttttggacaaaaataaaataacctttgtgggtttaaaatttggaataatcttttttgcggattcgtattgccatcttgggaaatttctcactcatattattataacttcttttatttgaatgggcacagttacagtccacagtttttattctcagacacctaattacagccaaattctaggtcattctctttagagaaatctcaaagacaatggcaggcttttggattaaaacattttctcagtgattttggaagcaaacttgttttcagtgtttacagaagggccagaggygaaaccattagcagcacctgcctttttagtgtcttctataccaggaattccaggtacctggagctcaaagtaaaagctctaaagtacataggattctcccaggca

SEQ ID NO: 318602 - DNA, 547 bp, Homo sapiens
cactgtgctggttcttgcacatgctggtaaatatctgagtttctatgcttatgactgacaaatgaaatgacaaaaacaycacaaaaactatatattttgatactactctgctaagcttatgaataagacacagactgattatttgaaacactaccttttcatgtttctacattttttaaattgacagataaaattatatgtattgtcatgtaaaatgtggtttaaagcatgcatacattgtgtaatattaaattctggctaattaacaagtgctttacctcatatagttatcatttttgtgatggagaacacttaacattgactatatcagtatttttaaaacataacagtatgtcatcattaactatagtcaccaggctttacaacagatttttttaacttattcctttaatctaactaattatatattctttgaaagacatctacccaatccccttccaaaatatcttagcctctcgttccactattttagtctctacttcaatgcgatcaattttttaaaattccacatatgagcaaaatcatg

SEQ ID NO: 318603 - DNA, 547 bp, Homo sapiens
cactgtgctggttcttgcacatgctggtaaatatctgagtttctatgcttatgactgacaaatgaaatgacaaaaacatcacaaaaactatatattttgatactactctgctaagcttatgaataagacacagactgmttatttgaaacactaccttttcatgtttctacattttttaaattgacagataaaattatatgtattgtcatgtaaaatgtggtttaaagcatgcatacattgtgtaatattaaattctggctaattaacaagtgctttacctcatatagttatcatttttgtgatggagaacacttaacattgactatatcagtatttttaaaacataacagtatgtcatcattaactatagtcaccaggctttacaacagatttttttaacttattcctttaatctaactaattatatattctttgaaagacatctacccaatccccttccaaaatatcttagcctctcgttccactattttagtctctacttcaatgcgatcaattttttaaaattccacatatgagcaaaatcatg

SEQ ID NO: 318604 - DNA, 547 bp, Homo sapiens
cactgtgctggttcttgcacatgctggtaaatatctgagtttctatgcttatgactgacaaatgaaatgacaaaaacatcacaaaaactatatattttgatactactctgctaagcttatgaataagacacagactgattatttgaaacactaccttttcatgtttctamattttttaaattgacagataaaattatatgtattgtcatgtaaaatgtggtttaaagcatgcatacattgtgtaatattaaattctggctaattaacaagtgctttacctcatatagttatcatttttgtgatggagaacacttaacattgactatatcagtatttttaaaacataacagtatgtcatcattaactatagtcaccaggctttacaacagatttttttaacttattcctttaatctaactaattatatattctttgaaagacatctacccaatccccttccaaaatatcttagcctctcgttccactattttagtctctacttcaatgcgatcaattttttaaaattccacatatgagcaaaatcatg

SEQ ID NO: 318605 - DNA, 597 bp, Homo sapiens
tcatcattaactatagtcaccaggctttacaacagatttttttaacttattcctttaatctaactaattatatattctttgaaagamatctacccaatccccttccaaaatatcttagcctctcgttccactattttagtctctacttcaatgcgatcaattttttaaaattccacatatgagcaaaatcatgaggtatttgtctttctgtgtctgcattatttcaattaacataatctccttcatgttcatccatgtaattgaaaatgacagtattttctattttaaggctgaataataatccattcgtacagaatggatgtatgccacatgttctttatcattttatttgataataaaccctgagtttgattttatatcttggctattgtgaatagtgctgcaataaacataacagcacagatgtctctttcacatacttgatttttttgatatgtgcccaataatgatattgctgtatcatatgatagttcagcttttaatgtttgagaaatctccatactgttttgtataatggctacgctgatttacattcagtgcgcaagcattccctttgctccacatctttgccaataa

SEQ ID NO: 318606 - DNA, 554 bp, Homo sapiens
caccacagcccttcttcctctccaatgcagcatgatgcttatagaagtaaacttctgacttctttctgaagaaagaaaataaacacacaatcccagagtagacacagcctgagaacaggctttagaaacctccagaatctctagcctggtcaattggtgtcagactccaaaccactttataaagactgtgacagctttctgttaatgctcaaatcacaatgaaagatgacaacagagtaccagagtaacatggccaaaaaaacacaataaatttccagatatgaaccctaaaaaattgagatatacaaattacttgaaaatattcaaaataaccatctaaatgatgctcagtgtatgaaatgggaacatagacaactraatgaaagcagcaaaatgagaatatcacaaaaaattataaaaaccttcaaaaattatggagctgaagactacagtaagtcataaagacagaaattctcaaacaaaatacttgtaaaatatcaagaagcttaaattactttggctaagataaacacaaagttactcataacaagaca

SEQ ID NO: 318607 - DNA, 631 bp, Homo sapiens
caaaatgaaacaacacactgaggatctttgagaagtactctgacctccaagtgagctggctgatatggaggctgagctacatgtagaaagccaaaggaatttctgcaggacatcatcatgccaagcacagccgtaacctgggttccagcccttttcacacgctcaacggttggatcttgggagggaatcaaagaagccattgtaaaatatcaaaatttaaaccctgattttgaatttaaaaagtgttaaaatatggttgtggcctacactcagaaaatctgtgtccttcagatggtttctcggtggcaccagatggtttcaagtggctattcattaggtttctcagtgaaattaccagatatagaataaataaattgtcactgtcttaaatcaacccatgggaaaggaaaactgtataaagacagcagagaggaaacattgtccacaccaaggaaaaaacaatctccagmaactgttgttgaagaaacagaggcatcacacttactagaaaaatatattgtatttcatatattatgggcatacaacgtgatgttttgatatatgcgtgcattgtgaaattattaaatcaagtaaataaacatgtctgtcacctcacatactgcttttttta

SEQ ID NO: 318608 - DNA, 578 bp, Homo sapiens
acattctttgccactttatggcaaggatggcctttgctccattttctgatgagctattcttctttttctcctgagacgtcatcagaacggcctttattgtccatggttctaccaacattctaatggtcatcacttgaataatctctaagaagtttcagaatttcctcrcaactctcttcttctgagtcctcaaaagaatcacctctagtgttctattcagggcaatctacactttttatagtctgatcctccaaattattccagactttgtgcattactacatccacttctacattttggagtatttgtaatcacaaaagccccacctcttgatactgatttttttgtcttagtccactttgtggtgcaatgaggcaatacgacagactgactaagtataagtaaaagaaatttgtgttctcacagttctagagcctgggaagtccaatatcaaggtgctagcatcttgcaggggccttcttgctgtgacacctatgtgggaggcaggaaagcatgtgcgaaggagagaaatggggctaaattcatcttttaatgaggaccccaggcctgtagtaact

SEQ ID NO: 318609 - DNA, 578 bp, Homo sapiens
acattctttgccactttatggcaaggatggcctttgctccattttctgatgagctattcttctttttctcctgagacgtcatcagaacggcctttattgtccatggttctaccaacattctaatggtcatcacttgaataatctctaagaagtttcagaatttcctcgcaactctcttcttctgagtcctcaaaagaatcacctctagtgttctattcagggcaatctacactttttatagtctgatcctccaaattattccagactttgtgcattactacatccacttctacattttggagtatttgtaatcacaaaagccccacctcttgatactgatttttttgtcttagtccactttgtggtgcaatgaggcaatacsacagactgactaagtataagtaaaagaaatttgtgttctcacagttctagagcctgggaagtccaatatcaaggtgctagcatcttgcaggggccttcttgctgtgacacctatgtgggaggcaggaaagcatgtgcgaaggagagaaatggggctaaattcatcttttaatgaggaccccaggcctgtagtaact

SEQ ID NO: 318610 - DNA, 536 bp, Homo sapiens
ctttcatctgtggtggtcattccaagtgatctgtccagggcacatggggactctatccctaggaccacttgtccccacagaaggagaraccacagtagcagcaccaagggtaggtcacagcattgtcaccaggagtccccatattcttctcccagacgcagtgaaccttgtcaccctcttcccacactccacagggggtgtacaaagaggcatcttgcagtgacctgaccctgggatgttatggaaaaggagacagcctgagctcatgactcctggaattacatgctccagtcttggctatatacagacctacaattcttttccttttactcaggcactttgccttctggttgaggacagtgttctacagccctccacagtgtgctagagctgactagagtcgaatagccactttctttgtgcaagtttcctttctgtgactttactggatttcattggtagtaagcgttcatccagacagattccaagacagtgtccacatgaaaggaaaacaaaggctgatgggcagagacgcc

SEQ ID NO: 318611 - DNA, 493 bp, Homo sapiens
aaaattaggtacatggagaaacccagcggatggagtcaaaatgtagaatttttctgtgtcttttttgcctttgcttgtttctgttctttcatttgagttgtcgtctcctttaaataacttctcatatctataaggtgtttcttttaagactcatgatgaccacagcacaaaaacctataactgattcactaaaaatcagaagcaacaaattctactgaagaaaatcactgaaccacaaaaacaagaaaaagaaagaaagaargaaggaaggaaggaaggaaggaaggaagaaagaaagaaagaaagagaaagaaagaaagaaagaaagagggagggagggagggaagaaggaaggaaggaaggaaggaaggaaggaaggaaggaaggaagaaaggaaggaagggagacaggagtctcaaaactgccagaaaatgggcaacaaaatggcagtggttgctccttccttctcttttcccccaactagacggcatcg

SEQ ID NO: 318612 - DNA, 493 bp, Homo sapiens
aaaattaggtacatggagaaacccagcggatggagtcaaaatgtagaatttttctgtgtcttttttgcctttgcttgtttctgttctttcatttgagttgtcgtctcctttaaataacttctcatatctataaggtgtttcttttaagactcatgatgaccacagcacaaaaacctataactgattcactaaaaatcagaagcaacaaattctactgaagaaaatcactgaaccacaaaaacaagaaaaagaaagaaagaaggaaggaaggaaggaaggaaggaaggaagaaagaaagaaagaaagagaaagaaagaaagaaagaaagagggagggagggagggargaaggaaggaaggaaggaaggaaggaaggaaggaaggaaggaagaaaggaaggaagggagacaggagtctcaaaactgccagaaaatgggcaacaaaatggcagtggttgctccttccttctcttttcccccaactagacggcatcg

SEQ ID NO: 318613 - DNA, 569 bp, Homo sapiens
cttgggcgattatattagtgtatgacaaaaataaatcagtggctctttaaaaatgtatatggtaatttttggggttgattttaatgtgttttttacattttttgtacttttgtcatggaagaaatgttggataaagagtaatttgtcaagtctcaactaatktaggtttaattcatgctttgcccaaaaattttgtgtttaggctgctgaaagtttcacatgaccattgttaggagtcgaatgtcccatctgagtggaggaggacgcgcagatttgtctgacacagactccctacaggaatggatcaacatgactggcttcctttgtgcccttgggggagtgtgcctccagcagagaagtaattctggcctggcaacctatagcccacccatgggtccagtcagtgaatgtcagggttccatgatttcagtgatgtcctcagagggaaacgcaggtacacctgtcagcaaatgtatggatcagctgttgtccttaatggtgtgtaaccatgagaaagtgggacttcaaatacgggccaatgttaaggacctggtgggtctagaattgag

SEQ ID NO: 318614 - DNA, 569 bp, Homo sapiens
cttgggcgattatattagtgtatgacaaaaataaatcagtggctctttaaaaatgtatatggtaatttttggggttgattttaatgtgttttttacattttttgtacttttgtcatggaagaaatgttggataaagagtaatttgtcaagtctcaactaatgtaggtttaattcatgctttgcccaaaaattttgtgtttaggctgctgaaagtttcacatgaccattgttaggagtcgaatrtcccatctgagtggaggaggacgcgcagatttgtctgacacagactccctacaggaatggatcaacatgactggcttcctttgtgcccttgggggagtgtgcctccagcagagaagtaattctggcctggcaacctatagcccacccatgggtccagtcagtgaatgtcagggttccatgatttcagtgatgtcctcagagggaaacgcaggtacacctgtcagcaaatgtatggatcagctgttgtccttaatggtgtgtaaccatgagaaagtgggacttcaaatacgggccaatgttaaggacctggtgggtctagaattgag

SEQ ID NO: 318615 - DNA, 546 bp, Homo sapiens
gatgctatttaacaaactgaagaatgccatcagcaagttttttgactcccaaggacaggtaaagtgtgctcttttttatttttcaccttgtttgaaataaggaaggctttttctttccaattatttaaattaggtgctcacagtttttaaaaattgccaaaaaattgcagaaagaagagtcatctcaatgtaggggtcagcttgcttcttaggaactctggtgtgtatgtgtgcctgagggtatacctgccttgtgtatgggtatgagtgtctgcatgtatctgtatgcttgtttggctgtgtgcctgtgggtgcacttctgtgtttgtgtgtttagatcagtcggttgcatctctctagaggtctgtcttctgggcattgatggcaaatgattaatayatttgttctttctataggttttattgacggataccaacactcaatttgtagagcaaaccatagctataatgaagaacttgctagataatcatactgaaggcagctctgaacatctagggcaagctagcattgaaccaatgatgttat

SEQ ID NO: 318616 - DNA, 546 bp, Homo sapiens
gatgctatttaacaaactgaagaatgccatcagcaagttttttgactcccaaggacaggtaaagtgtgctcttttttatttttcaccttgtttgaaataaggaaggctttttctttccaattatttaaattaggtgctcacagtttttaaaaattgccaaaaaattgcagaaagaagagtcatctcaatgtaggggtcagcttgcttcttaggaactctggtgtgtatgtgtgcctgagggtatacctgccttgtgtatgggtatgagtgtctgcatgtatctgtatgcttgtttggctgtgtgcctgtgggtgcacttctgtgtttgtgtgtttagatcagtcggttgcatctctctagaggtctgtcttctgggcattgatggcaaatgattaatatatttgttctttctatagkttttattgacggataccaacactcaatttgtagagcaaaccatagctataatgaagaacttgctagataatcatactgaaggcagctctgaacatctagggcaagctagcattgaaccaatgatgttat

SEQ ID NO: 318617 - DNA, 546 bp, Homo sapiens
gatgctatttaacaaactgaagaatgccatcagcaagttttttgactcccaaggacaggtaaagtgtgctcttttttatttttcaccttgtttgaaataaggaaggctttttctttccaattatttaaattaggtgctcacagtttttaaaaattgccaaaaaattgcagaaagaagagtcatctcaatgtaggggtcagcttgcttcttaggaactctggtgtgtatgtgtgcctgagggtatacctgccttgtgtatgggtatgagtgtctgcatgtatctgtatgcttgtttggctgtgtgcctgtgggtgcacttctgtgtttgtgtgtttagatcagtcggttgcatctctctagaggtctgtcttctgggcattgatggcaaatgattaatatatttgttctttctataggttttattgayggataccaacactcaatttgtagagcaaaccatagctataatgaagaacttgctagataatcatactgaaggcagctctgaacatctagggcaagctagcattgaaccaatgatgttat

SEQ ID NO: 318618 - DNA, 559 bp, Homo sapiens
ggtcgtctctcagtatctgtcaggaattggttccaggaaccaccccccaaactcctgcccacatctcacttccatgaacactaaaatccacagactgaagtccctgatacaaaatgtcatagtatttgcatataaactatgcacatcytcccatatattttaaattatcattagattacttataatatctaataaatataaatcttatataaacacaagttgttataccatattgtttagggaataacaacaaagaaaaatctttacatgttgagtacagatgaaaccctacttttttttcccccaaatagtttcaatccatggttggttgaatccgtggatacagaactcgctgagacagagggccaattgtacatgcttctgattgaagatagtcattttgccaagattactttgtagaaagttactattgtcttctcctcatttgagatgattttgtattctaggatctgcatattaattcaaattatttgggttgtgctaataatttgtttaatgaaacaggtagttcctaaagtttatatctgttaataagagg

SEQ ID NO: 318619 - DNA, 559 bp, Homo sapiens
ggtcgtctctcagtatctgtcaggaattggttccaggaaccaccccccaaactcctgcccacatctcacttccatgaacactaaaatccacagactgaagtccctgatacaaaatgtcatagtatttgcatataaactatgcacatcttcccatatattttaaattatcattagattacttataatatctaataaatataaatcttatataaacacaagttgttataccatattgtttagggaataacracaaagaaaaatctttacatgttgagtacagatgaaaccctacttttttttcccccaaatagtttcaatccatggttggttgaatccgtggatacagaactcgctgagacagagggccaattgtacatgcttctgattgaagatagtcattttgccaagattactttgtagaaagttactattgtcttctcctcatttgagatgattttgtattctaggatctgcatattaattcaaattatttgggttgtgctaataatttgtttaatgaaacaggtagttcctaaagtttatatctgttaataagagg

SEQ ID NO: 318620 - DNA, 552 bp, Homo sapiens
ttggcatcacggaggcactgtgcagtccttgcaatgtcaaacttacttagtgccagcatagacggtggtctcatgcactccataggtgagatcaaatgaaagtttcatatagaaatacacagcctagagaactggcttgtaagataagcaaaaattacttcagtaaggccatgttagtaaatttgcatccatttgtccacatcaggtttagggtactacaaggatctccagacagctacatttatggaagttctgatgaaaatccctcaacaaggcacagaatttgacacacttcagaaacggtattggctgatgggtttgagcaattggtggaactggtcacagtgatgggtgatcaaggagagctccctatagygatggctctggccagtgtggttccttgttctcagtgggtaagtgcatagagtaagtggggaagaaaagtgcctggcacatagcaaatccttcagaacatatttgttcaataaatgtttgttgaatgaattgataaaattttagagccagaagaaatcttagatgtttagttaggtg

SEQ ID NO: 318621 - DNA, 622 bp, Homo sapiens
ttagatgtttagttaggtgacttttcagctgtagggaagtggttggcactgctagacctgaatagtgtcctatatcatttcatcccactgaaaaattccatttaaacactgattaaaaatcactgatctactccgctgtcttcatatatttgagaaggtaattaagttaaacctaatttcagtcagttgttgcaacgctggaattggaatccacgatttgtgcctgtttactacctccagtttgctgttcttttccccataatatcttacacaatttttaaaaatgtaagcactgtatttgcatttgatattatgatattgtttgttttaaacactgaaaacatcatatggctattaggtctctctcttaatttaatgaaaaattttcctcaaatcacatcattcctaatacatgtgaaaacrttgagaagggtggtggttcctttccagtgttaaaaggctatttcctttttagtgtaccaaaaatggtttcacttatagtaaagtataactaataaggtaatctgtcattgtagatttgtttctgcttaaagctgtaggatatttgttacacctgtacttaaagtaaaattcaaactccttatcctgtcctacaaggctc

SEQ ID NO: 318622 - DNA, 573 bp, Homo sapiens
aatttgtgtgaaagcatacatccatttttctaacctttatcagatttcaaagaggttcctcatccccagaaggttgaacactatactggaatagtygaagcactcaaattttttcttaattctttatctttttatagttttagctaaaacttctatatctaattctaaatttatatatttcagctaaaaataaatggtatttaggttttaaagccattctaataaagcagctatatttagccaccttcaccagtttccccttattgaagggttaaggttgttcttcatgcaataaacactgtaacataaagaaagcttcctgaactgtgtgtagtgtaactgaaggtgggactatattgttacacctcaccgcttacaaatactttattctctaacatctaatttttactaacttcctattagagattacagaaagctattttgagattataagcagtgataagaatgcatttaaaatgtggacttcatgaagcactgcgttgaacaggatgaagtgaaataatcccgattccagagttaatctggagtcagccatgtgaatttaggacagga

SEQ ID NO: 318623 - DNA, 591 bp, Homo sapiens
gaaccactcagtagcagtgatggtctatgaatattctaaaattatgtgaagaaatttgtgtgaaagcatacatccatttttctaacctttatcagatttcaaagaggttcctcatccccagaaggttgaacactatactggaatagtcraagcactcaaattttttcttaattctttatctttttatagttttagctaaaacttctatatctaattctaaatttatatatttcagctaaaaataaatggtatttaggttttaaagccattctaataaagcagctatatttagccaccttcaccagtttccccttattgaagggttaaggttgttcttcatgcaataaacactgtaacataaagaaagcttcctgaactgtgtgtagtgtaactgaaggtgggactatattgttacacctcaccgcttacaaatactttattctctaacatctaatttttactaacttcctattagagattacagaaagctattttgagattataagcagtgataagaatgcatttaaaatgtggacttcatgaagcactgcgttgaacaggatgaagtgaaataatcccgattccagagtt

SEQ ID NO: 318624 - DNA, 577 bp, Homo sapiens
gaaagcatacatccatttttctaacctttatcagatttcaaagaggttcctcatccccagaaggttgaacactatactggaatagtcgaagcactcaaattttttcttaattctttatctttttatasttttagctaaaacttctatatctaattctaaatttatatatttcagctaaaaataaatggtatttaggttttaaagccattctaataaagcagctatatttagccaccttcaccagtttccccttattgaagggttaaggttgttcttcatgcaataaacactgtaacataaagaaagcttcctgaactgtgtgtagtgtaactgaaggtgggactatattgttacacctcaccgcttacaaatactttattctctaacatctaatttttactaacttcctattagagattacagaaagctattttgagattataagcagtgataagaatgcatttaaaatgtggacttcatgaagcactgcgttgaacaggatgaagtgaaataatcccgattccagagttaatctggagtcagccatgtgaatttaggacaggaaatattaatttat

SEQ ID NO: 318625 - DNA, 577 bp, Homo sapiens
gaaagcatacatccatttttctaacctttatcagatttcaaagaggttcctcatccccagaaggttgaacactatactggaatagtcgaagcactcaaattttttcttaattctttatctttttatagttttagctaaaacttctatatctaattctaaatttatatatttcagctaaaaataaatggtatttaggttttaaagccattctaataaagcagctatatttagccaccttcaccagtttccccttattgaagggttaaggttgttcttcatgcaataaacactgtaacataaagaaagcttcctgaactgtgtgtagtgtaactgaaggtgggactatattgttacacctcaccgcttacaaatactttattctctaasatctaatttttactaacttcctattagagattacagaaagctattttgagattataagcagtgataagaatgcatttaaaatgtggacttcatgaagcactgcgttgaacaggatgaagtgaaataatcccgattccagagttaatctggagtcagccatgtgaatttaggacaggaaatattaatttat

SEQ ID NO: 318626 - DNA, 556 bp, Homo sapiens
ggcactcttcccagtctaaggtaccttttactttatcttaatgtagaatgttttataaagagaaaatcaatccactttaaatattgggttcacattacttttcaggctggacaaccatttcttgaattcttaaattatttttatttgacagaattatacattgaggtagacataggggttcgctgttctgctgagatccttttttcttttaggtgcccaagaattcccatccctccatggttcaaataataggtaggttgttataaaggaagctggcaacaggcaataacattacttgtaagtaagtttttttttcctcaataggaatctaagattttgtttttttatagcaagcatttttttcttcaattcagttgtaactggtacacaacaaaacataaatatgtrctatcaggtataggatgttttgggggtgtgttgttgaaaatttagtttcaccttataatgttgaccacactttcatgtctgttaatcttaataaattatgatcatctttgtgtgaaaatttggtctgttttcatgactcctcaaactt

SEQ ID NO: 318627 - DNA, 572 bp, Homo sapiens
gatattaataaataaattgaaatatttctgtaatatgtcacaatggaaatacttaggatttacagtaaaagcagtactaaaagtttataactaaaagtgtctacataaaaaaattcaaatgaacaacttcatgacagatttaatgcagtttccatgaaaataccaccagtattcttcacagaactagaaaaaaamccctaaaattaatatggatcaaaaaagtgcctacatagccaaagtaatactaaccaaacaaataaataaaaaatatggggtcatcacattaccctacttcaaattatactacaaggctatagttatcaaaacaacatggtattggtattaaaatttacacacagaccaatgaagcaaaatacagaatccagaaattaagccaaacacaggcaactaaactaatcatcaacaaggcatataatgacacaaattggggaaagaacaccctattcaataaatggtgctaggaaatactggcaagccacacgcagaggaataaaactggatccccatctctgaccttatacaaaaatcaattcaagatggatcaaatattt

SEQ ID NO: 318628 - DNA, 577 bp, Homo sapiens
catatagtaactctagttttagttttctgaggatcctccatgctgatccycatcatggctcctttatggagagtgtgtgagggttctcctttctcagtatgttcactggcctgctgccttagacattaaatcaggtgctactgcggtattccgagttgtaattagttttttattttgacatctataaatcttcaggcagccagacagcttgataaagttaagccaaatacagtttttctaggagtggtgaattaatgggagaagtggccagatcatccttgtgtgtaggtgtgagcatgtctgagtgtggcgagggaaggtggttgggtagagagtgctgtgagggagtgaggtgggaatccccctagctaggattgagtcatttttttcttccatgcaaaatgcatattccccattgtggatttctgagtgtgtgagtgatgaagaaatagggcatgtgccttgacccagttgcagctattgcctccatgtgcctgaggtgccttcctcatactctagcatgttactgggcagacagtcagtattagcacatgctgctggtccttgtgagcacagc

SEQ ID NO: 318629 - DNA, 465 bp, Homo sapiens
ctacactaaaagtaatagacataaaaataaaaaataaacagctgtgtaatgttatcaggctagctagatgttatgcatctgtgattctgaggcttctttgcagcatttggttcatggaggttctggtaagaccagcttgtgagcgttgatgtttcagagcagkttattttctatggtgtgaaagatgcagtcattgccaagagtcacaaaaagtgaggctgggaagaggatacactgaataaagttttaaggaagtttaagaaagcacacaccacattgccatttgctttcttaaagtttcaaggaaaatttctaaaaaatacgttcgtatggtttgtaaggttcacatgagataaggaagtaaatagagcacttagcataggaattggaaaaaaaatactttcagacatagaagacatacagttaacagatttcagagtcaagcactggttagataaagtcaaa

SEQ ID NO: 318630 - DNA, 579 bp, Homo sapiens
tggctcatttaagaaaaataatactgttcaaatgtgcgaaggctgtcaaagggtttgttgtatagctttgcattggctgagttttcaatgtttagacatttgagtataagaaaactgctacactaaaagtaatagacataaaaataaaaaataaacagctgtgtaatgttatcaggctagctagatgttatgcatctgtgattctgaggcttctttgcagcatttggttcatggaggttctggtaagaccagcttgtgagcgttgatgtttcagagcaggttattttctatggtgtgaaagatgcagtcattgccaagagtcacaaaaagtgaggctgggaagaggatacactgaataaagttttaaggaagtttaagaaagcacacaccacattgccatttgctttcttaaagtttcaaggaaaatttctaaaaaataygttcgtatggtttgtaaggttcacatgagataaggaagtaaatagagcacttagcataggaattggaaaaaaaatactttcagacatagaagacatacagttaacagatttcagagtcaagcactggttagataaagtc

SEQ ID NO: 318631 - DNA, 478 bp, Homo sapiens
tcaatctaaggcctgaaatcatacgaattctaaatgataacataagaaaaaaaactcttctcgacattgatttaggcaaagaattcatgactaagacccmaaaagcaaatgcaacaaaaacaaacataaataaatgggacctaatttaactaaaaagcttctgcacagcaaaggaaataagcagcagagtacacagacaacccacagagtagcagaatatatttgcaaactacacatctgacaaaaagctagtatccagaatctataaggaactcaaagaaattagcaaaataataattccattaaaaagtaggcaaagaaaatgaatatatattttttcaaaagaagatatacaaacagctaataacaacctaaaaatgctcaacatcaataatcaaggaaatacaaatgaaaaccacagttagatatcaaataactcctacaaaaatggccattttttgtaggccaaaaaaagtca

SEQ ID NO: 318632 - DNA, 627 bp, Homo sapiens
gtgtatgagagtttcagtggctctatatcttgaccagctttggtatggtccatctttaattttagccattctgatacatatgcagtgctatatcattatatatatccttttttgagactgagtcttgctctgtcgcccaggctggagtgctgtggcgcgatcttcgttcactgcaagctccacctcccaggttcaagcgattctcctgcctcagcctcccaagtagctgggagtacagrcacctgccaccatgctcagataattttttgtatttttagtagacacagggtttcaccatgttggccaggctggtctcgaactcctgagctcaggtgatccacccgccttggcctcccaaagtgctgggattataggcgtgagccacggcgcccaatctagagcatcttttcttgtgcttgcttctgtctgtatgtcttctttggtgaagcatctgtttaaaccattgcctattttttattagggtgatttatcgtcttactattgaacagtaagagctcttgtatattttggttacagatcttttgttggatgtatgttttgcaagtgttttcttccaggtgagcactgccacttcatttcattaacaatgatgttgaaataggaaaa

SEQ ID NO: 318633 - DNA, 588 bp, Homo sapiens
gaattctaaatgataacataagaaaaaaaactcttctcgacattgatttaggcaaagaattcatgactaagacccaaaaagcaaatgcaacaaaaacaaacataaataaatgggacctaatttaactaaaaagcttctgcacagcaaaggaaataagcagcagagtacacagacaacccacagagtagcagaatatatttgcaaactacacatctgacaaaaagctagtatccagaatctataaggaactcaaagaaattagcaaaataataattccatyaaaaagtaggcaaagaaaatgaatatatattttttcaaaagaagatatacaaacagctaataacaacctaaaaatgctcaacatcaataatcaaggaaatacaaatgaaaaccacagttagatatcaaataactcctacaaaaatggccattttttgtaggccaaaaaaagtcaagaaaacaacagatgttggcattggatgtggtgaaatgggaacacttaacaaaataatgtcatttgcagcaacttggatggagccgaaggtcattattctaagtgaaataactcagaaatggaaaactagatat

SEQ ID NO: 318634 - DNA, 511 bp, Homo sapiens
taagacagaatttattcagaagtatatactactgactacctgtaaactctgtgaggggaaaaaaaaccaaaaaaacaaaactggaggatgcactccataaagaagagaaaatgaattcaaagaaatgcattaaaaatactaatcaggctgggtgtggtggctcacacctgtaatcccagcactttggraggccgaggtgggtggatcacctgaggtcaggagtttgagaccagcgtggccaacatggtgaaactccgtctatactaaaaatacaaaaattagccaggtgtggtggtgtgcacctgcaatcccagctacttgggagactgaggcaggagaatcacttgaaccgaggaggcagaggttatagtgagctgagattgtgccactgcactcaagcctgggccacagagtgagactgtcttaaaaaaataataataataatcaatagttggcaaaaacaaagaagtaaaaataatagtaaaatttgattaaatctgaattggtgcaa

SEQ ID NO: 318635 - DNA, 511 bp, Homo sapiens
taagacagaatttattcagaagtatatactactgactacctgtaaactctgtgaggggaaaaaaaaccaaaaaaacaaaactggaggatgcactccataaagaagagaaaatgaattcaaagaaatgcattaaaaatactaatcaggctgggtgtggtggctcacacctgtaatcccagcactttggaaggccgaggtgggtggatcacctgaggtcaggagtttgagaccagcgtggccaacatggtgaaactccrtctatactaaaaatacaaaaattagccaggtgtggtggtgtgcacctgcaatcccagctacttgggagactgaggcaggagaatcacttgaaccgaggaggcagaggttatagtgagctgagattgtgccactgcactcaagcctgggccacagagtgagactgtcttaaaaaaataataataataatcaatagttggcaaaaacaaagaagtaaaaataatagtaaaatttgattaaatctgaattggtgcaa

SEQ ID NO: 318636 - DNA, 511 bp, Homo sapiens
taagacagaatttattcagaagtatatactactgactacctgtaaactctgtgaggggaaaaaaaaccaaaaaaacaaaactggaggatgcactccataaagaagagaaaatgaattcaaagaaatgcattaaaaatactaatcaggctgggtgtggtggctcacacctgtaatcccagcactttggaaggccgaggtgggtggatcacctgaggtcaggagtttgagaccagcgtggccaacatggtgaaactccgtctatactaaaaatacaaaaattagccaggtgtggtggtgtgcacctgcaatcccagctactygggagactgaggcaggagaatcacttgaaccgaggaggcagaggttatagtgagctgagattgtgccactgcactcaagcctgggccacagagtgagactgtcttaaaaaaataataataataatcaatagttggcaaaaacaaagaagtaaaaataatagtaaaatttgattaaatctgaattggtgcaa

SEQ ID NO: 318637 - DNA, 511 bp, Homo sapiens
taagacagaatttattcagaagtatatactactgactacctgtaaactctgtgaggggaaaaaaaaccaaaaaaacaaaactggaggatgcactccataaagaagagaaaatgaattcaaagaaatgcattaaaaatactaatcaggctgggtgtggtggctcacacctgtaatcccagcactttggaaggccgaggtgggtggatcacctgaggtcaggagtttgagaccagcgtggccaacatggtgaaactccgtctatactaaaaatacaaaaattagccaggtgtggtggtgtgcacctgcaatcccagctacttgggagactgaggcaggagaatcacttgaaccgaggaggcagaggttatagtgagctgagattgtgccactgcactcaagcctgggccacagagtgagactgtcttaaaaaaataataataataatcaatagtyggcaaaaacaaagaagtaaaaataatagtaaaatttgattaaatctgaattggtgcaa

SEQ ID NO: 318638 - DNA, 588 bp, Homo sapiens
gaattctaaatgataacataagaaaaaaaactcttctcgacattgatttaggcaaagaattcatgactaagacccaaaaagcaaatgcaacaaaaacaaacataaataaatgggacctaatttaactaaaaagcttctgcacagcaaaggaaataagcagcagagtacacagacaacccacagagtagcagaatatatttgcaaactacacatctgacaaaaagctagtatccagaatctataaggaactcaaagaaattagcaaaataataattccattaaaaagtaggcaaagaaaatgaatatatattttttcaaaagaagatatacaaacagctaataacaacctaaaaatgctcaacatcaataatcaaggaaatacaaatgaaaaccacagttagatatcaaataactcctacaaaaatggccattttttgtaggccaaaaaaagtcaasaaaacaacagatgttggcattggatgtggtgaaatgggaacacttaacaaaataatgtcatttgcagcaacttggatggagccgaaggtcattattctaagtgaaataactcagaaatggaaaactagatat

SEQ ID NO: 318639 - DNA, 526 bp, Homo sapiens
gttcactgttggcatatagaaatgctgctaactttttaatcctatatcttgactaaaattgtgagttctmatagtgttttagtgaattaggattttccaaatataagaccacatcatctgcaaacaaacataatttgacttcttcctttccaatttgcttgccctttattttttctcttgctaattgctctagctgccatgtgttgaataacagtagtgaaagtgtgcatctctgtcatgttgtcaatcttagaggaaaagcttttcatttttccccatttagtatcatactatatgtgatatatatatatctatatataacttttatatgctgaggtatgtttctttttttattatactttaagttttagggtacatgtgcacaatgtgcaggttagttacatatgtatacatgtggtatgctggtgtgctgcacccattaactcgtcatttagcattaggtatatctcctaaagctatccctcccccctccccccaccccacaacagtccccagagtgtgatgt

SEQ ID NO: 318640 - DNA, 526 bp, Homo sapiens
gttcactgttggcatatagaaatgctgctaactttttaatcctatatcttgactaaaattgtgagttctcatagtgttttagtgaattaggattttccaaatataagaccacatcatctgcaaacaaacataatttgacttcttcctttccaatttgcttgccctttattttttctcttgctaattgctctagctgccatgwgttgaataacagtagtgaaagtgtgcatctctgtcatgttgtcaatcttagaggaaaagcttttcatttttccccatttagtatcatactatatgtgatatatatatatctatatataacttttatatgctgaggtatgtttctttttttattatactttaagttttagggtacatgtgcacaatgtgcaggttagttacatatgtatacatgtggtatgctggtgtgctgcacccattaactcgtcatttagcattaggtatatctcctaaagctatccctcccccctccccccaccccacaacagtccccagagtgtgatgt

SEQ ID NO: 318641 - DNA, 529 bp, Homo sapiens
gttaatatagacactaaaaatactgattcttattcatgaacataaaatacatatttttgtctttttaaatttcttgcatcaatgttttatagtattcattgtagagatctttaacgtctttggttaattcctaggtatttaattttaatttgaggctatcgtaaatgggaccactctcttgatttctttttcacattgttcactgttggcatatagaaatgctgctaactttttaatcctatatcttgactaaaattgtgagttctcatagtgttttagtgaattaggattttccaaatataagaccacatcatctgcaaacaaacataatttgacttcttcctttccaatttgcttgccctttattttttctcttgctaattgctctagctgccatgtgttgaataacagtagtgaaagtgtgcatctctgtcatgttgtcaatcttagaggaaaagcttttcatttttccccatttagtatcatactatatgtgatatmtatatatctatatataacttttatatgc

SEQ ID NO: 318642 - DNA, 452 bp, Homo sapiens
caaataactcctacaaaaatggccattttttgtaggccaaaaaaagtcaagaaaacaacagatgttggcattggatgtggtgaaatgggaacacttaacaaaataatgtcatttgcagcaacttggatggagccgaaggtcattattctaagtgaaataactcagaaatggaaaactagatatcgtatgttcttacatataagtgggagctaatctatgaggatgcaaaggcataagaataatgtaaaagactttggggactygagggggaaggctgggaggcgggtgagggataaaaaactacatattaagtacagtgtgcactgctcaggtgacaagtgcactgaaatctcagaaaacacactaaagaacttatccatgtcatgaaaaaccacctgtatttccaaaacaattgacacttaaaaaaaaaaaaacctaatgacgtatcttag

SEQ ID NO: 318643 - DNA, 546 bp, Homo sapiens
taaaatgatcatgtggtttttgttctttcttttgttgatatgrtatattacattaattgatttgcatatgttgaagtatctttgcatccatgagataaatcctacttgatgatgaggaataataaacttttaatctgttgctgaattttacttgccagtatttttatgagaaattttgcatctattgctgatattggcctatagatttttttgatatgcatttgtctgattttagtatgagagtaatgcttgccttacagaacgaggttgaaagtatttcctcctcctctgttttgaaatagtttaagtgggattgctattagttttatacatgttttgtcaaattcagtgaaaccatcagatttcaggcttttctttgatgggaggctttgtattatggatctcatcacgtcttgtttgtgtattcaggttgtggatttcttaataattcaatcttcttaggttctatgtgtctagaaatttatccatttgttctagattttccaatttatggcatctatctgctcatagtactcactaatgatc

SEQ ID NO: 318644 - DNA, 538 bp, Homo sapiens
tactgctatttttgtttgttttctttgacatggaatttttttaaatctttttaatctatgtgtttataggtgaagtgtgtttcttgtaggcaacaaatcgctgggtcttaatttttgtatccatttagccactctgtgtcttttgattggagaatttagtccatttacattcagtgttgttatkgattatataaagacttactcttgccattttgttctttgttttctggtcttgctatcagcagcaagagggaacctgaaagtaggtagccatctgtgaggctgagtctgggatttttatgggtttaaaacaggagaatgcatgctgattggttcatgggtgggcttggaaaagacaccattcaattggttaaaaggcatcattctcaaagaaccaatagagagcaggttagacagggatggaagttctcactctagtccatgaattctttctggaactggtagctcagttttcaggctttttagactgttgtttccttgaaggtcgagtttcaccagtgcacccatccctgtctgc

SEQ ID NO: 318645 - DNA, 552 bp, Homo sapiens
  misc_feature (1)...(552): n = A,T,C or G
nnnnnnnnnnnnnnnnnnnnactcattatattatagagtgaccatctttgtctcttctnctagttttgtcttgaaatctattttgtctgacataagtgtagcaactactgctatttttgtttgttttctttgacatggaatttttttaaatctttttaatctatgtgtttataggtgaagtgtgtttcttgtaggcaacaaatcgctgggtcttaatttttgtatccatttagccactctgtgtcttttgattggagaatttagtccatttacattcagtgttgttattgattatataaagacttactcttgccattttgttctttgttttctggtcttgctatcagcagcaagagggaacctgaaagtaggtagccatctgtgaggctgagtctgggatttttatgggtttaaaacaggagaatgcatgctgattggttcatgggtgggcttggaaaagacaccattcaattrgttaaaaggcatcattctcaaagaaccaatagagagcaggttagacagggatggaagttctcactctagtccatgaat

SEQ ID NO: 318646 - DNA, 554 bp, Homo sapiens
tgaggctgagtctgggatttttatgggtttaaaacaggagaatgcatgctgattggttcatgggtgggcttggaaaagacaccattcaattggttaaaaggcatcattctcaaagaaccaatagagagcaggttagacagggatggaagttctcactctagtccatgaattctttctggaactggtagctcagttttcaggctttttagactgttgtttccttgaaggtcgagtttcaccagtgcacccatccctgtctgcctaggagtttgtcttctgttgctatcagtaggactgcagtgggtcagacctgaaaccagcacagcacttgatcacacccatggtgagctgtaaccctacctggtaccaccagtaattgctcaaggtcttggrgctttataatctgtaggtggtaagccagccaggtttgtatcctttccttcagagtagtgagttccctcaggttctgggcaagcccagtggtgccatccaggagccaggggctggagtcaataaccttaggagtctactttgtgttctattgtactgtggta

SEQ ID NO: 318647 - DNA, 580 bp, Homo sapiens
ccaggtttgtatcctttccttcagagtagtgagttccctcaggttctgggcaagcccagtggtgccatccaggagccaggggctggagtcaataaccttaggagtctactttgtgttctattgtactgtggtagagctagcaattaaaccatgaaattcggttcttcccatttttccctccttactcaacaggcagaggggcctcatcctattgctgccatcaccacaggcccatcgggaatactgccaggcttccaccaatgttctcttaaggttcaaggctctttagttcacttatagtgaatgatgcttggcctgstactcatccttttggtcagtggtgtcccttctgtcccagtacaggtccagaagtgccatccaagtgccaagacctggaataagggaccccaagagcccactggtgctcttcctctctttggccatgctggaacctaagttgcaagatgaagttctctagtttttcctctacctttttcagtgtctccctgtagccaccacagttgtgaatgtgccgagtctcacctgattctagcaagcctcagagtctcaatgaaagctc

SEQ ID NO: 318648 - DNA, 610 bp, Homo sapiens
tttttcctctacctttttcagtgtctccctgtagccaccacagttgtgaatgtgccgagtctcacctgattctagcaagcctcagagtctcaatgaaagctcacagcaaactacctggttatcactgcaggttattccaggccaagggccctttacttagcagttgatgggtcttgttagtaccggatttcttcattcaaggcagcagatttccttatagtccagtatgtacctagaaattttaattaggagctagtggctgagaagggtgttttataactctgactggtggccttgctgrtatccaaaatacaagacaaagtcctgtttactctttctgtcttcttaagtagatggaagtggtctcttgaatctgtgagctgtgcagcctcagtttggaggaggggtggtataagaactctcttagctgccccagcttgtatcttagtaggtaatgtggcccccaagtccactggctctaagcccagttcagcatgacacctgggagttgctgtccttgtgacctagactgttttaagtttctttagggccccagagcattttagactatggtggtgaagcttgccagaactcaagttccaatcactgg

SEQ ID NO: 318649 - DNA, 563 bp, Homo sapiens
aggcatcagctgagttcattccagttttgctttctgctatgatggggcagcactgagttcaatgctcacaatcccagtgctctccctctcccaagtgtacagattctgtctacatagcatgtgactactgccagggcatgagtgaggagtggcattagtgattcaagactgtctttcctaccctgttttagtgcctctttgtgtactgcagggttaaaaccaggtactgtgagtgctcgcctttattcttatgaaggtttttgtttgytttttaatagatagttgttatattggtgtccttccaggggaaatgatcactggagccttctatttagccatcttgctctgtcctctgttggttttctactatggcattgtgctcatgttctcagcttggtaaaatttcatattagatttgtaaagtatattcagctaaattcagtatgtagaataattagttatttttactactttgagctatatattcttattacaaccaaggcattttaccagagcaaggcatagaagagtcattcaaaaaagcaacactaggaaaagcaaca

SEQ ID NO: 318650 - DNA, 563 bp, Homo sapiens
aggcatcagctgagttcattccagttttgctttctgctatgatggggcagcactgagttcaatgctcacaatcccagtgctctccctctcccaagtgtacagattctgtctacatagcatgtgactactgccagggcatgagtgaggagtggcattagtgattcaagactgtctttcctaccctgttttagtgcctctttgtgtactgcagggttaaaaccaggtactgtgagtgctcgcctttattcttatgaaggtttttgtttgttttttaatagatagttgttatattggtgtccttccaggggaaatgatcactggagccttctatytagccatcttgctctgtcctctgttggttttctactatggcattgtgctcatgttctcagcttggtaaaatttcatattagatttgtaaagtatattcagctaaattcagtatgtagaataattagttatttttactactttgagctatatattcttattacaaccaaggcattttaccagagcaaggcatagaagagtcattcaaaaaagcaacactaggaaaagcaaca

SEQ ID NO: 318651 - DNA, 470 bp, Homo sapiens
cctcaaagtatccatattcaagaaaagccttacaaccctaatgaatgtggtgaaacttctgacccatcctcaaaacttactcaacatcgaagaacttatattggagagagctcacaaagatgtaataaaaaatgtataatagtctttagtcagtcacatctgaagagacataagataattaacactggagagaaatcagtaaaatgtaaagaacgtggcaaagcttttaccaggggcttacaacttggacatcagaaaattcatactggagagaaaccttacaaatgtgaaaaatgtgacaaagcctttaagaagagctcacaccttgctcaacatcagagaatccatactggaaagaaacctatcaagtgtaaggamtgtggcaaagcttttaacagaggctcgtaccttacttaacatcagagaatccatactggagagaaagccttcaaatgtaaagaatgtggcaa

SEQ ID NO: 318652 - DNA, 590 bp, Homo sapiens
aagctcatacattactcagcatcagagaattcacactggagggaaacctttcaagtgtcaaaaaatgtggcaaagcttttaacagagcttcacacyttactcaacatcagagaatacatactggagagaaacacttcacacataaagaatgtggcaaagcctttaacaggggctcacaccttactcgacatcagagaatccacactggagagaagtctttcaaatgtaaagaatgcagcaaagcttttatctagggctcacaccttactcaacatcagagaatctacactggagagaaattcttcaaatgtaaagaatgtggcaaagcttttaccaggagctcacacctttctcaatatcagagaattcatactggaaagaaacctttcaaatgtgaagaatgtggcaaagcttttaacagacactcaacccatactcaacatcaaataattcataccagatagaaactcttcaagtgtaaagaatgtgccaaaaccctaaactggtgctcacaccttactcaacaattctatcttttatacaataaattacggttaactatagttgtcctattgtgttacgaaacacta

SEQ ID NO: 318653 - DNA, 513 bp, Homo sapiens
tggcaaagcctttaatagaagctcatacattactcagcatcagagaattcacactggagggaaacctttcaagtgtcaaaaaatgtggcaaagcttttaacagagcttcacaccttactcaacatcagagaatacatactggagagaaacacttcacacataaagaatgtggcaaagcctttaacaggggctcacaccttwctcgacatcagagaatccacactggagagaagtctttcaaatgtaaagaatgcagcaaagcttttatctagggctcacaccttactcaacatcagagaatctacactggagagaaattcttcaaatgtaaagaatgtggcaaagcttttaccaggagctcacacctttctcaatatcagagaattcatactggaaagaaacctttcaaatgtgaagaatgtggcaaagcttttaacagacactcaacccatactcaacatcaaataattcataccagatagaaactcttcaagtgtaaagaatgtgccaaaa

SEQ ID NO: 318654 - DNA, 590 bp, Homo sapiens
catgcattaagtgaaataaaccagacacaaaacataatacagtgtatcatyccatttatacaaaatagtaatcataccacaataataaagaggtaataaaaatggaccaggcatggtggctcacacgtttaattctagcactttgggaggctgaggcaggtggattgcctgaggttaggagttcgagagcagcctggccaacatggtgaaaccatgtctctactaaaaacaaaattagccaggtgcagtggtgggcgcctgtaatcccaggtactcaggaagctgagtcaggagaatctattgaacccgcgaggcaggcagaggttgcagtgagctgagatcgcaccactgcactcaagcctgcatgacagagactccatctcaaaaacgaaaccaaaccaaacaataaaggtgataaaatggaatgtccataaaagggaaatcagtaatgattgtctagtcctgatagtggaaatattttaaagttataccatggctatagttgcataattataaatataccagaaactttgtattgagtatgatgttatgcatatttcatcataacttttttttaaaaaataagcatg

SEQ ID NO: 318655 - DNA, 552 bp, Homo sapiens
aattctagcactttgggaggctgaggcaggtggattgcctgaggttaggagttcgagagcagcctggccaacatggtgaaaccatgtctctactaaaaacaaaattagccaggtgcmgtggtgggcgcctgtaatcccaggtactcaggaagctgagtcaggagaatctattgaacccgcgaggcaggcagaggttgcagtgagctgagatcgcaccactgcactcaagcctgcatgacagagactccatctcaaaaacgaaaccaaaccaaacaataaaggtgataaaatggaatgtccataaaagggaaatcagtaatgattgtctagtcctgatagtggaaatattttaaagttataccatggctatagttgcataattataaatataccagaaactttgtattgagtatgatgttatgcatatttcatcataacttttttttaaaaaataagcatgccataaaatagcaaggtggttaaattgcttgcttgaaaacaatgtgaaaatgcaatcaatttttgctcatttcaaggtttttgattaggtgt

SEQ ID NO: 318656 - DNA, 546 bp, Homo sapiens
tggggtctttgttaggtacatgcatatttaaaactattttatcttcttgatagatttataattttttaacataaaatttcctrtgtcaattaattatagcaatgttgtcttaatgcctatcttgtctaagggtaaccaccccagcttattttgcttactatttgtgtggaatctttttacccatcctttcactttcaacccatttgtgagtttaggactaaagagattctcctatagataacataaagttagttcaggtttttgtttatttttaaaccatctgccaatctttgcattgtaattgtagatgttaatttctatttaaactatttataaggaagggcacacttctgccatttttctagttgttttctaaagtcttgtatatttttgttaattaactcttatattactgacatctttaatgttctagtatttttccaaaacagttttgattctcttctcatttcctctttcacttctttctttagttgtatttttagtggctaccttaaggatgacaattaatctcatcactgtgtaact

SEQ ID NO: 318657 - DNA, 546 bp, Homo sapiens
tggggtctttgttaggtacatgcatatttaaaactattttatcttcttgatagatttataattttttaacataaaatttcctatgtcaattaattatagcaatgttgtcttaatgcctatcttgtctaagggtaaccaccccagcttattttgcttactatttgtgtggaatctttttacccatcctttcactttcaaccyatttgtgagtttaggactaaagagattctcctatagataacataaagttagttcaggtttttgtttatttttaaaccatctgccaatctttgcattgtaattgtagatgttaatttctatttaaactatttataaggaagggcacacttctgccatttttctagttgttttctaaagtcttgtatatttttgttaattaactcttatattactgacatctttaatgttctagtatttttccaaaacagttttgattctcttctcatttcctctttcacttctttctttagttgtatttttagtggctaccttaaggatgacaattaatctcatcactgtgtaact

SEQ ID NO: 318658 - DNA, 546 bp, Homo sapiens
tggggtctttgttaggtacatgcatatttaaaactattttatcttcttgatagatttataattttttaacataaaatttcctatgtcaattaattatagcaatgttgtcttaatgcctatcttgtctaagggtaaccaccccagcttattttgcttactatttgtgtggaatctttttacccatcctttcactttcaacccatttgtgagyttaggactaaagagattctcctatagataacataaagttagttcaggtttttgtttatttttaaaccatctgccaatctttgcattgtaattgtagatgttaatttctatttaaactatttataaggaagggcacacttctgccatttttctagttgttttctaaagtcttgtatatttttgttaattaactcttatattactgacatctttaatgttctagtatttttccaaaacagttttgattctcttctcatttcctctttcacttctttctttagttgtatttttagtggctaccttaaggatgacaattaatctcatcactgtgtaact

SEQ ID NO: 318659 - DNA, 546 bp, Homo sapiens
tggggtctttgttaggtacatgcatatttaaaactattttatcttcttgatagatttataattttttaacataaaatttcctatgtcaattaattatagcaatgttgtcttaatgcctatcttgtctaagggtaaccaccccagcttattttgcttactatttgtgtggaatctttttacccatcctttcactttcaacccatttgtgagtttaggactaaagagattctcctatagataacataaagttagttcakgtttttgtttatttttaaaccatctgccaatctttgcattgtaattgtagatgttaatttctatttaaactatttataaggaagggcacacttctgccatttttctagttgttttctaaagtcttgtatatttttgttaattaactcttatattactgacatctttaatgttctagtatttttccaaaacagttttgattctcttctcatttcctctttcacttctttctttagttgtatttttagtggctaccttaaggatgacaattaatctcatcactgtgtaact

SEQ ID NO: 318660 - DNA, 350 bp, Homo sapiens
acaaaatattctttaatagtggcatttatattttgccatgtactcatttttactggcattctttattttttcatatggccttgcattattacctagtttgtcatttcatttcaaccmaaaagataacctttgtcatttaatgcataccaggtctactagtgacaagctgttaaatttgttttaatctatatagctcttagtgtcttcaaaggtcttcaaggatgtccttcatctttgaagagcagttttgctgaaaatagagttctttgttggctttttttttttgtttctacactttaaatatattgtcctatcatattctggactccgtagtttttagtgagaaatta

SEQ ID NO: 318661 - DNA, 567 bp, Homo sapiens
ccaggtctactagtgacaagctgttaaatttgttttaatctatatagctcttagtgtcttcaaaggtcttcaaggatgtccttcatctttgaagagcagttttgctgaaaatagagttctttgttggctttttttttttstttctacactttaaatatattgtcctatcatattctggactccgtagtttttagtgagaaattatattctggactctagtttttagtgagttgttaatgtcagtgtagatgcattgcaaatagtagtcttttctccataactttcttcaaagttgtctctttagcttttgaaagttttattgtaatttgtcttggtgtagagttctttgagtttatactatgaattcaatgagattttggaatgtgtagattcacgtatttcatcatgcttgggaactttttagccattatttcttcagatgttctttctgccccattttatctttctcccttctttcgggagttttcataatgcttgtaatggcacattttatagtatcccattgttatcttaggctctgttcatctttattcattattttttatt

SEQ ID NO: 318662 - DNA, 465 bp, Homo sapiens
gcctacgattcctctaggactgtttctgttaatatctgttatcttattagtgggccattattttttcattaatttatttgcacgctttgtatttcattgctgttgctgaaaactagactttttctatyacaacaaccctgaaataatattctctctcatcccgttgggtttttttgttgcttattgtaaattttacttgtttgtttggtgagttttcaaaattatttttaaaatatcatccttttgtcgtgtttagcaataaaaatctctgctttattagcttcatgtgagctagctatttgacagagattttctcaaatgcctgctcacatcaaatataaatctactagttcttgcagttgggtttacttagccagaaagattacaactttgctgttttcttttcttcctgcttgtgcagtgcttggaggtaaagcagacatgagagataacagcttcgtaggt

SEQ ID NO: 318663 - DNA, 465 bp, Homo sapiens
gcctacgattcctctaggactgtttctgttaatatctgttatcttattagtgggccattattttttcattaatttatttgcacgctttgtatttcattgctgttgctgaaaactagactttttctattacaacaaccctgaaataatattctctctcatcccgttgggtttttttgttgcttattgtaaattttacttgtttgtttggtgagttttcaaaattatttttaaaatatcatccttttgtcgtgtttagcaataaaaatctctgctttattagcttcatgtgagctagytatttgacagagattttctcaaatgcctgctcacatcaaatataaatctactagttcttgcagttgggtttacttagccagaaagattacaactttgctgttttcttttcttcctgcttgtgcagtgcttggaggtaaagcagacatgagagataacagcttcgtaggt

SEQ ID NO: 318664 - DNA, 465 bp, Homo sapiens
gcctacgattcctctaggactgtttctgttaatatctgttatcttattagtgggccattattttttcattaatttatttgcacgctttgtatttcattgctgttgctgaaaactagactttttctattacaacaaccctgaaataatattctctctcatcccgttgggtttttttgttgcttattgtaaattttacttgtttgtttggtgagttttcaaaattatttttaaaatatcatccttttgtcgtgtttagcaataaaaatctctgctttattagcttcatgtgagctagctatttgacagagattttctcaaatgcctgctcacatcaaatataaatctactagttcttgcagttgggtttacttagccagaaagattacaactttgctgttttcttttctycctgcttgtgcagtgcttggaggtaaagcagacatgagagataacagcttcgtaggt

SEQ ID NO: 318665 - DNA, 609 bp, Homo sapiens
cattagagagggtgtggcatgaattaaagtgtgtgatctggataccttatggggagaaaaaaatagaattcttacgtatgttgttttatctaattgtattacctctttctgtgatataacttttaatacayacagtatatttagtaaaagtgatttctacgtaagtagtaagtagttatttgtatattaactgtccatgtttattttctggaactagactgcagtatttaatatatggagattattatggctttaatctgatactatcctggagcttcttttaggtttaacatgataaagaaccatatcatgttgatggcatcagtatattttggtggcaactatccattgtttggttctggacattgagataaatgtgtacttatactagattatgtgttaggagaaaaaataaaaactgatatataaactatgcaatttcctttttgtaaactcatccatatcaggtggtttaaaattggttagcagttttctagctcagatgttaatttctgagtatgaggtaaaaaatactgtcaaatcatcttcattgccttgcacatttatatttgtggtttgtgcattagtaccatcacaactcactggctc

SEQ ID NO: 318666 - DNA, 609 bp, Homo sapiens
cattagagagggtgtggcatgaattaaagtgtgtgatctggataccttatggggagaaaaaaatagaattcttacgtatgttgttttatctaattgtattacctctttctgtgatataacttttaatacatacagtatatttagtaaaagtgatttctacrtaagtagtaagtagttatttgtatattaactgtccatgtttattttctggaactagactgcagtatttaatatatggagattattatggctttaatctgatactatcctggagcttcttttaggtttaacatgataaagaaccatatcatgttgatggcatcagtatattttggtggcaactatccattgtttggttctggacattgagataaatgtgtacttatactagattatgtgttaggagaaaaaataaaaactgatatataaactatgcaatttcctttttgtaaactcatccatatcaggtggtttaaaattggttagcagttttctagctcagatgttaatttctgagtatgaggtaaaaaatactgtcaaatcatcttcattgccttgcacatttatatttgtggtttgtgcattagtaccatcacaactcactggctc

SEQ ID NO: 318667 - DNA, 609 bp, Homo sapiens
cattagagagggtgtggcatgaattaaagtgtgtgatctggataccttatggggagaaaaaaatagaattcttacgtatgttgttttatctaattgtattacctctttctgtgatataacttttaatacatacagtatatttagtaaaagtgatttctacgtaagtagtaagtagttatttgtatattaaytgtccatgtttattttctggaactagactgcagtatttaatatatggagattattatggctttaatctgatactatcctggagcttcttttaggtttaacatgataaagaaccatatcatgttgatggcatcagtatattttggtggcaactatccattgtttggttctggacattgagataaatgtgtacttatactagattatgtgttaggagaaaaaataaaaactgatatataaactatgcaatttcctttttgtaaactcatccatatcaggtggtttaaaattggttagcagttttctagctcagatgttaatttctgagtatgaggtaaaaaatactgtcaaatcatcttcattgccttgcacatttatatttgtggtttgtgcattagtaccatcacaactcactggctc

SEQ ID NO: 318668 - DNA, 541 bp, Homo sapiens
actgcagtatttaatatatggagattattatggctttaatctgatactatcctggagcttcttttaggtttaacatgataaagaaccatatcatgttgatggcatcagtatattttggtggcaactatccattgtttggttctggacattgagataaatgtgtacttatactagattatgtgttaggagaaaaaataaaaactgatatataaactatgcaatttcctttttgtaaactcatccatatcaggtggtttaaaattggttagcagttttctarctcagatgttaatttctgagtatgaggtaaaaaatactgtcaaatcatcttcattgccttgcacatttatatttgtggtttgtgcattagtaccatcacaactcactggctcactatagcctcaagatcctatgctcaagtgatccttccatgtcagcttcccatgtaactgggaccacaggtacgtgccaccatgcctagctaatttctttcttatttttgatagacacagggtgtcactgtgttgctcaagctaatttc

SEQ ID NO: 318669 - DNA, 541 bp, Homo sapiens
actgcagtatttaatatatggagattattatggctttaatctgatactatcctggagcttcttttaggtttaacatgataaagaaccatatcatgttgatggcatcagtatattttggtggcaactatccattgtttggttctggacattgagataaatgtgtacttatactagattatgtgttaggagaaaaaataaaaactgatatataaactatgcaatttcctttttgtaaactcatccatatcaggtggtttaaaattggttagcagttttctagctcaratgttaatttctgagtatgaggtaaaaaatactgtcaaatcatcttcattgccttgcacatttatatttgtggtttgtgcattagtaccatcacaactcactggctcactatagcctcaagatcctatgctcaagtgatccttccatgtcagcttcccatgtaactgggaccacaggtacgtgccaccatgcctagctaatttctttcttatttttgatagacacagggtgtcactgtgttgctcaagctaatttc

SEQ ID NO: 318670 - DNA, 433 bp, Homo sapiens
ctgtcaaatcatcttcattgccttgcacatttatatttgtggtttgtgcattagtaccatcacaactcactggctcactatagcctcaagatcctatgctcaagtgatccttccatgtcagcttcccatgtaactgggaccacaggtacgtgccaccatgcctagctaatttctttcttatttttgatagacacagggtgtcactgtgttgctcaagctaatttcaaactgtttatctgaagcaatgtccctgcctcagcctctcaaagcggtggaattataggcatgagccagagctctattattctaagctgygggctgaattagttggatacaatagtgatgactgtattcagggcaaagaagaaagtaattgcagaattattcaataaaattttatgaagggttctcatacagagatatcatgattaag

SEQ ID NO: 318671 - DNA, 642 bp, Homo sapiens
tttctctgggataaaaacaaaacttgaacagagccagaattattttaagggattcgtttaataggacttgtggtaagtggaataatgccatgcaaaggtccccatgtctaaccaccaggttctaggcatgtattatggtatatgagaaatgggaattcaggctgcagatgawatcaaggttgataaccagctgactctaaaacaaaaacattaacttgaattacagatttgggcctaatgtaattataagcattcttaaaagtgaaagaaataataagagaaactgagtgctgtgatgtgagtcagttaaacttttttttcaactttttctttaggtgattattttcccttaacataaaatttactttagctcaactatacaaacatgtgagttattgttatgtaaccatcactcttcattaagaaatgctttgtaaaaagtgagccagtttttcatatacattcttcaaaatacattctcaacattatacatcaaattatatatacatacatgcacacatacactatatatatcaaggatttatatgataggattaattaagaaaaaaattagtggaataaaaataatgtttatgataattttggccatagaatatataatacagatgatgtgaagtacaa

SEQ ID NO: 318672 - DNA, 555 bp, Homo sapiens
atcttccatggaagggtatctctgtataaagtgaagcatcaagaaaattatcacttaatgcaaattcatggatcccataaagtagaaaaaggtagtccatgtacttgtagcattgaaaactggattttagcaatttcctcctgagatgaaataaagctttcatgagatttctctgggataaaaacaaaacttgaacagagccagaattattttaagggattcgtttaataggacttgtggtaagtggaataatgccatgcaaaggtccccatgtctaaccaccaggttctaggcatgtattatggtatatgagaaatgggaattcaggctgcagatgatatcaaggttgataaccagctgactctaaaacaaaaacattaacttgaattacagatttgggcctaatgtaattataagcattcttaaaagtgaaagaaataataagagaaactgagtrctgtgatgtgagtcagttaaacttttttttcaactttttctttaggtgattattttcccttaacataaaatttactttagctcaactatacaaacatg

SEQ ID NO: 318673 - DNA, 642 bp, Homo sapiens
tttctctgggataaaaacaaaacttgaacagagccagaattattttaagggattcgtttaataggacttgtggtaagtggaataatgccatgcaaaggtccccatgtctaaccaccaggttctaggcatgtattatggtatatgagaaatgggaattcaggctgcagatgatatcaaggttgataaccagctgactctaaaacaaaaacattaacttgaattacagatttgggcctaatgtaattataagcattcttaaaagtgaaagaaataataagagaaactgagtgctgtgatgtgagtcagttaaacttttttttcaactttttctttaggtgattattttcccttaacataaaatttactttagctcaactatacaaacatgtgagttattgttatgtaaccatcactcttcattaagaaatgctttgtaaaaagtgagccagtttttcatatacattcttcaaaatacattctcaacattatacatcaaattatatatacatacatgcacacatacactatatatatcaaggatttatatgakaggattaattaagaaaaaaattagtggaataaaaataatgtttatgataattttggccatagaatatataatacagatgatgtgaagtacaa

SEQ ID NO: 318674 - DNA, 560 bp, Homo sapiens
tgctgtgatgtgagtcagttaaacttttttttcaactttttctttaggtgattattttcccttaacataaaatttactttagctcaactatacaaacatgtgagttattgttatgtaaccatcactcttcattaagaaatgctttgtaaaaagtgagccagtttttcatatacattcttcaaaatacattctcaacattatacatcaaattatatatacatacatgcacacatacactatatatatcaaggatttatatgataggattaattaagaaaaaaattagtggaataaaaataatgtttatgataattttggccatagaatatataatacagatgatgtgaagtacaaaatgttttttatacttcatattttgatgtacaaagtatgtttgtctttgtaattcagatgattactttgcacttgtgttcccatgaaaaatgcctttcatttctaagctggtattggcatctcagccaacactttkctccttcttttctgcgtcttctccttttctgctttttctggatctcaggccagagcgcacttacctacca

SEQ ID NO: 318675 - DNA, 364 bp, Homo sapiens
gtgtaaaaagcttgacctggggcaattacatacaaacaaataccagggaagggacagaggtaattaaattctgcccaagaggcagagaacgagracaaggaaaaaaaaaaaaaaaaaaagcaaggtttcactttccatttgccacagatagtcctctgcatggggtatctcacaggcgagatccactttcagcacagtaattgtgcattgaggacctttctgtaccaaaagattagcctactgaagggtcatgttggatatctcttaaattccccagtccttttttcttttgactcttttgaatcaaaatgttaaatttcatgaaataaattagctaccacctacaaagttttctctccaagtc

SEQ ID NO: 318676 - DNA, 435 bp, Homo sapiens
cacagatagtcctctgcatggggtatctcacaggcgagatccactttcagcacagtaattgtgcattgaggacctttctgtaccaaaagattagcctactgaagggtcatgttggatatctcttaaattccccagtccttttttcttttgactcttttgaatcaaaatgttaaatttcatgaaataaattagctaccacctacaaagttttctctccaartcacacacaatgagtgaatatgtgctacgctgtatctgtgtgaaagagaataaacaagagagttagtccaaattattgcccaaacctgcaccaaatggtcttgcaaaatgctgtttccataaagctttgaacatttcattcttctagtacatcttgtttttcattgactagcaaattaagcctgaactagttagacaggcagcaatgactcccat

SEQ ID NO: 318677 - DNA, 435 bp, Homo sapiens
cacagatagtcctctgcatggggtatctcacaggcgagatccactttcagcacagtaattgtgcattgaggacctttctgtaccaaaagattagcctactgaagggtcatgttggatatctcttaaattccccagtccttttttcttttgactcttttgaatcaaaatgttaaatttcatgaaataaattagctaccacctacaaagttttctctccaagtcacacacaatgagtgaatatgtgctacgctgtatctgtgtgaaagagaataaacaagagagytagtccaaattattgcccaaacctgcaccaaatggtcttgcaaaatgctgtttccataaagctttgaacatttcattcttctagtacatcttgtttttcattgactagcaaattaagcctgaactagttagacaggcagcaatgactcccat

SEQ ID NO: 318678 - DNA, 388 bp, Homo sapiens
aaagaaaggaaaagctcaaacaaggtgaaggaaaagcatttctacagctgaatcacgactgagttgatcraagcccattgttgctgcacaacagactgtgcgtttggtcacagcggcaatttttttttctcttcacattgtgaaatcactttacattgttttctagtagaaaaggcaaaaaattgtacaaaacccctagtgttaaatacgtttgtaccaataaaacactcacacaggtttgtctccaaaatgtcaagtttctttttctttgctttttaaattattcacaagacccaaaatttttcatccatgttgcccaattggcagtttgaagatcttgcccactaaatccagaaggatcttatgcccagaaatccacagagctacc

SEQ ID NO: 318679 - DNA, 388 bp, Homo sapiens
aaagaaaggaaaagctcaaacaaggtgaaggaaaagcatttctacagctgaatcacgactgagttgatcaaagcccattgttgctgcacaacagactgtgcgtttggtcacagcggcaatttttttttctcytcacattgtgaaatcactttacattgttttctagtagaaaaggcaaaaaattgtacaaaacccctagtgttaaatacgtttgtaccaataaaacactcacacaggtttgtctccaaaatgtcaagtttctttttctttgctttttaaattattcacaagacccaaaatttttcatccatgttgcccaattggcagtttgaagatcttgcccactaaatccagaaggatcttatgcccagaaatccacagagctacc

SEQ ID NO: 318680 - DNA, 388 bp, Homo sapiens
aaagaaaggaaaagctcaaacaaggtgaaggaaaagcatttctacagctgaatcacgactgagttgatcaaagcccattgttgctgcacaacagactgtgcgtttggtcacagcggcaatttttttttctcttcacattgtgaaatcactttacattgttttctagtagaaaaggcaaaaaattgtacaaaacccctagtgttaaatacgtttgtaccaataaaacactcacacaggtttgtctccaaaatgtcaagtttctttttctttgctttttaaattattcacaagacccaaaatttttcatccatrttgcccaattggcagtttgaagatcttgcccactaaatccagaaggatcttatgcccagaaatccacagagctacc

SEQ ID NO: 318681 - DNA, 298 bp, Homo sapiens
aaatgtcaagtttctttttctttgctttttaaattattcacaagacccaaaatttttcatccatgttgcccaattggcagtttgaagatcttgcccactaaatccagaaggatcttatgcccagaaatccacagagctacccatctttatttcttataaactctttttctccacatatagatcaaacaaggtagatgttagtcaacycagaagttaagatatcaattgtgtgaaaaagacaaatccatttcctctttttcaagtgtagatcacatttctgggtcccctttggagttag

SEQ ID NO: 318682 - DNA, 594 bp, Homo sapiens
aatggctgtatcaacatataattcagtgggcttattcccttcaaagactcaattctgaaataacaggaataaattacggaaataatttctggagactgaacaattactaggaaggaatagaaagtgagtgttagtggatacatttaccacaagatcaccattaggttgtatttgaatttgartatgatttcctttgaaatatatgatcttgtgcctatctacattcacggcaagcacaatccttcctttagcttgagccaaaacctgtggggcagaaataagaaaaacctttagcagtaggaagcagtgtggagttttttagttttttgaatgcaaaggtttacagagacctgaggaccttgaattaagtgaacatagttacagggggaaaaaatagtaagaactatccctaccatcagcattcaattaacagtagtgagaaaatacagctgtaaacccagttgcagaaagttgaggataggacaaattcagaagctcttaaaatcctggtaagtagaattaaatttaatttaaagccagccatggaaattaaaagatataattaaagtttaattaaaatgtagagcgtttaag

SEQ ID NO: 318683 - DNA, 577 bp, Homo sapiens
gagtactatatacaacctcttccaggatacccctttctggatattggtcatgcatacactgcatacactcaacaccattgccaaaattttgacaacttgccctcagaaagattagctactttgttaaattttgattcttccctttttttaatttagtttctacccttgaatcacagsatttcacacatacattgctatacatatcagagttcagtacaagatagaaaaacaactccaaatattttaagcagaaagaaatttaacagggaattaatgcttgattaactctttttccttgttattcatagtcatccttagagaggtagcataattttaccacattaggataatctgcactttcggtgtcttgtctttcaatatcttaaatgtttcaaaatgttctgtactatacatttgatgatatttatcatacatggtatcattaattgattcaatccttgagtcaataaatatttgtgaaataactactattcaccagacacttttttcactcactcttgatatcacagtaaggaaatctgcctccaaaaagtaattaatttgtgacatagcaaac

SEQ ID NO: 318684 - DNA, 577 bp, Homo sapiens
gagtactatatacaacctcttccaggatacccctttctggatattggtcatgcatacactgcatacactcaacaccattgccaaaattttgacaacttgccctcagaaagattagctactttgttaaattttgattcttccctttttttaatttagtttctacccttgaatcacaggatttcacacatacattgctatacatatcagagttcagtacaagatagaaaaacaactccaaatattttaagcagaaagaaatttaacagggaattaatgcttgattaactctttttccttgttattcatagtcatccttagagaggtagcataattttaccacattaggataatctgcactttcggtrtcttgtctttcaatatcttaaatgtttcaaaatgttctgtactatacatttgatgatatttatcatacatggtatcattaattgattcaatccttgagtcaataaatatttgtgaaataactactattcaccagacacttttttcactcactcttgatatcacagtaaggaaatctgcctccaaaaagtaattaatttgtgacatagcaaac

SEQ ID NO: 318685 - DNA, 577 bp, Homo sapiens
gagtactatatacaacctcttccaggatacccctttctggatattggtcatgcatacactgcatacactcaacaccattgccaaaattttgacaacttgccctcagaaagattagctactttgttaaattttgattcttccctttttttaatttagtttctacccttgaatcacaggatttcacacatacattgctatacatatcagagttcagtacaagatagaaaaacaactccaaatattttaagcagaaagaaatttaacagggaattaatgcttgattaactctttttccttgttattcatagtcatccttagagaggtagcataattttaccacattaggataatctgcactttcggtgtcttgtctttcaatatyttaaatgtttcaaaatgttctgtactatacatttgatgatatttatcatacatggtatcattaattgattcaatccttgagtcaataaatatttgtgaaataactactattcaccagacacttttttcactcactcttgatatcacagtaaggaaatctgcctccaaaaagtaattaatttgtgacatagcaaac

SEQ ID NO: 318686 - DNA, 608 bp, Homo sapiens
gttcagtacaagatagaaaaacaactccaaatattttaagcagaaagaaatttaacagggaattaatgcttgattaactctttttccttgttattcatagtcatccttagagaggtagcataattttaccacattaggataatctgcactttcggtgtcttgtctttcaatatcttaaatgtttcaaaatgttctgtactatacatttgatgatatttatcatacatggtatcattaattgattcaatccttgagtcaataaatatttgtgaaataactactattcaccagacacttttttcactcactcttgatatcacagtaaggaaatctgcctccaaaaagtaattaatttgtgacatagcaaaccccagaagggaaaatttgaggtaacacaatgagttcacttgtacacatggtcaactatgtgtcactgagatatccaagtaaagacaaccagtcagcgattggacagaaaagtctcaagctcaggagagggtaatagatatattagatattagaagctgytagcacagaaagggcatttggacctgaagtgggtatatacttcctaagaaatactgcctaagaaatatgtatgagaaaag

SEQ ID NO: 318687 - DNA, 608 bp, Homo sapiens
gttcagtacaagatagaaaaacaactccaaatattttaagcagaaagaaatttaacagggaattaatgcttgattaactctttttccttgttattcatagtcatccttagagaggtagcataattttaccacattaggataatctgcactttcggtgtcttgtctttcaatatcttaaatgtttcaaaatgttctgtactatacatttgatgatatttatcatacatggtatcattaattgattcaatccttgagtcaataaatatttgtgaaataactactattcaccagacacttttttcactcactcttgatatcacagtaaggaaatctgcctccaaaaagtaattaatttgtgacatagcaaaccccagaagggaaaatttgaggtaacacaatgagttcacttgtacacatggtcaactatgtgtcactgagatatccaagtaaagacaaccagtcagcgattggacagaaaagtctcaagctcaggagagggtaatagatatattagatattagaagctgctarcacagaaagggcatttggacctgaagtgggtatatacttcctaagaaatactgcctaagaaatatgtatgagaaaag

SEQ ID NO: 318688 - DNA, 624 bp, Homo sapiens
atagacgtatttgtttccaagattcagctatgacaaataatgctgaaagcttattaatttatgtagaaatttgcaaaatacacaatatctgaaagaaatattctgaaagtgaaaatgctgagtcataaactgtgcacttttttttttttttttttgagacagagtctctctctgccacccaggctggaatacagtggcatgatttcagctcactgcaacctccacctcccgggttcaagcgattctcctgcctcagcctcctgaatagctgggactacaggcacctgccatcacacccggctcatttttgyatttttagtagagatgggatttcaccatgttggccaggcgggcctcaaactcctgacctgaagtgatccacccacctcggcctcccaaagtgcagggattataggcgtgagccaccacacctggcctaagtgtgcacactttaaattttggtcaatatggccacattttcctccaaagaggtgtcagtgctttcctcattactgttgcttttctctctatccttggcaccaaggcctagcttttcacaagttcttcaaaatgagcttcacaaattattttagccacaatgttttatggcttcattatggtgat

SEQ ID NO: 318689 - DNA, 587 bp, Homo sapiens
tttctctctatccttggcaccaaggcctagcttttcacaagttcttcaaaatgagcttcacaaattattttagccacaatgttttatggcttcattatggtgatatgaatactgtccatatcagtgacattaattactgtcagttgagagaatacggtacatattcttgaagtaagactctttcatcaaaggtgacccaatgyctaccctttaaatctatattgtacacacttaataatataaggtcagtgaccacatgaaataaagatatggagtaggagaaggctgcaacagctacccacaatgcattatagaacaaacctagcactgccactatttcaatatgggcatagatgggatatatgattcttcagaactcactagatctgttaccaggctaaccagttattccccataaaactcatgacttcttacaaatcatttgctggaaaatttttatatcctaatttcctgagatgggctctacattgtggcagatggctttttgacctcttaactgtacactcaaattttatctggcttgtaaaagctctatgacatttagcacagactgtatcatacattct

SEQ ID NO: 318690 - DNA, 419 bp, Homo sapiens
ctaatttcctgagatgggctctacattgtggcagatggctttttgacctcttaactgtacastcaaattttatctggcttgtaaaagctctatgacatttagcacagactgtatcatacattctatatgcaatagaaaaaaggttcccaaggatataagctataaacaaagcgcttgtagtagtgtaatataagggagtaatagttgttgctatcgttattttttaattttaattgacatactaattatacatatttatgggataaaatatgatgcttcaatacatgtatacattgtgtaatgatcaaatgaaggtaattagcatatccatcacctcaaacatttataatttttgctgtgagaacagcaaagagatacattctggttgaacttgctacagaatagtaacaactgatgtg

SEQ ID NO: 318691 - DNA, 553 bp, Homo sapiens
actatttcaatatgggcatagatgggatatatgattcttcagaactcactagatctgttaccaggctaaccagttattccccataaaactcatgacttcttacaaatcatttgctggaaaatttttatatcctaatttcctgagatgggctctacattgtggcagatggctttttgacctcttaactgtacactcaaattttatctggcttgtaaaakctctatgacatttagcacagactgtatcatacattctatatgcaatagaaaaaaggttcccaaggatataagctataaacaaagcgcttgtagtagtgtaatataagggagtaatagttgttgctatcgttattttttaattttaattgacatactaattatacatatttatgggataaaatatgatgcttcaatacatgtatacattgtgtaatgatcaaatgaaggtaattagcatatccatcacctcaaacatttataatttttgctgtgagaacagcaaagagatacattctggttgaacttgctacagaatagtaacaactgatgtgctt

SEQ ID NO: 318692 - DNA, 419 bp, Homo sapiens
ctaatttcctgagatgggctctacattgtggcagatggctttttgacctcttaactgtacactcaaattttatctggcttgtaaaagctctatgacatttagcacagactgtatyatacattctatatgcaatagaaaaaaggttcccaaggatataagctataaacaaagcgcttgtagtagtgtaatataagggagtaatagttgttgctatcgttattttttaattttaattgacatactaattatacatatttatgggataaaatatgatgcttcaatacatgtatacattgtgtaatgatcaaatgaaggtaattagcatatccatcacctcaaacatttataatttttgctgtgagaacagcaaagagatacattctggttgaacttgctacagaatagtaacaactgatgtg

SEQ ID NO: 318693 - DNA, 419 bp, Homo sapiens
ctaatttcctgagatgggctctacattgtggcagatggctttttgacctcttaactgtacactcaaattttatctggcttgtaaaagctctatgacatttagcacagactgtatcatacattctatatgcaatagaaaaaaggttcccaaggatataagctataaacaaagcgcttgtagtagtgtaatataarggagtaatagttgttgctatcgttattttttaattttaattgacatactaattatacatatttatgggataaaatatgatgcttcaatacatgtatacattgtgtaatgatcaaatgaaggtaattagcatatccatcacctcaaacatttataatttttgctgtgagaacagcaaagagatacattctggttgaacttgctacagaatagtaacaactgatgtg

SEQ ID NO: 318694 - DNA, 419 bp, Homo sapiens
ctaatttcctgagatgggctctacattgtggcagatggctttttgacctcttaactgtacactcaaattttatctggcttgtaaaagctctatgacatttagcacagactgtatcatacattctatatgcaatagaaaaaaggttcccaaggatataagctataaacaaagcgcttgtagtagtgtaatataagggagtaatagttgttgctatcgttattttttaattttaattgayatactaattatacatatttatgggataaaatatgatgcttcaatacatgtatacattgtgtaatgatcaaatgaaggtaattagcatatccatcacctcaaacatttataatttttgctgtgagaacagcaaagagatacattctggttgaacttgctacagaatagtaacaactgatgtg

SEQ ID NO: 318695 - DNA, 559 bp, Homo sapiens
ttttaattgacatactaattatacatatttatgggataaaatatgatgcttcaatacatgtatacaktgtgtaatgatcaaatgaaggtaattagcatatccatcacctcaaacatttataatttttgctgtgagaacagcaaagagatacattctggttgaacttgctacagaatagtaacaactgatgtgcttctgctagtctttttttttttttttttttttgagacagagtctcactctgttgcctaggctggagtgcagtggcacgatctcagctcactgcaacctctgcctcctgggttcaagcaattctcctgcctcagcctcctgagtagctgggattacaggtgccagccaccatgcctggttaatttatatttttgtagagacagggtttcatcaagttggacaggctggtcttgaactcctgacctcatgatccacctgccttggcctcccaaagtgctgggattacaggcgtgagccactatgcctggccaacttctgctagtctttttgcagtttgcctatttagttatctatgatctcctctact

SEQ ID NO: 318696 - DNA, 572 bp, Homo sapiens
ggcttttccctctcctctaatgactttttyattcacctctccaccttggctttatggcgtgcgcgcactcacacacatacacacacacacacacacacacacagagcttaggttagctcatcattatttctttagtacctgttatttgattttttgccaaccaggcaccagacttaattttttatattgcatatagtttgctaaataagggacatgtagtaataaaataatatcccagaggacattttcacattttacttgctgtttctctttcaaaatttccaactttagaagaggcaaacagccataggctctggatataatagcttcagctgcaaataaaaaaattgtctttctggatggaaggtgtgaaaaggactattattgcatcagtctctcagctactctcccacagaacattgcggtctgttcaaacgaatgaggacagtagtgaataaaccagtcttttaaacttgtgtaagattttccatacctgggtttcagatcattttagaggcaagtattaatttattcttttttctcctaatttttcatatggacaaatttaggca

SEQ ID NO: 318697 - DNA, 572 bp, Homo sapiens
ggcttttccctctcctctaatgacttttttattcacctctccaccttggctttatggcgtgcgcgcactcacacacatacacacacacacacacacacacacagagcttaggttagctcatcattatttctttagtacctgttatttgattttttgccaaccaggcaccagacttaattttttatattgcatatagtttgctaaataagggacatgtagtaataaaataatatcccagaggacattttcacattttacttgctgtttctctttcaaaatttccaackttagaagaggcaaacagccataggctctggatataatagcttcagctgcaaataaaaaaattgtctttctggatggaaggtgtgaaaaggactattattgcatcagtctctcagctactctcccacagaacattgcggtctgttcaaacgaatgaggacagtagtgaataaaccagtcttttaaacttgtgtaagattttccatacctgggtttcagatcattttagaggcaagtattaatttattcttttttctcctaatttttcatatggacaaatttaggca

SEQ ID NO: 318698 - DNA, 572 bp, Homo sapiens
ggcttttccctctcctctaatgacttttttattcacctctccaccttggctttatggcgtgcgcgcactcacacacatacacacacacacacacacacacacagagcttaggttagctcatcattatttctttagtacctgttatttgattttttgccaaccaggcaccagacttaattttttatattgcatatagtttgctaaataagggacatgtagtaataaaataatatcccagaggacattttcacattttacttgctgtttctctttcaaaatttccaactttaraagaggcaaacagccataggctctggatataatagcttcagctgcaaataaaaaaattgtctttctggatggaaggtgtgaaaaggactattattgcatcagtctctcagctactctcccacagaacattgcggtctgttcaaacgaatgaggacagtagtgaataaaccagtcttttaaacttgtgtaagattttccatacctgggtttcagatcattttagaggcaagtattaatttattcttttttctcctaatttttcatatggacaaatttaggca

SEQ ID NO: 318699 - DNA, 572 bp, Homo sapiens
ggcttttccctctcctctaatgacttttttattcacctctccaccttggctttatggcgtgcgcgcactcacacacatacacacacacacacacacacacacagagcttaggttagctcatcattatttctttagtacctgttatttgattttttgccaaccaggcaccagacttaattttttatattgcatatagtttgctaaataagggacatgtagtaataaaataatatcccagaggacattttcacattttacttgctgtttctctttcaaaatttccaactttagaagaggcaaacagccataggctctggatataatagcttcagctgcaaataaaaaaattgtctttctggatgsaaggtgtgaaaaggactattattgcatcagtctctcagctactctcccacagaacattgcggtctgttcaaacgaatgaggacagtagtgaataaaccagtcttttaaacttgtgtaagattttccatacctgggtttcagatcattttagaggcaagtattaatttattcttttttctcctaatttttcatatggacaaatttaggca

SEQ ID NO: 318700 - DNA, 631 bp, Homo sapiens
aaacaattagcttagatatttataactgatgctgtacttatatggttctgttgtattccatgaacatgtgttagatctttgaagacaaatatatgttattcatcttatgaaatttgtcctacacagaatttggcacatggttatccattcaaatgtttgtggaataaatatgaataaactcaaaataaagagaacatatattaattttgtcctaatttgcaaaattctccattttatttccctcactgcaaactatccccactgacagaattggtatctgatttcatagtgttgatttctaacatttttaaacaaaaaactatgtttcaattataaatcatgtatttaggtaagaatccttgcttcatcaactataagaacataaattctaagacattttctctactgagatgttaaaatgtaggagaaatgtgtgttttataattaacgaaataaaattccttaaggtcttaccatatgcttggccccatgctgtgttttatattaatyagttctcttaatcttcaccacagtcctatgaggagggtatttttattattctcattctaaaagttaataaaataagttcaaaagaaaggtaattttcccaaagttacccagattataagtg

SEQ ID NO: 318701 - DNA, 626 bp, Homo sapiens
aaaagcccaagaccaggtggattctaggacgcaaggctggttcaacatttgcaaatcaataaacacaatacatcacataaccaaaaccaaagacaaaaaccacatgattatctcaatagatgcagaaaaggcctttgataaaattcaacatcccttyatgttaaaaactctcaaactaggtattggtgaaacaccgcaaaataataagagctatttatgacaaacccatagccaatatattgaatagacagaaatggtacgatggacataatactattgcacccctactagactacagtgtagtataaacataaactttagatgcactgggaaaccaaacacttccgtctgacttgctttattgcagtggcctggaactgaatccacgatatctgaggtataccactatttgaactgaataaaattggtagctttcactttgtttttacttcttcagcaatcataacaaattttggtgtatttaaagtacagcaaggtaattattatcttcaaagagcccctaaattagtagagaagagaatacctataaaaatgtaaaaacaatgctggtaaataatgacaaatggcataataagggaatagatccaatggttaagaattgcaca

SEQ ID NO: 318702 - DNA, 626 bp, Homo sapiens
aaaagcccaagaccaggtggattctaggacgcaaggctggttcaacatttgcaaatcaataaacacaatacatcacataaccaaaaccaaagacaaaaaccacatgattatctcaatagatgcagaaaaggcctttgataaaattcaacatcccttcatgttaaaaactctcaaactaggtattggtgaaacaccgcaaaataataagagctatttatgacaaacccatagccaatatattgaatagacagaaatggtacgatggacataatactattgcacccctactagactacagtgtagtataaacataaactttagatgcactgggaaaccaaacacttccgtctgacttgctttattgcagtggcctggaactgaatccacgatatctgaggtataccactatttgaactgaataaaaytggtagctttcactttgtttttacttcttcagcaatcataacaaattttggtgtatttaaagtacagcaaggtaattattatcttcaaagagcccctaaattagtagagaagagaatacctataaaaatgtaaaaacaatgctggtaaataatgacaaatggcataataagggaatagatccaatggttaagaattgcaca

SEQ ID NO: 318703 - DNA, 626 bp, Homo sapiens
aaaagcccaagaccaggtggattctaggacgcaaggctggttcaacatttgcaaatcaataaacacaatacatcacataaccaaaaccaaagacaaaaaccacatgattatctcaatagatgcagaaaaggcctttgataaaattcaacatcccttcatgttaaaaactctcaaactaggtattggtgaaacaccgcaaaataataagagctatttatgacaaacccatagccaatatattgaatagacagaaatggtacgatggacataatactattgcacccctactagactacagtgtagtataaacataaactttagatgcactgggaaaccaaacacttccgtctgacttgctttattgcagtggcctggaactgaatccacgatatctgaggtataccactatttgaactgaataaaattggtagctttcactttgtttttacttcttcagcaatcataacaaattttggtgtatttaaagtacagcaaggtaattattatcttcaaagagccsctaaattagtagagaagagaatacctataaaaatgtaaaaacaatgctggtaaataatgacaaatggcataataagggaatagatccaatggttaagaattgcaca

SEQ ID NO: 318704 - DNA, 618 bp, Homo sapiens
ggtatatacccaaaggaatgtaagttactctatcataaagacacatacatgcatatgttcattccagcactattcacaatagyaaagagatggaatcaacctaaatgcccatcaatgatagactggataaagaatgtggtacataaacacaatggaatactatgtagccattcaaaagaatgaaatcacgtcctttgcagggacatggatggaattggaggtcattatccttagcagactaatgcaggaacagaaaaccaaatactacatgttctcatttataagtggaagctaaatgatgagaacacatggatatatagaggggaacaatgaacactggggtctatcagagggttgagggtggggatagggagaggatcaagaaaaataactaatgggtactagccttaatacctgggtgatgaaataatctacacaacaaaccccatgatacacgtttacctatgtaacaatccttcacgtgtaccccgatcttaaaataaatgttaaaaaaagaaacctttcttcttttctaatataggcatttagtgttataaatttctctctaagcacagcttagccccactccacaaactttaatgtaccacattttcattt

SEQ ID NO: 318705 - DNA, 618 bp, Homo sapiens
ggtatatacccaaaggaatgtaagttactctatcataaagacacatacatgcatatgttcattccagcactattcacaatagtaaagagatggaatcaacctaaatgcccatcaatgatagactggataaagaatgtggtacataaacacaatggaatactatgtagccattcaaaagaatgaaatcacgtcctttgcagggacatggatggaattggaggtcattatccttagcagactaatgcaggaacagaaaaccaaatactacatgttctcatttataagtggaagctaaatgatgagaacacatggatatatagaggggaacaatgaacactggggtctatcagagggttgagggtggggatagggagaggatcaagaaaaataamtaatgggtactagccttaatacctgggtgatgaaataatctacacaacaaaccccatgatacacgtttacctatgtaacaatccttcacgtgtaccccgatcttaaaataaatgttaaaaaaagaaacctttcttcttttctaatataggcatttagtgttataaatttctctctaagcacagcttagccccactccacaaactttaatgtaccacattttcattt

SEQ ID NO: 318706 - DNA, 567 bp, Homo sapiens
tcttgagactcttgagagtacagatactatatatggcttgtatatattgtagaagccaactctgtgccaggacataattggttcttgataaatatattgatttaatttgaatgtgaattgcatattaaatactgagactttggtaataccataataattaaaaattttgctaagtgcttactatgarcaagttacattcatcatttcattgagttcccactactattttataagagtgaacctttttgctagcagtaattttaatttacacctttaaggatttatttttaaatttacataaactgaaatttactttttttgggtagagttctgtgaattttgacacatgcatagaattgtatatctactttacagtggtatgattaccacagtcaatatacagtttcctcactcacccggatcccctcatggtgtctctctctagtcaaacctccttccaactgctaacctttggcagccgtattgatctgtttgccgttgctatagttttgctttttctggaatgtcatatacgtggaatcatactggatgcaatttttgaatgta

SEQ ID NO: 318707 - DNA, 567 bp, Homo sapiens
tcttgagactcttgagagtacagatactatatatggcttgtatatattgtagaagccaactctgtgccaggacataattggttcttgataaatatattgatttaatttgaatgtgaattgcatattaaatactgagactttggtaataccataataattaaaaattttgctaagtgcttactatgagmaagttacattcatcatttcattgagttcccactactattttataagagtgaacctttttgctagcagtaattttaatttacacctttaaggatttatttttaaatttacataaactgaaatttactttttttgggtagagttctgtgaattttgacacatgcatagaattgtatatctactttacagtggtatgattaccacagtcaatatacagtttcctcactcacccggatcccctcatggtgtctctctctagtcaaacctccttccaactgctaacctttggcagccgtattgatctgtttgccgttgctatagttttgctttttctggaatgtcatatacgtggaatcatactggatgcaatttttgaatgta

SEQ ID NO: 318708 - DNA, 398 bp, Homo sapiens
gcctatgagttgagtgtggctggaacaggcagctgggatcccaagggctcagaccatggcagagycaggcagagctgcagtcaccccatggggctcactctacagcctgggtgagctgagggtgctcactctggactggatgggagctgaaagggactctactatgtccgccttccctatcccactgcactctgtgtttgctctgccataaactcttcatgatgagagtcacagtctcaagtctgccagatgagtttcagatttctagagttttcaagtcttgttgagtctctgtattgttttctttagtatacttctttccctttgttttctgcaaatcctgctcaccctaacagccgacctttcaagaactggccaatgctcagagacagcattgc

SEQ ID NO: 318709 - DNA, 482 bp, Homo sapiens
ttgcctatacaaaattgggcaaagccaaacacaggtctgagaagttcaaaagatgagatgaggtgaggccaaagggaaggggatacagcatccatgttccatccatrtacggcaagccccttgcaatgggcaaagggatgtagagatgcaaccaatcccaggaagaaagacagataagaagcagatggcctcccagagaccccatcattgatgagtttcagagcagcggtcccagctgcaaggggcttagtaataccagacagagagcccagaaaattatagagtgggagaaaattacagagtggtgcatcaaagcagaagtcttggcctatggattgaataatagtagaagcataggaaatgccctgactaggaggtttcttgggtacccagtgctcatccaagcacaccaaatcctgagtgtcagagaacataacttagttctcatcctcaccagatgattgcactgaagtccctgcccc

SEQ ID NO: 318710 - DNA, 299 bp, Homo sapiens
aagattacaaaatgattccatttacttatcaaaaaacattcaactccagttaggatcttgctgtcacggtgttcttcagtttcaccttagagatgactgagtacatcctgaattaatcctttttacatagtattttctttttcagtattccctaatgtggaagacttacaaaagttattattattagcagtrgccagagaaataacccccaccactaggtattgctgttttaataaaagtgattgataaatagagataggtaaataggcagaaaacacttcctacttaagagtgttcat

SEQ ID NO: 318711 - DNA, 581 bp, Homo sapiens
cttgtggtctgcccctctccagaccctcagactcctcttcgttcagctggaagaggagaaaggagatctgggattataagagagaagatttttttttctttttttttttcagagatggagtcttgctctgtcacccaggctggagtgcggtggcatgatctcggctgactgcaacctttgcctcctgggttcaagcaattctcctgcctcagcctcccgagtagctgggattacaagcacatgccaccacgtccggctaatttttatatttttagtagagacagggtttcaccatgttggtcaggctggtctcaaactcctgacttcatgatctgcccaccttggcctcccaaagtgctgagattacaggcatgggccaccgcacccggccgggagagatttcatgggccagacctgtaagaggagtacatctcttttgcyaccatttcattgttcgaaactcagtcacctggtggcacttactctcagggaggctgggagatgacatctacctgtttgcctaagagaaaaaaatgggctctgccgagtatatcacaatctatgctgcaggctgggaccgc

SEQ ID NO: 318712 - DNA, 559 bp, Homo sapiens
gaggctggtttgggtccaggtgcctcccaggcaacgtggagcaaggttttctttcatgagtcctgagaagtagcctgcatgataactgcagaaccatgcgtcacttcattgattccttcatgcatgtatgcattcatttactcaaccaatacttattgggttccaactattacaaacattgaggatgcagaggtgaacaagatagaaaaagcccttgctcttttttctaatgaggaagagagaaactaagcaaatacacagaataaaraaagagaccacatataaagtgatttcatacagcaagatgtgctttctcagacttcttggaggggccatattcttattgcgaatggaggacttaagcccctcttcttcatttgaattaaggttctcccctcagttgataagatacccactcccttttaagacactcagagtgctctgcaaatctgcatccacaaacctcctgtcccccactcctcgcaagaagcagctgctctccaaggccatgtcagcccattcttcatccttcctgaacctatgagcaagaagtcaggct

SEQ ID NO: 318713 - DNA, 372 bp, Homo sapiens
catcacgatattggtatctacagctcattttgtacataagtattaatagcacttccaggatttagacaaattaaatgttgagtgacagtgaggcatccaagtagaaaagcccagaaggcagttggagacactcaactggagctaagggaagaagtcagggctattgcttgagatatgagagatgtcacacttcgaggaagaagatgggaaggctggagaagcaagggacccacctgagcctcaggcaggcccagtgagaaaaaggagtgagggagtggggagtgggaaggccagtgaagaaggcagtccactgtgtccaggaggaggcggwgggaggagagaatgctgtcaaatgctgcaggggatgaggga

SEQ ID NO: 318714 - DNA, 546 bp, Homo sapiens
aaaggggtaaattcctccttcctccacttttctgtcctattcaagctttcaacagattggatgatggacacccacgttgaagaagacagtctactttaccgacactgctaactcagacgttaatctcatctggaaacatcctcacagacacacacagaaagaatgtttctatttgggaaccctgtggcacagtcatgttgacgcataaaattgaccacaatactagatctgacccaatttccmgcatgcttcttgggaaaaaaaggaagtgtgaggcaaatttctctaggtttttcatgaggagagttgcatacattctgacaaaggcagagaaagtgacctggtaaccaggtatcttcttttgatatatgctgcttgcattcagcaggttctaagcagtgaaactcagagtaacctatggtgaatttctgacttcccctcccttattgttggagcaagtcgaggaattttatgagacaagttgtgtgtctgctggaaagaataagggcaaggactagagaaatatagggtacatggacttaaata

SEQ ID NO: 318715 - DNA, 566 bp, Homo sapiens
gataatgatatttatgactatggccttgctgaatgactaaggaaatttaattatattctttaatttaggtattcaggcctagaatcttaaaattctgtttctcaggccaggatttcttgataaggcaccacaccgaggcttagtatatagccttagttctaggtgtatattatgtcataactatttaaaaaatatacttgtgtttatagatgctacttctcaaccagccagaatagtcattcaacatgtacaaccaatcagcaattcttccacaacaacaggagttcatcacatctattacatgcaaaatccatacatcactaagaagtttttcaaactcaggctcctggcttttgtaaatttyacttaataaaccaattaagctgtattcattataatccttggagggttatccaccaagacaatgctcttgcaactaaattgtctaactgaaatatgttcgatctgtctaaaattgccattgaaccattttactgttgcagaccagcaaaatttggatgggatttggattcatctagcaacttgggagacagatggtgttaaaa

SEQ ID NO: 318716 - DNA, 566 bp, Homo sapiens
gataatgatatttatgactatggccttgctgaatgactaaggaaatttaattatattctttaatttaggtattcaggcctagaatcttaaaattctgtttctcaggccaggatttcttgataaggcaccacaccgaggcttagtatatagccttagttctaggtgtatattatgtcataactatttaaaaaatatacttgtgtttatagatgctacttctcaaccagccagaatagtcattcaacatgtacaaccaatcagcaattcttccacaacaacaggagttcatcacatctattacatgcaaaatccatacatcactaagaagtttttcaaactcaggctcctggcttttgtaaatttcacttaataaaccaattaagctgtattcattataatccttggagggttatccaccaagacaatgctcttgcaactaaattgtctaactgaaatatgttygatctgtctaaaattgccattgaaccattttactgttgcagaccagcaaaatttggatgggatttggattcatctagcaacttgggagacagatggtgttaaaa

SEQ ID NO: 318717 - DNA, 441 bp, Homo sapiens
gttattgttgttaatctcttactatgcctaattyataaattaaactttattgtggggttgtgtaagaaaaaatacatggggtttggtactattggtagtttcaggcatgcgttggtggtcttagaacatattccccacagataaggggggactactctaatagaaactttccccacctagaattttggctccacaggattgcataggaactaggccatgggagaacagaaaaaagaaagaaaaataaaacaggacatttccacactctttcggaatattttaagttccctttcttgcttcttgagccagaactagggagaacttcttagaagaagccagagttaggcttctcccaagctctctctgccaactcctttgtgatcactgctgtgttggttgtgagcattagaggaaaaaaatgataaattcatcagtatttga

SEQ ID NO: 318718 - DNA, 441 bp, Homo sapiens
gttattgttgttaatctcttactatgcctaattcataaattaaactttattgtggggttgtgtaagaaaaaatacatggggtttggtactattggtagtttcaggcatgcgttggtggtcttagaacatattccccacagataaggggggactactctaatagaaactttccccacctagaattttggctccacaggattgcataggaactaggccatgggagaacagaaaaaagaaagaaaaataaaacaggacatttccacactctttcggaatattttaagttcccttwcttgcttcttgagccagaactagggagaacttcttagaagaagccagagttaggcttctcccaagctctctctgccaactcctttgtgatcactgctgtgttggttgtgagcattagaggaaaaaaatgataaattcatcagtatttga

SEQ ID NO: 318719 - DNA, 441 bp, Homo sapiens
gttattgttgttaatctcttactatgcctaattcataaattaaactttattgtggggttgtgtaagaaaaaatacatggggtttggtactattggtagtttcaggcatgcgttggtggtcttagaacatattccccacagataaggggggactactctaatagaaactttccccacctagaattttggctccacaggattgcataggaactaggccatgggagaacagaaaaaagaaagaaaaataaaacaggacatttccacactctttcggaatattttaagttccctttcttgcttcttgagccagaactagggagaacttcttagaagaagccagagttaggcttctcycaagctctctctgccaactcctttgtgatcactgctgtgttggttgtgagcattagaggaaaaaaatgataaattcatcagtatttga

SEQ ID NO: 318720 - DNA, 626 bp, Homo sapiens
tatcaagttaaaactgtttttttataatgagaagaagagcttgtgatgagagtgaagaatattgtaaaatcaaatttgaaaagcttattgaaggaaatttatgtccactgtcataagtaatttttgttattttgcctttcagtgtgtatgtacagagaaccatcgctacatgaaattggagaaaaacaagggcgttcaaggaaaagttctggaacaccaaccatgaatggaggcaaagttgtgaatcaagattcaacatagctgagaactctccccttcttccctctctcatcccttccccttcccttccttcccatttacccatttccttccagtaaatccacccaaggagaggaaaataaaatgacaacgcaagacctagtggctaagattctgcactcaaaatcttcctttgtgtaggacaagaaaattgaaccaaagcttgcttgttgcaatgtggtagaaaattcacgtgcacaaagattagcacacttaaaagcaaaggaaaaaataaatcagaactccataaatattaaaytaaactgtattgttattagtagaaggctaattgtaatgaagacattaataaagatgaaataaacttattactttaaaggaaaggattt

SEQ ID NO: 318721 - DNA, 597 bp, Homo sapiens
tactgttctaatgctgaagtgacttttgccagtgccatgtccaggtggtgaggtataagttacttgctcttagcatttggtctgatttttttgctttgtggacacctttgagagtatccacaaagcaatgtctcaggtgtggacacctgagagcatgttttagaaagctttgtaccctgtcttgtggcaggaaagaaagaacaggggttttacataaggaaataagtcctaggaaattagtcaacgcaaattgcatttgcstttgtaccttaccacagtcttatattgttttttaaactctgccatgaaatttggagacatgactgtgaaattcctaacttactatcttacaaagccagtagctaatttgttgctctatgtatgatcctgttacaagtccagtttgcaattcatttgtttcctagaacacagaagggtaccagtaatacactaaattttcaaggtgtgtagagaaataatatggaattagcagctatgactccaacagacaggattgtgtgagcagctgaaaggagcaaaaaagaactcagtgtaagagaaggcacatacatagttaagaatactaaagtattttta

SEQ ID NO: 318722 - DNA, 597 bp, Homo sapiens
tactgttctaatgctgaagtgacttttgccagtgccatgtccaggtggtgaggtataagttacttgctcttagcatttggtctgatttttttgctttgtggacacctttgagagtatccacaaagcaatgtctcaggtgtggacacctgagagcatgttttagaaagctttgtaccctgtcttgtggcaggaaagaaagaacaggggttttacataaggaaataagtcctaggaaattagtcaacgcaaattgcatttgcgtttgtaccttaccacagtcttatattgttttttaaactctgccatgaaatttggagacatgactgtgaaattcctaacttactatcttacaaagccagtagctaatttgttgctctatgtatgatcctgttacaagtccagtttgcaattcatttgtttcctagaacacagaagggtaccagtaatacactaaatkttcaaggtgtgtagagaaataatatggaattagcagctatgactccaacagacaggattgtgtgagcagctgaaaggagcaaaaaagaactcagtgtaagagaaggcacatacatagttaagaatactaaagtattttta

SEQ ID NO: 318723 - DNA, 660 bp, Homo sapiens
ttttaatgaatacttggataaaatgctgtatcttttcaggtttgactcccactgtcaacactgttttcatcacatgctaatttcttgcaatgcccccacttcctaaccctcaagctgtgctttgctcaagctgttctctctgtttctctatcaaataggaccataacagatgytctttcaagactcttcaggttacagcaaactttccttccttttgcttctcatagcatttgatatttcttttagtatttaatgtgttctgtcttgaatcacgatggtttttcttgctcctatagcagacaatgtgagctttagttcacagggacataatcctcttcaatgctttttatgaagccaagcaattcagcgcccagtttattcttgtttaaataaatgtagcaataatttaagtcaaggaaacagcaaaggttatgtggtgagatagaactgattgacagtactgattcagtccctttacctgtatgaacttggacatgctatttaattttgttaaaaatctctttttctattacattaaactgggagcaataattctcacattaaaaatgtttgaagattaagtaaaatgacaaaaattacttcccaaaaatctttgtccttctttcaatatcaagtttttcctacataattagctaacag

SEQ ID NO: 318724 - DNA, 573 bp, Homo sapiens
tgtcttgaatcacgatggtttttcttgctcctatagcagacaatgtgagctttagttcacagggacataatcctcttcaatgctttttatgaagccaagcaattcagygcccagtttattcttgtttaaataaatgtagcaataatttaagtcaaggaaacagcaaaggttatgtggtgagatagaactgattgacagtactgattcagtccctttacctgtatgaacttggacatgctatttaattttgttaaaaatctctttttctattacattaaactgggagcaataattctcacattaaaaatgtttgaagattaagtaaaatgacaaaaattacttcccaaaaatctttgtccttctttcaatatcaagtttttcctacataattagctaacagatgatgtatggtaagtttaataacaaataacaaccattcatttataggttgcaagcaaattttgttcaagatgtaaatataacattgtggatcacataagttattcaagaaaaaatattttccattctgtctccaactaacacattccccttcttattttctattccacaccg

SEQ ID NO: 318725 - DNA, 573 bp, Homo sapiens
tgtcttgaatcacgatggtttttcttgctcctatagcagacaatgtgagctttagttcacagggacataatcctcttcaatgctttttatgaagccaagcaattcagcgcccagtttattcttgtttaaataaatgtagmaataatttaagtcaaggaaacagcaaaggttatgtggtgagatagaactgattgacagtactgattcagtccctttacctgtatgaacttggacatgctatttaattttgttaaaaatctctttttctattacattaaactgggagcaataattctcacattaaaaatgtttgaagattaagtaaaatgacaaaaattacttcccaaaaatctttgtccttctttcaatatcaagtttttcctacataattagctaacagatgatgtatggtaagtttaataacaaataacaaccattcatttataggttgcaagcaaattttgttcaagatgtaaatataacattgtggatcacataagttattcaagaaaaaatattttccattctgtctccaactaacacattccccttcttattttctattccacaccg

SEQ ID NO: 318726 - DNA, 573 bp, Homo sapiens
tgtcttgaatcacgatggtttttcttgctcctatagcagacaatgtgagctttagttcacagggacataatcctcttcaatgctttttatgaagccaagcaattcagcgcccagtttattcttgtttaaataaatgtagcaataatttaagtcaaggaaacagcaaaggttatgtggtgagatagaactgattgacagtactgattcagtccctttacctgtatgaacttggacatgctatttaattttkttaaaaatctctttttctattacattaaactgggagcaataattctcacattaaaaatgtttgaagattaagtaaaatgacaaaaattacttcccaaaaatctttgtccttctttcaatatcaagtttttcctacataattagctaacagatgatgtatggtaagtttaataacaaataacaaccattcatttataggttgcaagcaaattttgttcaagatgtaaatataacattgtggatcacataagttattcaagaaaaaatattttccattctgtctccaactaacacattccccttcttattttctattccacaccg

SEQ ID NO: 318727 - DNA, 520 bp, Homo sapiens
gcttcttgaaagtagctaccatgattgctatattctcttcgtattctcaacagttctgggaattaaacaacaaatcgactccaacaaaataatttggtgaaaatacatcataaaatctgaattttttcttcctgtatatctctaagttgtgatcaaatgggaaaggcctctttctttcttaggctctcagtttctctaaatgtaaaaaagaaatgccaaattacacaatctcaaatgtcacttttgtcttactttatagctatattattcatattaaatacataatgtattaaaattaaagagcctatataaaatgttgtttcttcaaaaatagagctttcctaccaaagaaatggtggtaatatattattatttaataagcaaacaaagaaaaattaatcagagaaatagactttgctattgtgttagtaattatgactaatgaytctccatatggtatgtagaaattattgaattttcaagcatatgccagataaaaaagggcctctgattttggttc

SEQ ID NO: 318728 - DNA, 423 bp, Homo sapiens
caaactataccccacttgtctccttgcctttgctgtcaaattttgtctcagttgcccttccccatctatttcacaatcttgcacattcttcaaggcccagctaatctcctccatgaagcctttccaacctaacatcatccagactgcctgtgagctctgagcatcttttagctgagagcartttataaccagattctcaaattcatatgctcaaccaagtattgtctatagattaaataattaacatgtcttgcacatgtatttacccctgtttttcaaaagtgtgaaagtattgttttcattaataaattacgtattcttaggaaaaatgtgtcacggacctgtagttccccaaactccattctctcctttccatggtagatatcagacccattgctatcccaaattaagactacattttct

SEQ ID NO: 318729 - DNA, 594 bp, Homo sapiens
tctaaatgctgccaacttttatttaaagccagtcagttgatatacaatagtcaggagtcttgagtttgaatgccagcttgccaataagtacctctgtgactctaggtaaatcactgaacatytttggggcctccacttccgtaagaagtaaatggtgaattggccatgtcttttcccatttgtcttccaaatctagaatcaggtccctttttcagaatattcatttattttagggtgccttcagtgaactgactactcatgtagattaacttatacatgcttaggcgagtggtagaagaaattaaattcttccccttggatcagtaagtgttctaagtagaacattaattcaagttttactaagggattgctagatatactatagtcataatttaaaaagtggcagaatttcacagtaaaattggaactagaagtatgtgtatatatgtgtgcgtgtatgtatatatatatatatatatatttaaattttaatgtctcataatatcacatctctaaggtctgactgtctccccttctgaggaatttaaagtacatggatgatacggttcaagatgaatgtcagtccacagtctc

SEQ ID NO: 318730 - DNA, 627 bp, Homo sapiens
ttgaaacattctttcctccactccctgagtgtctgtctcctatgacatgtagaacagaagcctaaacaactacatggggcctgcactgcatagtcagtyaacatcttttcctgcttataccaagtcaacagcctagtatgtccaacagctgatatctgcaggaagctcagagagcaacattggtcaatgtctctgttccccatcacttcaatgattcattacatgtccattctcggggtcttcttttaaatcactcaaaaccaaaccaaaaaggtatacattagaaaaaaaagagagagagatgttctttatcagaagaacaagtagttggcaagagaaaataaagcaaaccaaataaaagacataaaactgaaaactcacaaatcatattataaaacaatattttgctgatttcaaatacagtaatcccatggcaacaatttaattgctgcctttttgcctgcgatcccagatttctcgtttgggactggacacaattttcatttctctgtgtacttagtgcttcacattgaaccaatattatttactacgtacttgcgcttgcttgcatactttaaaaggctgaagtgtttcttggtagaaaagctgatgataagcctgcaggtc

SEQ ID NO: 318731 - DNA, 546 bp, Homo sapiens
gaaatcactggttgcacgccaccaccattcacaatagcactcacctgccaggtttccattgctccttctactcctctggctccacagtccatgctgagggagccaggagtgcagagctgttgggcaagtaaacacagatggccaaagcacaaaccagggccygccaataggtgttctggggaaaccaataaggtattccaggaaaacagtacactcttgcaagccaactaaaatattttaattaccaactctaagtaataactattaccaaaatttattctatatacactttaaaaattaactcaaggaacatttcccctatttggcaatgtcacagcacatcagcgtcaaatatataaaagctacatttacttttttgaagaaaagccaaaatcatcataaatgagtctttggtgcccccttgtgaaatgttcagtgtaatccttgaaataccctccatacagaaataatgggtatttcaatttttaaaaacacttaaagcattttctatttatggtacactatttttaatggaaataactgaaa

SEQ ID NO: 318732 - DNA, 573 bp, Homo sapiens
tggttttaactcacttagcttggagaaatcagaagattccctgtctgaccaggagggttcttttcaagaactactgcagaaacataaggggactcccaaagttggggacaccataagaaagacaagacatcttggaaggtcgagaagactgtccacccttcgggaacaaagctcgcagtcagagacagaagaggaaaagcagattgtccaccctgactctgaaaaaagagcagcagctgcttctgccatctcagagggtcagctgagtagtgatgagagtggggatttgacctttagcttaaagaatttatcaaagaccccagccttgcaattggtacatgagctgttcatgaaaagcaagaggaaaagattacaggaaaatagtggacatgaattcttagagcaaggggatggggagaaaatagctgtactgcagtgtatacttgcaggactgatyggcaagaaaatgggtatagaaaaactggacatcttaacagaattaaaatatagaaatttaaagcatattcttgctatggttttagagtccttgaccgcagagagcctatgcaggta

SEQ ID NO: 318733 - DNA, 578 bp, Homo sapiens
atgctatgccatgtatgctctattcttagccacagtggcaaatgaaagtagattgacttaattgtttttcatatttcttttaaattccattatttactatttgaaggcaataactatttcattgtttgttcctagttaaacaaattagcagctgcatttacaaacagtcatttttttcctaacatattatatcataatatgcttgtatatgttaagcttaaaatagttttctctgactaggtagggaaaacagtaatgctrgaaaggtaagggtagtatattagtcagagttccccaggggaagagaatcaattgaagatgtgggtggggcttggggggtgctgttgggaagggagagaagaagtgagaacaatttaaggaattgtcttatgatactgtgggactagagactcaggctgggtttgtatgttgcagtattgagaaggatttcttcttctttgggaaaactcaataattgctctgatagtcttcaattgatggaactgtggaagaggccaatgtgacctacccacattatactttacgcacattttattgatttaaatgttaatcacatc

SEQ ID NO: 318734 - DNA, 345 bp, Homo sapiens
aaggaaataataataatatatttgtatttgaaataaagttgcctttaggaaactagtgtagaccgtagagaaaaatgtttcctcagtgctaacgtgagccttgtttttrtaggtgtgctttaattataatctactttattgtaatataccgatcatgtctaaatcactatatttttgacttaaagaagccttattagagatgccagtatagatatttaagttcttctacataaaaaaaaaattatacgggaagaaaaactatctgcagatttctttggagagccaaaaatatgtaactctggtttattagttgagtgaataaatctaatgtgcagtaaaactgag

SEQ ID NO: 318735 - DNA, 635 bp, Homo sapiens
taaatctgctttttgataaaagcagaatgtggaatttagaaatgtaattttaattacttgttggaacagattttcttattaggagagaacacctttgaaatcagagagtgaatctaattctctaaaaaagtttaattttacagwcttttggaaatatattggaaactttgttcattagatctctttataaatcaacttaccaaaaagagaaaacagaatagaaagatatattgattaccataagcatgacactcaaggacttaacaattattttaagtatattttccagattataatctggaaaattatatattatatatattgccaagacttgaatgctgtttttgcaataaaaatttaaaacataatgtataaatatttaaattagattaactttagaaaattttgaattttattatataattattatttaaaaatttaaatgatagaatgtgctattgatacctaaaatatcatttaaaatcaaaatattatattttattacattctatcttaaatattatattatattttaatataatataatttgtacttatctgtgtgtaattacattactgtaaaccaaaaatgtcaattagaggtaatatatggattccaggatcaacctaatcatt

SEQ ID NO: 318736 - DNA, 635 bp, Homo sapiens
taaatctgctttttgataaaagcagaatgtggaatttagaaatgtaattttaattacttgttggaacagattttcttattaggagagaacacctttgaaatcagagagtgaatctaattctctaaaaaagtttaattttacagtcttttggaaatatattggaaactttgttcattagatctctttataaatcaacttaccaaaaaragaaaacagaatagaaagatatattgattaccataagcatgacactcaaggacttaacaattattttaagtatattttccagattataatctggaaaattatatattatatatattgccaagacttgaatgctgtttttgcaataaaaatttaaaacataatgtataaatatttaaattagattaactttagaaaattttgaattttattatataattattatttaaaaatttaaatgatagaatgtgctattgatacctaaaatatcatttaaaatcaaaatattatattttattacattctatcttaaatattatattatattttaatataatataatttgtacttatctgtgtgtaattacattactgtaaaccaaaaatgtcaattagaggtaatatatggattccaggatcaacctaatcatt

SEQ ID NO: 318737 - DNA, 551 bp, Homo sapiens
ttccagaaaaataatttatgacctctaaagcatataaatatgttttagaaaacagtaacacaagataacaataaactagtaaagttagtcaatctaaatatacattgaaagcctaccatgtaacaaggacaatgtggcatgtcaatatgaacacaactaaaacttcacacatgattggtacaaaaatttatagttttacatttctcttccctgaagttcttcaaaatgcaaacaaaggagcccaaaataaataaaactttatcttctttgtaattagacaaagatcccacagagtccaaagaagctcttctasatataatgcaacttggatgaagtaatacaagaaaaaatcatatagtacctagcaagaacactcaatgagatctcacctattcttacttttaaaatgttaaaagtcactatgaatatatgaattcatagaataaaaaaattgtactgaaatatataataaaaattactaaatatgcatcatgcttgcaaatcgaagttaatgcaaggtgcctttctaagaatttgacagaatcattaga

SEQ ID NO: 318738 - DNA, 627 bp, Homo sapiens
attttttaattatatattatgtttaaaagtatgacagtaacaatattaaacattaaacttttaaaaggcaagtaaaattacataaacatcaaaacattacatttgtatttacaaatactgttttaaaataaaaatataaacaaaaatagtctagaaaaagaaacttataactagataaaattgatttaggcaccaattaatataaatctatacaataatgaaataaaaaaamcatttatataaatgggactgagagcagggtttttgacaagaatgataatatggacaaatttcaataaaggctattgttagaaacataaaatatgcaatatccaaaatatctaccattcggaatgggaaatgatatatggccacagatatgcaataaataaaaagataatactatagaaaatagaattccagttccagccataacagagtagatagcactaatcttgccaactaaaaccataacccttgataaaaaatatgtatgaaaacgttttgaaggtcatagagatcatccagtgcagacaggcttgaggagttagaaactgagagaaagggaacttacatggtgagatttagtcacctctgctttttccttagagccattttttaacttgc

SEQ ID NO: 318739 - DNA, 609 bp, Homo sapiens
ctatcgggtacaggacttaatcctgagtgatgaaataatctgtacaataaacctccttgacatgagttgacgtgtgtaacaaacctcatgtaccaccgaacctaaaataaaataattattttagaaaacaaaaattctcaacaaaatataaacaaaatctagcaaaaccaaaaagaatgataaagcatgaccaagcaggagtatcatagaaatgcaacatggaattaatagcttaaaaytggttaatgtgaaacatcatattaataaattaaaggacaagagccataagatctttttgacagatgcagaaaattgcttcatgatatccaccatccagttttatttgctttaaaaaaaaaagcttaaaaactccaaataaaatagaacttcttcaacctaataaagggtatctatgaaaacccccaaaattagctttctgcttactgttgagagactgtatgttttccccttaattgggaagaatataagcatgtgtctcataacatctattcagcactgcattgaggattctagttagtgcaatcagagaagacatagaaataaaagcatcaaactgaaaataaagaataaaaagaataaaactgtaat

SEQ ID NO: 318740 - DNA, 609 bp, Homo sapiens
ctatcgggtacaggacttaatcctgagtgatgaaataatctgtacaataaacctccttgacatgagttgacgtgtgtaacaaacctcatgtaccaccgaacctaaaataaaataattattttagaaaacaaaaattctcaacaaaatataaacaaaatctagcaaaaccaaaaagaatgataaagcatgaccaagcaggagtatcatagaaatgcaacatggaattaatagcttaaaactggttaatgtgaaacatcatattaataaattaaaggacaagagccataagatctttttgacagatgcagaaaattgcttcatgatatccaccatccagttttatttgctttaaaaaaamaagcttaaaaactccaaataaaatagaacttcttcaacctaataaagggtatctatgaaaacccccaaaattagctttctgcttactgttgagagactgtatgttttccccttaattgggaagaatataagcatgtgtctcataacatctattcagcactgcattgaggattctagttagtgcaatcagagaagacatagaaataaaagcatcaaactgaaaataaagaataaaaagaataaaactgtaat

SEQ ID NO: 318741 - DNA, 451 bp, Homo sapiens
tcccttctctggagtgagaccattcattacctgcaaaactttaaaaagggccactattgatccatttkataccgtcttgccaattagaaaaatgctggctacactcccttcttcttgggcacatgatttagaggagcatgagctggttttcagctcctactcactcactcagtcattgttcttatgggaggataactacaaaaccatagatgatgttcctgatcatgcattcattcaaagagttcaggagacaaccaagttctgtcagttatcttggggagatttccctggcatgctcatatatgattctaaaaaggcctatctctggtgacttgtgaacacctgaaggcaagccactggttcaattgctgtcagtatctctagcttaccaccattccacaagtatagaaacaattctgcttgccatcaatcactaaaggcctgccttgca

SEQ ID NO: 318742 - DNA, 501 bp, Homo sapiens
gcctatctctggtgacttgtgaacacctgaaggcaagccactggttcaattgctgtcagtatctctagcttaccaccattccacaagtatagaaacaattctgcttgccatcaatcactaaaggcctgccttgcaagccgaggctacatgatattttaataatttaaaattaaattaaaaaacaaaaaagaaaatcagtatagataattagtggattagwctgtcaagtgcaatgccaaaatgtgacaaaagaaagaaaaaattaaactaataaagagaaaaatgagaaatttggagaatagcttcagaaaatttggacattctagaatgagataaagcaacagaagaagaacaactaaacaaataacagaaaattacttatctttacagtcagaagaaaggctgcagtgtttaacttgaaaaggctcattgaaattcaagtgagaatattttttaaaaaatacaacaaagccaggtgtagtacctgtaatccaagctact

SEQ ID NO: 318743 - DNA, 599 bp, Homo sapiens
tatttaaatgtttcatatattttgagttaattttgatatttggtgaaaggtaggattccagcttcaattttctgcatatggctagccagtcattccagcaccgtttattgaataggtagtccatttaccattgcttgttttgattggctttgtcaaagatgagatggttgtgggtgtgcagttttatttctgagtcctctattttgttccattagtctatgtatctgtttttttgttttgtttgttttttgagacagagtcttgccctgtcaccaggctggagtgcagtggtgtgatctcagctcacagcaccctccacctcccaggttcaagcaattctcctaccttagcctcccgagtagctgggactacaggcgtgcaccaccactccaagctaatttttgtatttttagtagagacagggtttcaccatgttggccaggatggtctcgatctcttgaccttgtgatccacccacctyggcctcccaaaatgctgggattacatgcatgagccacaacacctggcccctatgtgtctgtttttgtgcccgtactatgctgtctgggttactgtggctttgtaggatagtttgaagt

SEQ ID NO: 318744 - DNA, 599 bp, Homo sapiens
tatttaaatgtttcatatattttgagttaattttgatatttggtgaaaggtaggattccagcttcaattttctgcatatggctagccagtcattccagcaccgtttattgaataggtagtccatttaccattgcttgttttgattggctttgtcaaagatgagatggttgtgggtgtgcagttttatttctgagtcctctattttgttccattagtctatgtatctgtttttttgttttgtttgttttttgagacagagtcttgccctgtcaccaggctggagtgcagtggtgtgatctcagctcacagcaccctccacctcccaggttcaagcaattctcctaccttagcctcccgagtagctgggactacaggcgtgcaccaccactccaagctaatttttgtatttttagtagagacagggtttcaccatgttggccaggatggtctcgatctcttgaccttgtgatccacccacctcggcctcccaaartgctgggattacatgcatgagccacaacacctggcccctatgtgtctgtttttgtgcccgtactatgctgtctgggttactgtggctttgtaggatagtttgaagt

SEQ ID NO: 318745 - DNA, 538 bp, Homo sapiens
aagaatagcatgggaaaaccggcacccatgattcaattacttccccctaggtccctcccacaacatatgggaattctgggagatacaattctagttgagatttgggtggggacacagtgaaactacatcaatagctaacatgtaccacatatttactgtgttaggtattgatctaagaacttataaatattattaactcatcacaaacctgaagtaaatactattattattcccattgtacagataaagaaattgaagcagagataagttgaaaaacctatccactattacagagttatcaaatggcaaaaccagcattcaaactcaggtggtcctgctctggagtccacattcgtaaatattatgctgcagtaaatattaatcttgagaactaggtgatatggtttggctgtgkcccactcaaatctcatcttgaattgtagttcccataatccccacatatcatgggagtaacctgatgggaggaaactgaatcatagggcagttatttctatgctgtcctcataatagtgagttt

SEQ ID NO: 318746 - DNA, 629 bp, Homo sapiens
gaggagccaaatgttaatcatcaagaaaatggggaaaatattctccagagcatgtcagagaccttcatggcagcccctcccatcaaaggcctggagacttaggagggaacaatggtttcctgggccaggcccagggccatcctgccctatgcagcatcaggacatggtgccctgcctcccagctgcttaagctctagccatggctaaaaagggccaatgtacagctcaggccgttgmttcaaagggtgcaagtctcaagccttacatgtggtgttggacctgtaggtgcataaaagtaaaaaattgaggtttgagagaatgtccagctagatttcagaggatgtatggatgcccactcagaagtttgcttcaggggtggggccctcctggggaacctctgcgagggcagtgcagaagggaaatgtggggttggagccccaacacatagtcttcagtggggtactggctagtggagctatgagaacatggccgctgtcctccagacctgagaatgacagacccacccacacgttgtactgtgcatctggaaaagccacagatactcaacaccagcccatgaaagcagccttggggtggggcggggctataccctgcaaacctatactcac

SEQ ID NO: 318747 - DNA, 629 bp, Homo sapiens
gaggagccaaatgttaatcatcaagaaaatggggaaaatattctccagagcatgtcagagaccttcatggcagcccctcccatcaaaggcctggagacttaggagggaacaatggtttcctgggccaggcccagggccatcctgccctatgcagcatcaggacatggtgccctgcctcccagctgcttaagctctagccatggctaaaaagggccaatgtacagctcaggccgttgcttcaaagggtgcaagtctcaagscttacatgtggtgttggacctgtaggtgcataaaagtaaaaaattgaggtttgagagaatgtccagctagatttcagaggatgtatggatgcccactcagaagtttgcttcaggggtggggccctcctggggaacctctgcgagggcagtgcagaagggaaatgtggggttggagccccaacacatagtcttcagtggggtactggctagtggagctatgagaacatggccgctgtcctccagacctgagaatgacagacccacccacacgttgtactgtgcatctggaaaagccacagatactcaacaccagcccatgaaagcagccttggggtggggcggggctataccctgcaaacctatactcac

SEQ ID NO: 318748 - DNA, 559 bp, Homo sapiens
agaggatgtatggatgcccactcagaagtttgcttcaggggtggggccctcctggggaacctctgcgagggcagtgcagaagggaaatgtggggttggagccccaacacatagtcttcagtggggtactggctagtggagctatgagaasatggccgctgtcctccagacctgagaatgacagacccacccacacgttgtactgtgcatctggaaaagccacagatactcaacaccagcccatgaaagcagccttggggtggggcggggctataccctgcaaacctatactcacagggtggagctgcccaatgctgtgggagcccactcattcatgtgccctggatgtaagacatggagtcaaaggagatcatttagaactttaaggtttaatgactgccctatttgattttgaacttgcatgcggcctgtagtccctttgttttggccagtttctcccatttcgaatgggtgtatttacccaatgcctgtacccccattgtatccaggatgtaactaacttgctttttattttacaggctcataggcagaaggaactt

SEQ ID NO: 318749 - DNA, 629 bp, Homo sapiens
gaggagccaaatgttaatcatcaagaaaatggggaaaatattctccagagcatgtcagagaccttcatggcagcccctcccatcaaaggcctggagacttaggagggaacaatggtttcctgggccaggcccagggccatcctgccctatgcagcatcaggacatggtgccctgcctcccagctgcttaagctctagccatggctaaaaagggccaatgtacagctcaggccgttgcttcaaagggtgcaagtctcaagccttacatgtggtgttggacctgtaggtgcataaaagtaaaaaattgaggtttgagagaatgtccagctagatttcagaggatgtatggatgcccactcagaagtttgcttcaggggtggggccctcctggggaacctctgcgagggcagtgcagaagggaaatgtggggttggagccccaacacatagtcttcagtggggtactggctagtggagctatgagaacatggccgctgtcctccagacctgagaatgacagacccacccacaygttgtactgtgcatctggaaaagccacagatactcaacaccagcccatgaaagcagccttggggtggggcggggctataccctgcaaacctatactcac

SEQ ID NO: 318750 - DNA, 617 bp, Homo sapiens
agccttacatgtggtgttggacctgtaggtgcataaaagtaaaaaattgaggtttgagagaatgtccagctagatttcagaggatgtatggatgcccactcagaagtttgcttcaggggtggggccctcctggggaacctctgcgagggcagtgcagaagggaaatgtggggttggagccccaacacatagtcttcagtggggtactggctagtggagctatgagaacatggccgctgtcctccagacctgagaatgacagacccacccacacgttgtactgtgcatctggaaaagccacagatactcaacaccagcccatgaaagcagccttggggtggggcggggctataccctgcaaacctatactcacagggtggagctgcccaatgctgtgggagcccactcattcrtgtgccctggatgtaagacatggagtcaaaggagatcatttagaactttaaggtttaatgactgccctatttgattttgaacttgcatgcggcctgtagtccctttgttttggccagtttctcccatttcgaatgggtgtatttacccaatgcctgtacccccattgtatccaggatgtaactaacttgctttttattttacagg

SEQ ID NO: 318751 - DNA, 617 bp, Homo sapiens
agccttacatgtggtgttggacctgtaggtgcataaaagtaaaaaattgaggtttgagagaatgtccagctagatttcagaggatgtatggatgcccactcagaagtttgcttcaggggtggggccctcctggggaacctctgcgagggcagtgcagaagggaaatgtggggttggagccccaacacatagtcttcagtggggtactggctagtggagctatgagaacatggccgctgtcctccagacctgagaatgacagacccacccacacgttgtactgtgcatctggaaaagccacagatactcaacaccagcccatgaaagcagccttggggtggggcggggctataccctgcaaacctatactcacagggtggagctgcccaatgctgtgggagcccactcattcatgtgccctggatgtaagacatggagtcaaaggagatcatttagaactttaaggtttaatgactgccctatttgattttgaacttgcatgcggcctgtagtccctttgttttggccagtttctcccatttcraatgggtgtatttacccaatgcctgtacccccattgtatccaggatgtaactaacttgctttttattttacagg

SEQ ID NO: 318752 - DNA, 492 bp, Homo sapiens
atgattataggagatacaagttactttctctttggaaaatatacaatcctttttattttatcctccatttatataacttttatacatgtcatatctttgcatgcaaaaatggagagaaataagcaagttgatatttatttttgtgactattgttataatagataatacatactgagctcctcctctgtgctaggcacttagtacctcataatatctacccatttaatccccaaagcaaccccatgaaatagatacttttaatacctcctagtctacaattgtggaaacttttataaagacacaaagcttaaacaactttcccaaaattatattaatggccactaatgtggaggagtgatttgcacctaagccaactgtcttggaagtccacattcttagctgaaagggaaatctgygtttagtaaaggtatgagatggagctaagtttcttcatctgtattctgtaacttggtcattataataataaacatt

SEQ ID NO: 318753 - DNA, 570 bp, Homo sapiens
tgacaaatttatatggcaaatcctaatctgagacaaagacctcagggagatctgttccaaacctgcaggacgcatcacaaagtagtccttgttactagtgtagcctttacttcattggtatttaggaaacttaaaattcaccttatgtatttgtatttgagtcattttactaatattcttgatgcatcattcctactgaataggagtcatcttcaatattccagcacccaatcccaagagcagtgattctgatttgtgattactacctggtgactgggrcctgactacttgctgaaagaatttggctatgctgactccctgcttactgactatgctttgtgagtagcatccagtctgtttcttagtgactgacatcctttgactagcacagttgaacttagttaaacaaaaattattgagtgtaaagtgatttaatatccaatctctggagtcaaatcttggctccatcatttactaggtgtgtggctgtgaggcagctactaacctttgtaattccagtttacttcctctaaataaaataacaaaaacaaaccaacaaaaacaaaagca

SEQ ID NO: 318754 - DNA, 613 bp, Homo sapiens
gtctcttctttgttgaccaggaagccagaaaacacatagcaattaaaaagatgtacagtctaatatattccaataaaagatgattactcacatccaccaatgggtattcacaaattacctactaaccctttcaaaaatacgcctgattttgtattatyaccattgattttgaaagctgtgcaaaatattgttagacacagaagaggtttttttgcatttttttgtttttcttttctttttctgaataagctattggttatttttcttttaaaattctaatacttaattgaggatctgaaacagttttatcatattttggtgataattgtatttcacaataggtagaaaaatcaattgaagaaagatttaatattaactaaattttgactatcaggatagaattggcaataagaagaaaataaaagaagcagacattttcagggaaagggcccttgtaatttctgtccttttaaaaccacagaaattatctactctagattgctactgactagactgattatagtttttcaactaaggagttagaatggagtagaaacagaaaagggacaataggaataagaggcaagcacgactctggattataactattaaa

SEQ ID NO: 318755 - DNA, 572 bp, Homo sapiens
agctagaaacctaacttatcatgctggatttcttccttttccttatttctgacatcaagtcatcctaaaattctgtcatttgtatctcaaaaatatatcttgtatccattcccttatccccatttccacacacatcaccctagataagcaagcatcaaatctcacctagagaagtccttcacaatttctagtaagcatacaaattacctggggatcttgttaaagtgtacattctactttagtaggtctgaagaaagaccagagactcatcttttcttacagrcttccagatgacattgatcctgccattccatggatcacccatttaatggaaggtctagattacctcaagagtatctgtattgcagggtccaatttcatcctcctgcagtctactctccaccaagtagttagagtgatttttagaaaataaaaagcagatattttaaatatctgaaaataaagctatattttaactcaagagaaccaaactattatcagtaggcaagaaaggaactttcatagagcacagggtggtggtttttactttcgcaaagtagaatttgcaacag

SEQ ID NO: 318756 - DNA, 572 bp, Homo sapiens
agctagaaacctaacttatcatgctggatttcttccttttccttatttctgacatcaagtcatcctaaaattctgtcatttgtatctcaaaaatatatcttgtatccattcccttatccccatttccacacacatcaccctagataagcaagcatcaaatctcacctagagaagtccttcacaatttctagtaagcatacaaattacctggggatcttgttaaagtgtacattctactttagtaggtctgaagaaagaccagagactcatcttttcttacagacttccagatgacattgatcctgccattccatggatcacccatttaatggaaggtctagattacctcaagwgtatctgtattgcagggtccaatttcatcctcctgcagtctactctccaccaagtagttagagtgatttttagaaaataaaaagcagatattttaaatatctgaaaataaagctatattttaactcaagagaaccaaactattatcagtaggcaagaaaggaactttcatagagcacagggtggtggtttttactttcgcaaagtagaatttgcaacag

SEQ ID NO: 318757 - DNA, 572 bp, Homo sapiens
agctagaaacctaacttatcatgctggatttcttccttttccttatttctgacatcaagtcatcctaaaattctgtcatttgtatctcaaaaatatatcttgtatccattcccttatccccatttccacacacatcaccctagataagcaagcatcaaatctcacctagagaagtccttcacaatttctagtaagcatacaaattacctggggatcttgttaaagtgtacattctactttagtaggtctgaagaaagaccagagactcatcttttcttacagacttccagatgacattgatcctgccattccatggatcacccatttaatggaaggtctagattacctcaagagtatctgtattgcagggtccaatttcatcctcctgcagtctactctccaccaagtagttagagtgatttttagaaaataaaaagcagatattttaaatatctgaaaataaagctatattttaactcragagaaccaaactattatcagtaggcaagaaaggaactttcatagagcacagggtggtggtttttactttcgcaaagtagaatttgcaacag

SEQ ID NO: 318758 - DNA, 582 bp, Homo sapiens
tatctcctggggagattgaatatgaagcagagagaaaaagaggaaatcatagtagaagatagtagatgggaatacggtaggcatagaggccaaaaagtgtaaaggagaagagtgacttattgtgttatagagtccctagatagggtgcattagatgctctctgttgagggaaagacaagctgagaagttcaaccggctgatattcgtgctgcagagccactgctgcatcctgaatggcaaagygtacttatcaaatttttctgctgaaacactttctcaaattccctctttcatgtagctttacaagtaaaacttccttatatgaggtaacctctacatctctattctactataatctgtaaaatctaaactaatgaaatttctccacgtgctcctttcaccattgcacaagattttatagcattattcttgcaaatgcaggtgatttcatgcagagctcagtggagtctctctagataactctggttgccactactcatttcatctatatcacaggtaccctctaatttgtagttccaaagtcctggtactttggattgagaattgtgtttgttttaactc

SEQ ID NO: 318759 - DNA, 608 bp, Homo sapiens
caaaaattagtagatattggcctgatacatgaaagcttctgtgctaaggccctagggatagctgaatgagcattttaccactacaaacccacgtgttgttctttttttttttttttagtttccagaatttggctttattttgcagtatagaaatcatttggagccattttgagacagaagtagaggctctgtcaagtcaatactgcattgcagcttggtccactgaagaagccatgcctgagatacaaaagatgtgctacactttacccgctttatgttcgattcctctccccttttctctcatcaactttattaggttaaaacaccwcatacaggctttctccaaatgactccctattgtctggagtttggttagaattttatgcccacataaaccaaacttgtggctaggctatttgggccctgccataacatttgacataacacaaaatataaagtcatagggaaaacttctggatgccatcccaaaccgtggactattcaatttagaatctcctgaacctcaagaggacagatggcacacaactgtatggatccagctcttgagcagcagaagcacatagctacactgattaaaagataaactg

SEQ ID NO: 318760 - DNA, 549 bp, Homo sapiens
gaaggggagtttattaggagaattgattcacacagtcacaaggtgaagtcccacaacaggccatctgcaagctgaggagccaggaagccagtccaagtcccaaaacctcaaaagtagaaaagcggatagtgtagccttcactctgcagccaaaggcctgaaagtccctggtgaatcactggtataagtccaagagtccaaaagctgaagtacttggagtctgatgtttaagggcagaaagcatccagccagggagaaatgtggaggccggaagactcaaacagtctagtctttccacattcctctgcctgcttttatcctagccacgctggcagctgattagatggtgcccatccagaytgagggtgggtctgcctttccccatctactgactcaaatgttcatttcctttggcaacactttcatatacatactcaggaacaatatccaatcaagttgacactcaatattaaccaatacaggtatagcctcctcttgccctggaaacacatagatggcagggtgggctactctagctatccttgccacc

SEQ ID NO: 318761 - DNA, 549 bp, Homo sapiens
gaaggggagtttattaggagaattgattcacacagtcacaaggtgaagtcccacaacaggccatctgcaagctgaggagccaggaagccagtccaagtcccaaaacctcaaaagtagaaaagcggatagtgtagccttcactctgcagccaaaggcctgaaagtccctggtgaatcactggtataagtccaagagtccaaaagctgaagtacttggagtctgatgtttaagggcagaaagcatccagccagggagaaatgtggaggccggaagactcaaacagtctagtctttccacattcctctgcctgcttttatcctagccacgctggcagctgattagatggtgcccatccagactgagggtgggtctgcctttccccatctactgactcaaatgttcatttcctttggcaacacttwcatatacatactcaggaacaatatccaatcaagttgacactcaatattaaccaatacaggtatagcctcctcttgccctggaaacacatagatggcagggtgggctactctagctatccttgccacc

SEQ ID NO: 318762 - DNA, 603 bp, Homo sapiens
ccatcttacatgtaatgacaacttcaagctcaaagtaaagagaaggagaaaaatctaccaagcaaatgaataagagaaaaatgcaggagttgctatcctaatttcagacaaaacagactttaaaccaacaaagatcaaaaaaaacaaagaatatcattatataatgtcaaaggttccaactcaacaagaaaacctaactatccaaaatatatatgcactcaatccaggggcacccatgttcataaagcaagttctaagagacctacaaagagacttagataatgacacaataatggtgggacasttcaaccccctactgacagtactggacagatcatcatggcagaaaactaactaaaatatatgagacctaaatgcaacatttgaccaaatgggcctaacagacatctacagaactttctaccttaaaattacagaacatacattcttctcatcggcacatggcacataatctaaaattgaccacacaatgagcaacaaaataatcctcaggaaattcataaaagccaaaatcatactaaacacattctcagaccacagcaccttaaagatagaaatcaataataagaaaattgttcaaaa

SEQ ID NO: 318763 - DNA, 425 bp, Homo sapiens
caaatcagcaggtctacttgatgtcacatataactccaagagagaccatttcaatgagtctacaagctacatctctaagtaatatgaatgtttcattgtattattcagtactttgcagaggctcattaaatgtttactgaaaggaatttaattgggaataaagccagaagtctgttgataaatgtgaatctgtagatgctatatgaagttctacataattaatctgtactctgcactctccttcatttttatagcaccaaaaatgaaactattgatatatgctacctttgagaagtagtataaaggatgcytaaaaaagaagttaaaaggatggtgatggtaatatatataatcttttcattaaattttaatacatagctcttataaacagaatataatgcttttatattcatagagagagatta

SEQ ID NO: 318764 - DNA, 578 bp, Homo sapiens
tattttttcacagtaagacttaaacctaacaataacattttaattacatgcaaaatacaaatttatttaaaacttttaataaacaatgagtttattgtgaagtgtgaataacagttgccttatcttacagttactttatctaatctgagtttttgtacggaataagataattatccaatttcattatcttgcatgtggatatacagttttgcaaataccatttgttgaaaatgttatcttttccctattgtttccttagtgtcttttttgaagatcagttgactgtctatgtgtggattgatttatcatctctctactctgttccattagtctatacgtttgttttcatgtcagtccatactattttgattactatgactttataacatatttcaaatccaggaaatatgatgcctttaccttttttcttctttctctaaattacttttactaktttggtcttctgtgattccatataagttttagaattttttctacttctgcaattttgataggaattgcattgaatctgtagatcatttgggtagtacgtacatttgaacaatattaagtcttcc

SEQ ID NO: 318765 - DNA, 644 bp, Homo sapiens
ggtctatggctgggtagaagtcttttataaaatatgtatataattaactaaaatacaagaaaggaacttctttatattgaccaaacacattttatcaaatcctgtattaaatgcaaggtaaataaattcactaggtaaatayattcacaaatgtgtgtatgtatatacatacataaaaatctaaaaaatgtaccaagtgtgtgtgtatatatatatagacagataaacacacacacacacacacacacacacacacacacacacaccaatttggaaatgagaaaaaaacaccattgagctaaattcagagaataaatagaacttgaaaattattaaaacccttttttttgaaaatcaattgatgaggaggaaaatgtcccacacaagacagggcaatagcaaaaagtcctatctgaaataaagaataattaataagtccctaaagcataccggagggtaaagaagtaatcatgttatcagaaaactttgatgttgattgctatcagctaattccttataatatcgatgaaggtttattgttaatatttctaaaaatcttactggcaacatttgtttattttgtaccaggcatgatgttgaggagcttccaacgtttaccttttttaattcttagaacctatagg

SEQ ID NO: 318766 - DNA, 644 bp, Homo sapiens
ggtctatggctgggtagaagtcttttataaaatatgtatataattaactaaaatacaagaaaggaacttctttatattgaccaaacacattttatcaaatcctgtattaaatgcaaggtaaataaattcactaggtaaatacattcacaaatgtgtgtatgtatatacatacataaaaatctaaaaaatgtaccaagtgtgtgtgtatatatatatagacagataaacacacacacacacacacacacacacacacacacacacaccaatttggaaatgagaaaaaaacaccattgagctraattcagagaataaatagaacttgaaaattattaaaacccttttttttgaaaatcaattgatgaggaggaaaatgtcccacacaagacagggcaatagcaaaaagtcctatctgaaataaagaataattaataagtccctaaagcataccggagggtaaagaagtaatcatgttatcagaaaactttgatgttgattgctatcagctaattccttataatatcgatgaaggtttattgttaatatttctaaaaatcttactggcaacatttgtttattttgtaccaggcatgatgttgaggagcttccaacgtttaccttttttaattcttagaacctatagg

SEQ ID NO: 318767 - DNA, 644 bp, Homo sapiens
ggtctatggctgggtagaagtcttttataaaatatgtatataattaactaaaatacaagaaaggaacttctttatattgaccaaacacattttatcaaatcctgtattaaatgcaaggtaaataaattcactaggtaaatacattcacaaatgtgtgtatgtatatacatacataaaaatctaaaaaatgtaccaagtgtgtgtgtatatatatatagacagataaacacacacacacacacacacacacacacacacacacacaccaatttggaaatgagaaaaaaacaccattgagctaaattcagagaataaatagaacttgaaaattattaaaacccttttttttgaaaatcaattgatgaggaggaaaatgtcccacacaagacaggrcaatagcaaaaagtcctatctgaaataaagaataattaataagtccctaaagcataccggagggtaaagaagtaatcatgttatcagaaaactttgatgttgattgctatcagctaattccttataatatcgatgaaggtttattgttaatatttctaaaaatcttactggcaacatttgtttattttgtaccaggcatgatgttgaggagcttccaacgtttaccttttttaattcttagaacctatagg

SEQ ID NO: 318768 - DNA, 509 bp, Homo sapiens
agaccagcgtggtcaacatggtgaaaccccacctctactaaaaatataaaaattagctgggcgtggtggcrggtgcctgcaatcccagttactcaggaagctgaggtaggagaatcgcttgaacctaggcggcgaggttgcagggagcagagatcgcaccattgcactccagcctgggtgacaagagtgaaactccacctcaaaaaaaaaaaaaattactgagttaacagttctacagaaatgactaggttcagttatgttctaccagaccgaagagactcaataaatgtaggtaaaaattaaagtttttgttttggcttgtcattctctaggctgtacagaaagcatggcaccagcattttctcttagtgaggcctcaggaaactttcacgcatggaggaagaaggtgaaggggaagcaggtacatcaaatggtgaaagtgggagcaaaagagagaggggagcaagagtgaggggggaaagcgccacactcattttaaacaaccagct

SEQ ID NO: 318769 - DNA, 509 bp, Homo sapiens
agaccagcgtggtcaacatggtgaaaccccacctctactaaaaatataaaaattagctgggcgtggtggcaggtgcctgcaatcccagttactcaggaagctgaggtaggagaatcgcttgaacctaggcggcgaggttgcagggagcagagatcgcaccattgcactccagcctgggtgacaagagtgaaactccacctcaaaaaaaaaaaaaattactgagttaacagttctacagaaatgactaggttcagttatgttctaccagaccgaagagactcaataaatgtaggtaaaaattaaagtttttgttttggcttgtcattctctaggctgtacagaaagcatggcaccagcattttctcttagtgaggcctcaggaaactttcackcatggaggaagaaggtgaaggggaagcaggtacatcaaatggtgaaagtgggagcaaaagagagaggggagcaagagtgaggggggaaagcgccacactcattttaaacaaccagct

SEQ ID NO: 318770 - DNA, 563 bp, Homo sapiens
atttgaaattaattaaaaagacgtgatataacagaatccttgagaaacagcgaaatcagtattaagagaaaagcttacagtaccgtattagtccattttcacactgctatcaagacatacctgaagctgggtaatttataaagaagagaggtttaattgactcacacttccacatggttggggaggccaaacttacagtcatggcagaaggggaagaggcacgtcttacayggtggcaggcgagagagaacaagtgtgtgtgagtgcggaaaaatactaccatttataaaaccatcatatctgaatatttgctcattatcacaagaacagcataggggaaactgcccccataatcaaatcacttcccaccacatctctccctcaacacccgggatttacaattcaagatgagatttggatgaggacacagccaaaccatatcaagcactaaacacctacatcaagaagatagaaggatctcaaattaagaacctaatgtcacacccagaggaactagaaaaacaagagtaaaccaaaatctagcagaagaaaataaataacca

SEQ ID NO: 318771 - DNA, 563 bp, Homo sapiens
atttgaaattaattaaaaagacgtgatataacagaatccttgagaaacagcgaaatcagtattaagagaaaagcttacagtaccgtattagtccattttcacactgctatcaagacatacctgaagctgggtaatttataaagaagagaggtttaattgactcacacttccacatggttggggaggccaaacttacagtcatggcagaaggggaagaggcacgtcttacacggtggcaggcgagagagaacaagtgtgtgtgagtgcggaaaaatactaccatttataaaaccatcatatctgaatatttgctcaytatcacaagaacagcataggggaaactgcccccataatcaaatcacttcccaccacatctctccctcaacacccgggatttacaattcaagatgagatttggatgaggacacagccaaaccatatcaagcactaaacacctacatcaagaagatagaaggatctcaaattaagaacctaatgtcacacccagaggaactagaaaaacaagagtaaaccaaaatctagcagaagaaaataaataacca

SEQ ID NO: 318772 - DNA, 621 bp, Homo sapiens
tacagtcatggcagaaggggaagaggcacgtcttacacggtggcaggcgagagagaacaagtgtgtgtgagtgcggaaaaatactaccatttataaaaccatcatatctgaatatttgctcattatcacaagaacagcataggggaaactgcccccataatcaaatcacttcccaccacatctctccctcaacacccgggatttacaattcaagatgagatttggatgaggacacagccaaaccatatcaagcactaaacacctacatcaagaagatagaaggatctcaaattaagaacctaatgtcacacccagaggaactagaaaaacaagagtaaaccaaaatctagcagaagaaaataaataaccaaaattcgagaagaactgaaaattgaaacattaaaatacaaaaaatcaataaaaccaaaatttgttttytgaaagaataaataagaatagactactagcttgaataacaaaggaaaaaaaagaagatccaaataagcacatcagaaacaacaaagctacattataattaaccccatagcaaaaaaaaaaaaaaatcctcaaacaattatcaactcttataagcacacaaactgcaaaaactaaaagaaatgg

SEQ ID NO: 318773 - DNA, 416 bp, Homo sapiens
ggaatgcaaattgttcatctttgtagatgacatgatcttatatatttggaaaaatcaaaagactgcaccaaaaatctctgagctgataagcaaattcagtagagttgtagaatacaaawtcaacatacaaaaatcacaagtgtttctataatgtaataataaatagccaaaaaagaaatcaagatgacagttccctttataatagtgacacacagaataaaacacctaggaataaatttaactaagaaggagaaagctctctaaaagcaaaactgaaaaatgctgatgaaagaaattgacaaggacaaaaataaatgtaaagactcatctcgctcatagatcggaaaaattaatttcattacaataattatactgcccaaagcaacatacagatttaatacaattcctattaaaaa

SEQ ID NO: 318774 - DNA, 628 bp, Homo sapiens
gaattttgccccatagccaccatagctggtagtgcactgagtctcacctgaagccattatgtcttagaggctcattcaaggccctcaacatggtacgtgggtatcactgctggttattcagggcccaagagctctttagttaacaagygatgtatactgctaggaatgggttcttcccttcaagtcagtggattcccttgtatctcagatgttatctagaaatttcttccagtagctagtgcctggaacaggggcttcatttctcttactggtgccctattatactgtggctgaactggtatccaaaatgcaagacaaagtccatcccagtcttttctctcctctcaaatagagggaaggggtgtcttttgtagctgtgagctgtgcttcctggggttaggggaggagtcatgccagcacttccttagccaccccagctggagtctcagtaggttacaggccacccccaaccccgtcaccaaccaagttcactgtctcttggcccagttcatcactaggacttgcctcagcgtcgcagtccttgtggcctctcctgtctttgaggtttacttttagacccagagcactttagccctcagtggtgagcaaggtatgtaagaactcaaat

SEQ ID NO: 318775 - DNA, 628 bp, Homo sapiens
gaattttgccccatagccaccatagctggtagtgcactgagtctcacctgaagccattatgtcttagaggctcattcaaggccctcaacatggtacgtgggtatcactgctggttattcagggcccaagagctctttagttaacaagcgatgtatactgctaggaatgggttcttcccttcaagtcagtggattcccttgtatctcagatgttatctagaaatttcttccagtagctagtgcctggaacaggggcttcatttctcttactggtgccctattatactgtggctgaactggtatccaaaatgcaagacaaagtccatcccagtcttttctctcctctcaaatagagggaaggggtgtcttttgtagctgtgagctgtgcttcctggggttaggggaggagtcatgccagcacttccttagccaccccagctggagtctcagtaggttacaggccacccccaaccccgtcaccaaccaagttcactgtctcttggcccagttcatcactaggacttgcctcagcgtcrcagtccttgtggcctctcctgtctttgaggtttacttttagacccagagcactttagccctcagtggtgagcaaggtatgtaagaactcaaat

SEQ ID NO: 318776 - DNA, 544 bp, Homo sapiens
cagagaaaatatatacattcccagaaacatatagtctaccatgactgaactgtgaataattagaaaacctgagcaaaccaatagtgactaataagactgaatcagtaataaaaaagctccaaacaatgaaaagcctagggacagacagatttacagctgaattctaccaaactcataaaaaagaacgaaaaccatttttttttttctcaaagtgtttcaagaaactgaataggtggaaaatgttcttaatccattgtaccaggycataatttctttgatataaaagccaagtaaggatgcaagaaaccaaaaactataggctaataaccctaataaacatagatgcaaaaatatccaacaaaataccactaacgtgaagccaacaacaaatcaaaaagataatacaggtgaatctagcaaagatggcagatagaagacagggctaacatgcagctaccacttagatagacagaacagtgtgtagagactcacaccatgaacttttgctccaagaaccatcacagaaatgtaccagaaaactgaa

SEQ ID NO: 318777 - DNA, 544 bp, Homo sapiens
cagagaaaatatatacattcccagaaacatatagtctaccatgactgaactgtgaataattagaaaacctgagcaaaccaatagtgactaataagactgaatcagtaataaaaaagctccaaacaatgaaaagcctagggacagacagatttacagctgaattctaccaaactcataaaaaagaacgaaaaccatttttttttttctcaaagtgtttcaagaaactgaataggtggaaaatgttcttaatccattgtaccaggtcataatttctttgatataaaagccaagtaaggatgcaagaaaccaaaaactataggctaataaccctrataaacatagatgcaaaaatatccaacaaaataccactaacgtgaagccaacaacaaatcaaaaagataatacaggtgaatctagcaaagatggcagatagaagacagggctaacatgcagctaccacttagatagacagaacagtgtgtagagactcacaccatgaacttttgctccaagaaccatcacagaaatgtaccagaaaactgaa

SEQ ID NO: 318778 - DNA, 502 bp, Homo sapiens
aaggatggccattcttactgcttgtatttaacataatactatacaccctagtgagagcagttaggttaaaaaaaacaaaaaagaaagaaaatgtatctaaatagaaaaggaagtagcaaaattatctctgtagataacattttatatgtaaaaaactagattccaataaataaataaatttgttagaattaagcaaatctagtacattgcagaatacaaaatcaacattaaaaatcagttgtgtttttatacactaaaaatgagcagtctgaaaagaaaattaagaaaacaatcccacttacaatattatcaaaaggaacaaaatactttggaataaacttaacaaaggagacaaaagatttcactgaaaattgcaaaaygttgcagaaagaaattaaagaacacgcaaacaaatgaaaagtcatcatacgttcatggactggaagacttaatattgctcaaatgttaccactccccaaaggaatctatagattcaatgcaa

SEQ ID NO: 318779 - DNA, 574 bp, Homo sapiens
tctgatactcaggcttcctctgagtgcactttgttgccccattcctgatttcccttccttgaggcatatcttttcctagttctttcactccccaacccaaaactcacatacatataaatacacacaaacacacacagaaaccttaagtttatccatacaacacttcaaagccttggtcttataagctatttgaagcattttttttcagtgatgcaatatatacctacgtctatattccatatctatgtatatttctayatttatgtatatatatccatgtatctctctatccagctttaacagcccataagaatcacaagtgcctaaatttcagacactgtggtaagttgttaaagaaaataatttgtaaaatattttgataccctgaaaatcataacctttaaaatttagataagttctcagaatgatttcctttttcaaaaactataaaagataacccaaatatacagaaatgccatgtttaatttaatctgaaactgcatgccttatctttagtagatggtgtggcaagaaaatgtcagtcctttctgaataagcaaagctgggagttagg

SEQ ID NO: 318780 - DNA, 607 bp, Homo sapiens
ctgtgagtgtgggctgaacctatgacctgcttctaatgaattacataggacaaacatgatgggatgccgcttctgagattaggttacaaaaggttataacttctgtcttgttacttttttccttgctttgatgagtgaactgccatgttggagaggcccatgtgacacagaggttgtagtggcccttgaccaaaaccagctgggagcagaggtctttagactaacagctctgaaggaactgaatcctgttaacagccaatgagtaagcttggaaataatcctgcatgagtgagatcttgattgcagccctgtgagagagaccraagcagggaacccagttaagtaatgcttagcttcctgattcatagacgtacacagaaactctgtgttgttttacgccactaaattcaggggtaattggttatacagcaatagttaactaatacaggccatagcatctctttgtagttaatgaagggacttgtggccaatagacccaactggctaaagggaggagttggaatttcaaagaagagaaattaactatggttatgttatatgcatgtttctatgcttgaaaactgtatcaggtatgagaaaaatttta

SEQ ID NO: 318781 - DNA, 513 bp, Homo sapiens
aacaatcagcagcaacagaaaaaatattattcaaacttaagcagaccctcctgaaaatatagttgccattgcctccccttctgattgaaaaaaagactgatccttatcaccaggaagtgcaaatgtagctgtccataagcatcataaagcccagtagaccattccatacttttccaattaaaatcttaayctttttgttaagtttagtatatgagcctttatttctggttattcagggagttactcctcactgagcactccatctgcatatcatgcatgtataaataaaccttgtgttttcatctgttaatctgtccattgacagttagtttgcaggccaccaatcactggacccaagatgaaagggaaaaggttttcctcaaaatatagtgactaagtagcctctaggagctgaggtctgagctcctacaactcaagaaaccacgttctgtgaacaaccagcaagcttgcaaaaggaaccttagcctcaaaagagatcgcagtcttggtcag

SEQ ID NO: 318782 - DNA, 403 bp, Homo sapiens
ttctgccggcattcatcacctgctaaatgaagagtccttgggccccaagtaaacagcagtgatatccgggtactacatcaagggctttgggtgagcctctaagacttgctggcttcaggtgagtctcagcacattaccacctstggtggctactgggcaaaattccttactcctgagaaaagcaaaggggattttgtcttgcaccttaggtgccagcagagccacagtggggtagagcaccaagtgggttcttggggtcctcgatttcaggacttgactcttgaacagcatttatggacatgccctggatcaaacgggagaccatttccctgaagggtgagtcccaggccaggcagcatctaccacaagctgacttaagggaacataggccttaagggaacac

SEQ ID NO: 318783 - DNA, 365 bp, Homo sapiens
ccttgggtgatatcatccatttctttagtctcttttgcctttatatagatgcatcaaatattgataccatctaatttgacctgcattttagagcccctgtgtgcctatctgacaactaaattttattgttccatggttactataagcttacatgtcccaaacagactttagtatcttcccctttaaatctgctccttcttgtttgtccactgttacatttccttatctcatcatccttctatctcatccttgggttaatcttcaactcttgcttgcccttcaaaccttacactcaatcagtcttgaagttgtactgtgtcayggtaaatactgtgtagaggcataaatcctctctctccaaatcc

SEQ ID NO: 318784 - DNA, 549 bp, Homo sapiens
gcagcataagaaaagaaagttgggaaaggaaatgtggttgccacacagtcagccacatcttccctattcctctgtagcagctaattgtataagacgttgatatcttttttatgccaccttctcccccgatttctccactggagcctcctggtggtggcagaccctgcagtttggggcagtcttgagtatatgtaaccacaggagcagctcttatgtgggaagacagaacacatagcctgggcaaatgggggagggcagattagataaaaacaagtccatatcactaaaaccaactattctgaaagacaatgactcgattgtgttttccctctaagaagraaacaaatacaaaacctggcaaataaacagtctaattattaaattctcttagatttgagaaccaagaaggcctctgaagcctatttacctttgttcttgtatgtctggcactatttcttttccttttatgaataaagaaaatctgaaataacacaacattacccttaatcatgtttgtgctacagaaataacatctccttgaaataccag

SEQ ID NO: 318785 - DNA, 547 bp, Homo sapiens
ttaactgacagctctgagatgtggcttctagaagagtgtgacaaagcaggctatccattcatttattcatccttttatttatcttttatttggagaatgagtgaggtaggtttctattgttcattccatttggcactttgttcatgttttttgtggggtttaagtagcccaaagtggatattagggattgaaagatggcagatacaargcaaggctagcttgcagctcctgcagggatgaatggagcaacatgtggagactcacatcatgaacttttgcttcaagaactactgcagggacattccaggaaagctgagacaatccacagactatatgaagaaactggatcactactgcaggctccctgagacaccaaaaaactgcgggtctgcctgctttctcagcagggaagctcatggtatggggcaaattctcagccctgggcattggctgcctggaaataaactcagtgctgctgtgggggcacagtgagagtgagactagcctttaggactgctggctgcatgggagtgggggtgaggcctgt

SEQ ID NO: 318786 - DNA, 543 bp, Homo sapiens
agggcttgagagatcagatattatcactggaatgatgttccctttaccttaggagagtaaaaggatatcagggatctacttgtgggtaagattccactgaaagaatgcaggaaatgcaggggaaaagtatccctgagtattaataaatagtagcattttattatctgtagcctcacataatggagttatatggtcasatgattgcagagagaagctgcccagaattagcgtagtgacggcaaccaagaacttgcagacaatgcaaaggtgatgtgacaaagttagggttggaggaaagattaaaaatgctgacacaacgccattttgtatctgtgtttcatgtcctggcttattgtatacaattatcctgccatgcaaagataaattctctctgcaagcattggaggtgccagtcacttgtcactgagaagcagaagaaattaagactgctaagcatggcagatttggcagaagcccagtctgagagatgtaacatgttttctagctaagaggggaaggggtttggaggtagaccctgacagt

SEQ ID NO: 318787 - DNA, 543 bp, Homo sapiens
agggcttgagagatcagatattatcactggaatgatgttccctttaccttaggagagtaaaaggatatcagggatctacttgtgggtaagattccactgaaagaatgcaggaaatgcaggggaaaagtatccctgagtattaataaatagtagcattttattatctgtagcctcacataatggagttatatggtcacatgattgcagagagaagctgcccagaattagcgtagtgacggcaaccaagaacttgcagacaatgcaaaggtgatgtgacaaagttagggttggaggaaagaytaaaaatgctgacacaacgccattttgtatctgtgtttcatgtcctggcttattgtatacaattatcctgccatgcaaagataaattctctctgcaagcattggaggtgccagtcacttgtcactgagaagcagaagaaattaagactgctaagcatggcagatttggcagaagcccagtctgagagatgtaacatgttttctagctaagaggggaaggggtttggaggtagaccctgacagt

SEQ ID NO: 318788 - DNA, 532 bp, Homo sapiens
aaatagtagcattttattatctgtagcctcacataatggagttatatggtcacatgattgcagagagaagctgcccagaattagcgtagtgacggcaaccaagaacttgcagacaatgcaaaggtgatgtgacaaagttagggttggaggaaagattaaaaatgctgacacaacgccattttgtatctgtgtttcatgtcctggcttattgtatacaattatcctgccatgcaaagataaattctctctgcaagcattggaggtgccagtcacttgtcactgagaagcagaagaaattaagactgctaagcatggcagatttggcagaagcccagtctgagagatgtaacatgttttctagctaagaggggaaggggtttgkaggtagaccctgacagtttgattcctttgcatctttcatgtcactgttacattcctaaaagaaaacgtgattattataatcttgttttatgcagcatctaaagttggttgttttggagggatgaggaacactgaatttatgccactagag

SEQ ID NO: 318789 - DNA, 574 bp, Homo sapiens
atgacatttgaattcttaaaactaacatatagataattccatactgttagtaggtagtgaaataagataacacatgaggatattctattttctttggcccatgtatccaaatctccaacaacctgctcagtcagcttggccagtccaacatagacaccccctcaggcccacagtgggcacgtttctctggctgccctcctgggatatccttggtcattttgcccaggtatccctggttccttgggaaagtcctaccctccaggtttgctcagcgcaggcctataccatggcttaacagctttgtgatggcagcactctcctaatcatcagggaaaaggtcagtaaactcatttgcaataattagctgttaatcagagagtagttaatatcaatgtgttattctgttccagkattttctttcctcccttgagatttctccaaggatttcccagagtcctgattgtcctgcttctactgattcttcagtaacagggtctatcttcttgccttgctgggtagaagaagcagcaagaaaatactttttcccagccttctctaacctctcttggtcatt

SEQ ID NO: 318790 - DNA, 538 bp, Homo sapiens
agaggctggaattctaatctcacctgtcatttaattagctataccttgaattttttaatctaaaaataatctatgtctttggttttacaatagcatccccttttccataggggatacattccaagatccccagtggatgcttgaaattatgaatagtaccaaaccctacatatagtatgttttttcctatacctacatccctgtgataaagtttaatttataaatgagacacaataagaaattaacaactaataataaaatggaacaattataacaatataccagcatcattattcatgagctttcaggccattatcgcataaaataagagttatttaaacacaagcccagtgacaccttgacagttgatctgataactgagatggtttctaaatgactaaggagtgggtagygtagactgtgtgaatacactggacaaagggatgactcatgtccctggcaggacagcaggagatttcatcatgctactcagaatggtgcacaatttaaaacttataagttgtttatttctggaata

SEQ ID NO: 318791 - DNA, 631 bp, Homo sapiens
attggctggaactctgataatcatcacattttaggcttgggcagaagaaaagtggttgcaaaaaagctgtggggctaccaaaagttggaagaaaatagaaaaaagtctagaggaagtatggattctcagaaaccagtggaaggtatttcatgaaaaatgggcacatattctaggcaccaaagatataaagataaaagaaacagttcttatctagagaagttcaaattctggtgaggcagctatctgtagttcagtagaaaattcagagycattgatacccacagtagagaaataagttactactggagcccagagaaaacgtgtctctaccacaccaccaactcctaagtctccaactagaacaaactcagaagaaaagaatcctgaactattgcttccccagtgagtgatttcatcacacaacgtaactccatattttacctaataattcatttattatctttctcccttcaataaaagcgaagctacacaaaggcatggatttttttctcttttgctcactcttgtgtctccagagcctagaacaattcctggcatatagtagatgctcaataaatatttgttgaatgaataaaaatatcaagcctacatacatacaaggtgtttactg

SEQ ID NO: 318792 - DNA, 562 bp, Homo sapiens
ctttttagcccagggtaacaaataatttctcaccaaaggtgagaaattgtttatgcttattagtgcaataatcctagggtcaaactaagtaacacaagacagaagatgccaaaagctgagtgctactttttggaaatcattgataggtagttctacctgagtgatacagcaagcaaatatgaacttgaatctggcaggccctgtgggtagaggagttgtagcttagatttaaggaagaactaactgagcctagggaggagggcaccaataaatattggggtttatgttctttaggttaactaaaaccaggttattttgtcagtagggatgattaaggtgcagcttgtttgtgagtatgagcagtgctacttgaagtggggctcacttgagtctgttaagaatgaaacactttgagccacagactattaaatcagaatctctgaaagtggcatccaggaacttacattttaacaaaatttccataagagcattccagtttgccaagtcctasgctgggaaagggttgctttctggagcttccttttgatttacaagccagaat

SEQ ID NO: 318793 - DNA, 516 bp, Homo sapiens
ttactcaacctacataattaggtgggtttcatcctctgaagtccagttctgatttgccctcctcaatatcttcctaatatatgcctaattcagctaaccataatttcccccttcactttttcctcgactcatcccccatgttcctttgcacatcactctgtttctgtaaccaaccctgatttctcttgtcctcaagatttcctacctccatgctttgctcttgctatttcctcatcctgagaagctacccctayccatctctgcctatcccagtgctttttgtcaaagccagccaaaatctttccagatatctctctcctctaagttaccatagaccttgatctttaattctcctgtttctctccaatttgtatttaggtattgcatgttcttgtcttttcaaacccacttgatgcttgatgggaacaatggcaaataccaattttaatatgcctcacagcacttaatgcagagccgtactcataggagctgtttaacagataaggattaaattga

SEQ ID NO: 318794 - DNA, 660 bp, Homo sapiens
gaaataaaaatctgtgtcttttggcattgctacaatgtagaaaacgaatctgcagtatttagaaccattggccagatcgaaagctacggtacctaaatccaggctagatttagtttccctgaaagccacccacaacttcaaacgctgttttctaaatgcatgtgctcagagttttgttaatccaaatattaggcatgattttaaaaattgtagagaaactagctagtcaaatggaggatcttggaactgtaggatttacaactcaaatggatcttggaggtaatctagctcaaactccaaactgtgcagatgaaaatatgtaaggcccagagcagtcttataattgcctggtaactttcctttcatggcacagaagaacttactacaccttttggtgccatcacaggactttatgaatgaatggcttttgcacaaaagcgaggacaatgtcagaatcagttcacttcataggcttcatcacttggtaagaagagaaagccaacaagttctggggagtyaagtgctccttcactgaataagtgataagtattaataaattgcttttgcaaggcatgaccccagagctgacaataagcttttcctataggctccatgcagaaggctggagtatgtccaataaccaaaccaaaccaaaacaaa

SEQ ID NO: 318795 - DNA, 568 bp, Homo sapiens
tgaagcaagtttcatgtctcagaatgggacatggacagactgcgtgggataattaagccataaaatgatataatccagtagtagaaagggacctaccatacaaatataagaaatgtagacattagcagaaatcatagagaaagtcatgcactttcatagagtatacaatgaatggttggtaatgttatttaaattttaaggaacagagcagtcccggctaatggaccattctgagtaacagaagaaagttatgattttatgtggaggaacatttccactccaatgacttggagttttcaccatcgagaaatgccamcaacccccaaatgagttggcctatatttgtaatgatcaattagccacatctacctgaatgccttactcatgctttaaattcagcatgaccctgatggtaccttccccacttcctcccaagtccctgtgtctttgtttcctgactctgtgaatgcttccattacctgtcctgcttatcctgaactcttttctcccattcatatcacatagccaactagtcactgaatcattttaattttcattgcttgcgtat

SEQ ID NO: 318796 - DNA, 618 bp, Homo sapiens
cttttaattctctgcccaaatgaattatcaagctttacagttcatattcatttagatttacatacatatttattaattcatttgcttaccattacttcttgcatcccattccttcttagttttcttctttttaaggtagtttatttgaggaggattgctgagtgatcagttctctcagtttttattttttctgaaaatgtctatattttgtgctcatttaataataatctatctaaatagagaattctagaatgactattattggtatcagtatttcacaggtatattttactcttttctgatcactaatgattttgagaattctgctaattgattttattctttataaattatcaatctctcctttcttgttgctattaagacttttccctttgctgatttgcaattacactacaatgtttccatgtggataaattttttgttttccttctcagtgtccatgggagttattcaatatgacaattcatgtttctaattaaatctggaaarttttcagacatgatttctttcaatatttcccactccctatcttctgtttctttcttgcaaatcctattagctctactcatgactcttatcctctagtttgtattccat

SEQ ID NO: 318797 - DNA, 478 bp, Homo sapiens
ggggtaagaggttattagtgtatcctctgagaagggacaaatattgaaagagaagttggaattgggctgatatttaagaagcacacaccaggtgagatatactggccacccacatttggatgggttaggcatccattctgactaaatgtctgatgcagagttgaatattacatgtggttcaactcataaatgtcaacccttaaaagtaycttagcaattatctagtatagcagttttaaagctatgtatcactgaatgccatccctataaatatgtattgatacaaagcaagttagcattgcttaagagaatgaaatctaacacatagttaggtttacatcctggattcacctcttactagctgtgtgattatttgcaagttacttaatgtctctaagccttggttgcctgatctccaggcagatactgttgaaaatagttatattatacccacaagactagttcagagtttgctact

SEQ ID NO: 318798 - DNA, 516 bp, Homo sapiens
agcgaacagccaaacgtttctctctgtggaaaagagttaaagaaagcagagctttacatgtattttttcctatgactataaaaatacatttatcaaggtgaatttcaagacctgttgtttgttttaatgtaggagagccccggtctttagcaatctaagcaagtgaaaacaaacaaacactgtcgtagtttacggtggagctcacggacacttcctgatattcctgatatttccattgaagggagaccaagctgtcctccaggtatcctgcrcctcctctgaaccatccaaagcacattttaatttcctgcatgggtcatgaatggaaaatttgtccataaaaaaatagaaggtttctaagaagaaactgagagagattattttcattactctctgtggcaaagcctactacttgcctatccaacatttatttttctccttccaacttagtactagaaccttgacttttaggagggcatattaatgtgctaaatgaaagactgcatttcccaatgc

SEQ ID NO: 318799 - DNA, 539 bp, Homo sapiens
aaactgagagagattattttcattactctctgtggcaaagcctactacttgcctatccaacatttatttttctccttccaacttagtactagaaccttgacttttaggagggcatattaatgtgctaaatgaaagactgcatttcccaatgcatccagaagtagccattttaaaagttccatccaatgagatgtaagccaaagtattatgtattatttgggattttcaggaagtctttttaaatgttttttttttctccattgaggagtaccctttctcctccctgttgtctggaatgcgggtgtcatattgaaccaagaggtggccttgagaatagtctccaagttctaagagttgcaaagcccaaagataggagcctgggttcctgaagacatcatataccatttcagctctggactaacttcttccaaatgtctttcaggtgagagaaaaaattcatcttgtttaagttactaytatttggatattttcctgttatatgcaatgaaactgactccaaaactgatagtcccccatat

SEQ ID NO: 318800 - DNA, 585 bp, Homo sapiens
gtaatttttattaaaaagagtaagccctctctatgccatgataatagtgaattctccttctaaatctgtatgtaacaatgaataaacaactcagaaggtgttkatctgacaaggaggcaaaaacacaaagtatgcacatgtgacttagttaacaatattccacaatcttccaaattcattggacagttttcagtgccaaagaagttcactaacattttctgaaatgttaatgtatcccaacagtttatgtatcatacacattaaagtaataataaacatatgttaagaccagagtactgctaacctgccccaaacaccacatttctaagccacagttttgttacctgtaaagtgggagaaaaataaaagacaacctcagaggagtattacaaggattaaatgaaataatgaatgtgtaaatcacaagacattattgaggtgttttatgatttactttagcagacttacattgagaagtaacttttccaacatccaaaagtaagcaaactaagcaaggttaaaaattgtgttgtgatggtagaacaatgtctaaggaaagtttcatttaccacacaggggaaagtc

SEQ ID NO: 318801 - DNA, 575 bp, Homo sapiens
cttcatacacctcaacgtaacctgagacatcttagtcaaaagcagaaatggacaagtaaatttgtcttttcttttttgactcctgaagtacaaaagtagaatgttttataagccagtgaatttcctgctaccaggaatgtttggaatatttgtcataagatgrtatttgaggaatattttaaaagatctctgcttgaggagggagatgggattctatttacaattcaactcgatagacatttaagtgcctctgattgcaaaagtgaacacaaagctgttgctgatgtcaacaaggcaacactctagcagaaaagatgggtatagatgactgtggtaacaaaagtgttatgcctaaatgtatatgcagagaggaaaagcattgacttttcaagaatatttaaaagcagccccaaagagaaatagagtgattattttgtctggtagatctgagatctttcctctctttttttttttttatgttggatgtccacccctaatccttggtctcagcaaagaacatgatgaactcacctactgaaagacattgaagggaaactggaccctaagaactagct

SEQ ID NO: 318802 - DNA, 558 bp, Homo sapiens
ccacctggtctctcccttggtacatgaggatcatggtgattacaatttaagatgagatttaggtggggacacaaagcctaaccatatcaccaatcctgccagcaacttgattttagacttcaggcttccggaaatatgaaagcatacatttctgttgttttgaggcatgtagctcatggtaatttgttacagcagttctaggaaactcataactgaggataattgaggactttcatttatttattcttccgttaacctgactctccctatttccagtttcagcagctgaaaycatcattttctcagtttaaatatgattgacaagtttaaatgacacaaaagaatgctcatgctgtctcagagggatgatggggtcagatagcaggctaggaggcagccagagcaaaggggtaagccttaagctcacaggcaatggctgaacagcactaaagaacccagaaactgaagagaaagggagtacataaactctgatggaatgagaaaatgggaagtataaagttaggtgtaagccatataaagtgaagtgcagaaacatgc

SEQ ID NO: 318803 - DNA, 608 bp, Homo sapiens
caatacttttttccactgttggttaatgagatctaggggaaaatgataaacgaaatgtgtttctctttgtgtttgcaaaggataaagtgagaaaaggtaaaaatgacgtaattakatagtttcttttcttagctaagatcttgttttgtgagttaagaaaattggggcttaaaaactcatttaatttcatagcagattatattctgaaattgaactgaggggaaaggtcttttgaggttagtaagaagcatcaataagggagctgagacagcagcttttacttcagactatttcaaaagtcaagagcagagctaagaatagatgttcataatggccaatccagttttcagaccgcagacacatgctccctggcccccatgcctgcttagagcatcatcttagaatatgcagtagttggagatctctaaagagactctgagtcacttcactactcaacctcaagttcttttattcccttggttcattattagactgatagcaaagctgagacaagaaccaaggaaaggcttctgattcaagagaatgcattgaacattgagcacatgctgaattatcttccatctgctttaaattcatgaaaaagactg

SEQ ID NO: 318804 - DNA, 551 bp, Homo sapiens
catagaaaaaaaatgagaaggcgaaggaaggtaacactcagagtgaacgttatccagtggtttgtaaaaaccctgtcaacaaaatggtagaatttgggagagggggaaattttcaaaaaatattccaaagtgaaattaagaatacgagtgttaagatttttaaatacaagactaaacagaatagcacaaagaaaagtattaagagtatttgagcaatgtagtttagggaaggacacagaagcagtgcagtttccttacggaasctggaactgagaacatgcaaagcaactgagaatatggaaattttgcacatttccaagtgcaaaatgcgtttgcttacgcacatggaagaaggctgagtggtgcaacagaaaaagccatacactaacactctgggtcctagtcccacttagtagcagcattcctctgggtaagtcatttaactccttggcttcaatttctcagagtgaaggttctggactaatgcttctcaaccctggatgcatattacaatatccaagaagctttttaaaaatagctatgcttggtct

SEQ ID NO: 318805 - DNA, 561 bp, Homo sapiens
cgtgttgcccgggctggtctcaaactcctgagcccaggcaatccacccgcctcagcctcccaaagcgctaggattacaagcgtaagccactgcacctggccttgtttatccatttatctatccatggactcttgggttgcttctaccttttggctgttataaataatgctgctgtaaacatgagtatacaaayatctcttcaagtctctgttttcaattcttttaggtatatacccagaagcagaattgctggatcttatggtaattctattttcaattttttgaggaaccacatgtgaatttatttttaaatccaagaaattaaaaaagaaaagcaccaattttcattttatagaaaattatacatgtgattttttttattcttgtaatttttcactttctccaccacaacacacacaatctgataactgagtcatctgcttattctaagtttacattcagtgttacaaacagttcacaaaattttaacattgattttgaatttcaagtttttccaaagagaaacttaccctcaaagctgtgggtgaccgtgaatagtca

SEQ ID NO: 318806 - DNA, 561 bp, Homo sapiens
cgtgttgcccgggctggtctcaaactcctgagcccaggcaatccacccgcctcagcctcccaaagcgctaggattacaagcgtaagccactgcacctggccttgtttatccatttatctatccatggactcttgggttgcttctaccttttggctgttataaataatgctgctgtaaacatgagtatacaaatatctcttcaagtctctgttttcaattcttttaggtatatacccagaagcagaattgctggatcttatggtaattctattttcaattttttgaggaaccacatgtgaatttatttttaaatccaagaaattaaaaaagaaaagcaccaattttcattttatagaaaattatacatgtgattttttttattcttgtaattkttcactttctccaccacaacacacacaatctgataactgagtcatctgcttattctaagtttacattcagtgttacaaacagttcacaaaattttaacattgattttgaatttcaagtttttccaaagagaaacttaccctcaaagctgtgggtgaccgtgaatagtca

SEQ ID NO: 318807 - DNA, 561 bp, Homo sapiens
cgtgttgcccgggctggtctcaaactcctgagcccaggcaatccacccgcctcagcctcccaaagcgctaggattacaagcgtaagccactgcacctggccttgtttatccatttatctatccatggactcttgggttgcttctaccttttggctgttataaataatgctgctgtaaacatgagtatacaaatatctcttcaagtctctgttttcaattcttttaggtatatacccagaagcagaattgctggatcttatggtaattctattttcaattttttgaggaaccacatgtgaatttatttttaaatccaagaaattaaaaaagaaaagcaccaattttcattttatagaaaattatacatgtgattttttttattcttgtaatttttcactttctccaccacaacacacacaatctgataactgagtcatctgcttattctaagtttacrttcagtgttacaaacagttcacaaaattttaacattgattttgaatttcaagtttttccaaagagaaacttaccctcaaagctgtgggtgaccgtgaatagtca

SEQ ID NO: 318808 - DNA, 540 bp, Homo sapiens
gtcaatagtcagtgcagaggaaaaggtagctggaacaaatacaaaatgaacatgcttgatatcaaagcttgatatcaagaattttcaaaaccacaaactcatatattatttatataaactgtgttctgactaaaatgctcatctcttgggatgattattctaatatggtgaagaataaaacacttggagtgttttgcttaaacagcaaatactggtaggtgacttatcttaggttcatctatgtatgtgtgagtgaatgtgtttgtgtactcttaaagggaacacttggatctgaatcagtcatttctagcaatttccagtctttctacttagtcaataactaaacatgcaaaccaaaatgcctcaatgtactcataagatagctgcgacaactgggcttttcccatcattggctggtgagtgtgatgtgaggtggtagtccatggctcagatattattaatagttttactgtggattcacaagacaagtaaaagaggaaaatgctcrttaacaataaaagtgcaatctggcaggcctta

SEQ ID NO: 318809 - DNA, 507 bp, Homo sapiens
agtacagttcatttatccagcctcatcttctaatgcagtgtttcataaaagtattttagataactgaaatgcttatctctaggtgtaatcaaagatacacctgcccagatacacctgtatctgtgattctgattttttttttactgtaaaacatttttttaaagatttcaatcatcttataactgaacttttctggatgattcagggatactattaagataacagtatcatagcagtgtcctctgggactacccctatttatggctatggatctttgccctgcactaaaagttccaaattgcaaggcatttctaatgccagtgcctgttttttaacaaatttcctgtctcctccctatcagtttgttagctactgctcttcttactgtttgttactagcattcctgtttctacaaaatctcactcattctaatttgttttccctaatatgctatgggatgggaaatgagaaaaacaacaacaytggaatgtttaaaatagtgctaag

SEQ ID NO: 318810 - DNA, 569 bp, Homo sapiens
atgacagttggagctattcggcccaaatactatgcttttcccatggcctttgcaacccacagaccaggagattccctcaggtgcctacaacaccagggccctgagtttcaagcacaaaactgggtggccgtttgggcagacactgagctagctgcaggagttttttgtttttgttttttctttttcatactccagtggcccctggaaagccagtgagacagaagtcttcactcccctggaaaagggggctgaagccagggagccaagtgttcttgctcagtggatcccacccccactgagwctagcaagctaagatccactggcttgaaattctcattgctagcatagcagtctgaagccaacctgggatgcttgagcttggtgggaggaggggtgtccaccattactgaggcttgagtaagtggtttttcctcacagtgtaaacaaagccgccaggaagttcggactgggcagagcctactgcagcatggcaaagctgctacagccagactgcctctctagattccccctctctgggcaggctatctctgaaagaaaggcagcagccc

SEQ ID NO: 318811 - DNA, 569 bp, Homo sapiens
atgacagttggagctattcggcccaaatactatgcttttcccatggcctttgcaacccacagaccaggagattccctcaggtgcctacaacaccagggccctgagtttcaagcacaaaactgggtggccgtttgggcagacactgagctagctgcaggagttttttgtttttgttttttctttttcatactccagtggcccctggaaagccagtgagacagaagtcttcactcccctggaaaagggggctgaagccagggagccaagtgttcttgctcagtggatcccacccccactgagtctagcaagctaagatccactggcttgaaattctcattgcyagcatagcagtctgaagccaacctgggatgcttgagcttggtgggaggaggggtgtccaccattactgaggcttgagtaagtggtttttcctcacagtgtaaacaaagccgccaggaagttcggactgggcagagcctactgcagcatggcaaagctgctacagccagactgcctctctagattccccctctctgggcaggctatctctgaaagaaaggcagcagccc

SEQ ID NO: 318812 - DNA, 571 bp, Homo sapiens
agcagaaatgttatagagagattgagaataagcctcccaattagagaaagaagaagcacaggcaaagacatacctgagcatggtgaggggcaggaaaccctgtccccaaagctctgagcatagaaatcccctccaccctgcaagaccctgggatgggcctctgggcataaacaagggcaggagtctctctacataaaacttttgccaaaataggatgaagtaggcaaatgttacagccaaaataatatttcactgctaatagaaaaacaggcagaaaaaactaccttgtcaccttttctgggaaaagcaaaaataaagttgtatttcatccttaattttctaccgtgtgggmtaaaataaaaggaaaattacttgtgggcaatagtgcacatattatagaataatgagccatcttaagcagttgggcaagaagcagaacaacaaatgttcactccagaaaagaagagaatcatgcaaaaataatagtgttgttttcagaagtaaaccttaaaaagaaatcaaaagggagatataatcagatacactatcaagggccaactaggaatgccac

SEQ ID NO: 318813 - DNA, 571 bp, Homo sapiens
agcagaaatgttatagagagattgagaataagcctcccaattagagaaagaagaagcacaggcaaagacatacctgagcatggtgaggggcaggaaaccctgtccccaaagctctgagcatagaaatcccctccaccctgcaagaccctgggatgggcctctgggcataaacaagggcaggagtctctctacataaaacttttgccaaaataggatgaagtaggcaaatgttacagccaaaataatatttcactgctaatagaaaaacaggcagaaaaaactaccttgtcaccttttctgggaaaagcaaaaataaagttgtatttcatccttaattttctaccgtgtgggataaaataaaaggaaaattacttgtgggcaatastgcacatattatagaataatgagccatcttaagcagttgggcaagaagcagaacaacaaatgttcactccagaaaagaagagaatcatgcaaaaataatagtgttgttttcagaagtaaaccttaaaaagaaatcaaaagggagatataatcagatacactatcaagggccaactaggaatgccac

SEQ ID NO: 318814 - DNA, 605 bp, Homo sapiens
acattctatagaaggatattttcatcactcctttttagcctcataggactccattgtgtagctatatcatggcttactaatagatatttgggttgtttctgctcttttactatgacgtatttactactactattacaaatagccctataaattatgccaaattacgtattttcaccagataatttttagtagatttctactagaacttagattgctagggcagagggtaaaagtgtatgtattatgctggctgtatgaaaataggtktttgcctgccctttatgcctttctgtctcccacaattcggggcctacaacaatgtctagcacataatcggtgcttaacacatatttgcgaaatgaatgaatgtggctctgtctgtgtttactcactgttaattggtttcctttttagtagaccatctgagagggcaatcactgttgactgataatctgactttgtatagtgcagttgtattataaatccaaatgtaaacttaaatagctaatcaagaatatatcatattccatcattaataaaggaagtcctttttttaaattgcttataccccttccctttgtaacgctgaaaattgagaaaagata

SEQ ID NO: 318815 - DNA, 605 bp, Homo sapiens
acattctatagaaggatattttcatcactcctttttagcctcataggactccattgtgtagctatatcatggcttactaatagatatttgggttgtttctgctcttttactatgacgtatttactactactattacaaatagccctataaattatgccaaattacgtattttcaccagataatttttagtagatttctactagaacttagattgctagggcagagggtaaaagtgtatgtattatgctggctgtatgaaaataggtgtttgcctgccctttatgcctttctgtctcccacaattcrgggcctacaacaatgtctagcacataatcggtgcttaacacatatttgcgaaatgaatgaatgtggctctgtctgtgtttactcactgttaattggtttcctttttagtagaccatctgagagggcaatcactgttgactgataatctgactttgtatagtgcagttgtattataaatccaaatgtaaacttaaatagctaatcaagaatatatcatattccatcattaataaaggaagtcctttttttaaattgcttataccccttccctttgtaacgctgaaaattgagaaaagata

SEQ ID NO: 318816 - DNA, 595 bp, Homo sapiens
tatcccccatggtgtcttgattgcttgtgtgtcttatgagttttgaaggttggaccataacctttggtgctcaattgtgggaattttttgaggcctgatttgaaagtggattcctccagagaagattgtgtttgtttctgccaggtacctgaaagcaactaaaacttgaaaccaacttaaartaagcatttcagcttgaggtgtttttggtcctcacagatagtatacattttggacctcaagtttctgtgcaggtttgcttgtggttatacattttcagggaagactttttttcctttccactcagcacaatggtcaagacaagcaagtttccttgctatctctatctatggagtgggcttatctcttgttcaccctcacactgaaggtgcttccttttggggtcctggctttacatggggatctcgtattagacttcaccgtggttgggccctggggttgttctcctgtccctttcaccccatgccaacatcaaaacctaagatcattgtcagcaaggatctacagatgcctccatggaaaaggctacattcaggtaagcactctcacctttcaggattcctgcttttatttt

SEQ ID NO: 318817 - DNA, 455 bp, Homo sapiens
tgacaaactaggatccacctgccaactgtktctgtaaataacgttttattggatatagccacacttacttatttacataccatctataactgctttcatactacaatggcagagcttagtagtttcaacagagaccatttgggtcacaaaccctaaaatatttgctatctgataccctgccgaaaaaaattgccactgctcatccatatcagtgtatatgtgctttttaacattcttttttttttaaaaaaaagtcaatcatatgcattgggctgggcacagtggctcacgcctataatcccagcactatgggaggctgaggtgggaagatcgcttgagtctaacagttgcagataaacccaggcaacatagtgaaaccccatctctacaaaatcaaaaaaagttacccaggcatggtagtgtgcacttgcagccccagctacttgggagtgctg

SEQ ID NO: 318818 - DNA, 455 bp, Homo sapiens
tgacaaactaggatccacctgccaactgtgtctgtaaataacgttttattggatatagccacacttacttatttacataccatctataactgctttcatactacaatggcagagcttagtagtttcaacagagaccatttgggtcacaaaccctaaaatatttgctatctgataccctgccgaaaaaaattgccactgctcatccatatcaktgtatatgtgctttttaacattcttttttttttaaaaaaaagtcaatcatatgcattgggctgggcacagtggctcacgcctataatcccagcactatgggaggctgaggtgggaagatcgcttgagtctaacagttgcagataaacccaggcaacatagtgaaaccccatctctacaaaatcaaaaaaagttacccaggcatggtagtgtgcacttgcagccccagctacttgggagtgctg

SEQ ID NO: 318819 - DNA, 455 bp, Homo sapiens
tgacaaactaggatccacctgccaactgtgtctgtaaataacgttttattggatatagccacacttacttatttacataccatctataactgctttcatactacaatggcagagcttagtagtttcaacagagaccatttgggtcacaaaccctaaaatatttgctatctgataccctgccgaaaaaaattgccactgctcatccatatcagtgtatatgtgctttttaacattcttttttttttaaaaaaaagtcaatcatatgcattgggctgggcacagtggctcacgcctataatcccagcactatgggaggctgaggtgggaagatcgcttgagtctaacagttgcagataaaccyaggcaacatagtgaaaccccatctctacaaaatcaaaaaaagttacccaggcatggtagtgtgcacttgcagccccagctacttgggagtgctg

SEQ ID NO: 318820 - DNA, 608 bp, Homo sapiens
tttgaaaacccagtagggaaaaagatctagaggtctcattttcagtatgtacatgttcatttaattcctctgtttytcagaatggtatatcttctctcaaattaggaaagcagtgctacatagtctggactattttctctttcccatgagtaaatttctagttttgaaatggatagagaagaggcagttgtctcgttgtacgatatcacaaagggaatataacagcatccttttccttttttctaggagatttaaaattgatataatgctattatttaataaggttcctcttcaaacttcaccagttacctcaatacttttccttacagcaaagttttttctccaatctaggataacatgttacatttagctgtcatgtatcagtcctttttaatcattcatgtcactgacatgacaagcctggtgttttatgaaatgagagtctcccaatttaggatttccagttgtttctttccggtttttttccttctggttagattaaggttatgaattattagcaagaatactataagaggagaggggagcaagaggtccaaatagaagcctccattaatcatcctcactgcaggaacaccaaattgaaaaac

SEQ ID NO: 318821 - DNA, 543 bp, Homo sapiens
taatcctatgtattagttgttcttatgttgctaataaagacatgcctgagaatgggtaatttctaaaggaaagagatttaattgactcacagttcagcatggctggggaggcctcaraaaacttacaatcatgccggaaggggaagcaaacatgtccttcttcacatgatggcaggaagaagtgacaagcaaaaggaggaaaaccccttataaaaccatcagattgtgtgagaactcacttactatcatgagatcagcacagaggtaaccacccctatgatgcaattacctcccactgggtccctcccacaacacctggggattatgggaactacaatgcaagatgagatttgggtggggacacagccaaaccatatcatcctagaatagaatacccagcgaaaatagctttcaaacatgaaggagaaataaagactttacaaaataaacaaagctaagaaatttcaacaccagacctctcctacaaaaaatgtaaaagggagttcttcaatcagaaagaaaagcatgttaatgagcaacaac

SEQ ID NO: 318822 - DNA, 483 bp, Homo sapiens
tagtgacacttcaaagaggtaaagttatagaagawttaaaaaagccatgtgactctgtcataaggactatgcattctcacatgcctcctatattcaagacaaactttatttaggaggaggcttttataaaaatcttgagttttctgtggtcattccaggaaacagctgaatacagtttgtcattttttgacatatccttagtattactaattaacaaaaatacaaatcagcaaatttggtgtttgaaaaggacaagcaacagagcatgtgaaatgctcgcagagaaggagagatgactatttccccgaatgggaaggagagggtaagggagtcatgacatcgcattaatatgccaaagaagcaaaaagtactgtgctattttatgccctttcagctttgaggacctctgttggaataagcctaatttaataaatgagaaagtagccttaacagatgccatgtgttttgttcctttttgagtgt

SEQ ID NO: 318823 - DNA, 483 bp, Homo sapiens
tagtgacacttcaaagaggtaaagttatagaagaattaaaaaagccatgtgactctgtcataaggactatgcattctcacatgcctcctatatycaagacaaactttatttaggaggaggcttttataaaaatcttgagttttctgtggtcattccaggaaacagctgaatacagtttgtcattttttgacatatccttagtattactaattaacaaaaatacaaatcagcaaatttggtgtttgaaaaggacaagcaacagagcatgtgaaatgctcgcagagaaggagagatgactatttccccgaatgggaaggagagggtaagggagtcatgacatcgcattaatatgccaaagaagcaaaaagtactgtgctattttatgccctttcagctttgaggacctctgttggaataagcctaatttaataaatgagaaagtagccttaacagatgccatgtgttttgttcctttttgagtgt

SEQ ID NO: 318824 - DNA, 236 bp, Homo sapiens
atgtaggtttcatttaatctttgaaattaaaatgaaattaaaagattgtgatcttttgatgaaattgggctaaaatgaacwataacaaaataagaacttacttatattctttatatggtcaataaagaagtgatagtggaaaaaaacaggatcaaatgaaggtgaggatttaggaagttggaaagatagctgaaactacaaaatggtatataaccagtgaacacttagacacactg

SEQ ID NO: 318825 - DNA, 236 bp, Homo sapiens
atgtaggtttcatttaatctttgaaattaaaatgaaattaaaagattgtgatcttttgatgaaattgggctaaaatgaacaataacaaaataagaacttacttatattctttatatggtcaataaagawgtgatagtggaaaaaaacaggatcaaatgaaggtgaggatttaggaagttggaaagatagctgaaactacaaaatggtatataaccagtgaacacttagacacactg

SEQ ID NO: 318826 - DNA, 236 bp, Homo sapiens
atgtaggtttcatttaatctttgaaattaaaatgaaattaaaagattgtgatcttttgatgaaattgggctaaaatgaacaataacaaaataagaacttacttatattctttatatggtcaataaagaagtgatagtggaaaaaaacargatcaaatgaaggtgaggatttaggaagttggaaagatagctgaaactacaaaatggtatataaccagtgaacacttagacacactg

SEQ ID NO: 318827 - DNA, 194 bp, Homo sapiens
gccattggagggtaggtgcaggggaggaragggaagtttgcatctctcctgctgtggagagaacccgtgggaagcacagaccttgtcctaactgaaggcagaccccttgctaaccagcttctcatcagccaaccctggatgagtttccatgtctatttactaaataatccttattgcttttcttcatatgggca

SEQ ID NO: 318828 - DNA, 584 bp, Homo sapiens
ttttcctctgttctctaactgtaatatattttaattacagatggaggaacagatagatgttagataaataggtatataatagatagatcatccaaaattcttattcttatggttttatgcagtcaatatttacctctaattttctacatgtttatccttccaattaagttcattacttcctgcacctttgatgtcatatatataaacaggaaataacacmtggtggccgggatgtagagagagccacaagacttgtgaatacaatccacaggcaagcatgtggcgattccttttgcagttttggagggaatgccaaaccctatgtttgctgtggaaaagagtatggtagttcctcaaaacatcaaaatgatattgccatatgactcagcagcgccacatctcaggatagcaaaagaattgaaagcagagtcttgaaaaagtatttgcacatccatgtttgcagcagcattattggcaatagctaaaacgtagaagcaagtgaagtgtccaacaacagatgaatggataagcacaatatgatatatacatgcaatggaaaattattcagccttaaacatgaggga

SEQ ID NO: 318829 - DNA, 534 bp, Homo sapiens
taatagatagatcatccaaaattcttattcttatggttttatgcagtcaatatttacctctaattttctacatgtttatccttccaattaagttcattacttcctgcacctttgatgtcatatatataaacaggaaataacacatggtggccgggatgtagagagagccacaagacttgtgaatacaatccacaggcaagcatgtggcgattccttttgcagttttggagggaatgccaaaccctatgtttgctgtggaaaagagtatggtagttcctcaaaacatcaaaatgatattgccatatgactcagcagcgccacatctcaggatagcaaaagaattgaaagcagagtcttgaaaaagtatttgcacatccatgtttgcagcagcattattggcaatagctaaaacgtagaagcaagtgaagtgtccaacaacagatgaatggataagcacaatatgatatatacatgcaatggaaaattattcagcyttaaacatgagggaaatattctgacatatgttgcaacttg

SEQ ID NO: 318830 - DNA, 608 bp, Homo sapiens
ctgttgtcattttccttctgtctggaagactatctcaaacgttttttgtagtgcaggactcctggtgataacttcttctggtttttgtgtacatgaaaagtgtttctatatcaccttccgtttttaaagatattttctctaggtatggaattccagcttggcaggttgttgtttcattttgtttttttctttcagggcgctaaattgttgctcactgtctctcagcttgtaccgttttcaacaagaactgtgctctgatttttcgttcctttcatgtgtcttttttctatggctggttttaagatttgctcytatcattggctttgggcaatattatttcaatgtgtcttcatgtagttttctttgtatttcttttgcttggaattcgttgtttcctggatctgtggatttatcattttcatcaaatttgtaaaatgtatttgaggtatttcctcagatatgttttctttccccttccttctgtggggatgcaaattccacatacaaaatgccatgtgatgctgtcccacagctcactaacgctctgttttattttttccagtcttttttctctgtatgtttcatttttggatagtttctgttgctgt

SEQ ID NO: 318831 - DNA, 597 bp, Homo sapiens
cataccattagcactctacctaatgcgctgtgaattaccaggttttccattcttgctgatgagaaaaggaactcttcctagctctgtgtgagttccaaagattgttccctctactccttttggagctttgtggttcttttcccaaacgtactgagctcagatgaagacggggaatgcaggggatcccctgcaaagccccagaactctctctcctccttttgcagctgtctcctgtgactcttcccagcaaactccagccactttggccccccaagactttcacgtccacttcctccactcagagagactactgggctttatcaggcttcctcaccctgcgccgcaaactggaaacttcccaggcagctggctgtggccatgctgggctcaccgtgctggttttccattttcagagatctttgtcctgtgctgytgttgtctgatgtctgataatcatggttttgtatatttttccaatttttgagttgtttaaggcaggagggtgaagctggtccttgttacaccctcgtggatggaagcatcggtgtcttatgtcatcttcaggactttgggttttactctgagtgaaatgggagg

SEQ ID NO: 318832 - DNA, 505 bp, Homo sapiens
tgtcaagacagcaaggctctgttccagacaggaagcaacatttggctaggtcaagtggccaaaaccagtgaccaaacacacttagagctattcgattcctagaagaacacggaggagtgactcagccaaatcaaatggaaaatgcattcatttgttcagctgcagagatctggggtcttatgatgactttttctgtggggaataygcatgtagtatgggggcccaggccccccagccctggccaaggaactacagatgttgtgaagacaacactcgttcagtgtggccaccaaaccccacgggtcccagctgagccaccaaatgggtggtggtcccagcgtggccaccaaactccatgggtctccaccttctcctcccagcccactctccccatggcctgtgggtcaggggagggaaaggccctcttccgagtttccccccacaggcaagatctaggcttgccagattcatcaactaaaattacaggaatttagatttttgaatt

SEQ ID NO: 318833 - DNA, 580 bp, Homo sapiens
acttgcttccttggaggcagaatgggaacaacagtggctgctttttgtggttgtgggcatttgagacaatgygtgacaagtgtcctacaatgcgtaggctgctgggaaatggtggctgcactggtggtgcccgtgttgctggagcgtggtgtctgcttgcctcagcctcacctgcattttgggttcctgttatgggtccaggtcacagccacagcatatctgctcaggcctcttacctgggcactgccccagctccctcctggggctctccagcccctgcctgcccatgtgccctcctccaagcagcctccaccttccttctctaaatgatctggctgcagcccacgtgtgcccaagcacgggacaggcagcaccacttcccgtaggccaaccccacctctcaggggctggggagacctcacagctgtccacagggctccttccacctgcaaagagagaggggagaatccccagaggaggcttctcattatgtcctccacccgccagagccacacatcagggctctgattgttttgctttactgtatcttggcagggaaacaatgggaagacagagcctc

SEQ ID NO: 318834 - DNA, 550 bp, Homo sapiens
gctggtgatagggagccattgaaggttttagagcagggagagayggcatcagggtggaggtttgagaagcagcatctgattgtgatgggggaaaggtgaggcctgaggcaggggcctagcgagggggctgaagcagctgtctttgcaaaggactttgaggccagagggactgcccagattggggtcacactccaggcaggccacactgttgtcaggagatgctggggctgcctgccaggcaaggcctggaaagccctaactgtgcaccactggcccctcagctgcagctcctggggaccattaacctggccacgcaaactcttgagggggcagctggactcagtgggccagagtttggcctcgccatggaaggtcaagagcgaggtgggagtcagggaccctctcacccagaaacacaaaccccattatcctcctctgctcctatttgcaccccctatcctttatgaacagagctctagaccaaaagctgggagacctgggatcaagtccagccccttcctgaccaactgggccccgggtgcatcaccca

SEQ ID NO: 318835 - DNA, 550 bp, Homo sapiens
gctggtgatagggagccattgaaggttttagagcagggagagatggcatcagggtggaggtttgagaagcagcatctgattgtgatgggggaaaggtgaggcctgaggcaggggcctagcgagggggctgaagcagctgtctttgcaaaggacwttgaggccagagggactgcccagattggggtcacactccaggcaggccacactgttgtcaggagatgctggggctgcctgccaggcaaggcctggaaagccctaactgtgcaccactggcccctcagctgcagctcctggggaccattaacctggccacgcaaactcttgagggggcagctggactcagtgggccagagtttggcctcgccatggaaggtcaagagcgaggtgggagtcagggaccctctcacccagaaacacaaaccccattatcctcctctgctcctatttgcaccccctatcctttatgaacagagctctagaccaaaagctgggagacctgggatcaagtccagccccttcctgaccaactgggccccgggtgcatcaccca

SEQ ID NO: 318836 - DNA, 585 bp, Homo sapiens
ggaaaggccttgtgtgcccggactaatggtgtggacctcagggacagaggcgcggcgctaggctcctttgctgatggcggagacatgatccttggcttcccagtcaccaggtgtgacatggagatgcccctttccacattctgtccacagcttccctgcctctttcccagtgaggrccttgtggtctcattgcagaaatgagagagagggcttgtgctatggtcctgtgtctgctgggagctcctcctaccagatccctccacccgtctcttcctttcacagtgataaagtgggggctgtgggaggtgaagtgacttgcccagggtcccacggctggtgccctgcagagtcattggcttcgaaagcctgcaacagacaaacagaaggggccccaggtccttagggccagtggatgtgggagtgctggggaagccccacggagagtgaccccaccccccttgaggacaggtggctgcattcacagagacggtgatggtggggatgcgtcctgccttcgctctagcccagcccaggctccagccccatcaccctcattccagggagagggtgaaagctgcgcccagg

SEQ ID NO: 318837 - DNA, 585 bp, Homo sapiens
ggaaaggccttgtgtgcccggactaatggtgtggacctcagggacagaggcgcggcgctaggctcctttgctgatggcggagacatgatccttggcttcccagtcaccaggtgtgacatggagatgcccctttccacattctgtccacagcttccctgcctctttcccagtgagggccttgtggtctcattgcagaaatgagagagagggcttgtgctatggtcctgtgtctgctgggagctcctcctaccagatccctccacccgtctcttcctttcacagtgataaagygggggctgtgggaggtgaagtgacttgcccagggtcccacggctggtgccctgcagagtcattggcttcgaaagcctgcaacagacaaacagaaggggccccaggtccttagggccagtggatgtgggagtgctggggaagccccacggagagtgaccccaccccccttgaggacaggtggctgcattcacagagacggtgatggtggggatgcgtcctgccttcgctctagcccagcccaggctccagccccatcaccctcattccagggagagggtgaaagctgcgcccagg

SEQ ID NO: 318838 - DNA, 495 bp, Homo sapiens
tgcattaaaaccctttgttggaaagctttacactttccacagaacagaaactaaaataacctgttatacaattagtcacaaatacagtcctcgagtttttttgcccatacacatgagtatctgcctaaaacatgtcttctttgtagcagctaggccctgccaccacagtgcttgaccgagttcacaaatctgttgtaacccgtagcttccctgtcacgtctatggctctcctctcctgctaagctttgtttcctaattaaaatcttctgccactgccatagctaccgctgctactggaaccaccatagccaccttggtttcrtggttttgcgaagtattggcctccaccaccataggagccagagcttctgcctccaaagtttcctcccttcatggggccaaaatttgaagactcgttgttctaattgccaaaatcattgtagcctccaaaatggcttccatcattaccaaatccattatagccatccccactgc

SEQ ID NO: 318839 - DNA, 604 bp, Homo sapiens
tacataaattatatacatatataaatttaaaattatgctcataagttttaattgcccattttatacttattatctatgcatcattggctatcttgcaccactctaggtcttattttcctaagtataaaataagcctacttgatcaagaccytgggggtctgtgtgtgtgtgtgtgtgtgtgtgtgtgtgtgtgtgtgtgtgtacatatgtcatcctttgtccataggattacacttcatacaaagtagggtcttgataaatatgtgttgtttgatgattgatttgtttttctttaaatatacttaactcactgacttgtacagcaatatttaatgaatactacttttgtccaagtatacaaaaacagaatcacatacaagtatacaaaaaaaaagaatcatatatcctgattttcaagactacacagtttagctgaagagctacgaatcacttacaaataggtaaatgaaaaaagacaatacatgtgactccagtagaattcagggaaagatgtagactcctgcgggtacagaattcttaggggagatgggattttcagtgagcactgattggaacttagaggaagaacagaaggaaggaggtc

SEQ ID NO: 318840 - DNA, 577 bp, Homo sapiens
aacaaatacagcaccaacatgaacttgtggtgacaacaatataggcaccaatgatgaaatacacacttgtatggacactgataattacatcaagatcttaatttcagaagcatgaagatatacaaaaatagatcttaatatgggccttaagcacagtggaatattcagctttttattaaatttctattttttatgttcatctgtccaacattgaaagaggcatattaaagtttgaattttatcttcactatgaatcatacccttttctataccaaatgacagcatttctgcttttttatttatttcattgaagtctacttttttatattaatagcttgacacctgatgtctttttgtttaaatttacttgatacatctttgcctatcatttcacatttatatttcttgtcactttatttgagataagctaactgaaaaccacatttggcaaaacactgctgttcrtttccaatctaaaagatttttgtcttttagtagggaaattacacttagtttgattataaaatttacataatttagattcatctcccttagctgattttagttcttgtcacat

SEQ ID NO: 318841 - DNA, 621 bp, Homo sapiens
tggtgtttattgacattaaatgtctactttaccctgattgtccaataactgataaagtctataccctcaaccccatatatcagccttgttagatttctaaggaagcctgaactcaacgtttcacttggcctttgattctccctttcccccgaccctctgtctctcccaggaggggacttccctgcttgacctccatgcactgtgacatccagaggtagttcagggatagcaamgtggaagaataatattgccaacaaaagcgatgggacaaataatgaggtgaattcactcctagcatccttttcagcatatctagctgtagaatcagttggaaccacaaatcaagcacactcctacactaactagagatggccatgttgccagcaataatcagtccaggctcttccccacccccagagctgctgaccaagcagggatgagcagtggccagaagaaaagctgagctgacagatgcaaggctggaaccgcaggccagtgtccagcggctgacccctgggtgctctgacctgtgccagagctggaataaattatttgagatgcctaaaccagaagtgtgttttcctgagtatgccacaaaatcaaaggagaatttatttctta

SEQ ID NO: 318842 - DNA, 566 bp, Homo sapiens
caagtgcctgctgtggtacaaacaacttggcaaagatctttatagctaatttgggtattttaaaaggactatgttttcccactagagaaataatacaccagatgttaaaaattgggaaatatatgaaaggatatatataaaaataagggtctctgataatccccaacatccactttagccactattcattatttgtatakgtgtttccagcctttttcttgctacttattattggtagtattatttttaaaaattaaaataatactgttttgtattttttaaaacaatacttttcaatgaataatttattatgcatatgcatttatatgtcattaatttttttacaatgtcttatatggtggttaagcataaccttatcgtgtgttacaataaaatgtattttaaaatttgcattttcatatttttaggttgttttctttctttttgttgatgttacataaacacatgcacaaacatgtttttggtaaaccttttcacttttaaaattaattttcaaaattagtgttacagggtaaaaagtgtgtctgtcttgtgctttttgataa

SEQ ID NO: 318843 - DNA, 575 bp, Homo sapiens
ttttactgaaagaaattaatctcatccataaacctattaaacagcttgtgttttctgcatagggttaaccatacatattcaaggtttaaaaagtaaaatttccctatagtttctatggttgcttttgtttgtttctgtggagttatttctctggattgcatagttcttgtcaaatacctaaactaatttatttggacagataagaagacatttacttagtctattcttgggaacattcctctcacagtcaatagagatacgagatayggtatttctgccgttatatcatttgactaaatttggcaaaatgctgatttaagcatcaaagaaacgtagtagatttctttatgtatgatgaaagaacttgtaaaaatcatcacatccctggctgaactacaaatgtgctaacattttggaaaaacttatacgaatggaataattgcttggcaaacatcaggctccaaaagggtacagatttagatttagatttgatagaccaaaaattcaattgatttaaatattaaaaaatcaataaatggcaaacaaaaggagattgtttagcttggtgggttact

SEQ ID NO: 318844 - DNA, 478 bp, Homo sapiens
tgtaaccctggcaatgatctgtcatatataacatgttcaagagagtatttcacagtatttataattttttttttaccttaagtttttatactttctgtattttcaaagagagaacacatacttgtttgaaaatccagaaaagacagaaacagaagcctgtcccactgttcgagtcaatgttaggcctaagcgtggaaccactcatttctcacccttttgtagagaaagaacatggagatgcctgcacaactgagggatttaagctttttttttttttttttttttacaccatgagacatagaagcaattcttgatttccccaacacagaaacataccacattgttaattgtggttatttatatggctggtgtacctttctttctatatcaggagtcagtaaactctatraaggtccagatagtaaatattttaggctttgcaggcctactcaacgctgctgttatgaataatatgtac

SEQ ID NO: 318845 - DNA, 561 bp, Homo sapiens
tctctgtacttaatcacacaatgcagatcttcccttggctgtaacatttcaaatgttactaccaatttctgtctaatagggtgagcaatgggggtgatggctactctagcagccattgtaagacttggggactaaactattaaaaggagcccccaatccccaccacaatcagagcagacctatgccgtctcctcaaggaccctgtactcccccaggggaggtttgctagccagttgcgggaacagtgagtgtggggagattctggaggcttcagtccccatgggaacagcactgcatgcaaaacagagcccacacaaagggcctgagcaagaaagagaggcaccaaccccctgccaaaagttctcagagttcccacagtgagtctcagaaagggagagttttgtttgtttctgaaaacacataatgaggrtgttataagaagagccacctgcgtgcataaagcatagcaaagtcgtgcccctcccttctgtggaatgtctcctgtggccatcggaccctgctgccctaaagtagcctcctcactggacagaagaatctatt

SEQ ID NO: 318846 - DNA, 522 bp, Homo sapiens
gtgtgtgtaacagggcgtcagagggaatttcagcctgcgacactaagagacrcttgctctcttattccaaaggaggcattaaacagtgtgcagagcttacaaacgccttccttgacctgcagggagcttatgaattggccagaagactagaggttgaaagagggtttgggtagaatgtagtggggatgagccccctcctagaggggaaggtggggatcccccctcacttccagcctgtgaacaggccagaactgctcagcctgggagcaccccatgacttgagtctctgagtggtcctgggaagcatctccaactgggggacaccaatagcaggcaggttctgatacttggaaacactgaatgcaggtgctgatggggcatctgggcacacagggtggggagctgtggtttgggacatggctggactgtcagttgtttggacagcaaagggtgctcagtgttgcccaaggatcaagcaagaaaaagagaattggtgtagggttattttagatccaatgttac

SEQ ID NO: 318847 - DNA, 590 bp, Homo sapiens
tctcacacatacacactcaccattaacctacacacactatctcacactcatacacactcaattcacacaccactgtctcacagtcgtacacatattcgacgttcacactcacacacactgtcaaacacacactcagaattcatacttacacattatctcagtcatacacactaacacactcaacatttacaatctcacactctgaattcacactccaaattcacactcagccatasacactcatcattcacactcagtctcacacacaggcatacacatacccaacattcacatttagtctcacagtcatatatgcacaccattcacacacactatcttgatagacatacacactcagaattcacattcatacacattatgtcagtaatacacacacatgttcacatcccttgcacactattacctcatactcagtcatacccatgtacccattcacacattcacacacactcacattatctcagttattcacacactcgtaagttcacttgcccactcatcccatctcacacacactcaccctaacacacagttctacacacacacgtttacagacccccacactcatc

SEQ ID NO: 318848 - DNA, 590 bp, Homo sapiens
tctcacacatacacactcaccattaacctacacacactatctcacactcatacacactcaattcacacaccactgtctcacagtcgtacacatattcgacgttcacactcacacacactgtcaaacacacactcagaattcatacttacacattatctcagtcatacacactaacacactcaacatttacaatctcacactctgaattcacactccaaattcacactcagccatagacactyatcattcacactcagtctcacacacaggcatacacatacccaacattcacatttagtctcacagtcatatatgcacaccattcacacacactatcttgatagacatacacactcagaattcacattcatacacattatgtcagtaatacacacacatgttcacatcccttgcacactattacctcatactcagtcatacccatgtacccattcacacattcacacacactcacattatctcagttattcacacactcgtaagttcacttgcccactcatcccatctcacacacactcaccctaacacacagttctacacacacacgtttacagacccccacactcatc

SEQ ID NO: 318849 - DNA, 505 bp, Homo sapiens
ccatcgggttctccttcagagcgcttggagagaaccaaccctgctgatgcctctattttgggcttctggcctccagaactgagagagaatacgtttgttgttttaagccacccacttcactatggcagccctgggaaactaatacagtcggccctgcatatctgtgcattcataaaccataccaaactagccacagataaaaamtatttggaaaaaaggaataaaaataacaacacaacaataaatataataggaaccaaaaccacaaaataacaactactcatatcatttaccttttatgaagtattataagtaatctagagatgatttaaagtataccagtagaacgtactcaggtacccaaccaccaactgctccccaataacctatggaaatacaaatttctttaaaaaataaagtatatgggaaatgtgcatagggtatatgcaaatactactaaatggaagtaaaacactcctcaacaaatgcaaaagaactgaaatca

SEQ ID NO: 318850 - DNA, 644 bp, Homo sapiens
tccgggcccactgtccttctgtccactggctgcccaggtctccttgctgtgtcacatctgccaggtatttcttcttcctcccmctgctggagggatttgaatgctctgtgtcccaagacaggcagaagagaaggtctagtgttctctgttaattccccagtccaaccacttgctagccaagaaacatttcgttcatttgatcatatacttgttgaagaagacgccaggcaagctaggtaagacctctggcgtcaggaaatttactttgccattgatgggagacagacaataaaatccaaacgggggaagaatccagatggggataaatagttacataaagaaaataacagtgagtcatagaggagggttttgggggcgggggatgaagggagagcttgagatacagaagctgagagagttctttgcggagctgcttttcagcagagacctgcagcatcagaaagagccagtgagctggtgacctgggaaaagagagttgcaggcaaagggaacggccagtgcagaggccgtggggtaagaataaccttggtgtgctccagggacagaaagaagaccagggcacccagtccactgagtggaaggaagagaaatatgccaagggtggaaaggtaagcaggggacag

SEQ ID NO: 318851 - DNA, 644 bp, Homo sapiens
tccgggcccactgtccttctgtccactggctgcccaggtctccttgctgtgtcacatctgccaggtatttcttcttcctccccctgctggagggatttgaatgctctgtgtcccaagacaggcagaagagaaggtctagtgttctctgttaattccccagtccaaccacttgctagccaagaaacatttcgttcatttgatcatatacttgttgaagaagaygccaggcaagctaggtaagacctctggcgtcaggaaatttactttgccattgatgggagacagacaataaaatccaaacgggggaagaatccagatggggataaatagttacataaagaaaataacagtgagtcatagaggagggttttgggggcgggggatgaagggagagcttgagatacagaagctgagagagttctttgcggagctgcttttcagcagagacctgcagcatcagaaagagccagtgagctggtgacctgggaaaagagagttgcaggcaaagggaacggccagtgcagaggccgtggggtaagaataaccttggtgtgctccagggacagaaagaagaccagggcacccagtccactgagtggaaggaagagaaatatgccaagggtggaaaggtaagcaggggacag

SEQ ID NO: 318852 - DNA, 596 bp, Homo sapiens
aggaagttatagtcaaaacaaaagccacagctttctgtgttagcttggctcagtaacttaaccttgttacacttcagcctcttacgtagcataggaattaaaacattttgttgtaaagtccaaatgagataacatagtcacacgttattcagccttgtcaacaaatagtgctagaacatttggatatctctatgcaagaaaataaacactggagctgggcacagtcactcacacctgtaatcccagcactttgggaggccgaggcgggcggatcacgaggtcaggagttttagaccagcctgaccaacatggtcaaaccccatctctactaaaaatacacaaaattaggatggtggtgcacacctgtaatcccagctactcaggaggctgaggcaggagaatcgcttgaaccccggaggcakaggttgcagtgagccgagatcgcatcacctcactccagcctgggtgacaagagcaagactctgtctaaaaaaaaaagaaaaaaaaagaaacattgacccatacctctcactgtattaaaaagttaagtgaaaatggatcataaacctaaatgtaagccctaaaactgttaaact

SEQ ID NO: 318853 - DNA, 625 bp, Homo sapiens
tctccccgctgtgcgtttttatcactttgttttcttgaccctttctggtccttcctggcacctgtagcatttggctctggtcagcaccatggttcacttctcattccctgtctgggcattcgcaagttmtccttattttggttcatctcacaagagtttgaggttttggagaaagaattttgttagaggacccagagaaaaacaaaacaagtcaaaggcagaaaataaaaatgcaaacacaaagaaatgatgtaataacagagcagggagctttacctttttatagtcaggctatggtggctaccactttttttttttttcagactgactttcacttttcttacccaggctggagtgcagtgatgtgatcttgactcactgcagcctctgcctcccgggttcaagcgattctcctgcttcagcctcctaagttgctgggattagaggtaactgccaccacgactggctaatttttttgtatttttagcagagacagggtttcaccatgttgggcagcctggtcttgagctcgtgacctcaggttatccacccgcctcggcctcccagagtgctgggattacagttgtgagccactgtgcctggcctggctactgctgtttaatga

SEQ ID NO: 318854 - DNA, 625 bp, Homo sapiens
tctccccgctgtgcgtttttatcactttgttttcttgaccctttctggtccttcctggcacctgtagcatttggctctggtcagcaccatggttcacttctcattccctgtctgggcattcgcaagttctccttattttggttcatctcacaagagtttgaggttttggagaaagaattttgttagaggacccagagaaaaacaaaacaagtcaaaggcagaaaataaaaatgcaaacacaaagaaatgatgtaataacagagcagggagctttacctttttatagtcaggctatggtggctaccactttttttttttttcagactgactttcacttttcttacccaggctggagtgcagtgaygtgatcttgactcactgcagcctctgcctcccgggttcaagcgattctcctgcttcagcctcctaagttgctgggattagaggtaactgccaccacgactggctaatttttttgtatttttagcagagacagggtttcaccatgttgggcagcctggtcttgagctcgtgacctcaggttatccacccgcctcggcctcccagagtgctgggattacagttgtgagccactgtgcctggcctggctactgctgtttaatga

SEQ ID NO: 318855 - DNA, 534 bp, Homo sapiens
gtgtcagctgccccactaccaatctcctccggctctcctctcttccatgcaagtatcgtatcttctgctcaggaggggatgcagcagtttaacaagttctttgcagaaataaacatccatcctggaattgagtactaatagatcaaagcaaacatttacaktgcccttactatgtgccaggctgtgctcaaaattaccatccatgtgtgtttgtctgctcaggctgctgtaatggaataccatgggctgggtagcttaaaagcagaaatagacctcatgtaaccctaattaccctccaaaggcctttctctaattaccattacattgggtgttagggcttcaacatattaatctggggagatacaaatattcagtccatagcaacatgtaatcctcacaataaccacacgaagtatctactgttatctcagttttacagatgggaaaatgaagtatgggaaggttcagtaacttggtcaaggttacacagttggggcagcagaactgggatttggacctcgacaggctagcgtc

SEQ ID NO: 318856 - DNA, 440 bp, Homo sapiens
tgatgctctctaactgactttctagtcagaacatctttaggttaaacttgcagctcctccagctagaatcctttttactttccgtttctctctgacatctctgtcctgtctcactcagtttatttaatatatatttttwaattcaggcatatgatctgtttgtatagtgttctgctttgtatttacatataatttcatttgatctttataatcaccttgcttggaaaaggaggtgggcactattgtcctcacctttggcatgaggagacatagcctgggaggaggagttagagcctcatgcgagagcgcacaggttgttcctgatggggctgggtccagcagctcatcctcagatttccagttttatgttcttttcattatgcaccaaaatttcctcaccaaatttgaaagccagtcacgcaggctgcctatcaatgagg

SEQ ID NO: 318857 - DNA, 598 bp, Homo sapiens
ccccttgcctggatggtccaggcgacacctcctttcactcttaaaaggattcttatttagatgataagttaaatgtgccccccacctacaacagagagggggagggaaaggagggtgagtggtattagtctttgacagaaaccctcctggaaaagtattcagccttggggtgcagcagtgatggtcagtaccctgttgggctaaagacgtagcaccaactcctacaaaaattcaaagatgattccgtcagaatccaagtgactgccagaggttctcaaacttatctttctgtccttgggccaatggcacctgccccagagatgtctgtgctctgacttsgtgacatctgggcatgggatatgccaactgtgctcacctgcagactctgcccagccaagggccaaggcaggcccctgagatagcctcattgagccacaaacagaatcattcccccatgtccccctccatctcctgctaggatctacacttccacttcagaaaccagatggaagtctaagagaaactataccaacagttagatgcctggcattctgtccctcattggccatgcattgttaggaaaggtcacttgcttcct

SEQ ID NO: 318858 - DNA, 582 bp, Homo sapiens
gatgatggttgagaaatcagaaattctttagctagcatatactctcttgatattttaaaagtatcaacgtatattttttcaataaaagtaacaagtttaaaatcagttttgcctctgaaaatgattagcaggaacttcagacctccttctaacctcctctgttcttccattcccacagtgtagcaccacaagagatatgtagaaataaagaatgcatatttttttatcccggtcacaagcctaatgtcttaaaaggtttagaaaaggcatgtgacaaagcctgtttgaaaagcagagcataatgtgttttcagtttataaattataaaatattcaacagcacaggctaacaccaaggaattggttactgctagatatctggaactgttttttctttccttctcycatgtgcttgctcttttttcccattaagaacaaaatgcaaatcaaatgcaaatgagatgccttaggcttagaagacaagaaggaaaacaactgtgccaaagagaaaaagaacacagggggtccctatgaatggttattaaacaaattatctgctcacagaattttttgattgacccag

SEQ ID NO: 318859 - DNA, 556 bp, Homo sapiens
tctacaatattttgataagcggtgccagtcaaagcactttgttgggtggtagcagcaggatccatgcttgttcacacgtgaaagtggcagcagcacatagcagggtacatgctcatcaacygggttgggacactggcaggcgtggaaatgctggcttccatgatggtgtttgcagcagcagctgtggcagcacagggctgggggtagggcaaggggcagggctgctggcaatgtcaacaccaggggccgggtgcatgcaggcgcagggctgatggccttcattcacagtccgtgccactggcaatggtggtatggggtagaaagggggtgcagagctgctccacacttgatagaccaaggcaagtatagattgaactatacaactaatggtagcagatcaataacaatttcatgcataaaactttgaaagcattattgtccacatcaattgtatagttgactatgtgtttctgggacaattggcatatcttatgtaacacatatgtatggaatcacttttctaagcagtgcatatattaggcaagtgagtcaacta

SEQ ID NO: 318860 - DNA, 556 bp, Homo sapiens
tctacaatattttgataagcggtgccagtcaaagcactttgttgggtggtagcagcaggatccatgcttgttcacacgtgaaagtggcagcagcacatagcagggtacatgctcatcaactgggttgggacactggcaggcgtggaaatgctggcttccatgatggtgtttgcagcagcagctgtggcagcacagggctgggggtagggcaaggggcagggctgctggcaatgtcaacaccaggggccgggtgcatgcaggcgcagggytgatggccttcattcacagtccgtgccactggcaatggtggtatggggtagaaagggggtgcagagctgctccacacttgatagaccaaggcaagtatagattgaactatacaactaatggtagcagatcaataacaatttcatgcataaaactttgaaagcattattgtccacatcaattgtatagttgactatgtgtttctgggacaattggcatatcttatgtaacacatatgtatggaatcacttttctaagcagtgcatatattaggcaagtgagtcaacta

SEQ ID NO: 318861 - DNA, 556 bp, Homo sapiens
tctacaatattttgataagcggtgccagtcaaagcactttgttgggtggtagcagcaggatccatgcttgttcacacgtgaaagtggcagcagcacatagcagggtacatgctcatcaactgggttgggacactggcaggcgtggaaatgctggcttccatgatggtgtttgcagcagcagctgtggcagcacagggctgggggtagggcaaggggcagggctgctggcaatgtcaacaccaggggccgggtgcatgcaggcgcagggctgatggccttcattcacagtccgtgccactggcaatggtggtatggggtagaaagggggtgcagagcygctccacacttgatagaccaaggcaagtatagattgaactatacaactaatggtagcagatcaataacaatttcatgcataaaactttgaaagcattattgtccacatcaattgtatagttgactatgtgtttctgggacaattggcatatcttatgtaacacatatgtatggaatcacttttctaagcagtgcatatattaggcaagtgagtcaacta

SEQ ID NO: 318862 - DNA, 647 bp, Homo sapiens
ggtttccacccattttcagagaggaaagaccatctaactaacgtattcattctatgtatttgtgggctatatgatcatattaaattaacaggtaattaacagtacatatttctcacttcattgtacaggttcagttattcttagctaatcctttttatgggctataatacattcccaagtaaaatatctatgtcaaataaacatctgaaagaagtagaagttattttattactcaaatcaaggctatattttaaaaaattttwaaaaatgcagagcaagtaagcactatcctttatagaataccccttaagaaaaatgatttctaccagcatatggcatgtattgcacacaatgcttcgaaaacgctttatctagtcgtgtcattttgtacatttagtctgtattgactagctctttaaatgaagcacagtgcttatgaggccagtgtgataacctcaacatcaattaaactgttgaggttaaataacttcaggttgctttaagtgcatgaatatggtgcacgtgcacagtacacaggcaaacacacacacactacacaaaaccaacagtgaaaactagaaaaactatgttaataatttagtgcaattcactactacttttagataaagcaagccaaaacatgtcat

SEQ ID NO: 318863 - DNA, 647 bp, Homo sapiens
ggtttccacccattttcagagaggaaagaccatctaactaacgtattcattctatgtatttgtgggctatatgatcatattaaattaacaggtaattaacagtacatatttctcacttcattgtacaggttcagttattcttagctaatcctttttatgggctataatacattcccaagtaaaatatctatgtcaaataaacatctgaaagaagtagaagttattttattactcaaatcaaggctatattttaaaaaattttaaaaaatgcagagcaagtaagcactatcctttatagaataccccttaagaaaaatgatttctaccagcatatggcatgtattgcacacaatgcttygaaaacgctttatctagtcgtgtcattttgtacatttagtctgtattgactagctctttaaatgaagcacagtgcttatgaggccagtgtgataacctcaacatcaattaaactgttgaggttaaataacttcaggttgctttaagtgcatgaatatggtgcacgtgcacagtacacaggcaaacacacacacactacacaaaaccaacagtgaaaactagaaaaactatgttaataatttagtgcaattcactactacttttagataaagcaagccaaaacatgtcat

SEQ ID NO: 318864 - DNA, 571 bp, Homo sapiens
ccagttctcctgtggctgggctcaagttaattaaactctttctttactgatctcagtgaattcgttttgtctgtgcagagggccagaagaacctgttgggtaattacatttagcagccataaaatattagaattaaaaacagtttagattacttttacataatcaatgyaatattttgtttttaaatcccctactaactatgacttgatttctgattattttagtactgtttttccccctatatgggctggcattgctttgtttaataagctaaactcaagagaagtttggtgggcagaattttaagatggtggcaagaatcctgtctcctggcaaacacactgtttataatctactcaagcgcagtctggagccatgaatatgatggaataatagctcttgatgaggttatgtcctgtgagcaaggtgatgggacagtcatcccctgatgtgttacattatataagacaatgccttagtagactgaagaaaaagaggttctcctactagccttgaccttaggaaggaagctgctgtgttgtaagagagccatgtggcagggcactaaggt

SEQ ID NO: 318865 - DNA, 563 bp, Homo sapiens
catcccctgatgtgttacattatataagacaatgccttagtagactgaagaaaaagaggttctcctactagccttgaccttaggaaggaagctgctgtgttgtaagaragccatgtggcagggcactaaggtggcctctaaaactgagggcagcttgctgctgacagcaagaaaacagaggcctcagtcctacaaacataaggagctggattctgccaacaaccacatggtcttggaagaccctgagctccaaaggagaatgcagcctggtcaaaatcctgactgcagccttgtgagactctgagtagaggacccgggcaaccatgcccagactcctgacacagggaaactgagataacatgtatgtgttgctttaagctgttgaattcatggtaatttgccacacagcatagaaaactaatacaagaagcaaatcaacatttcatattaagtattcagtttaaaagtcactccttcaaagagagattaaagtaagagtaattgaatccttcagccctaatctgttaggaaaggtatgcctatctattaaggatctatacgga

SEQ ID NO: 318866 - DNA, 622 bp, Homo sapiens
atgtcagtctattctgcccgttattaaaatccaaaacctatgaacttaacttcaattgcaagaaacttcccttttagaggctaattattatgtttttgtttttgtttttgtttttgctttgagatgtagtctccctctgtcacccaggctggagtgcagtggcatgatctcagctccctgcaacctctgcttcctgaattcaagcaaytctcctgcctcagcctccagagtagctgggattacaagcatgcgccaccatgcccggctaatagaggctaattattatgttggtgcaaaagtaattgcggttttagaccatgaattttaaatcattataactaggctcaaatacatctttattaatcacaataggaaccattaaaattaacacatttttgccaatgagaaataagtttgtttattcctgtagcataaaaatctgtgcttcgggatttgacaaactcttagaaagcattttctgcatcctgctggttgtagaaggttttccctgcaaaacaaacaaacaaaaattgtcgagatacttgaagaagtggtagtcagttggcaagagatcatgtgaatatggtggatgaggcaaaattttgtagcccaagtcgttcaa

SEQ ID NO: 318867 - DNA, 585 bp, Homo sapiens
atgttctctggctttctggaacatccatcttcatttctaccacttaagatttatttgtttgatcctgaagggctttttgaatgttagaattttcttatccaaaaaaatttttttgtattattttccaacctaaaaaatgatccagaaacaataaaataaaaacattggaaataaatatagaaaaatataaaagaaaataactctgagtggtgaacttgtggatatgttttgtttattttaataagaaataaatattgagtccctaatatatgccatttactaagaaggcactgaaggctcaaagtttctggctggaagaatttatattttggagagagagttatataaacatgccaatatatttggtaggtgatatcataaagagatacacagcactttctgaggttaaatgctgyctaaaaatagatattattttagtaatacaaacataataattcattaagggaacaaaaaataaatctaggcggtgagaggggcaagaggaaatacaaatggtaggaaaatgttcttccttgaattggggaagatgtcaaaggcaagctagtttatttcacaatttttatc

SEQ ID NO: 318868 - DNA, 591 bp, Homo sapiens
cttaactatctttctttcccagtagcctaaggaatgtcctagcagctgtagtatttgcattagccaccagacattcactttgatgttgagcaggtgagtaaggagctctgaatttaaaaaccctgtgtggcttaaggtgaaagttcaacagcagcactttcattgttttaaggttttaattctttgatcaactccttgctttccctgaataaactttaagttcccaacaatcaggcattgatggtgatccttgaattgaaaggtttacccctgtctcatcagtcacttttccttgtctcttgctgattaacttcaatgacacaggaacagcacttcacaggttgcacaatttgctctttgaccttcagaaagttcctgctatagatgaattcattccataaatacatacattttgcatcactttcaactttgctacaatctgtaaatattttcatttccattataatgatacactgattctttttaactctttctacattgataggttttgcaatatccaaacaccaacagatkaataacatttgaagtaaagcttcagaacaaagcacaaatatagtagacacaccacag

SEQ ID NO: 318869 - DNA, 635 bp, Homo sapiens
atgtgatgtgtgaaagggtagatttttagtcacaaattaagttattatagaaaagtaggtagttgacatcatcarctgtttatagatgatggcttctgtctgctgcttgtgacatagcttgctcttctttagaaataatgacttcttttccaggcagctctctagttcctcctataaataacaccctgatgggtctgtccagcctgcaggtctccaaacaatcccaagtatgtgtgagttttaaagtgttatctttttcatcaatatggcaccaaattgtgaaaaggccagtgggtagaaacttaaggaggtcggatttggactcaaaataaggaagaatttttaataaattttgtcccaagcttgaatgggattctttacatggtggccaccccatcaatggcggtatccaaaaattgactgagtgttcacttagtgaaagtttttgaaaatattcagggtattgagggaaacaagtcaacagtgtagtagtctcattctattccaagtctatcattatgcttttcttgaatctcccacagtgcacagtactatgtcttgtcactgagtgaacaagcagtcaaacgtagtcttatgggatcacttttctggctggaaacctctgtggctggtag

SEQ ID NO: 318870 - DNA, 635 bp, Homo sapiens
atgtgatgtgtgaaagggtagatttttagtcacaaattaagttattatagaaaagtaggtagttgacatcatcagctgtttatagatgatggcttctgtctgctgcttgtgacatagcttgctcttctttagaaataatgacttcttttccaggcrgctctctagttcctcctataaataacaccctgatgggtctgtccagcctgcaggtctccaaacaatcccaagtatgtgtgagttttaaagtgttatctttttcatcaatatggcaccaaattgtgaaaaggccagtgggtagaaacttaaggaggtcggatttggactcaaaataaggaagaatttttaataaattttgtcccaagcttgaatgggattctttacatggtggccaccccatcaatggcggtatccaaaaattgactgagtgttcacttagtgaaagtttttgaaaatattcagggtattgagggaaacaagtcaacagtgtagtagtctcattctattccaagtctatcattatgcttttcttgaatctcccacagtgcacagtactatgtcttgtcactgagtgaacaagcagtcaaacgtagtcttatgggatcacttttctggctggaaacctctgtggctggtag

SEQ ID NO: 318871 - DNA, 621 bp, Homo sapiens
tgagattagagaatcttggctcttctctttggtcagataaattactcatagatattgattatgtgaatactttcataaaataagcctagccttctactcaatgccagcccctcaagtagaagtttggacctacaaaaatgactatggtcagttgtgccccaagtttcttatagtccactggaaagacagctgcatggataactaatcatagtataatataataagcaataatgcaagtgatataaaccagaagaaggattgtgttaattgatattatcttgggggagggagtgttaaggagagttgcactgaaaagctaagttgaaatgtaaggggttgtaaacatttttttccaggtaaaaagggttaaaaggcatggaaggaggagagacaaaggcaaggcgatggaaatgggaaagtgtcatgatccactggggaaatggcaaggaggtcagamtgagactgagacaggtgttcatggcctgaaaggcaggtgggtgtgccagccaagaaatcgcttgattgaatatggactctttacaattctgtctctgataggagcttgtagaactgactgcgtggtgggtggtgggagaagactggggagaagggaaccagtgt

SEQ ID NO: 318872 - DNA, 507 bp, Homo sapiens
gcttccaatccctctattgcagggtttaccagaatatgcatcatgtaacagcatttccactgggtgttaatagacctcatttgaatagaagggtttcatgatcatataaggctgggaatgctgaattttaaaatgttaaacagatttgtctactgtaggcaactttaatgtgcccatggtccaaaaagatggtgtaacatgctatactccccaaagttatttgagtttaaaatgttgtgtgtttttgttttgcttttacaaaacgcttgttcaggtggtctggaaaatcctgcaggaggaaatctaaagtcattaagtttctttatttccctttcagtcacatcagctctcttttgtttccctaagatygtagagttcattgaaacacataaatgtccatttctacaacaatatacaaatcctagctagaaaggaaatagtggtaattactctcatgtagtaattatttaatgtctgggtattttaaaaccaaacaagtatttaaaa

SEQ ID NO: 318873 - DNA, 507 bp, Homo sapiens
gcttccaatccctctattgcagggtttaccagaatatgcatcatgtaacagcatttccactgggtgttaatagacctcatttgaatagaagggtttcatgatcatataaggctgggaatgctgaattttaaaatgttaaacagatttgtctactgtaggcaactttaatgtgcccatggtccaaaaagatggtgtaacatgctatactccccaaagttatttgagtttaaaatgttgtgtgtttttgttttgcttttacaaaacgcttgttcaggtggtctggaaaatcctgcaggaggaaatctaaagtcattaagtttctttatttccctttcagtcacatcagctctcttttgtttccctaagattgtagagttcattgaaacacataaatgtccatttctacaacaatatacaaatcctagctakaaaggaaatagtggtaattactctcatgtagtaattatttaatgtctgggtattttaaaaccaaacaagtatttaaaa

SEQ ID NO: 318874 - DNA, 507 bp, Homo sapiens
gcttccaatccctctattgcagggtttaccagaatatgcatcatgtaacagcatttccactgggtgttaatagacctcatttgaatagaagggtttcatgatcatataaggctgggaatgctgaattttaaaatgttaaacagatttgtctactgtaggcaactttaatgtgcccatggtccaaaaagatggtgtaacatgctatactccccaaagttatttgagtttaaaatgttgtgtgtttttgttttgcttttacaaaacgcttgttcaggtggtctggaaaatcctgcaggaggaaatctaaagtcattaagtttctttatttccctttcagtcacatcagctctcttttgtttccctaagattgtagagttcattgaaacacataaatgtccatttctacaacaatatacaaatcctagctagaaaggaaatagtggtaattactctcatrtagtaattatttaatgtctgggtattttaaaaccaaacaagtatttaaaa

SEQ ID NO: 318875 - DNA, 568 bp, Homo sapiens
ctgtgtaaataatttccattaaatgtttgaaatgttcaacttcactgtgttaagaaatggtggcttgcttctgtttgtatttaaactgttcttgccagcaaaaacaattgttcatattggcagaagtagaacatttcccagcatgaaaaagtgctgtatagcactttttttttgtatagcatttaacataccataacacatattttcttttcctcacaaatctggtttaaaaccttaatttttttacatagctgtggcctcaatacttcagaattttaactttttttcaaccttgtagaatataaaagtacgtgtgtaagcatataatgccaagaaaagttttcttaaagttattgcatttctacttgaaattctggctccattttgcatagaacatggtgaatgccttcttatctagaagacagaaatatattagtacagtcactaatctctctaytaacaccttaaatatctctttgattcttcttgacatccaaagagcacttttcactccttttaaaatttttttagagaaatctaatttcatgttatcaactttccaatattc

SEQ ID NO: 318876 - DNA, 586 bp, Homo sapiens
gcccttccctggaaaggaacagtgtgtgagccccccacatctatgtaagtttcccacttgtctccactgagcaacattcttcccatgaggtcatgttcagcccccatctttattccagatgacttttcaattcttttggtacctagcttttatatatttcaactgtggacatataaaacccaaaccaagcacaagatagggtacagagagcycagctgttctatagaaaaacatctttcagtactttctcccttttcaccagccccacccaacttccccaccctgtgtttttctaaaaccccaaagaagaaaggaggacagagagtaaaatgtttttactgttcaccagtgaactgggaaggtgttgcttctgtgaaaactcatgccccggtacctggcacactgaacactctgctgcttcatttgtctgactgccttgttcacacttgccaagccaacatctgtggattgcatgactttttaattagaggagatggagagtgtgcgtttaaaaaaaaaaagaaaaaaagaaacatctgataggacttgcacctcaaacttctacccacctttctcttccacacca

SEQ ID NO: 318877 - DNA, 558 bp, Homo sapiens
aaaagttgaacatgtgatttttctactgacaagagatgaactgctctcctgatcatctatggatagcatacaaggctttccatggttagaacctgtggtatgtctaaattcaactgactctgaatagatgaatgattcagtgatccctaaacacaacattcgtcatatctgtacttcatgacaacctgattacttgagccttattattcacttactttaagttgaaaaactgaagtctcagactctaatttaaaaacttcaactacatctttctttttcttattactttcattccctacrtattataatgagtagaccactataaattaatatttttagagaaaagcagatgaaaaatgaataaatgtttaaaatttctcaccatacaattctaaggtatcatgtattgattcaattatttaataaaaaagattaataaaaattaaattaatgcttggcatttattcatatagtactcacagtgtgtcaggcactggtctgagatttttatatgcactaacttgtgtaaatatttattgaacctttaaaaggtaccag

SEQ ID NO: 318878 - DNA, 638 bp, Homo sapiens
atgggataccattaagtgaacagatattgacagtatggtcaacccagaaggagaatataaggaaaaagggaggaaaatatattttatgaaatagctaaaaaacttcccaagtcatcagagaaacatggatatctacattcaggaagctcaaagagtctcaagtagaaccaatccaaacaggtyttcttcaaggcattttagagacaaattgtcaaaagtcaaaggcaaagaaggaattcttaggaaaaaaaaaaagcaagagagaagcatcaagttacatataatgtaatctccattaaatgaacagtggatttctcagttgaaatcttgtagccaggagaaaatgggatgatgtattcaaagtactgaaaaaaaatttttaaaaaactgccagccaaaaatattatacccagctaagctattcagaaatgaaggatcaataaaatatttcacagagaaaaaaaaaaaaaactaagagaattaatcaccactagactagccttaagagaaatatttgagagactcttagatctggaagtgaaaagacaatatcaaccatcatgaaaacatgtgaaattataaaatttattggtatagtcaatacaaatgggagaaataagaatcaaaactatcactac

SEQ ID NO: 318879 - DNA, 638 bp, Homo sapiens
atgggataccattaagtgaacagatattgacagtatggtcaacccagaaggagaatataaggaaaaagggaggaaaatatattttatgaaatagctaaaaaacttcccaagtcatcagagaaacatggatatctacattcaggaagctcaaagagtctcaagtagaaccaatccaaacaggtcttyttcaaggcattttagagacaaattgtcaaaagtcaaaggcaaagaaggaattcttaggaaaaaaaaaaagcaagagagaagcatcaagttacatataatgtaatctccattaaatgaacagtggatttctcagttgaaatcttgtagccaggagaaaatgggatgatgtattcaaagtactgaaaaaaaatttttaaaaaactgccagccaaaaatattatacccagctaagctattcagaaatgaaggatcaataaaatatttcacagagaaaaaaaaaaaaaactaagagaattaatcaccactagactagccttaagagaaatatttgagagactcttagatctggaagtgaaaagacaatatcaaccatcatgaaaacatgtgaaattataaaatttattggtatagtcaatacaaatgggagaaataagaatcaaaactatcactac

SEQ ID NO: 318880 - DNA, 638 bp, Homo sapiens
atgggataccattaagtgaacagatattgacagtatggtcaacccagaaggagaatataaggaaaaagggaggaaaatatattttatgaaatagctaaaaaacttcccaagtcatcagagaaacatggatatctacattcaggaagctcaaagagtctcaagtagaaccaatccaaacaggtcttcttcaaggcattttagagacaaattgtcaaaagtcaaaggcaaagaaggaattyttaggaaaaaaaaaaagcaagagagaagcatcaagttacatataatgtaatctccattaaatgaacagtggatttctcagttgaaatcttgtagccaggagaaaatgggatgatgtattcaaagtactgaaaaaaaatttttaaaaaactgccagccaaaaatattatacccagctaagctattcagaaatgaaggatcaataaaatatttcacagagaaaaaaaaaaaaaactaagagaattaatcaccactagactagccttaagagaaatatttgagagactcttagatctggaagtgaaaagacaatatcaaccatcatgaaaacatgtgaaattataaaatttattggtatagtcaatacaaatgggagaaataagaatcaaaactatcactac

SEQ ID NO: 318881 - DNA, 495 bp, Homo sapiens
caaactactgaattgagagaacatgtttgcaaactattcatttggcaggggattattatccagaagatataaagaattcaaacatttcaacagcaaaataaacaaacaatttaaaaatgaayatgttttctgaacagacatttgtcaaaagacatttgtccaacaaaagatgaatgaataaaaataacatggtatacatgcacaatgcaacactgttcggccatagaaagaatgaaatcttgtcattcatggcaacatggatagaactgaaggacatttcattaagtgaaagaagccaggagcagacagttaaacaatgcatattttcaatcatatgtgtaagctaaaaagctgtttacctaatacaagaaaaatgagaagaggataagtttgagtttgagacggaggaagaggaggatagggagagacttgttaaatgatacaaaattacagctagatagaagggctatgttctagtgttctataccactgtag

SEQ ID NO: 318882 - DNA, 570 bp, Homo sapiens
ttgttcatctatacctgaaatacttattgagcacccttaatgtgacaatcaccgttcttgaccctgtgatacagtgataaacatgaaaggaagaggtctctcactccattgagattccagtgacatgatataaaaaagaacaaatcaaaaaataaaaagggcaaggtaattttagtgttacctactatgtagaaataaaataaggtcatttgaaaatgattaggccatgaytgagaattgaaataatgtactctaggattggatggaaaagaagaactctctgaaatggtaatagttttgccttaactttaatcatgagaagtgtcagtcatgagatgaccataattaataggattccaaagagaaagaacaataaaaagagaagtagaaggagaggacatggagtattcaaggaataaagtgaaagtcagtatgaacatatcgtccctgccgcaatgtcaaattcccaaaattagatttttgggaacgttgaattaacagatgtgaaagtgtttgtttccatgtgcaacatacggtccttcaaataacttttttagtacacacatgaag

SEQ ID NO: 318883 - DNA, 570 bp, Homo sapiens
ttgttcatctatacctgaaatacttattgagcacccttaatgtgacaatcaccgttcttgaccctgtgatacagtgataaacatgaaaggaagaggtctctcactccattgagattccagtgacatgatataaaaaagaacaaatcaaaaaataaaaagggcaaggtaattttagtgttacctactatgtagaaataaaataaggtcatttgaaaatgattaggccatgattgagaattgaaataatgtactctaggattggatggaaaagaagaactctctgaaatggtaatagttttgccttaactttaatcatgagaagtgtcagtcatgagatgaccataattaataggattccaaagagaaagaacaataaaaagagaagtagaaggagaggacatggagtattcaaggaataaagtgaaagtcagtatgaacatatcgtccctgccrcaatgtcaaattcccaaaattagatttttgggaacgttgaattaacagatgtgaaagtgtttgtttccatgtgcaacatacggtccttcaaataacttttttagtacacacatgaag

SEQ ID NO: 318884 - DNA, 511 bp, Homo sapiens
ttgaattatattgccaatttggtgtttagtcggtttgtaataatctattctttcactaacaaagaatgcacatgttaaaataagatattctcctaaaaatcaaaagttacctttaataaaatagttaattagataatttagcaagattgactcyttaaatatgggtcagttatgtgtattatattgagtgaacttttaaatttttaaaatgttcttatgacctaattttcatagtgatttcctgatacattgatgattgagatacataaaacattcttagtgcctaatatttacctctaaaaacaatattgctttttaaattggcaaaatgtttggtggctggctgcctgtgatactttgtaagttaactatttctatgtttatttatttatacttggatatttatcaagttttaataacttgctgcaaacgaaaatgtttaataaattgatcaatgtttaaactatgcgttagacattagcaatgtatgtggcaatatattacacacaac

SEQ ID NO: 318885 - DNA, 511 bp, Homo sapiens
ttgaattatattgccaatttggtgtttagtcggtttgtaataatctattctttcactaacaaagaatgcacatgttaaaataagatattctcctaaaaatcaaaagttacctttaataaaatagttaattagataatttagcaagattgactctttaaatatgggtcagttatgtgtattatattgagtgaacttttaaatttttaaaatgttcttatgacctaattttcatagtgatttcctgatacattgatgattgagatacataaaacattcttagtgcctaatatttacctctaaaaacaatattgctttttaaattggcaaaatgtttggtggctggctgcctgtgatactttgtaagttaactatttctatgtttatttatttatacttggatatttatcaagttttaataacttgctgcaaacgaaaatgtttaataaattgatcaatgtttaaactatgcgttagacattwgcaatgtatgtggcaatatattacacacaac

SEQ ID NO: 318886 - DNA, 574 bp, Homo sapiens
gttttgcttatgttcagaaattaagctggcttgttcacgttgttgctaacacaacgttcttggctttcaatgcaatagaaattaacatgaagtctggcacacttttcctagacaagattttgaacacttatgcctggaaaggttggrgctaagggaaacagtgcaggaggaagggtttcctagttggctccccaaggtgggtcctagtggtatctagaggagggtaccataagtaagtaatgagctcagtaagcatccttacatgtggtgggtagagcgctggtgcacaggcccagtgagaaatcatgctaacacatgcattgcatggcatgattagaaaacagtgggggagatgttagtattacaatgagttaaatgttagggccatcaacctcccggtcttgtgtgcatgatggtaggatcccctgccttgggtaagatttgtagccagtgttgcgtgtcttagcgttctcagatattttgcaaggtctcagggggtttcgggccagtgcgggtgggctgagtcctgtctccagtccatctcaatgtggctttctctgctgtgagaagtccc

SEQ ID NO: 318887 - DNA, 574 bp, Homo sapiens
gttttgcttatgttcagaaattaagctggcttgttcacgttgttgctaacacaacgttcttggctttcaatgcaatagaaattaacatgaagtctggcacacttttcctagacaagattttgaacacttatgcctggaaaggttggagctaagggaaacagtgcaggaggaagggtttcctagttggctccccaaggtgggtcctagtggtatctagaggagggtaccataagtaagtaatgagctcagtaagcatccttacatgtggtgggtagagcgctggtgcacaggcccagtgagaaatcatgctaacacatgcattgcatggcatgattagaaaacagtgggggagatgttagtattacaatgagttaaatgttagggccatcaacctcccggtcttgtgtgcatgatggtaggatcccctgccttgggtaagatttgtagccagtgttkcgtgtcttagcgttctcagatattttgcaaggtctcagggggtttcgggccagtgcgggtgggctgagtcctgtctccagtccatctcaatgtggctttctctgctgtgagaagtccc

SEQ ID NO: 318888 - DNA, 508 bp, Homo sapiens
ccattaagcagcattcacttgagtctccgtgttgcccatggcactttccttgggtaagtgcctccgggtcaatgcagtgaggaaggtgaaaaggaatagataatagaaaaaaatatgtaacaaaatcttcatggtttcatttagagaatattaaccagctcttcccaagagcttataaggtaccttatatggaaagttatgcaaattatatgtcagagtgacaatatatgagtaatttctagaggcatrgttgagtttcaggcatgattcattcttcccagtactcaccgtctagactgtaaacatgtgttaaggataaagccattttaacaaattttggaactcattttaacaaacagaattcagagcctctttaaaagttacacctaaaaaatgagttttaatatgagccggggttctttcacctggttacctgtggtcactatcggatttaacctcattcttcaactacttacatcactttaatcattatacttcgttgttccta

SEQ ID NO: 318889 - DNA, 570 bp, Homo sapiens
ctgggctagttttgtaggattttaccttgaacccctacaagacccacctagactgcagctgtgtgatgtccatctcagtggtatggcagaggatataaggtaccattttctgatagactaccatttgttaggtacagtacatgacattttgtatacatttattttaaatcctgtcattttcttgagggataagcggttactacaactcagaataattaacctgaattaacctgtctgtaactagacaggtagtaaataaaaactaggaactcagaacctttttttctggctgtaaactgaaaaaaaatgaattgtaaagatgaygatgatgatgatataataataataaaacaagcaaagctaataatagtttacaactaaaattgattaagttatttcaatgtgttggtcacagttctagatgctttacatagatcatcttatgtggatcatacagtgcccaatatatggatatatcatccccattatgcagaggaagacattaacatacatgccagttagatggcctgctcagtcgttatagaggtatactggagtttgaattgactt

SEQ ID NO: 318890 - DNA, 574 bp, Homo sapiens
taataatatagtttatcccagatggatcattttttacacagatcctattgtctatgccaaaatgtaagtgtccrtaagtttttgtctgaaatttcattgtcattattgtattaccccaaaactggcgcctttgacttgggtgggatatgatctttctatctttctaaagtaattattttattgtacgtatttttgttgtaagggttgatcattagaagtaattaatttctgcagggtgcagtggctcacacctgtaatcccagcattttgggaggccggggtgggcggattatgagttcaggaattcaagaccagcatgaccaacatggtgaaaacccgtctctactaaaaatacaaaaattagccaggcattgggcgcacatctgtaatcctagctactagggaagttgaggcaggagaatcacttgaacccaggaggtggaggttgcagtgagctgagatcatgccactgcactccagcctgggaaacagagcaggactctgtaaaaaaaaaaaataaagaaagaaataattaatttcagattttaccactatcaagatcaagatacaatgc

SEQ ID NO: 318891 - DNA, 574 bp, Homo sapiens
taataatatagtttatcccagatggatcattttttacacagatcctattgtctatgccaaaatgtaagtgtccgtaagtttttgtctgaaatttcattgtcattattgtattaccccaaaactggcgcctttgacttgggtgggatatgatctttctatctttctaaagtaattattttattgtacgtatttttgttgtragggttgatcattagaagtaattaatttctgcagggtgcagtggctcacacctgtaatcccagcattttgggaggccggggtgggcggattatgagttcaggaattcaagaccagcatgaccaacatggtgaaaacccgtctctactaaaaatacaaaaattagccaggcattgggcgcacatctgtaatcctagctactagggaagttgaggcaggagaatcacttgaacccaggaggtggaggttgcagtgagctgagatcatgccactgcactccagcctgggaaacagagcaggactctgtaaaaaaaaaaaataaagaaagaaataattaatttcagattttaccactatcaagatcaagatacaatgc

SEQ ID NO: 318892 - DNA, 574 bp, Homo sapiens
taataatatagtttatcccagatggatcattttttacacagatcctattgtctatgccaaaatgtaagtgtccgtaagtttttgtctgaaatttcattgtcattattgtattaccccaaaactggcgcctttgacttgggtgggatatgatctttctatctttctaaagtaattattttattgtacgtatttttgttgtaagggttgatcattagaagtaattaatttctgcagggtgcagtggctcacacctgtaatcccagcattttgggaggccggggtgggcggattatgagttcaggarttcaagaccagcatgaccaacatggtgaaaacccgtctctactaaaaatacaaaaattagccaggcattgggcgcacatctgtaatcctagctactagggaagttgaggcaggagaatcacttgaacccaggaggtggaggttgcagtgagctgagatcatgccactgcactccagcctgggaaacagagcaggactctgtaaaaaaaaaaaataaagaaagaaataattaatttcagattttaccactatcaagatcaagatacaatgc

SEQ ID NO: 318893 - DNA, 628 bp, Homo sapiens
ataactatagaagtatagttataaaatctaaaaataaaaaatgtaaagtataaaatgacagtaataataaataytcaagcttcacattgacagaaataaattaatcaacttacataaaatccctggcacaagtctttggacaaagataattggtattaataatattatccatatccaaatagttattagttgttattcttatttcaaaattttgcccctgtggttaacatagctaccaatttcacttagttgcttaacaaatctttattgagacctgtcatgtgattacttatccatcataaatttatacaaatagtcagttgctcttctttccttctttccttttttcattttttcttcctcctatcctcctttctcaaatggacaagctctgcattttccagtatctacctttaggttatggcactattcagtaagttcagaaaggtattatttcacctaagggttctggttcaggagtcgttagtgaaatgtcacaataacaaagacaagtcaatgcagtttgcagtcttattaaattgatatcagtttagaagaataaacttaattagtagaataaattaactgcaaactttaatctgttaatgttgaattttttttaacttca

SEQ ID NO: 318894 - DNA, 621 bp, Homo sapiens
ttttctgcagtgttaacatcatcttcattatcactattatcaacatcaccttgattcagagccatttttgatattttaccatcagtcaatgaatgaacaactggagcctcattattgatattaaaaactgcttcaagatctacttcttccagtttaccaatggactctgaaagtataattttttgcatatataaggagtgcaggctttttctttacttgacgtatgcaatctcttaaggtcaccaccttgctcatcatcatcactgaacatagttgcaggtcagaggctgtgccaggcatgtacaactgtgtcttcygtcactgtgttccaagcatgtagcatcatatatgctaaagtccttttgagaaccttccacaccaacacttttgttcactgctacaatgctgttcaagaaagtgcttttgtatttactcttcatcaatctaaggatagcctggtcacatggctgaattaatgaagtcacatttgagggaaagtttgtgacatagcatttctttttattaaaaattctgctgcagaaggagcagaatagtcaccaaaaaataataaaataatgcaacctttatctagtcctgctttccttcattgagtataagaca

SEQ ID NO: 318895 - DNA, 538 bp, Homo sapiens
accatggcattgaaacactttggaaataaaaggtctggttgcagcacagaagtgagaagtgataatcaattgaacaattatttatataaaatatgttatgtaaaaaatgtgtgtgtgtgtgtgtttgtgattaccaactgaaagttgatttattaattgaagttgattctttggaagatacaagtcttggtccytcccttaatgcaaggtagaaagataaaacataaaggaaacaatagctactgaaataaggaatctaagacacagaagaagaacacagcttgttcaaagccccaggtacatagggccacagcaggaagtcgaagtaaattatcctggtccttggcatagaatcttaccactgtatgaaagggaggaacatgcatctaaggtgctgctataatgaaaaccaccaaatacataagctggattctcagcaggaccttatacttcaaccatattctagttcagggtatttttttatgcttatctttaatgtcatatgaaattatacattcccaggcctacttcttccctg

SEQ ID NO: 318896 - DNA, 640 bp, Homo sapiens
agggctctctctctccctctcagttccctcaatatgtgcaaacccatcagcttgagagacagccaccagtttcaaatctaaactcactatttcctccatcctccttccaaatcacaatggaaggtgaatttaataattgtaatcattaaataagaccatggcattgaaacactttggaaataaaaggtctggttgcagcacagaagtgagaagtgataatcaattgaacaattatttatataaaatatgttatgtaaaaaatgtgtgtgtgtgtgtgtttgtgattaccaactgaaagttgatttattaattgaagttgattctttggaagatacaagtcttggtccttcccttaatgcaaggtagaaagataaaacataaaggaaacaatagstactgaaataaggaatctaagacacagaagaagaacacagcttgttcaaagccccaggtacatagggccacagcaggaagtcgaagtaaattatcctggtccttggcatagaatcttaccactgtatgaaagggaggaacatgcatctaaggtgctgctataatgaaaaccaccaaatacataagctggattctcagcaggaccttatacttcaaccatattctagttcagggtatttttttatgc

SEQ ID NO: 318897 - DNA, 640 bp, Homo sapiens
agggctctctctctccctctcagttccctcaatatgtgcaaacccatcagcttgagagacagccaccagtttcaaatctaaactcactatttcctccatcctccttccaaatcacaatggaaggtgaatttaataattgtaatcattaaataagaccatggcattgaaacactttggaaataaaaggtctggttgcagcacagaagtgagaagtgataatcaattgaacaattatttatataaaatatgttatgtaaaaaatgtgtgtgtgtgtgtgtttgtgattaccaactgaaagttgatttattaattgaagttgattctttggaagatacaagtcttggtccttcccttaatgcaaggtagaaagataaaacataaaggaaacaatagctactgaaataaggaatctaagacacagaagaagaacacagcttgttcaaagccccaggtacatagggccacagcaggaagtcgaagtaaattatcctggtccttggcatagaatcttaccmctgtatgaaagggaggaacatgcatctaaggtgctgctataatgaaaaccaccaaatacataagctggattctcagcaggaccttatacttcaaccatattctagttcagggtatttttttatgc

SEQ ID NO: 318898 - DNA, 563 bp, Homo sapiens
tttactttcccatttgttccttttctccttcctattttcctctattccacaaagcatttctgtaatgcatactatgtgctgagctgtgattgtgattgagaataaaggcaagaattgcttcacgtttctcaaaaattatcaattcagtggtgggtacagatccaccaataattgcaacaagatgtggcayatgtaaagataaagatgtacagagaaattcaagaacacatgtagaagaagacttcatggaagacgtaaagtcaaagctaagactaaatgggttattaggggtcattcagagaaagaagaaacaaccaaggaaggtgggagttctgaggagaagaaacggacagggcagttgcagccacctaggatgcctaataatgtgtgagaggcaagacagaaaggaaattaacacagaagaaaatgctaaactgaaatattcatatttatgtatacctatgaattctttttgcctttgctgattttgttaaccttcttagagcccatgagcttcttttcaggacttcttcagttgagagtcaaattgctgttaatcagct

SEQ ID NO: 318899 - DNA, 563 bp, Homo sapiens
tttactttcccatttgttccttttctccttcctattttcctctattccacaaagcatttctgtaatgcatactatgtgctgagctgtgattgtgattgagaataaaggcaagaattgcttcacgtttctcaaaaattatcaattcagtggtgggtacagatccaccaataattgcaacaagatgtggcacatgtaaagataaagatgtacagagaaattcaagaacacatgtagaagaagacttcatggaagacgtaaagtcaaagctaagactaaatgggttattaggggtcattcagagaaagaagaaacaaccaaggaaggtgggagttctgaggagaagaaayggacagggcagttgcagccacctaggatgcctaataatgtgtgagaggcaagacagaaaggaaattaacacagaagaaaatgctaaactgaaatattcatatttatgtatacctatgaattctttttgcctttgctgattttgttaaccttcttagagcccatgagcttcttttcaggacttcttcagttgagagtcaaattgctgttaatcagct

SEQ ID NO: 318900 - DNA, 563 bp, Homo sapiens
tttactttcccatttgttccttttctccttcctattttcctctattccacaaagcatttctgtaatgcatactatgtgctgagctgtgattgtgattgagaataaaggcaagaattgcttcacgtttctcaaaaattatcaattcagtggtgggtacagatccaccaataattgcaacaagatgtggcacatgtaaagataaagatgtacagagaaattcaagaacacatgtagaagaagacttcatggaagacgtaaagtcaaagctaagactaaatgggttattaggggtcattcagagaaagaagaaacaaccaaggaaggtgggagttctgaggagaagaaacggacagggcagttgcagccacctaggatgcctrataatgtgtgagaggcaagacagaaaggaaattaacacagaagaaaatgctaaactgaaatattcatatttatgtatacctatgaattctttttgcctttgctgattttgttaaccttcttagagcccatgagcttcttttcaggacttcttcagttgagagtcaaattgctgttaatcagct

SEQ ID NO: 318901 - DNA, 545 bp, Homo sapiens
gtcacatgatgtctcacttatcaaatcccggattttaagaatagagtgtctgacaatttcaacctctctccttttagagatgagaaaacaggttcggagaagacatgtgcctccacaagatctcaatcttagtgccatctgtgtgctgcwgtgtggacacacacgtcagagtacttgggttatgtgtgtcgggggtcacctaacatgcaccaggccctttaccagaacaggtttttgttgttgttgttgttgttgttgttttctaattgttaaatcattatgggtacataatgattacatataattataagttatatgtgatgttttgatacaagcattcaatgtgcaatgattaaatggggataattggggtatctgtcactttaagcatttatcatttctttgttaggtacattccaattctacttttccagctattttaaactatgtaacaaatgatagttaactatagccagcctaatgtgctaccaaatactagatattattcattatatctaactggatttttgcacccattaaccata

SEQ ID NO: 318902 - DNA, 545 bp, Homo sapiens
gtcacatgatgtctcacttatcaaatcccggattttaagaatagagtgtctgacaatttcaacctctctccttttagagatgagaaaacaggttcggagaagacatgtgcctccacaagatctcaatcttagtgccatctgtgtgctgcagtgtggacacacacgtcagagtacttgggttatgtgtgtcgggggtcacctaacatgcaccaggccctttaccagaacaggtytttgttgttgttgttgttgttgttgttttctaattgttaaatcattatgggtacataatgattacatataattataagttatatgtgatgttttgatacaagcattcaatgtgcaatgattaaatggggataattggggtatctgtcactttaagcatttatcatttctttgttaggtacattccaattctacttttccagctattttaaactatgtaacaaatgatagttaactatagccagcctaatgtgctaccaaatactagatattattcattatatctaactggatttttgcacccattaaccata

SEQ ID NO: 318903 - DNA, 607 bp, Homo sapiens
  misc_feature (1)...(607): n = A,T,C or G
nnnnnnnnnnnnnnnnnnnnnnnnnnaacaaagtggaaaattaagagggttgaggaggggacttgagaggaacagacagcttggtgctgctcagtgtctgatttgaacttataaaatggagaattaacaaggagaggttggagcctcaaggataactcttggacaagcaaagtcagtaagtcagagaggagacactgtaaagcaaaactcctgaaagacaaggaattgttctgtatgtctataaatattttttttkgggggtggtattattaataataccaatgaaaacttaatttagaaaatatagtttgaaagaaaaggcagcaatgaaagcttgaattttagctctgtgtcattcattagtagcaataacagtagttctcattttataaagttgctctaggaattgcatgaatgactaatatacatttacagtattaccacaataaactgtcacatgcaataacatagttacatttctttttttaaactttcacttaaaggtcagggtacaagtgtagtttgttacgtaggtaaacttgtgtcatgggggtttattgtgcagattattttatcacccatgtattaagtctagtacccagtttcc

SEQ ID NO: 318904 - DNA, 547 bp, Homo sapiens
ccaaaaggaaaaaactctggtcaaaaaatggacaaaggatttgaacagatatttctctaaagaagacayacaaatagccaatgggtatatgaaaagatgcttaacgtcattaactatcagagaaatacttatcaatgccacaaataatatcatgtcacatctgttaggatggctattgttaagaaaataagagttggcaaggatgtgaagaaattgggactcttgtacactgttggtgggggaatgtaacatggtgcagctgctgtggtaaacagtatggatttttatcaaaacactaaaaatagagctacttatgatccagcactctgatttctgaatattcattaaaaaattaaaatcaggatctgaaaaagatttttgcactcccatgtttatcgcagcattattcgctatagccaagatatggaaccaaactaaatatccgtcagtgtatgagtgcataaggaaaatgtggtaaatacatacaatgaaacattattcagccttaaaagagaaggatttctgacgtgtgataatgtgaatgaac

SEQ ID NO: 318905 - DNA, 607 bp, Homo sapiens
  misc_feature (1)...(607): n = A,T,C or G
nnnnnnnnnnnnnnnnnnnnnnnnnnaacaaagtggaaaattaagagggttgaggaggggacttgagaggaacagacagcttggtgctgctcagtgtctgatttgaacttataaaatggagaattaacaaggagaggttggagcctcaaggataactcttggacaagcaaagtcagtaagtcagagaggagacactgtaaagcaaaactcctgaaagacaaggaattgttctgtatgtctataaatattttttttggggggtggtattattaataataccaatgaaaacttaatttagaaaatatagtttgaaagaaaaggcagcaatgaaagcttgaattttagctctgtgtcattcattagtagcaataacagtagttctcattttataaagttgctstaggaattgcatgaatgactaatatacatttacagtattaccacaataaactgtcacatgcaataacatagttacatttctttttttaaactttcacttaaaggtcagggtacaagtgtagtttgttacgtaggtaaacttgtgtcatgggggtttattgtgcagattattttatcacccatgtattaagtctagtacccagtttcc

SEQ ID NO: 318906 - DNA, 547 bp, Homo sapiens
ccaaaaggaaaaaactctggtcaaaaaatggacaaaggatttgaacagatatttctctaaagaagacatacaaatagccaatgggtatatgaaaagatgcttaacgtcattaactatcagagaaatacttatcaatgccacaaataatatcatgtcacatctgttaggatggctattgttaagaaaataagagttggcaaggatgtgaagaaattgggactcttgtacactgttggtgggggaatgtaacatggtgcagctgctgtggtaaacagtatggatttttatcaaaacactaaaaatagagctacttatgatccagcactctgatttctgaatattcattaaaaaattaaaatcaggatctgaaaaagatttttgcactcccatgtttatcrcagcattattcgctatagccaagatatggaaccaaactaaatatccgtcagtgtatgagtgcataaggaaaatgtggtaaatacatacaatgaaacattattcagccttaaaagagaaggatttctgacgtgtgataatgtgaatgaac

SEQ ID NO: 318907 - DNA, 573 bp, Homo sapiens
cttctttttgttttttagcaaataacatatgaaagaataaatggcacgtggctactgagaatccacaaaaaagcaacaattacataaaaacaaagccagcaattgagggaattgaacacaggccrcagagtgactcgttgaattcttctcaccaaattatagcttttggcacctcttgggataaggacacaggcttcacatcctggttgttttaaattcacaaaggctcatctctctgtcaaaacgcaaatggcctcttgaggttttctctgcaagtgttgacaaacttagaaatcattcacagatgatccaccttcttttgtcctctataatttcattaatggaaccatcacacacctggtgatggctcacccactattattcatagttcctgtctccagccttctatttatagattgatcaaaaataagcatagcaggtattgcatttccaatattctttttgtacaacataatccttttaggtgattttagattcacatgcaattgtaagaagtaatacaaagatattcaatgaccccttcactctattttccccaatggtagcatcttt

SEQ ID NO: 318908 - DNA, 490 bp, Homo sapiens
ttcttttcttttcttttcttttcttttttttttttttttttgtgaggcagattgtcgctctgtcacccaggctggagtgcagtggcgcgttcttggctcactgcaacctccacctcccaggttcaagcaattctcctgcctcagcctcctgagtaccaagtagctgggattacaggtgtgtgcgaccacatctggctaatttttttgtatttttagtagagacagggtttcaccgtgttcaccrtgttagccaggatggtatctatctcctgaccttgtgatccaccagactcggcctcccaaagtgctgggatcacaggtgtgagccactgtgccaggcctatgttcatatttttaagaatgtattcttgttttccgaaaatttttattaaaatgtcatctttttgttccatgtccataatacctccaatttacatatggtgattgactgttattttattgattcttttattttttgatgccgcctttt

SEQ ID NO: 318909 - DNA, 635 bp, Homo sapiens
gaaagaaatgcttatacaatgctggtgggattgtaaattagttcaaccattgtggaaagcagtgtggggattcttcaaagaattaaaaacagaattkcccttttgccatttgacccagtaatcccactctagttatatacctaaaggaatataaatcattctaccataaagacacatgcatgcctaggttcattgcagaactattcatgaatcaacctaaattcccatcaacagtagactggataaaaaaacatgtggtgcatattcaccacggaatactatgcagccataagaaataacaaaattatgtcctttgcagaaacatggatggaacttgaggccattatccttcacgaactaacacataaacagaaaactcaataccttaataccacgtgttctcacttacaagtgggagctaaatgatgagaacacttggacagaaagaggcgaacaacagaaacttgggcctacttgtgattggagggtgggagcagggaagggtcttggaaaaaaaatctgttgggtactatgctactatgcttagtacctgaaagatgaaataatctgtacgccaaacccctgagacatgagtttacctgtaaaacaaacctgcgcatatatccctgaaccca

SEQ ID NO: 318910 - DNA, 491 bp, Homo sapiens
ggaatggcttccctctgtcccactggagtttgaaagtgcatgcaaatcttatcccaatgccactccttctcttagagtccccactgctcactaaatcagctccactgctatattggattaagaccttctgtgacctaaaatgcctgagtcccttttgggagtgtgggtcactgcagcggtttctctctctcacatgctatggagrcacacagttttcctctggctcgtggtttaggccgttgcccactggttctttccaaaggcctgtggtttctttcacagcatgaatctttacacactattttgcctttccaagtgggagagacatgctaacaatgtcttcagtccaccatcatggaaaaaaaaagtattttttttttctgtctacagtggaaacactcttgctttcttttactagctgtctcatactcatcctgattattacctggacctaagaataaaatcagatgtctaccaagaatccttttgag

SEQ ID NO: 318911 - DNA, 491 bp, Homo sapiens
ggaatggcttccctctgtcccactggagtttgaaagtgcatgcaaatcttatcccaatgccactccttctcttagagtccccactgctcactaaatcagctccactgctatattggattaagaccttctgtgacctaaaatgcctgagtcccttttgggagtgtgggtcactgcagcggtttctctctctcacatgctatggagacacacagttttcctctggctcgtggtttaggccgttgcccactggttctttccaaaggcctgtggtttctttcacagcatgaatctttacacactattttgcctttccaagtgggagagacatgctaacaatgtcttcagtccaccatcatggaaaaaaaaagtattttttttttctgtctacagtggaaacactcttgctttcttttactagctgtctcatactcatcctgattrttacctggacctaagaataaaatcagatgtctaccaagaatccttttgag

SEQ ID NO: 318912 - DNA, 566 bp, Homo sapiens
aaatcactcccaagtgtgtatgaggcagatcaagtcccactcatttgtagcttctcagggaaccctcttaactgagacctatgaactaatacctctgaattcccaaactacaagtgtgaaacagggacaagataacagcaggattcactctcattcaaaacagagaggaatgasagcatatagcagttactggtccacaacaactctggaattcagtcacacatatatctccagatctcaagaaatggggaatagtccttaagtagggcccagtttggctccctgaggatggtaccttctctctgctttaagtcatgtgtcaagccatctgtcaatctcttttttatcaaagatgttttatgtctgtaattaagatttctcagtctgtttagtgcccttaggtattctgtaaattttggtgagaactccttgctaatttgaaatgaatatttgtcacagtttgggtttcagtttggttaaattcaaattgtattgttcaaaatgtttatatacttaccaattctgcctgtgagtttgtgtgtgtgtgtgtgtgtgtgtgtgtgtgt

SEQ ID NO: 318913 - DNA, 566 bp, Homo sapiens
gtcgaggtcatgtaggaagcgctgcaggcgccctgctgccgccaccgcctcgccgcaggcctgagccgcgctagctagcgcgccccactcggcgcccagctcctccgcgccctggtgcagccgcgccgcctgcgccgggaagcgctcagccagcagggctgcctcctccagaagggccgcctggcgcggctccagcgcctgcagagcggcctctaggccgctaagacgccactgcagggcgccgccggcccggggcgcgctctccacagctctccgcttctcacgcacctgggcgcgcacctcggccacctccagcacgtggttctccaccagcagcaccgcgctcatttcctctttgcgctgttccactagctccacgatgcggttccacctgcccaggggaaagagagtgacttgaggaggacagggactcctcttgggcgcggagggcccgcygacccagggtagaatccaggcccaagccacccagccactgtgtgacctcagaaagtttctccagtttctgccggtgtaaaatggaaccctacgcagcacttttgcttagg

SEQ ID NO: 318914 - DNA, 578 bp, Homo sapiens
ctctctctgcccttcttcagccccgtccctgcgtccctggctttgccccactaattcctccctctctcttacatattttccacgcccttcttcccctacccagcccagtgccctcacagtcctactgccagcgccgcaccccccaacccrgggcctttccccagcccttatctccccatccccaggaaccaagaaaaccagttacgggcccagcaatggatgcaaaagctacatgaccaacttgagctgcagcacttcctccgagactgccacgaggtaggaactccaggtgtgctggggacggagacatcccctttagtcgggagggaagtgcttctcggccgaggtgggggtggggacgccccgtctaagtgggtcgcggagcgatgctcgctctaagccgccagggggcgcgcggagccgggtctcagtgcgcatgctccgcaagtccctgcccgcccacgccgactccgggaaacgaaggaggggccccgggcgcccctggcaaccgcgcgtgtccgcgcctacgggtcccgcggggacgcgcgctgatctcacctttctctcctgagatttgt

SEQ ID NO: 318915 - DNA, 546 bp, Homo sapiens
cgtgggggggccagcggccctgcgccctcctgcagccagcgatggctctgaaccaagccctcgcccctttaaaggtgttcagtaatcaagccccttcccttagggatgatctgcacacattagggacgatctcccctaatccgagatggtccaggcccccttccttattagtgacggttcaggagacctgctgtcttcccctccttcccttgcattccatagaaacgattctagactttggccacattagagatggcctagtaaacattttcctaaaccctaaacagagmtaggcctggccctgagcccctccatctgtgtgacccaggatcatcccctcctccatcatcaccccgtacctaagtttcttccaaccaaagctggttcaggaaccaggtctaacccctaaacccctcagcctcaattaaagacgattcgaccctcccccctatgttgaacacccatgggagattgttctctccgcacacggaataaacaagggcctccataccgtgcccccctcccccataactggggtaggccggg

SEQ ID NO: 318916 - DNA, 608 bp, Homo sapiens
catatttgttgggggcataagaaaatcatatgcattatgattacattaagcaaacttaatgtaatccctattaaaaaatccaattaaaaatttatcctaaaatttatgtggactctcaagggaccctggatagccaaaataagcttgagaaagaaggacaaagctggaggcatcacacttcctgatttcaaaatatattacaagacgagaatcgcttgccaggaagcgcaggttgcagtgagctgagcctagattgtgccactgcactccagcctgggcaacagagcaagactgtctcaaaaaaaattttatgtatgtataaattttatgtatacataaaaatttttatacatacataaaattttttagacagtcatcattatggtaacaataatcaaaacagtgtggtactggcataaaaacagacacatagaccaatggaatagaagagaaagcccagaagtaaacccttgcctatatgattgaatgactttttacatgggtgttgagaccattcaatggagaaaggggtcttttcaacaaataataytgggaaaacatgaatgtccacatgcagaagaagaaagtgggacccttaccttacaccg

SEQ ID NO: 318917 - DNA, 324 bp, Homo sapiens
gagatatattgtgtgtacttcatctggggggaggaggggacratgggaggatggagaagagggcattatgagatgcacacagggagacgcagggagatggccaaaattggtgctacccgtaagaatcgaaaacatggtggattggtgctccttgtaacatctacatttatttgttttgagtcagagtttcgctctgtcacccagggtagagtgcagtggcatgatctcggctcacagcaacctccacctcccaggttcaagcgattctcatccctcagcctcccaagtagctgaggctacaggcgtgcaccaccacgcctagct

SEQ ID NO: 318918 - DNA, 324 bp, Homo sapiens
gagatatattgtgtgtacttcatctggggggaggaggggacgatgggaggatggagaagagggcattatgagatgcacacagggagacgsagggagatggccaaaattggtgctacccgtaagaatcgaaaacatggtggattggtgctccttgtaacatctacatttatttgttttgagtcagagtttcgctctgtcacccagggtagagtgcagtggcatgatctcggctcacagcaacctccacctcccaggttcaagcgattctcatccctcagcctcccaagtagctgaggctacaggcgtgcaccaccacgcctagct

SEQ ID NO: 318919 - DNA, 572 bp, Homo sapiens
atttgtgactatgttgtttcagaaagaccagaatcaaatcctcaaaggggtaacaggcttacctatatcagtttttgtatcctatcaatatgttctccaagggcaaagattaaacagtggcctgcaaaatgtgcaagccagaagctgtcctagtttcaaccctaatctgttattccatttcttaccttcctttcacaaccccttctcgaaagtgacacacacacacacacacacasacagagagagagagagagagagagagacccacaccccacataagttttagcccacaggcgagaagtcaaatagatttcaaaatggcccaagttatattcccatcggtgcctgggctgaataggcttctccaggtgatgtgtgaaaagaaaatgactgttttgatgtgttttctggaaattaaaaggcttgtttggaagcccttaattatcaaagttgatgtcacaggagggcatggaagcagagggcagaagctgaggccttgggtgggaccctgtttctggcctggggacatcagctggccttggagaagggagccagcccaggctcctcattca

SEQ ID NO: 318920 - DNA, 574 bp, Homo sapiens
ctttgctgctagtgctgcccaaagtggagccttatgtctctctctctgctccacttgtgctgcagacagatatgcaaagagttcaccgacctgctggctcaggaccgatctcccctggggaactcacggcccaaccccatcctggagcccggcatccagagctgcttgacccacttcaacctcatctcccacggcttcggcagccccgcggtgtgtgccgcggtcacggccctgcagaactatctcaccgaggccctcaaggccatggacaaaatgtacctcagcaacaaccccaacagccacacggacaacaacgccaaaagcagtgacaaagaggagaagcacagaaagtgaggctctcctcccgccccgcccctcccacgcctcaccagccccccgcgcgcccaccctccggcgggtgacagctccgggatcagcaacccttcctgctgctgctactgctgctgctgctgccgccgccgccgccgccgcygcccttgggtccccccgagtctccgggactgccctctcgactgtcagtggggcagcctctccgactctgcacccgcctcga

SEQ ID NO: 318921 - DNA, 559 bp, Homo sapiens
atgacatactgtcttttccttactagaaacattaattttattattaaaaataaagttttattttatttatgttgatcctttaggttttcatttgtgttttggaaaccaaaatataaaatctccaggaccaaatgttaaggatgacaaggaagatggagaagaacagaagaaacttcccaccagcaggccccccgcctaacagctcccccsccccccataactgctttggaatttgtctcagaggataactgagatttaaattgttagttcattagcacaaaggaaataccgacttcaaccttcacttgcttgctcagggtagtcagcggctaagacgggcaaatgagctcagaccagctctagatttctggcgggagaaaaggaatagtggcagaaatatacatgtagcagggaaagagagggcaaattgtctcccatttattttcatattttatttagagatgaatttactactgtgctgttcttcagtagctctcgaggtagagaggggagtgggaaatgatgttgatccctggaatctttcctgcttgcccctaaa

SEQ ID NO: 318922 - DNA, 561 bp, Homo sapiens
aagccaataaaactcccaaggcgctgcggcccgaggggktggctgcctcgagcggaggcgatcccttgttgggaaaaaatcctggagtgacttcgccggtcttggtttggtggttatgtttaattgcgaaagggataatgatttctaataaaattgcacggggccaaaagggcagctcggatcgtggtagcagggttaagggagaagtgctagaagctgggccccaggcgtggcgcttggaccttgagcagtgccgggctttgcagaaggcatctctggagaaaaggaagcggagaaagaaaggaaggggaatgtggcggaattggggtaagagagggggtgttggggcagggcctcgcggcggagctcgaggaaggttttatcagttcgcaggctggagtgcgctctagaagcaagttcgcggcgtagagaggcctttatacctgtgtcggagcggccggcggcagattgtggtactggcgagcaattggactattgttgatatgctaatgaggcgattaggctgttggtaaagagctggaaaagggaaaagtttctacc

SEQ ID NO: 318923 - DNA, 561 bp, Homo sapiens
aagccaataaaactcccaaggcgctgcggcccgagggggtggctgcctcgagcggaggcgatcccttgttgggaaaaaatcctggagtgacttcgccggtcttggtttggtggttatgtttaattgcgaaagggataatgatttctaataaaattgcacggggccaaaagggcagctcggatcgtggtagcagggttaagggagaagtgctagaagctgggccccaggcgtggcgcttggaccttgagcagtgccgggctttgcagaaggcatctctggagaaaaggaagcggagaaagaaaggaaggggaatgtggcggaattggggtaagagagkgggtgttggggcagggcctcgcggcggagctcgaggaaggttttatcagttcgcaggctggagtgcgctctagaagcaagttcgcggcgtagagaggcctttatacctgtgtcggagcggccggcggcagattgtggtactggcgagcaattggactattgttgatatgctaatgaggcgattaggctgttggtaaagagctggaaaagggaaaagtttctacc

SEQ ID NO: 318924 - DNA, 595 bp, Homo sapiens
acagactgaacgtgtttcttctattctctcacccaacacagaagacttctgtggccgcatgtgtggggttttttttccccacataccaagaagcaaacaattcttctgtggactctagccgagactcttccaattcaattcaattcagacactagctacctagagatagtgtaagaaggcacaggttgaggactcattccccaagaccacccctcactcctgatgccaaytgcaagctccacgttgttttatctgtgcatctgactggctataaatcaggggtcctatggccccctccggtggcccttccttgggtttgattaatatgctagagcagctcacagaactcagggaaacaccgatttattataaaggatattacaaaggataaagattaatagatgcatagggtaaagtatgggggaaggcagaagcagtttccacgtccttcccaagcaccacaccctccaggaacctccacgtggtcagctacccagaaggtcttcaaacatggttcttttgggctttgatggaggctttattatgtaggcatgattgattaaactcttggtcattggtgattaactttacttca

SEQ ID NO: 318925 - DNA, 595 bp, Homo sapiens
acagactgaacgtgtttcttctattctctcacccaacacagaagacttctgtggccgcatgtgtggggttttttttccccacataccaagaagcaaacaattcttctgtggactctagccgagactcttccaattcaattcaattcagacactagctacctagagatagtgtaagaaggcacaggttgaggactcattccccaagaccacccctcactcctgatgccaactgcaagctccacgttgttttatctgtgcatctgactggctataaatcaggggtcctatggccccctccggtggcccttccttgggtttgattaatatgctagagcagctcacagaactcagggaaacaccgatttattataaaggatattacaaaggataaagattaatagatgcatagggtaaagtatgggggaaggcagaagcagtttccacgtccttcccaagcaccacaccctccaggaacctccacgtggtcagctacccagaaggtctycaaacatggttcttttgggctttgatggaggctttattatgtaggcatgattgattaaactcttggtcattggtgattaactttacttca

SEQ ID NO: 318926 - DNA, 556 bp, Homo sapiens
aaatcgccctgaagagcctctcaaaagtgccgaagtctttgtggatggtcactgtgtaagctaaagggaacccagcctcttcttcagagagtgtttctgttacatagtggcttcgaaccatgtactcatagcaggtagcttcatcaagggtagttttcaatgcattttctgttgggtaaaaaactttcccctcaaaaatctgatgacaggcttctgctaacagtgaagcattggacagagctgccctcagaaaacgtttattctcccataactcagtattgtaaacaaatacaaaaatcagggcagagataagagacgcgctaaaaagacagtgcttccaagagcccatcattcacaaccaggaaatgagtaaaatatctctctcttgagataggatcagagtgtagatrtatttaacttacattttctccaggttccgaaatcatcctcgtgatggctgaagctctcgtctggctgttccccgtcccttcagttcacggttctggtcctttttctttcttcttcccctcttcacttaccactaggttgcattttc

SEQ ID NO: 318927 - DNA, 556 bp, Homo sapiens
aaatcgccctgaagagcctctcaaaagtgccgaagtctttgtggatggtcactgtgtaagctaaagggaacccagcctcttcttcagagagtgtttctgttacatagtggcttcgaaccatgtactcatagcaggtagcttcatcaagggtagttttcaatgcattttctgttgggtaaaaaactttcccctcaaaaatctgatgacaggcttctgctaacagtgaagcattggacagagctgccctcagaaaacgtttattctcccataactcagtattgtaaacaaatacaaaaatcagggcagagataagagacgcgctaaaaagacagtgcttccaagagcccatcattcacaaccaggaaatgagtaaaatatctctctcttgagataggatcagagtgtagatgtatttaacttacattttctccaggttccgaaatcatcctcgtgatggctgaagctctcgtctggctgttcccygtcccttcagttcacggttctggtcctttttctttcttcttcccctcttcacttaccactaggttgcattttc

SEQ ID NO: 318928 - DNA, 546 bp, Homo sapiens
aaaaaaaaaaaaaaaaaaaaaaaaatcctacggtaaatatcagattaaattaaaacaacttaaaaactttccttgcaagatcagaaataacacattgctgtccactgttactacttctgttctcctatgtaatattgtagtgaagcctcagctagtttaataaagcaaataaataaatgataaataaatatcaaatagaaatatataaatagtattacttgaaagttacataaatataaaataggatattaaaaatctacagataggctattaraatttctaaatttagcagacttactggatgcaagtaaatatttttaaaaactgtgtttctaaacactgtaccaacaacagtttaagaaaaaaatatgactattacttccaataacatcaaaaacatcccattcctaggaataagttgaatggaagagctacaaaatctctatgccaaaaataataaaaataagggagtaaaattaaagaaccaaatcaatgtaaagactatgttcattattgaaagactcagtatcccaaaggacagaattt

SEQ ID NO: 318929 - DNA, 589 bp, Homo sapiens
ttattaattggcctaatttcaatactgtgtgtctcagggaatagcgagayccaaggagagagcgagagagagatgcagaaatggccagtctgaggggcagtcagaacacacacttactgattgttgtcctatgtgggtgcagtttgtggtgccccaacgcaattacattagtaatatcaaagactactgatcacatatcaccatcatggatataataataatgaaaaagtttgaaatattgtgagaattaccaaaatgtagacacagagatatgaagcgaggacatactgttggaaaaatggtgctgatagacttgctagatgcagggttgctgcagaccttcaatttgtaagaactgtaatatctgcaaagcacaataaggtaaagcacaatgagataaggcatgcctgcaccacattcacagattcatcaataaaccagaaggccgatttactagtttataatgaggatgaatttctatgtctgaaatttttgtgaccattatcacagtattcacctctgataccaattttcttgataaaccaaattggtaatcaaaaggtttctcatagagcatggaactaatgag

SEQ ID NO: 318930 - DNA, 589 bp, Homo sapiens
ttattaattggcctaatttcaatactgtgtgtctcagggaatagcgagatccaaggagagagcgagagagagatgcagaaatggccagtctgaggggcagtcagaacacacacttactgattgttgtcctatgtgggtgcagtttgtggtgccccaacgcaattacattagtaatatcaaagactactgatcacatatcaccatcatggatataataataatgaaaaagtttgaaatattgtgagaattaccaaaatgtagacacagagatatgaagcgaggacatactgttggaaaaatggtgctgatagacttgctagatgcagggttgctgcagaccttcaatttgtaagaactgtaatatctgcaaagcacaataaggtaaagcacaatgagataaggcatgcctgcaccacattcacakattcatcaataaaccagaaggccgatttactagtttataatgaggatgaatttctatgtctgaaatttttgtgaccattatcacagtattcacctctgataccaattttcttgataaaccaaattggtaatcaaaaggtttctcatagagcatggaactaatgag

SEQ ID NO: 318931 - DNA, 636 bp, Homo sapiens
tgaatcttgaacaagggacacaaggaaatgaggctagttgaagggcactcatcgcaagtgacagaaatagtatgctgatcaaactgcctgctatgagaacatactgtggttcttgtggtctgatcctccacagttcccttggtttcctcattttcagcctcccagtaattactagttgtcttccccaaaatctcatctccttttcttttggaatagaaccccaccctctcttcttttggaatagaaccccaccctcttttcttttaacaaggcttttttctaaactgatctttatggtggaataagactattttccaatctctcttgtaatattggtgtggccacatgtccaaatagtaagcgataagatgtaatcagatatatagactgcaaattccaggaatgcttaattccttcccactggatttcaagcataatagctggagcctgaaaggataatttagaccatgaggtggttgttctcttcaaatacgtatatattattttatatcttgtataaattatttctgttatacrtaaattagtttatgacattttaattttatatgtaaatatatgtaactactatcaatagagtatccacataatttattgttcagtaacaatggacaattt

SEQ ID NO: 318932 - DNA, 622 bp, Homo sapiens
tggtctgggcaaagattttttcagtaataccctacgagcagaggcaaccaaagaaaaaatcgacaaatgggattattacgttaaaaagcttctgcacagcaaaggaaacaatcaacgaagtgaagaggcaacccacagaatggaataaaactactcatatgacaagggattaataaccagaatatataagcagctctaacaactcaataggaaaaaaatctaataatcctatttttttaaatgggcaaaagatgtgaatggacatttctcaaaagacatacaaaatggcaaaccagtatatgaaaaggtgatcaacatcaytgatcatccagagaaatgcaaatcaaaactacaatgacatatcatatcaccatagcactccacagatacagacatatagatttagatagatacaattattttctgtatctccctactagaaagtaaactccatgaaggtaatgattctgttttgggctacgttgtgtatatattctcagctcctagaacaatgtttagcacacagtcagcactcagcaaatatttgttatatgaatgcttacacaaaatgtctttgcttattatgcttccccaatcttagataccctctctacactgccac

SEQ ID NO: 318933 - DNA, 570 bp, Homo sapiens
gctctgccaattttaacctttaatcacagtctttctgatatttttatataattgttgaatgtgtccataacttataatctcccacctaacaaatatccagagggtaggaacaaccaattgtatctacagcaatactatgctcacaatgggaattcartaaatgcttgctaaaaacaggaatgcagataaccatgcaaaataaatgctgtaaacttcataaatactagcttagttacaaaggtacatcttcctgaaatctctttaagctatactttacagggttgtggaagtatatatgcaaaatattagcaaattcaaaatagtactattttttgaacttcgtattgaagtataacttacaaacagaaaagtacaaaaaccatgcatacagctcaatgaattttcaaagaaacatacccatgtaccagcaaccaggttaagaaaaagaacattacatcccagaagttccccatgccgtaagggtagctactattctgactattagcactataaattaatttagcctaaataaacctttctaaaattattgttacaaccttttatatttga

SEQ ID NO: 318934 - DNA, 540 bp, Homo sapiens
gatgtcctcactcgcaggtttggcagctgatgctagttgtcttccagggtgctttgtttctcccctctatggcctattctgtatagttggctggactgggcttcttcacagcatggtctctgggttccaacagggtgagaggggaagccacaaagcctcttaagttccaggctctggagcctgaacaatgtcacttttacccccattttattagtcaaagcaaatcacaaaaccagtccagagtcaatgagtagaaaagtagattacacctcttaatggggaaacagcgatgccaattgcaaagtgggcatggacacagagaggcatgacacactgcagtcattgttataatgacctaccacatttacttttttaaaccaacaatcccatggaaggacttgctgcatgctatttttgaatagctttcctaagagtaccttctactctggcattcttcctgtgtttatgacccctttccttttcagwctcctctatgaactctttttaaccctttaatgttggtgcacctcaggacaatta

SEQ ID NO: 318935 - DNA, 615 bp, Homo sapiens
gcttctcctttcactctacctcaaatccatattgaactcatcccaagcctactgttatattccaagtgttagtgaattagaccattggttgctggagtcagtcctcttcctctatccttctccaagctctatcaatcttaccttctaaatgtttgtcaaatacacccctttccattcttgtgaatcttaatttaggccgtcataatctcttgtccagacgataactttcaattggtccccttgtctccaatatttccattctcaaattatagtgacttactaaaagacatgtgactrtacctccttcctgcttaaaaccctaaatgactcctcagtgcctacattttccattgtgagtttcaaagaacacttgttccatgggatgctaatagaaactgcatgaaaaaagaagtttccatgctcaaattagtttgggaaatggtggcttaaataaagttaaatgggtttcttttagaacttcttgtagaactcttcagaatttttaatatgctgatatacattgagattctccaagagagactatagaatgcaacattttcttaccctttcccctgccctgcatagtttttcagggattggggttgaaggagtatc

SEQ ID NO: 318936 - DNA, 615 bp, Homo sapiens
gcttctcctttcactctacctcaaatccatattgaactcatcccaagcctactgttatattccaagtgttagtgaattagaccattggttgctggagtcagtcctcttcctctatccttctccaagctctatcaatcttaccttctaaatgtttgtcaaatacacccctttccattcttgtgaatcttaatttaggccgtcataatctcttgtccagacgataactttcaattggtccccttgtctccaatatttccattctcaaattatagtgacttactaaaagacatgtgactgtacctccttcctgcttaaaaccctaaatgactcctcagtgcctacattttccattgtgagtttcaaagaacacttgttccatgggatgctaatagaaactgcatgaaaaaagaagtttccatgctcaaattagtttgggaaatggtggcttaaataaagttaaatgggtttcttttagaacttcttgtagaactcttcagaatttttaatatgctgatatacattgagattctccaagagagactatagaatgcaacattttcttaccctttcccctgcccygcatagtttttcagggattggggttgaaggagtatc

SEQ ID NO: 318937 - DNA, 602 bp, Homo sapiens
ggcatgagactgagcttatttggtgggtccatattaaatttatacttagtacaccttccccttttatattaacycaaagtatagcacttgctttttattataacacatatgtacatttttctctgttagattcatgagtatttatgatgtttcaacttatatgagaactagaagttggcttataaagtttaaaaatgttttaactttcttggaatattgtatagaaaagatacattttattccacctgagtaagtattgtgaacctttaatagaaacatacttgaaaatactaccatttctacattgtcataatagcttatctcaattttccttatttgagaaaaactatattatggtttattttcactgattgggtggtgcttgcttctcttcttccattctattttagcaacttcattgacatctctatgagagagtagtcaggaagggaaaaaggatgttcatatttggatccttcaagttttaattgctgtgtctgagggttgtagtgtgttgcgggctgcttaatattcttctggatataacatagagcaggggtgagaaatagctaactggtagactagatctagctctgtttaat

SEQ ID NO: 318938 - DNA, 602 bp, Homo sapiens
ggcatgagactgagcttatttggtgggtccatattaaatttatacttagtacaccttccccttttatattaacccaaagtatagcacttgctttttattataacacatatgtayatttttctctgttagattcatgagtatttatgatgtttcaacttatatgagaactagaagttggcttataaagtttaaaaatgttttaactttcttggaatattgtatagaaaagatacattttattccacctgagtaagtattgtgaacctttaatagaaacatacttgaaaatactaccatttctacattgtcataatagcttatctcaattttccttatttgagaaaaactatattatggtttattttcactgattgggtggtgcttgcttctcttcttccattctattttagcaacttcattgacatctctatgagagagtagtcaggaagggaaaaaggatgttcatatttggatccttcaagttttaattgctgtgtctgagggttgtagtgtgttgcgggctgcttaatattcttctggatataacatagagcaggggtgagaaatagctaactggtagactagatctagctctgtttaat

SEQ ID NO: 318939 - DNA, 601 bp, Homo sapiens
agatttttaaatttctagttgtgttcwttcttctgttcaacccatctattaaactttttaattttttttgacaattactttttgatctccaaaaactgtggttgcttccttttcataacaactgtttgctttaaaagaattaacataatattatctagaatcttcttttcatcttaaaagatattttgcttcctgtgttaattctgcttccttggggttcactctcctattcattgtgtttggtttctatatttcattctgtttttgcccccagtgtttggtgattttggttatattttcatacgtgtcaatgaggggctaaggtgaacagtatcaacagctgaaaggtgttttctcagcccaagttacactcttgatttttaactggagatggatttaaatcctgattactacaatgattatgtgtggatacataaaaccatggatggcctagaggttatgtcttctggttacggtgcctattttttgtggtgacggttacgttacctcagtcaagagaggctctttacttattgaaataagaagaggaaaagaggctgtgaagatatctacctttattggattgaacattaatgtgtaa

SEQ ID NO: 318940 - DNA, 601 bp, Homo sapiens
agatttttaaatttctagttgtgttctttcttctgttcaacccatctattaaactttttaattttttttgacaattactttttgatctccaaaaactgtggttgcttccttttcataacaactgtttgctttaaaagaattaacatartattatctagaatcttcttttcatcttaaaagatattttgcttcctgtgttaattctgcttccttggggttcactctcctattcattgtgtttggtttctatatttcattctgtttttgcccccagtgtttggtgattttggttatattttcatacgtgtcaatgaggggctaaggtgaacagtatcaacagctgaaaggtgttttctcagcccaagttacactcttgatttttaactggagatggatttaaatcctgattactacaatgattatgtgtggatacataaaaccatggatggcctagaggttatgtcttctggttacggtgcctattttttgtggtgacggttacgttacctcagtcaagagaggctctttacttattgaaataagaagaggaaaagaggctgtgaagatatctacctttattggattgaacattaatgtgtaa

SEQ ID NO: 318941 - DNA, 601 bp, Homo sapiens
agatttttaaatttctagttgtgttctttcttctgttcaacccatctattaaactttttaattttttttgacaattactttttgatctccaaaaactgtggttgcttccttttcataacaactgtttgctttaaaagaattaacataatattatctagaatcttcttttcatcttaaaagatattttgcttcctgtgttaattctgcttccttggggttcactctcctattcattgtgtttggtttctatatttcattctgtttttgcccccartgtttggtgattttggttatattttcatacgtgtcaatgaggggctaaggtgaacagtatcaacagctgaaaggtgttttctcagcccaagttacactcttgatttttaactggagatggatttaaatcctgattactacaatgattatgtgtggatacataaaaccatggatggcctagaggttatgtcttctggttacggtgcctattttttgtggtgacggttacgttacctcagtcaagagaggctctttacttattgaaataagaagaggaaaagaggctgtgaagatatctacctttattggattgaacattaatgtgtaa

SEQ ID NO: 318942 - DNA, 590 bp, Homo sapiens
aaaaattaaaaattaaaaagaaagagagaaggaacaagaaacgtgttatggggcttcatagctagctgcggggttctgtgcaaagcctgctctgtgctagatttacaaattcaaaggagtcataggttgggtttcctggaagcagattctgagagggagggttgggacagttgttggcagaaggtttattgggcaagtgtggaaggcagarttgggcaaggggacaagctgacctacagcacagtttcatccaaggctcccctgagctttgggaaactgtggagctggaagagcccttcagagtcatcccacactgagacaagggaacaggcctttgtatctctgcataatgcagtcattggccaagggctatcccttgagaggcaacaactttgagtagggcaggtccctgtggcccagagcaatgtgcagtgagaggcagagccatgcaggcccacttaaatcctcaaatccctaccagttgggggatgggctatcggccctgaagaggatgtctaaatggaacaccacaatatccactataaaaggagtggtgttcctgcaatatattaaagtgttttatttttcgt

SEQ ID NO: 318943 - DNA, 607 bp, Homo sapiens
aacgttctctcataattattttttatctcccctgtatctgtagttatattggttatgtctgccttctcattcctaatcttgtctaatttcagtctctttcttcattctctgtaaytggactcacgagagtttttttttttctattttatcagccatttcaaagaaccagcttttgcatttacttattccttacactattttttaattttctgtttcatcaatttcagttcttatctttgtgaattccctctttgtttcttttattgttccttttcctttcttgagacaagcagtaaaataatgttatgtttagtctttttccccttctgataaagacatttaaggctggatgtttctaaacagtcttaacttccctccctatcttttaataggaaacactctctttttctttgttttccaaatagtatttaatttcttctttgattttctctctcatccaaggattatgtagggatattttaaatttttaagtaaagcatttttcttggtttgctcccttttaattatttatttctactcatatgggatatggccagaagcacatggcctgtgcaaaactttgttcttgtgtacttgaatttggtaa

SEQ ID NO: 318944 - DNA, 581 bp, Homo sapiens
ctgattggtcgggtgtgagctaagttgcaagccccgtgtttaaaggtggatgcagtcaccttcccagctgggcttagggattcttagttggcctaggaaatccagctagtcctgtctctcagtgccccctctcaacaggaaaacccaagtgctgttggggaggttggctgacaactgctctaactgcttcctgttgaattggggcatagtaggggtcatgcagttgagatttcctcgggaggggtgccttcgatgtcatcaacattggagcatgggctagcaggccagtccaggggtccatggtagatcttagtcatggactacatctggggctccatttgaagaaccatttgtagttttacatcttcagttctggaacagacaaacttaacaaggaggttacagatacaggaattgaaatgtatgacctgcagtgcagggggttctttctttggcacacttcataggycctgactatctgcttgatagttttgaaaaggcctggtcctgtaaataatgatttggccatctgatgggtgctatcaatgcctaagtgaaaagtttggtgaagggttttaagt

SEQ ID NO: 318945 - DNA, 634 bp, Homo sapiens
aaaatgaacaagatagtcgttcagggatgtgagagctcgcaagaggagtggaccagcaccatgaggctgtcctcctgaaactctgagatgttatccactctgtaaagcttgtcactctctgaaattcgtagcaaagcaaataatcaaaaataactttttgaaaagataacaacatattcatttcacatataatacttagtgataagttagaattagaaaaaatgtattcatctatactttattttggatcttctacccagattctagagcaagtgctgtcacagtgcagggatcctgggcttgaagtcagggagacttaagcttggtgccccactttccacgcactagccatatgaccacaggcagtgacagactctctaagtttgttttcttatctgaaaattgaaaaatataatgcctaccaaactattgttgtggaattgaatgagataaaggatgcaagctgtctagcacataataaatgctcaataagtgatatgttaattactattgataytgacacattttaacaatttttattctgtatgatgttgatgatgcctcactaatttacctacagctatatcttaggtttattttgctcttcctggcctagaatatatatgaaataaaa

SEQ ID NO: 318946 - DNA, 603 bp, Homo sapiens
ctttttggtaactggcctaaatgataaagattttacattttatcaaaataatttctatattatatttgaaagtttttttattgcttaagaaaattgagatttaaaaggattaaagtttttacatccatgaaactttctgtcttgtttttaaaatattttgattatcactcttggctaaaagaataactattattctgttttgacaaaatgttttgagccttttaacatctgtgataaatgtcctcaaaataaaaattctaaactaattatttgacctagacttattacttgggacttaccaaagctacaaaaattaatcaccacaacattgtagaatctttttacacsttccagtcaggtcatggactccagtatcattacctccagccccttgaaagggtccctaccaggtgctattgactaatccttgtcctgttaagtaacagggttttgattcctgggcataactatctcatctaaaaaggtaccaactattgctaaatcttaaatgttgacaccagtgtctgacaccagactcattaaccaaagctttttctccagacctgggaaaagtatactgcttttatgagatgcagagagtgg

SEQ ID NO: 318947 - DNA, 591 bp, Homo sapiens
tgtttcttccaaggtgaggttacaaaagtctctgggttccatcttgtgctctgtggttctcttccttgcccattgaaatggaggcagctgtgtgttgtgagctgccctgtgggggctcctgtgtggccaggagctgagaagggtctctgtgaacagccgggaggacaggccccacggtgatggtgtatgtgtggctgaatcctgccaacagccatgtaggtgaacccgaaagcagttccttcctcagtctttagatgaggccacagtcctagcagatgatttgattgcaaatttgcacaaaatcttgaggcagaagsacccagctacatgtcatggccagattcctaaagcacagagatgtttgttgttttaattcactaagtttaggataatttgttatacagtatttgataaagataaaaacaaaaacaaaaacaaaaacatttctccatcctgaacttttaagaaacatccagttaagtacctaagggtaaagtggcctgatggctccaactgactctcaaatagtcagaaaaaataatatgcacatgtacgaaaagacacgaagagagatggactgaggaggcaaac

SEQ ID NO: 318948 - DNA, 588 bp, Homo sapiens
cttcttgttctcttagcgcagtcagtgacatcaaatatttgtggaattaaaaacatatgtagttgacattcaagggggtgcaaaacttaagaaatgcatgtattgattataatttaatccttaaaatatcactgagtcctgtagtctcaggtctcacaagttgcaattggtgctgtttggtaaacagttttgcactgacctcatgtgagtatttaattgaccatctaggtgacaaatgtgttatttgtatgcattttctgccactgcagctataaaagccctaattttgaccactaaaggcccttgtgtggggaacactcatcaggaaagatctagctctttctcttcttattagcagcacatttctatatacaaatgggggcaggggatttctatgtagttcatgggccataagcaggtggattttccagaaataatccatagattctgaatttcggagcgtcctaacatggttaggtcttccatttagttattaggagcckttggtgtaaaagttttcctccctgagaaaaagatggggttatctgtcttctgaaatgtcaaggatgtcatgggtttgtttacaga

SEQ ID NO: 318949 - DNA, 607 bp, Homo sapiens
  misc_feature (1)...(607): n = A,T,C or G
tcttctccataattttgtatttccaactatcattgagtttaaagaaagtggatgcaataaaagagcaaataaagacaatcaaatgtctgctttccaaaataatcagcaatataaaygcactgacataaaattaatactctcagcaatttgcacatagtaaatcacttaagagagactaatagaaatagattgtcatttagtttgaatcttctagtgccctgatcaatgttaagtgtattaattcactgaaataatgaactaatactttttaagtaatcataacaaaaacaagaatgttgaaagcagagatgatccatcaatagctaagactgaaagatgcctgctatgcaccaatcatcatgctgaacagtttgaatcccaagccttatttcatttgcaccacaaccctgtttcttacaccagtgaggaatatagggggagagacagttagaaactggctcaggttcacataagggaggaacagcatcttgtccaaaacacaaactaaaccactagtggatgtgcaaaggccaacaagaggatccaacaggagacttgtctatttttaggagcagagaatatggnagaaaaagaaaataattatctc

SEQ ID NO: 318950 - DNA, 417 bp, Homo sapiens
tctctttactaatctctctctctttaccacaaaaacttccccctcccccaaattaatccctaatccagatacacgtattcagtcactaatttagacaattattcagtacctctgatgttccaagaaccagggaactctccaccctgtagaatctgggagtctaaaggttgagattgtcgaacataarttaaccccacgccggccttctggctaagcttagggtcacttacacttatgcccctggaagaatgagtctgacattcactctccagtgaaaccacagcacgatgcaataagctatccaggagcagcctcagacagcagtggctgttaagcagcatcctttgcacaactagaccttgttagttaagagaactgaccttaagaacaggccattaatgaacacacaattaagac

SEQ ID NO: 318951 - DNA, 530 bp, Homo sapiens
cctactatcaccacttctattcagcagcatactggaagtcctagccagaacaattaggcaaaaaaaaaaaaaaaagaaagaaakaagcaaccaggccaggcgtggtggctcacacctgtaatcccagcactttgggaggctgaggcaggcaaatcacctgaggtcaggagtttgagaccagcctgaccaacatggaggaaccccatctctactaaaaatacaaaattagctgggtgtggtggtgcatgcctgtaatcccagctacttgggaggctgaggcaggagaatcacttgaacccgggaggcagaggttgcagtgagccaagatcacaccattgcactctagcccacaagagtgaaactccacctaaaaaaaaaaaacaaaacaaaaaacaaaaagaggcaaccaaagagaaaaagaagtaaaagtgtctgcttggagatgacaagaacttatatatacaagcatacctcagagatattgcaggtttgtcttcagtcccctacagtaaggacatgtcataataaag

SEQ ID NO: 318952 - DNA, 563 bp, Homo sapiens
gtaagtgtagtaagaatctgtcttcttttgtaacaggacacaattggaaaaactggttattttaccaaggctttgactggaattgtattctttccttttaggaatcaaacttaactcataaagccaataaagcccttgggaaactggcctcctattccatgtacacagtccctgtacagggtttctgatctgtggtaagtaaagaatgtcactttctgacaggccaggaaccccaagttatcttggaacctcaaaaggagaggaattcacccaactcrtaggtatttgatggtacaaatccatggctgggcttggctttaaaaaagccttatctcagattccttctacagaacaaagttccataaaagccagtttaaaaggctgatgtgaaaataattattcttgctgcactttatacagataatctgaccaattataataaagcaaattagtcctaccatgatttgtcttttaataaaaatgggaaactggagagataaaaattatgtttcagaaactatagtacacttcttgctaaattctagtcttgcctgatgttttcc

SEQ ID NO: 318953 - DNA, 530 bp, Homo sapiens
cctactatcaccacttctattcagcagcatactggaagtcctagccagaacaattaggcaaaaaaaaaaaaaaaagaaagaaagaagcaaccaggccaggcgtggtggctcacacctgtaatcccagcactttgggaggctgaggcaggcaaatcacctgaggtcaggagtttgagaccagcctgaccaacatggaggaaccccatctctactaaaaatacaaaattagctgggtgtggtggtgcatgcctgtaatcccagctacttgggaggctgaggcaggagaatcacttgaacccgggaggcagaggttgcagtgagccaagatcacaccattgcactctagcccacaagagtgaaactccacctaaaaaaaaaaaacaaaacaaaaaacaaaaagasgcaaccaaagagaaaaagaagtaaaagtgtctgcttggagatgacaagaacttatatatacaagcatacctcagagatattgcaggtttgtcttcagtcccctacagtaaggacatgtcataataaag

SEQ ID NO: 318954 - DNA, 530 bp, Homo sapiens
cctactatcaccacttctattcagcagcatactggaagtcctagccagaacaattaggcaaaaaaaaaaaaaaaagaaagaaagaagcaaccaggccaggcgtggtggctcacacctgtaatcccagcactttgggaggctgaggcaggcaaatcacctgaggtcaggagtttgagaccagcctgaccaacatggaggaaccccatctctactaaaaatacaaaattagctgggtgtggtggtgcatgcctgtaatcccagctacttgggaggctgaggcaggagaatcacttgaacccgggaggcagaggttgcagtgagccaagatcacaccattgcactctagcccacaagagtgaaactccacctaaaaaaaaaaaacaaaacaaaaaacaaaaagaggcaaccaaagagaaaaagaagtaaaagtgtctgcttggagatgacaagaacttatatatacaagcatacctcagagataytgcaggtttgtcttcagtcccctacagtaaggacatgtcataataaag

SEQ ID NO: 318955 - DNA, 450 bp, Homo sapiens
gccgcaccagtgtccaggagatagttaacctcctrgccctccatggtcaagcatacctggggctctgtgagggtgattggcatgggctggtgcttgccccaggcaccctcagtcctgctctgctggatcaatctggttagtggcttctgactaagaggaccttcgtctcctggggcagtgggccttccagtgattcccctgacataaggggcatggacaagggggcaacttatttatacttggacaatcttttttaaagtgtccttgtagatcgcactgaaagcgagccctattaggcattctatttgcccggcttttcccatttccagagccttcaaagtccactcacctgagggccatgactaaggtggcctttttgttaatcccgtttttccttttgcacctgttcctcctgatctctattataaaaaactgaggttcctaagttca

SEQ ID NO: 318956 - DNA, 507 bp, Homo sapiens
agattgaatgcatttgggccatccacgggttactgggttaaggatttttaataggaaggctacgggttgtcagtggtctcagtgttttcaggctacgcccttgtttacactgacaacaaggtagtattggagtgttatagagtcatggagargaccttcaattatcaattataggttttaaatttaccctagcttttaaaggaatagggcacacttttttttttttactatttctatctttctccttctctctttgactccctgcttgtctctctgcctctttctcctctctgtctctctctctcctctctgtctctctcctctccatctctctcctttgtctctctcctctgtctctctgtctctgtctctctctgtttctctctctttctctctctctctctctctccccatctctctctgccgtttacaaacttgggaccctggcaagagtggtggggaatgggtcccacataactgcccatgttgagagctgtatacctaaat

SEQ ID NO: 318957 - DNA, 595 bp, Homo sapiens
tttctttacctcctgtttttgcctaattagcattttagtgagctctctttactacctgattggtcgggtgtgagctaagttgcaagccccgtgtttaaaggtggatgtggtcaccttcccagctaggcttagggattcttagtyggcctaggaaatccagctagtcctgtctctcaacaggacactgggttcctagccttgtagttgtggcttctacggcatggaagggtcgtgacatgattcaccaattcaccaccccatctgagtttcaacacttggccagatcacggcactgagcttctaaccttgcagttgtagcttctatggcatggcagggttctggtgtaattcaccaattcaccaccccatctgagcttaagcacttggccatagccatgaggctttgcaggagaccagcctgtggaaatcagtcttggacaaggcagctcttgcagctcaaacctaaacacttcctaggaaatgctcaacagcgtccatcaacatggaagttgatgtccagaagaaaaaagaaaacttaaaaattaaagcagatgataagtaaagcagataagtattttccaattagatacagact

SEQ ID NO: 318958 - DNA, 552 bp, Homo sapiens
accttgcagttgtagcttctatggcatggcagggttctggtgtaattcaccaattcaccaccccatctgagcttaagcacttggccatagccatgaggctttgcaggagaccagcctgtggaaatcagtcttggacaaggcagctcttgcagctcaaacctaaacacttcctaggaaatgctcaacagcgtccatcaacatggaagttgatgtccagaagaaaaaagaaaacttaaaaattaaagcagatgataagtaaagcagataagtattttccaattagatacagactttgtgatcactgtagaaaatgggaaatgcaatggaatgacgagtgagtctggggaaaggagtgatgttactcatgttgtcatatgtagaataagtgaggacacttctttgaggaagttcaattgaggtaagagatgaatgatacaatgaaggcagtcatataaagagctggggaagtgttcaggcagagtgggtgttttggaggggatacaccatgrctatgtgtggggaccctgtggggaaacagttgcatcggggccg

SEQ ID NO: 318959 - DNA, 593 bp, Homo sapiens
aagataacataaggaaaaaatctagttaactttggatttggtgactttttaaagatacaacaccaaaagcatgatccacgaagacaaaaattggtaagctgaatttcattaacatgaaaaacttttgttttgcaaaagataccattaagagaataaaaagacaaatcccaaactgtgagaaaatatttgcaaaatatatctaaggattcgtatctgaaatatgcaaagaactgttaaaactcaacaagaggaaaacaaacaacccaattaaaaatgggcaaaagctgaacagatatgcagatggaaactaastatatgaaaagatgctctgtatgttattaggaactgccaattaagacaacaataagacaccactacacacctattagaatggccaaaatccacaagtctgaaaacaccaaatgctggtgaggatgtgaagcaacaagaactctcattcattgctgtgggaatgcaaaatggcacagccactttggaagacagtttggcagttttttacaaagctcacatagtcttattataagatttagcaattgtgctcttcattatttacccagtggagttgaagagtt

SEQ ID NO: 318960 - DNA, 560 bp, Homo sapiens
cctgcttttgctttccacagttcgtttgtgtgttttgtccaattcttgcttcaagatgccaagcacctggacaccttctaccagtaacaatttttttattcttcagacctttcaggtagttgcttttatatattcagaatttagagtttccaattgaatattcaaagctttcttttccataccagaggtggaactctgtaaataacttttcttttaaaataaaattttgcatataattgcaaaaaacccaaataactttaatcaagcacaaagaaaaactcacttaaaattccaccaccctagatatccctgttagttttggtgaacagttttctagacatctctgtttgcatatatctatatgttactttaccctaatgagatgttactctgggtgtagttgaatatgcctggatatgcttgctttactcaataatatgtcagtaaattttcatatactgaagagtgcatgtctattaatgttttgaaattgttttaaatggttttaytttatcttatttatgtacaaaaaaaattgaaggggcaaaagccataaaaat

SEQ ID NO: 318961 - DNA, 555 bp, Homo sapiens
ttaacacagctattaaatacttaagacttgcataagttattagtcccctcataacactaattaattcttgttcagcctatgaataaaaccaatagatcggggcatatgacaatgaactctaaaaagtaactaaatgattatacaaattacaagttgaaggtagtatcttttcaagaatggatcaactcagcctctggcacttggtatgccgctgcttggcactactggtttggtggatgtgatccctcagtccctctcagtaagagaaataaagcagattactcttacacagatgaagaataatatacatttattgctttatctcagagctatgttaaatctcctgctttctgtcactaaacagtctttgggacttycatcattttaatattctgaaacacatcctgttggctcactatgttggctgtggtttgagtgtttgtgccctctgaaactcatattgaaacataatctccaatgtaacagtattgggaggtggggcttttaagagatgattgggtcatcagggctctggcctcatgaatgtattagtcc

SEQ ID NO: 318962 - DNA, 588 bp, Homo sapiens
gactagttttatgatacagaagactgaagaatgggcatataaacacacagcccacttgtctgtctatatctcatcatttagaaccagaataattgaatggttactagaggccccagtgaagacaaaaacttgggtataataccttatgggttgggttgctgttctcttggatgtgrtacatgcactcagtcgatggctgttatatggtgctgtctggagtagctaaaatacattggtcccagaaccaaggggcaaaagtagaattggctcatctcactatcattcccagtgacccacttgtgaaatctgtgctccccatccccacaaacaggttttgcaggattcatggtgttaatttctagaaagagattgttttgaccagaagacaaagtggaacctttactctgtctcactttaagttgaaactacagctaccacttggtcactttaggctgcccatgccattgcggtagccaaggtgagtaatgactattctaagagagggactgaccctaatttctacgaagtgctaggattggtgagatgcaatggggacatgaaggagtgtgtgtggaatcgcagtgttca

SEQ ID NO: 318963 - DNA, 588 bp, Homo sapiens
gactagttttatgatacagaagactgaagaatgggcatataaacacacagcccacttgtctgtctatatctcatcatttagaaccagaataattgaatggttactagaggccccagtgaagacaaaaacttgggtataataccttatgggttgggttgctgttctcttggatgtgatacatgcactcartcgatggctgttatatggtgctgtctggagtagctaaaatacattggtcccagaaccaaggggcaaaagtagaattggctcatctcactatcattcccagtgacccacttgtgaaatctgtgctccccatccccacaaacaggttttgcaggattcatggtgttaatttctagaaagagattgttttgaccagaagacaaagtggaacctttactctgtctcactttaagttgaaactacagctaccacttggtcactttaggctgcccatgccattgcggtagccaaggtgagtaatgactattctaagagagggactgaccctaatttctacgaagtgctaggattggtgagatgcaatggggacatgaaggagtgtgtgtggaatcgcagtgttca

SEQ ID NO: 318964 - DNA, 552 bp, Homo sapiens
tttctttgacgtattttgaagtgattttgcaaagccatctcttgtaggggaaatttacattctatagagcatctctttcccttattargtcttttccagagagtctgacaccttttaagatctaataagagatatttaccagcaaaccttaactctttgaactaattgccactcggaaaatctttgaatccacctatgacctggaagctcttgctttgagatgtcccacttttctaggccaaaacaatgcatgttttgcatatgttgatttatgtctttgcctgtagcttctgtgcccctaacatgtttaaaattaaggtgtaacccaatcaccttgggcacatgttctcaagatgtcccgaggctgtatcataagccctggttctcatatttggcttagaatcaacctcttcaaatattttacagcattgttttttatcatcaacattaagtcatttatgttgataaaaaagccaacgctgtaaaattcccatgttccctgcagcattagtcatgatagccaagaaaggggaacagagtgcatccatcaat

SEQ ID NO: 318965 - DNA, 581 bp, Homo sapiens
acattaccagtcatcccccatttctttcagcctctcagatctaggcaaccattaatttatttttggtttgtataaatttgcctatttcatataaattgaattatataacataagtacttttgtgattggcatccttgacacattgtattttcaaggttgatacatgttgagcatgcatcagtaattcattttttattgccaaatgatattccattatatataccaaatcatatttgtctctccattcatcttttttttttttttttttttttgasatggagcttttctctgtcacctaggctggagtgcaatggcacgatctgggctcactgcaatctccacctcctgtgttcaagccgttctcctgcttcagcttccctagcagctggaattacaggtgtgcgcccccatgcccaggtaattttttttttttttttgaatttttagtagagacaggggtttcaccatgttggcaaggctggtcttgaactcctgacctaaggtgatccactcatctctgcctccaaagtgctgggattacaggcatgagccagcgcacctggtcctctccattcatcttt

SEQ ID NO: 318966 - DNA, 574 bp, Homo sapiens
tattgttctttcaacatattgaatgttagttccactgtatttttgcctccctgatttctgatgagaaatcagccattaatctcattaaattttttttcaggatgagtcttttttctctcttgttgattacaacagttttcctttgtcttttgacagtctgactaggtgtgggtctccttgactttatcttatgtgtttcatcaaatttggggagtttatggctatgattttcttcaaatattttttctgccctgttcactccattttctatttctggagctcacataatgtgtatgttgatatgcttgatggtgtcccacaggtccctgagactgtattcatttgtcttcatacatttttctttctattcttctgactrggtaatctcagttgacctgtcttaaagttcactaacctttctttcttttgatctttcttttgccaactcaaatatgctgttgagtaaactcaaatattctgttttagttattatgctttaaagctccagaatatctgtttgtgtttttaaaataatttctgtttcctttttttttttttttttttggtgggggac

SEQ ID NO: 318967 - DNA, 574 bp, Homo sapiens
tattgttctttcaacatattgaatgttagttccactgtatttttgcctccctgatttctgatgagaaatcagccattaatctcattaaattttttttcaggatgagtcttttttctctcttgttgattacaacagttttcctttgtcttttgacagtctgactaggtgtgggtctccttgactttatcttatgtgtttcatcaaatttggggagtttatggctatgattttcttcaaatattttttctgccctgttcactccattttctatttctggagctcacataatgtgtatgttgatatgcttgatggtgtcccacaggtccctgagactgtattcatttgtcttcatacatttttctttctattcttctgactaggtaatctcarttgacctgtcttaaagttcactaacctttctttcttttgatctttcttttgccaactcaaatatgctgttgagtaaactcaaatattctgttttagttattatgctttaaagctccagaatatctgtttgtgtttttaaaataatttctgtttcctttttttttttttttttttggtgggggac

SEQ ID NO: 318968 - DNA, 394 bp, Homo sapiens
gaaaggaagacagaatcacaccgattaagatgaatttagaaagtaagaccactacggctcacattggtggcatttccctatgtgtctttgcaatgctcttatctgacacaggtctcttaaaggttgggttgaatatctgttcctcagttattgctcttttactccccaaaatcttcccctacaaaggactaaaaatagtgatcagaaatgacmtttccctccttagtcccaggtttgtttgggatttcatgtaataaactagagcatgggtgtcctcttccactgattgccatgttcatttcatggccttagtcaggtgccttggctgcaaattttccctctctacactgaaaaacccagttttgctgggcaattttagttcccactatgaaga

SEQ ID NO: 318969 - DNA, 386 bp, Homo sapiens
ctggggataccctctatttgggagyaaagaggaagacaggagttaggagcctttgcccttcctagaattgtgtctgaccaataataatagcaatgatgataataaagatgatgatgatgacataacaaagagcatctacttacatcatacttactctgtgccagaaactttcctgaagatcatatggcaggttcttaaatgcttgttgaattagaatatttacaatgggctgtggattactagactttttaatatgtatcctaaatgtatcctttcagatagagtatgccagttctctactcctgtgggatttggtgcctgagcctattgcatgctcagtctttcctgtgttaaatgatcagatgcaggctggagtgcagtggccg

SEQ ID NO: 318970 - DNA, 574 bp, Homo sapiens
gttctttaactcagagctataggtgttaagttctctagggtttgtatattagaagatttctttattttatctttattcttaatgtggtttattcttgatgtatctgggtataaaattctaggtagacaggtattttcctcagtactttgaagatgttgtttttttgttttctttcaccagttattgcagaagggaagacttctgtcagtagaatagtcattcctttgtagatacttcgctttttttctcttgtacctttcaagcttatttatctattttcattcagccttagtaatctgatgatatataataacaataatatagcattatatatttaggcgtagttttagttttgaattactctattaggtacttagttggaatgctctgtcagtctgtgaattcatrtcatttttcaagtcttggaaattctcataatcatctctccaaatattgtgcccaccattccctccttctttttcatgaattcttaagccttcttagctagagcctctcccacttccatgcctgtgaattgcctcactgtgctatattatgaggcaaattgcatggt

SEQ ID NO: 318971 - DNA, 613 bp, Homo sapiens
tgttgttggcaatttttttttgtaccatttcaatctcactgctcgttattggcctgttcagggtttctaattcttcctgctttaagctaggagggttgtatatttccaggaatttatccatctcctccaggttttctaatttatgcacataaaggtgttcatagtaactttgaatgaccttttgtatttctgtggtgtcagttgtaatatctcctttttcrtttctaattgagcttatttggatcttctctcttcttttcttggttaatctcactaatggtctatcagttttatttatcctttcaaagaaccagttttttgtttcatttatcttttgcatgcttttttgtttcaacttcattcagttctactcttatcttagttatttcctttcttctgctaggtttgagtttggtttgttcttgtttctctagttccttgaggtgtgaccttagattgtctatttgtgctctttcagactctttgatgtaggcattcaaggctatgaagttttctctcagcacagcctttgctgtaccccagaggttttcataggttgtgtcactattattgttcagttcaaataattgtttaattttgtcttgatttcatt

SEQ ID NO: 318972 - DNA, 532 bp, Homo sapiens
tgtagttcttcttttgtttagatgtacttccaggtatttttttgtgtgtgtggctattgtaaatcggattgcatttttgttttggccctcagcttgaatgctattggtgtataaaactgctactaatttttgtacattgattttgtatcctgaaacttcgctgaagtcatttatcagttccaagaggcttttggtggagtctttagggttgtcaatgtatagaatcatattgtccatgaagagagatagtttgacttcttttcctatttggttgccttttatttctttctgttgcctgattgctctggctaccaattccartactatgttgaataggagtggtgagagtgggcatccttgttttgttccatttctcaaggggaatgattccaatttttgcccattcagtatgatgctgactgtgggtttgtcatagattgcttttattattttgaagtatgttcctttgatgcctagtttcttgagggtttttatcacaaaaaattgttggattttatcaaaagctttccct

SEQ ID NO: 318973 - DNA, 597 bp, Homo sapiens
atgcctagtttcttgagggtttttatcacaaaaaattgttggattttatcaaaagctttccctgtgtctgagataatcatattgtttttgtttttaattctttatgtggtgagtcacatttattgatttgtgtacattgaatcagccttgcattccaggaatgaagtctacttgatcatggtgaattagctttttgatgtgtttctgaattcagtatgctagcattttgttgaasatttttgcatctatgttcatcaggaatgttggcctgcaattttctttttttcattgtgtctttgccaggttttggtattggcctgatgctggctttgtagaatgtgttagaagggactcccttcttgattttttgaaataggtgcagtaaaattggtaccagctttttgtacatctggtagaatttggctgtaaatccctcttgtctggggcttttattggttggtagtttttattttattactgattcaatttcagaacttgatgttggtctgttcaatgtttcaatttcttcttgatttaatcatgggaaattgtgtgtttcccagaatttatcatttcctctagattttctagtttttg

SEQ ID NO: 318974 - DNA, 597 bp, Homo sapiens
atgcctagtttcttgagggtttttatcacaaaaaattgttggattttatcaaaagctttccctgtgtctgagataatcatattgtttttgtttttaattctttatgtggtgagtcacatttattgatttgtgtacattgaatcagccttgcattccaggaatgaagtctacttgatcatggtgaattagctttttgatgtgtttctgaattcagtatgctagcattttgttgaacatttttgcatctatgttcatcaggaatgttggcctgcaattttctttttttcattgtgtctttgccaggttttggtattggcctgatgctggctttgtagaatgtgttagaagggactcccttcttgattttttgaaataggtgcagtaaaattggtaccagctttttgtacatctggtagaatttggctgtaaatccctctkgtctggggcttttattggttggtagtttttattttattactgattcaatttcagaacttgatgttggtctgttcaatgtttcaatttcttcttgatttaatcatgggaaattgtgtgtttcccagaatttatcatttcctctagattttctagtttttg

SEQ ID NO: 318975 - DNA, 379 bp, Homo sapiens
tagattggaaaagcaggttcaaaaaagaaataataaaataagaatcataaacagttatcatcataatctatcgttctttaatctagattccaaaattttgcagtttttctaatattaatattttccaaagtaaaagccaaatgtaagataatcactttgaagttatccaaatttgtagcagtatagaaaaatcatgaatttcttatgttttcatttgctttgaaaattgcattcataatttgctctatcgaataataacaattattagaayaattgaaattataatgttcttttaaaataacaagatctgtcttagtttggcaatttggttgcacacctactaaaatgttttaattacagaaggagataattgaatagg

SEQ ID NO: 318976 - DNA, 571 bp, Homo sapiens
catcctgccctggcttggcaaagtccttccgtgacacattctcagaacatgtgataatttccctcttaacagtctcttagcttttattaatattcaaatatgtttccttatgttttgaatccccacttttcccattagcctaaaactccattagcacagagaccaagtgtgttgttctcaacatttctatctcaagccccagcacagtgcttcgtgcatggtaagcactcacggatgtctttggaatggatgagcttcamgagattctacaaacactgccctgttcaaacggtgtggcaaatactcttcattgttttcttcgttgtcttcaatatccaatttctacaataattatgatttttagtaggtacaggaatgctgagaagtaattagcagcttttgtatttattagttttccttgtagctagatatggttatgtgaccagttcctagacactgggatgcaggaagaaagtaaaacttttagaaagtgttcctagaggaaaggagtgcacttttttggcaatcatcttctccttcctgctggctggaatgtgaatggaaatgctga

SEQ ID NO: 318977 - DNA, 586 bp, Homo sapiens
cagtcttagaggaaaccatgataatgctaaaacagaaaaaaactcaaaagtcataaagcaagaacaaattgctatgaaaaagaaataacctaagatcaagaaaaaaaattttgaaattaaaaccatgatagctaaamtttaacattttagtgaaggtctaataataaaattatcagacctaataaatttatacatgtaaggttaagatattaaaaagattcttaatttaaaattaagaatattatcacaaattgttttataagtacatatccataatgagacaatataattaaaatgtataaactttgcaaaagaagagataaaattatcagttttcatagatatgactaagaaaaattcccaagaaaactaattaaaaaaccactagaattaataaaatattttaatatagcaattatatacaagacagacatgcaaacattaatagtttttctatatatcagcaagatacaattagaaattttattggaatttgcaatctcattaaaagtagaaatttttaataaattcatcaggcatacatattaaaattaatgtgggtgaagataaactcccaaaacatgag

SEQ ID NO: 318978 - DNA, 644 bp, Homo sapiens
aagttctaaacccaaaagtcacagaagtataaaattataagaatgtctaggaggttattttataatctgagctgggcaaggccttgtttaataagatataaaatacaggtatcataaaggaacagaagacaaatttgaaagaaagcagcttagtggaggctcaaagcagggctttgtagcattccctggcctcacacctaccacagtaaggccttgggaagttatgtgaccttcaagatgtagctcagttttcttacctgtaacataggcatgttaataccttccccataggattgttatgaagattaaatgtgttaacatttgtaaaaaaacattagaataaaacttggtacataataagtatttgttagctaaacttataaaataaaccttgtgtatggggtaaaatcatagacaaaataacaaaactagcaaagtaccgtgggagtatgagcacaacaaaaatgacaaaggatsactactcatgtttgtaaagagcttctacaagtcaaaatgcaaacaacaacaaatatgtgaaaggtgtaaacaggtaaatcaaagatcactgaaatccaagaggcagtctgactgtagtctctgaccatcgggaaaacacaaatttaaatagcggtgaaataactgca

SEQ ID NO: 318979 - DNA, 644 bp, Homo sapiens
aagttctaaacccaaaagtcacagaagtataaaattataagaatgtctaggaggttattttataatctgagctgggcaaggccttgtttaataagatataaaatacaggtatcataaaggaacagaagacaaatttgaaagaaagcagcttagtggaggctcaaagcagggctttgtagcattccctggcctcacacctaccacagtaaggccttgggaagttatgtgaccttcaagatgtagctcagttttcttacctgtaacataggcatgttaataccttccccataggattgttatgaagattaaatgtgttaacatttgtaaaaaaacattagaataaaacttggtacataataagtatttgttagctaaacttataaaataaaccttgtgtatggggtaaaatcatagacaaaataacaaaactagcaaagtaccgtgggagtatgagcacaacaaaaatgacaaaggatgactactcatgtttgtaaagagcttctacaagtcaaaatgcaaacaacaacaaatatgtgaaaggtgtaaacaggtaaatcaaagatcactgaaatccaagaggcagtctgactgtagtctctgaccatygggaaaacacaaatttaaatagcggtgaaataactgca

SEQ ID NO: 318980 - DNA, 531 bp, Homo sapiens
acactttgtctgaggttcattgcttaatcaatcttttctggcacaccagaatatcccattttgcaatacaagagtttccatcatcagtgtgtgtgtgtgtgtgtgtgtgtgtgtgtgatctttaattgtccagtgctgtcatatattaaggaacaataaactgaaataggctgctgtctcctcaaaagcaataataattcaaatttgaacagcttcaatttaggccaggtaattgtgactattcctttcttctctcatgctgtagtctaraatttaatagttttgcaaaatttactacattaagccaccagcaataagaaaataaaattaagatataggacatgaaaacagccaatataagagaccaatgattctaatacaagaaagagactataggaagattttttttttatcattaacattcttctaattagaagaatggagacttttgggataaagaagaatctctgtgaactctcttatattttgacttatgtttgtgatctgattaagacatattaataccatccc

SEQ ID NO: 318981 - DNA, 628 bp, Homo sapiens
atatattaaggaacaataaactgaaataggctgctgtctcctcaaaagcaataataattcaaatttgaacagcttcaatttaggccaggtaattgtgactattcctttcttctctcatgctgtagtctagaatttaatagttttgcaaaatttactacattaagccaccagcaataagaaaataaaattaagatataggacatgaaaacagccaatataagaraccaatgattctaatacaagaaagagactataggaagattttttttttatcattaacattcttctaattagaagaatggagacttttgggataaagaagaatctctgtgaactctcttatattttgacttatgtttgtgatctgattaagacatattaataccatcccaatcctaaacaacagcagcaggaacaaccacaaaaaccttgctttgtttcttcctcctcttcaagccatcatcccctcacccttcctctttccaagggccaaattactgaaatatttaaactcgattgcctacatttcctcagtttccagacacttctcaccctgccgtgatcctacatctgctcctgctcttctgcttcaactgctctagcaaaggaaaataatgtcttcctgttt

SEQ ID NO: 318982 - DNA, 532 bp, Homo sapiens
ggatttctttcattcctgtgttgtcttcagttgataagtagagtttgggttgaagtctatctcaaataaatcttacagaaactagacaagccctgtagttaattccctaggtacctaaatatataatttggataaatatactctatagacggaagaaccttacactgactacctgattaygaagcagcagccattatatttggaaaggccaagtaaaatctccttaatctgcatccccaccttgtcccatttcagcaaagatggtaatcagaaatcgtactgcatggcaaaaggaatttcagaggttaacacagctattaaatacttaagacttgcataagttattagtcccctcataacactaattaattcttgttcagcctatgaataaaaccaatagatcggggcatatgacaatgaactctaaaaagtaactaaatgattatacaaattacaagttgaaggtagtatcttttcaagaatggatcaactcagcctctggcacttggtatgccgctgcttggcactactg

SEQ ID NO: 318983 - DNA, 532 bp, Homo sapiens
ggatttctttcattcctgtgttgtcttcagttgataagtagagtttgggttgaagtctatctcaaataaatcttacagaaactagacaagccctgtagttaattccctaggtacctaaatatataatttggataaatatactctatagacggaagaaccttacactgactacctgattatgaagcagcagccattatatttggaaaggccaagtaaaatctccttaakctgcatccccaccttgtcccatttcagcaaagatggtaatcagaaatcgtactgcatggcaaaaggaatttcagaggttaacacagctattaaatacttaagacttgcataagttattagtcccctcataacactaattaattcttgttcagcctatgaataaaaccaatagatcggggcatatgacaatgaactctaaaaagtaactaaatgattatacaaattacaagttgaaggtagtatcttttcaagaatggatcaactcagcctctggcacttggtatgccgctgcttggcactactg

SEQ ID NO: 318984 - DNA, 544 bp, Homo sapiens
gaaaattaatgaaaccaaaactgatttttttgaaagatcaacaaaactgacaaggcgttagctagatggggaaaaaaaacacagaagactcaagttattgaaattagaaatgaaaatggagacatttctgtagattttacaaaagtaaaaatgattataacagactacataagcaaattggagaaagtggatgaaatggacaaattcctagaaacacaaaatctaccaagactgggtcattaataaataaaaaatctggatagatctacaactaatttgagattgaatcagtaatgaaaacaatttcccaacaaagaaaagcccaagatcgatggcttcactggtgaattctgccaaacatttacagaattaatwccaacccatctcaaacttttcacaaaaaaattgaacaggagggaatactttgcaactcattctatgaggctagcattgccctaatatcaaagcaagaaatcactacaagaaaagaaaactgcagaccaatatcccttataaatattgatgcaaaaatcctcaataaaat

SEQ ID NO: 318985 - DNA, 603 bp, Homo sapiens
attatcatgggccaaacctgagagatgttatattttatttaataatttctacaacagtagtaagtttccccaataaattctcaactccrtaaaagtagtaaagtacatatttatttttgctgatcattgttttcccatttctggcttaggattgatcttcaataaatacacgttaaatcaaggaaggaattaacatcatatacttcagacatcaaatatggaatccaagagactatcaacaacatgaacttgttcacaagttccttctgcttttaaacaaaaatatcgtgtttattcaaagccaatctgagaccctactctgtatcaagaactgtcccaggttctgaaagcatagaattagacatcgtatgtgccctctagaaacacttagactttcaaatcattataattcaatgagtcctaaaatagagctgtgtgccagagataaaagaagtcctgaggaaggggtgttcaactctgtcttggtaggtcagtaaagactttagagagacagaaagtcttagaggactaggagaagtttgccagacagacaagaatagaacattccagacaacatgcagaggaactgagtcacaaaggaat

SEQ ID NO: 318986 - DNA, 538 bp, Homo sapiens
caaagtgctaaaagtacaaaaagcaaaactgttatccaagaatcctatatttggcaaaattgtcctttaaaagtgagggagaaattaagacatttccagataaacaaaagctgagttagctcattaccactagacctgtggctgtaactcatagccacacaaagaaataaagatgttaataaaggtaaatacagaggcaagtataaaagctagtgttactggaacaatggtttgtaactccactttttgttttctatacaatttaagagattaatacatttaaaaacatattaatctaaaagttagcattattgtaactttgctttgtaactccatattttattttctacaaaatttgagagaatactccttgagaagagcaactccaagacacataattgtcagattcaccaaagttcaaatgaaaatttacatttaaagaaatattcatttaaatacatatattcatttaaatacatawattcatttaaatacataaattcatttaaatacataaattcatttaaatacaaaatgt

SEQ ID NO: 318987 - DNA, 622 bp, Homo sapiens
atgggtaatgttaaaatctgaatcagtattctagttgagcaattatcctgcaaatcctgcaaggtgatgggaataaataggatacccaacactyggaggtttcctttttgggaaagtaagaccaagggagctaaccaaagtgaaacaccatgcacccaaatcttagcaagcataactatagccaccagttatctggttgtgtcacaagacattctttcctgtccgttgttggaggaggacttagttccacagtttcatcttagcatagttccacagtttcatcttagcatttggtttatgacaaggagtccatgcaaccccccgagacatatttttgtcccaaactcaattccaagctttgggtcaaagccctatgaaagaaaactggatctaatggatccagagccaaatgacaacagaggttaaaaggcacagcgcaggtaagcatggctgattcctgccaattaagccaagcccaagcttcctgtttcatggataaaggccacgttaatatccatggcataaatgagatctagggaactccaaggctactgatagtagggtgaatagaggcatacatgagattggataattcctattctctaggaaccccctgcttcat

SEQ ID NO: 318988 - DNA, 622 bp, Homo sapiens
atgggtaatgttaaaatctgaatcagtattctagttgagcaattatcctgcaaatcctgcaaggtgatgggaataaataggatacccaacactcggaggtttcctttttgggaaagtaagaccaagggagctaaccaaagtgaaacaccatgcacccaaatcttagcaagcataactatagccaccagttatctggttgtgtcacaagacattctttcctgtccgttgttggaggaggacttagttccacagtttcatcttagcatagttccacagtttcatcttagcatttggtttatgacaaggagtccatgcaaccccccgagacatatttttgtcccaaactcaattccaagctttgggtcaaagccctatgaaagaaaactggatctaatggatccagagccaaatgacaacagaggttaaaaggcacagcgcaggtaagcatggctgattcctgcmaattaagccaagcccaagcttcctgtttcatggataaaggccacgttaatatccatggcataaatgagatctagggaactccaaggctactgatagtagggtgaatagaggcatacatgagattggataattcctattctctaggaaccccctgcttcat

SEQ ID NO: 318989 - DNA, 518 bp, Homo sapiens
gatctgcattttaatctcagctctaccatctgtaatcttgccatcttacacatgttagatagtttttctgagtcttagatttttcatgtgtgtaatggaatttgaaaagcaactttttatggtgtttgtataaattaaaaagtacacacacatacacacacataaattagtgtacaatagttttattaaaactatctgcctgtcctcagaagtagcaacactactcatggtagatatccttaatttatctgtccttcaaaccaccagagtcatctgtttgtactacggcccctgatttgagtttgaggtaaacattctggatatactcactatagcagggccatcaagattctagggcttgtgacatgaggaaatactgttatgggctaaattgtattccctcaaaattcttattttgatgtactaacttccagtacctcagaatgtgactatttggagataagctatttagagatagttaaggtaaaatgaggtyatttgggtaagatctattccaa

SEQ ID NO: 318990 - DNA, 511 bp, Homo sapiens
tattatactaatgtggcaattttaatagtttgcataataaaatatttttaaaagttgatattttaatgtatcagttattcagagccactttgatctataaaarggcttcaaaagatctctagaaaaatttctatgtatttgtatatataagcataaaggtgctccttgatttatgatagactcatgtcattataaacctatcataagtaaaaaatattacaaagcagaaattcatttaatacacctaacctactaagtatcatggcttagtttagcttaccttaaatgtgctcagaacacttacattagcctacagttgtgcaaaattatccaacacagtctattttataatgaagttaaatatcacatgtaacttattgcataccctactaaaagtgaaaagcagaatggttgtataggtactcaaagtaccatttctactgaatgcttatcactttcacaccatcataaagttgaaaaatcataagttgaactattgttagttggggat

SEQ ID NO: 318991 - DNA, 511 bp, Homo sapiens
tattatactaatgtggcaattttaatagtttgcataataaaatatttttaaaagttgatattttaatgtatcagttattcagagccactttgatctataaaagggcttcaaaagatctctagaaaaatttctatgtatttgtatatataagcataaaggtgctccttgatttatgatagactcatrtcattataaacctatcataagtaaaaaatattacaaagcagaaattcatttaatacacctaacctactaagtatcatggcttagtttagcttaccttaaatgtgctcagaacacttacattagcctacagttgtgcaaaattatccaacacagtctattttataatgaagttaaatatcacatgtaacttattgcataccctactaaaagtgaaaagcagaatggttgtataggtactcaaagtaccatttctactgaatgcttatcactttcacaccatcataaagttgaaaaatcataagttgaactattgttagttggggat

SEQ ID NO: 318992 - DNA, 511 bp, Homo sapiens
tattatactaatgtggcaattttaatagtttgcataataaaatatttttaaaagttgatattttaatgtatcagttattcagagccactttgatctataaaagggcttcaaaagatctctagaaaaatttctatgtatttgtatatataagcataaaggtgctccttgatttatgatagactcatgtcattataaacctatcataagtaaaaaatattacaaagcagaaattcatttaatacacctaacctactaagtatcatggcttagtttagcttaccttaaatgtgctcagaacamttacattagcctacagttgtgcaaaattatccaacacagtctattttataatgaagttaaatatcacatgtaacttattgcataccctactaaaagtgaaaagcagaatggttgtataggtactcaaagtaccatttctactgaatgcttatcactttcacaccatcataaagttgaaaaatcataagttgaactattgttagttggggat

SEQ ID NO: 318993 - DNA, 511 bp, Homo sapiens
tattatactaatgtggcaattttaatagtttgcataataaaatatttttaaaagttgatattttaatgtatcagttattcagagccactttgatctataaaagggcttcaaaagatctctagaaaaatttctatgtatttgtatatataagcataaaggtgctccttgatttatgatagactcatgtcattataaacctatcataagtaaaaaatattacaaagcagaaattcatttaatacacctaacctactaagtatcatggcttagtttagcttaccttaaatgtgctcagaacacttayattagcctacagttgtgcaaaattatccaacacagtctattttataatgaagttaaatatcacatgtaacttattgcataccctactaaaagtgaaaagcagaatggttgtataggtactcaaagtaccatttctactgaatgcttatcactttcacaccatcataaagttgaaaaatcataagttgaactattgttagttggggat

SEQ ID NO: 318994 - DNA, 559 bp, Homo sapiens
agggacattttacatggacagaagagcatgatgaaaagtatagaggtatgaaattacataccatgtgatatagtttaggttatttgtccctcccaagtctcatgttgaaatgtaatccccagtgttggaggcggggcctgctgggaggtgttttgatcatggaggaggatccctcatggcttggtgctgtcctcatgatagtgaatgagttctcaggagatctggttgtttaaaagtgtggcacctccccaccttcttgctcctgctctccccatgtgatgtgcgtgctcctgcttcatcttctgccatgagtaaaagctccctgaggccttcccagatgctgagcagatgcagcaccatgcttcctgtgcagcctgcagaaccatgagccagttaagcctcttttccktataaattacccagtctcaggtatttctttatagcaacacaagaatggcttagcacaccatgcttattatccgtaaattactccttaagcctggagtgaaggaaatatgggttttaaagtctgaagatgggataaaggagaagatggaaa

SEQ ID NO: 318995 - DNA, 526 bp, Homo sapiens
ttataagtcaaataatattcatcacaaacttatctctctgatttcttttgactcaagatcacggaagtttagctgtaacaaagtggatttcaacttagcatgttctagttaatagaacactcactgggtatttcctatgtaagtgctttgatgtgcatgatacatatcagagacccatgagttagattttctatttcttcctgtgtctggtatagcatctaattacattaactcttattaaatacttcttgtggatgaataaaaatatcgaggtatggccaggacgaatgttaacacagaactaaaaacactcataccatcattacttctgccatttytcatacttctagttactgccaaatactaccagggggtgcatctttggttccagaagtattaaagtttggtcttgtgtgggaaaaaatgacttgccatggatcagcaagtttcagtctgacaataacatgacccttgttggaatttaaaaaaaaaaaaaaaaaaaaaaaaaaaaaggctgggtgtgttg

SEQ ID NO: 318996 - DNA, 597 bp, Homo sapiens
gtattttggtaagcgccttttcacattctgttgacctaatcatatttttttctcattttacatgaaaaataataactgtactacctagtcctactaataatcactactcctattaaaataataatagctaatcactactgggcacttattatgggccaagaatcagccaaataaattttgtgtattgtttctttgatctttaatgtagccttctgaaataggtacattacctattatgttctgaagattrccattatgttcttatcgaggaagaacctgagcatcatagaatttagctaatgtgtcaaattaattaaacattacatgataaaatggtgagtcaacctttctggtcataacctcaatactatattgcttgttttagctgtatgagaggacatatacatagatgccattataattaattgtttttgaatgattaaaataatgtctgtatactcgttgaaataacatgaacatcattaggtaatttttttacattattgattataagtgagattttagtttacttgtagtttactgtagtttacttgtagtttacttgtagtgagattataagtagattgttgtttactt

SEQ ID NO: 318997 - DNA, 597 bp, Homo sapiens
gtattttggtaagcgccttttcacattctgttgacctaatcatatttttttctcattttacatgaaaaataataactgtactacctagtcctactaataatcactactcctattaaaataataatagctaatcactactgggcacttattatgggccaagaatcagccaaataaattttgtgtattgtttctttgatctttaatgtagccttctgaaataggtacattacctattatgttctgaagattaccattatgttcttatcgaggaagaacytgagcatcatagaatttagctaatgtgtcaaattaattaaacattacatgataaaatggtgagtcaacctttctggtcataacctcaatactatattgcttgttttagctgtatgagaggacatatacatagatgccattataattaattgtttttgaatgattaaaataatgtctgtatactcgttgaaataacatgaacatcattaggtaatttttttacattattgattataagtgagattttagtttacttgtagtttactgtagtttacttgtagtttacttgtagtgagattataagtagattgttgtttactt

SEQ ID NO: 318998 - DNA, 597 bp, Homo sapiens
gtattttggtaagcgccttttcacattctgttgacctaatcatatttttttctcattttacatgaaaaataataactgtactacctagtcctactaataatcactactcctattaaaataataatagctaatcactactgggcacttattatgggccaagaatcagccaaataaattttgtgtattgtttctttgatctttaatgtagccttctgaaataggtacattacctattatgttctgaagattaccattatgttcttatcgaggaagaacctgagcatcatagaatttagctaatgtgtcaaattaattaaacattacatgataaaatggtgagtcaacctttctggtcataacctcaatactatattgcttgttttagctgtatgagaggacatatacatagatgccattataattaattgtttttgaatgattaaaataatgtctgtrtactcgttgaaataacatgaacatcattaggtaatttttttacattattgattataagtgagattttagtttacttgtagtttactgtagtttacttgtagtttacttgtagtgagattataagtagattgttgtttactt

SEQ ID NO: 318999 - DNA, 527 bp, Homo sapiens
ctttctagaaatttatttttatagtacgtatgtttatcgtctactggatattcccagattgtctatttgatgtttctagctgatgtatcccaaatgccaagaagacggtctggcacataatgaaagctcaaaaatatttgttgaatgaatgaattaaatcacagactgacacctagttagacttgaaactacaccatgaacacatcttaaaataagtcgcaaaataccagaatgtttagcctgctttaattgcatgtgattgcaggtaccagttgttccacttcctcattggaccactgaagcacttgactttgtgaggttacctgattactaagaagataaaagcatcygacttttaatctggctatttctcacctctaaccacaaaggacattacacaaattaaaatcgtgtattcattgcctaaaataacacagcctagcctactaaagaaaattttctctctggattgttcttaaacatatcttttttttatgctttagtgctagggagtctttaagttttgt

SEQ ID NO: 319000 - DNA, 371 bp, Homo sapiens
gtaagtttcactttctctgtctttatacaaccaatataaaataggttattttcttttaattcactgcatactgtacgcttacttccttttttgctcccccccacacccccacccccacttctctttctgtgacactatgaagggttatgggaacttctggctttattggcaactcccaagttgaatctgacttctaaagcataccacatgacgcagaagtcaaggactccaaaatgttctctatatgtaacatctgctaactcccacatcaccaaaatactgctcattcttcatattcagggtctttccagtatattacatcacgygtattttgtgtacactatagacatgagaaagatacagtaaccaat

SEQ ID NO: 319001 - DNA, 570 bp, Homo sapiens
gatagaagcttaaaaaaacccaaagggtcaaaatatgcaaatgactatattctaatgactttagtaaagggataagagaattctagaagacataaaatagatatgacaatggatgcaactctaattaaaagtctgaggaaggacttgcacacctccagtgagtcagagcagccacctctccggtggttccatggtgtaatggtaagcaccctggactctgaatccagcaaccagarttccagtctcagcgtggacctttacctgaagtccaaataaaatctcttgctttggaagcccaaaaaggcaaactttggggtggaaagggagtgcctctgacaatacaaattatgtacgactataattttttaaagttgtattgtttctcacagactatagaaatctcgaaatgtgagatgctaaaaagaaataatttgtaatcagtactttcaaataaattaaatataactttattaaatagtatcattagagtaataaagcataataaaatgaatctgagggaggctaatgagaacaaattctgccatttttattaggcaataccttcaagtc

SEQ ID NO: 319002 - DNA, 570 bp, Homo sapiens
gatagaagcttaaaaaaacccaaagggtcaaaatatgcaaatgactatattctaatgactttagtaaagggataagagaattctagaagacataaaatagatatgacaatggatgcaactctaattaaaagtctgaggaaggacttgcacacctccagtgagtcagagcagccacctctccggtggttccatggtgtaatggtaagcaccctggactctgaatccagcaaccagagttccagtctcagcgtggacctttacctgaagtccaaataaaatctcttgctttggaagcccaaaaaggcaaactttggggtggaaagggagtgcctctgacaatacaaattatgtacgactataattttttaaagttgtattgtttctcacagactatagaaatctcgaaaygtgagatgctaaaaagaaataatttgtaatcagtactttcaaataaattaaatataactttattaaatagtatcattagagtaataaagcataataaaatgaatctgagggaggctaatgagaacaaattctgccatttttattaggcaataccttcaagtc

SEQ ID NO: 319003 - DNA, 606 bp, Homo sapiens
tgatgaggcttccttactctacatatttgmagcttgagaatccttcaaggtctttcaataagtctataaatatatgccatcaggtcattcaagtttgaacttcattttgtgatgatattgacactgagcccaaacttggtatgtgtggagggatgtggatggggggtgtgggagggcagtgctaagatatccaaaacttgattgttgtcaatattgaatattgatattggatattataaagcctagtaagataaattagcatttgttgagcatctgctttttgtagggacaatggttcttaaatagaatgttaaatatcttatgtgaaggcatcaaatagaaatagaataaatctgtgttgttccgggtgaaatgctgaagatggacccatcttccttttctccccttgctcctgccccttgcctcttttttaacacagctgggcctcccagatagcatagtttcaatataattattgctgaaattttaccaagtattccattttcagttttaattcctaatacatacaaatctacagttagaaacttgccaacatccttaatatccatgagacagttgagtacaatctttgaatctcaacactgt

SEQ ID NO: 319004 - DNA, 541 bp, Homo sapiens
ggctactctcctagctgcgattgaaaatttaaaaataacaatagtaaagaaaaaccctttactcttctatttgaattattttaaatagattatgcactatgatacaagtagttcactggaaacttaaatgttaactaaagaccatgagacctgtggaggaaagagggatagctttattttcttaaaaagtcaatctgcaggctggggagacactgccttccagtacaagtgaaagtatgctcccagaagaacaaagagaaagtccggcctaaatagggaaagttcttgttctggttctcaatcaggtccatttatgcacataaacatatcaaatttgttcrgttctgatgggtcaaaacagtcgagctctgactagatggttttcaagccccaaaccagaagtctgacaggcgttggggagtgcaggttggtgttctagccaccattttatcttggctctgacaacaggaacttgtttggcttgattgttgaaagggaggtcctgtgacacttttacaatgcctttctcaacacaccatca

SEQ ID NO: 319005 - DNA, 469 bp, Homo sapiens
gccttctgtttctaccctcttttccctgaaacaaccaaaatactggaaaaaaaatatatgaaacaatagtttttcaagagactggacatcagatagcgattcagcaaaatgggagaggaggtgaaagaagttgagctctttattgctycaagttaatgccttgagagagtccagtgctgtgaagcagagcagggaaacccagacaaagcaaacctgaattaaagaggtagacctctgttagctcaggggtttgtttgctctaggtcctctagttctttgaattgtaatgttagggtgtcaatttgagatcttttcagctttttgatgtgggcatttagagctataaatttccctcttaacactgttttagccgcgtcccagagattctgatatgttgtctctgtgttctcattgatttcaaagaacttcttgatttctgccttaatttcactatttactcagaagtcat

SEQ ID NO: 319006 - DNA, 469 bp, Homo sapiens
gccttctgtttctaccctcttttccctgaaacaaccaaaatactggaaaaaaaatatatgaaacaatagtttttcaagagactggacatcagatagcgattcagcaaaatgggagaggaggtgaaagaagttgagctctttattgctccaagttaatgccttgagagagtccagtgctgtgaagcagagcagggaaacccagacaaagcaaacctgaattaaagaggtagacctctgttagctcaggggtttgtttgctctaggtcctctagttctttgaattgtaatgttagggtgtcaatttgagatcttttcagctttttgatgtgggcatttagagctataaatttccctcttaacactgttttagcygcgtcccagagattctgatatgttgtctctgtgttctcattgatttcaaagaacttcttgatttctgccttaatttcactatttactcagaagtcat

SEQ ID NO: 319007 - DNA, 635 bp, Homo sapiens
ttaaattcactgaacttgagactggccgcccctctccccaggtgctctgccccagggagatgagagttctgtctataaacccctaactggaggtgctggacttcctgcagggatgccctgcccagtgaggagggatctaaggaagcagtctggccactatgtgccacagccgatttactgcactgtggagaatttcacccagtccaaacctctcagggtccttagcactgtcaagggaaaaccacctattaaagccacagtaatggtggtcacccctaccccggggaagtcggtcatcccacacagatttcagactgttgtgctggcagtggaaatttcaagcaagaattaatcaagctcagaacggaactgaagaagatagagacaagaaaagcccttcgaaaaatmaacaaatccaagagtggtttttttgaaaaaaatctgtaaaatagaccactagcaagactaataaaaaagaaaagagagaagattcaaacaaacacaatcagaaacaataagggggataccaccattgactccacagaaatacaaacaaccattagggaatactgtaaacatctttatgcaaataaactggaaaatctagaagaaatggataaattcctggacacata

SEQ ID NO: 319008 - DNA, 496 bp, Homo sapiens
taaaattcagtgtcttggacacatttggtaagttgtacattatttgagaactctaaaacctataatcctttattgatcaaaacactgttcaatgactcccagacctagttgctcatcagaatcacctgggcctcctttgtacatgatgcttttctgaccgggctgtcttcctattacctgactctacgcatcaactcagataagtgtcatcagtcgytggaatctgcctagaatcctagctccgggtatttggatatatcttataaaatttattctcatcattgtccttttgtcagccgaaagaatttcatatcacttctcgaatttctttaaatgtaccccctagccctactttgtggaagcatttgtcagaaaatattaagagaaagcatctatgagtctgtcataccatagtcaaagttgagatacctcagaataattttcttgtagctacatgtacacctcaaggttgctattctgcttatcctcagtagct

SEQ ID NO: 319009 - DNA, 621 bp, Homo sapiens
tcatttaaattttagcctgcatcacagaatgatgtggcctctttagtgggtccaaccagtcctatgacccaatcttcagcttgagtttcacaaaaccagagctacacatgtattaatcctatgatcaaayatggaaactcatggacaatgtcatgagacaaagacctcgcaaatcaataatattcaatacatatttgttgatagcttattctgtagcaggcattgaacaagccaatgggattcaaataagcatttactctaggatgtgaaccatctcctgaggtactgagtatgttccccagtacttgtgtaactagagtacattaaatctgattgcaattagttacactcagtggcattcattctggataatcttcactgaggagctacattctagctgctacagagtaaaagaaggatagttcagatagatggaatagattaagcaaaagtgagaagtaatgaatgagaatttgggaagaaacaggaagctcaacatgtcaagatgttgaagaacatgacctgagatcaagatgaaaatgcagactgaaaaagaattaccaaaatcttgaataccatgttaaggaattaggttttatgtttctacccccatgaagggaa

SEQ ID NO: 319010 - DNA, 655 bp, Homo sapiens
gtaactagagtacattaaatctgattgcaattagttacactcagtggcattcattctggataatcttcactgaggagctacattctagctgctacagagtaaaagaaggatagttcagatagatggaatagattaagcaaaagtgagaagtaatgaatgagaatttgggaagaaacaggaagctcaacatgtcaagatgttgaagaacatgacctgagatcaagatgaaaatgcagactgaaaaagaattaccaaaatcttgaataycatgttaaggaattaggttttatgtttctacccccatgaagggaaacgccactgaatatttttgagaggagtagcatatcagatttagaaagttagcttgtatagaattgttgaaaatgtattaaatgaagaaaaatctggaagcaaagaggctggttaggaaggcaatgaattatgtcaaacaagtaggagatatggaccttaagctggggtgatgatcatgacaagagcggcaaagctgagaaacttttcaatctaggtaatgaaaggttggtagttgaataacccctggtacttccacagtttctatactatactacctgcttcaggtataccctgcttacagagatgattctttgaaaaatgtttttatttattgtttaagttg

SEQ ID NO: 319011 - DNA, 354 bp, Homo sapiens
agccatgtcctgtagaaaagagacaccactgaattttctcatactgcataagcccatctcagcagcagattcctgaaggccttcatgaatggcatacaatctattccagcactttttttttttttttttttggtgtggctttagtctaccaggtaccagggtgattcggccattctcacttcattctgaacaagccattaccctcatcctaagartaagtttgttcccaattactaggattcttgataggtggttaaatcctatgtcctaaaaaagtgcccataattcattgaattcatgcttatccaattttatgttcggatcaagtaccctcaaaatattaatctgaggagt

SEQ ID NO: 319012 - DNA, 554 bp, Homo sapiens
agactttgggggactgttggaagggcatgattctgttttgaaatgggaagacatgagatttggtagggtccagaggcaaaatgacatgatttggctgtgttcccactcaaatctcatcttgaattatatttccataatccctgcatgttgtygaagggacccagtgggaggtaatttaatcatggggacagttaccctcctgctgttcttgtgatactgagtgagttctcatgagatcagattgttttataaagggcttttctatttttgctgagcacttctctttcctgccaccatgtgaagaaggacgtgtttgcttccttttctgccatgattgcaagatttctgaggcctccccagccatgctgaactgttagccaattaaacctctttgctttataaattactcagtctcaggtatgtctttattagcagtgtgagaacagcctaatacagggagatctgctctagtgagggatgtcagggtattaagtaaaaattaacttgataaagaggctatgggcagctgcactgccccagcagaatgaagggca

SEQ ID NO: 319013 - DNA, 554 bp, Homo sapiens
agactttgggggactgttggaagggcatgattctgttttgaaatgggaagacatgagatttggtagggtccagaggcaaaatgacatgatttggctgtgttcccactcaaatctcatcttgaattatatttccataatccctgcatgttgtcgaagggacccagtgggaggtaatttaatcatggggacagttaccctcctgctgttcttgtgatactgagtgagttctcatgagatcagattgttttataaagggcttttctatttttgctgagcacttctctttcctgccaccatgtgaagaaggacgtgtttkcttccttttctgccatgattgcaagatttctgaggcctccccagccatgctgaactgttagccaattaaacctctttgctttataaattactcagtctcaggtatgtctttattagcagtgtgagaacagcctaatacagggagatctgctctagtgagggatgtcagggtattaagtaaaaattaacttgataaagaggctatgggcagctgcactgccccagcagaatgaagggca

SEQ ID NO: 319014 - DNA, 529 bp, Homo sapiens
aaatgaccaacagcaaatcaagacttggattttatgatttattaacttcagagaaaaagagcatgtttctttcctgatggtgccatgcaaaattcctgaagttgattgtccttggattgatacatatgtgtattcttgaattaattactataaatctgattgaccatagctagtcagcactacctgcaatacataagttaaaagtgaatagtggacaatacatcaaatgtattgaggtgcttttaccagtaaaataggatctagaaagtaaaagctaacttgagcccagtaaaaaacagcattaataaatcaactgatggcagagctagagcagctgtgttcttttttctccccttctgttrcaagtagaaaggtaacctgatagtttttcaggtagagtcaagagtcacagaaattaaatggatgacaaactaatctccttctctttatctatctaggaaatcctctcttcattcagacctatattataaaacaaagattggtcatatcacttctatacttaacatgt

SEQ ID NO: 319015 - DNA, 474 bp, Homo sapiens
actgagcatggggagaggatgtaatcttgggtacagcatcacactgggcttttasacaatcctagagagaaactgatttgagagcagtcagcctgcaaaactgcaggaagctggaggaataagtgcctcaatcctatagggaggtggtctaggcaggctgatcatcatagtcatcactacatttgttgagatttccttctcttcacaccaatttctgttttgagagtgtttatcaagctcattgtggtagtcacatcttgtctcacctctgctaggatttaagctgcatctgagcatggagcatgtctgtaatttttgctgctgcacccctaacacctagaatatttgctggcacatagtagcttgctaaacttatatttaataaatgtatggataaaacaaggaaacatgatattttaaaaaataatgaacttggaagttctgttattggacttttttgatgcagtaacacaa

SEQ ID NO: 319016 - DNA, 474 bp, Homo sapiens
actgagcatggggagaggatgtaatcttgggtacagcatcacactgggcttttacacaatcctagagagaaactgatttgagagcagtcagcctgcaaaactgcaggaagctggaggaataagtgcctcaatcctatagggaggtggtctaggcaggctgatcatcatagtcatcactacatttgttgagatttccttctcttcacaccaatttctgttttgagagtgtttatcaagctcattgtggtagtcacatcttgtctcacctctgctaggatttaagctgcatctgagcatggagcatgtctgtaatttttgctgctgcacccctaacacctagaatatttgctggcacatagtagcttgctaaacttatatttaataaatgtatggataaaacaaggaaacatgatattttwaaaaataatgaacttggaagttctgttattggacttttttgatgcagtaacacaa

SEQ ID NO: 319017 - DNA, 560 bp, Homo sapiens
gcttaataactttgcttaatctgtttcaaaccttcttccttttcttcagtttaaccagtattagcttcactcaccccacctccacccacttctatcttgaggtctttatayttgctattctttttggcagaaatacatgtattaccattgttgcctccttcctatcattcaggtttcagcttaaatgtaattacaataaggaaggcttttaagctgttcaatgttaagtatccaccaaaaaagctccacagcatcaattcattgcatagctctttgagctatgttatgtgatctttagatatattatctgtctccactgttaggatttaagctccatgcaagcaagaaaagtgtcaccagtactgagactgagtaactgtgatgcagtcaaaatcataataaatattttttaaatggtgctcatacaatacatgggtgttatgtgccatgtgatgaggaattacttatacatttatttatattttataaatatatgagctccatcctcacatggccttatataagaataatcttataaattaggtattattgtccccata

SEQ ID NO: 319018 - DNA, 508 bp, Homo sapiens
ataaaatttattgtaattttttgtaattataaatgttgcaattatgataaccccaagtgcaagtaaaaataactttcaaaaatattttatttcttgtatttttttgcactttgtcttgtactttttattctgttaataaactcagtttacccttttatgctaagatttcaattaaggaaaacctttggatataaatatgatgggattcaaacatctcattcaacacttaatacatagaatatttttagttataccatgatttataatattcattaacttgaaaataatttattgtcccatcactttgtatttaatgaaaaaagtcagcatttctgtcttsagtcttcacatgcttttgtcaattatcagaattatactttatatttatatttgtatatatacatatgtatttatatttacatttgtatatttgtatttgtatttttgtattgactcttgaaaacatgtttgaactgtaggaccacttatgcatacattttttaaaaat

SEQ ID NO: 319019 - DNA, 570 bp, Homo sapiens
ccatgcaattagaatggttttagtaaatgtataaaaattttattatgcagaactttgcccctaggtgaaatttggagccacrcattctgtaaattgaggttaaaaaatcaattgttctgttttatgtttattcatttagtttttctatatctaatctctccttttttaaaaaccacaattttttacaattccaagccaattcctatttatttcacaacttatcttttaagcaaagtacatcagattctcttaagcgattattatatctatttccttcaatatacatatggtccttctttatcaccacatactatgataacctcaaaatatatttcaaaaactatatataagatttctaatatttcctgagctgtaattcttcacaacccataatacctcttcacttttcgttaatttattctctcagttagttacctctattaattaggtacatgccacatgaaagggatcaggtattttattttcacatataaaaatatttcttttctgtcattagtctaatattttacattggaaccaacacaattcccaatttgcatgtttctcacc

SEQ ID NO: 319020 - DNA, 567 bp, Homo sapiens
atttcgggttaggagttcaacatacaaattttggggagacataatccaattaataatattgctrtattttatgagttctctagtttttgaaaatgcctgctgcttgactttatgactgaataatatcttgcaggcatataatattcttggatccctctttttttcagcatttgatggatagtgctccattcatttctgtcattgatgtttttcatgtcaaagtctgaggccatcctgactttttctcttataaatgacttgttttgcttgaattcctgaattctttttaaattttttcttagaatttttcttttttttcagagacaaggtctcacctggttactcaggtgcagtggcatgatcatagctcactgcagccttaacctcctggtcccaagtgatcctcctgcctcagtctcctgagtagctaggactgcaggcaagcaacaccacacctggcaatttttttaatttttgtagttcaataacttcaccacattgtatcttgacctatgtctttgttttcttatatagaatgtattctatcaaactacagattcaggtttt

SEQ ID NO: 319021 - DNA, 294 bp, Homo sapiens
tctaagcagccaaggtaaggctaaaatcactaagtaatgatttcaggtgtccacctgctgcagaggagacaaaattggaagttttcttccatccaagtaaactgccttctaaaacaacaagaaagatcaacacttttcagaggaataggaccagaactgggttatatggctatgctgyaagtgcaattgagctaggaaggtgataatttgccattttccatctctgtaatggggaagagcctctgccagaaagaaagcagagagtcagaaagcaagtagattatctaaagagtt

SEQ ID NO: 319022 - DNA, 646 bp, Homo sapiens
tttataccaaataaggcaaatatgtcatttttggactttagggaacctgttactaatatcttaaaggattaattaggtcagaaaaagacatgatttataatttgattttggaaggtttgtcaaatatcaaaggtttaaaacgtgtgatattacaaaatcagatcacaggtcattgtaaaataagtcattcatttaagcaaagtgatctcagctatagactagctgaaattcaagaaatgaacctgtttttgctacagaatacctgaagggctcaagtatgaatgacaccatggattaaaacatggcactgaaascagagggatctgctagtatacaaagaggttagacccctgtttcctctcctgtgcatcggtgactatccctagtcaggcaatcgtggcttatttctggagagactgaaccagaggagtaggtcttaaacacactgtaagtgatagagagtgaaggtgaaataaagggttgcacgcagggggattaatgaaattctaaatactggactaatactggactttgggacccccagattcctttctctatcccttccagagcaccagtagtttggtatgttcttcctaggtaaaaagttgaaaaacaaaaaataatactgaaaggttttagagaaaat

SEQ ID NO: 319023 - DNA, 657 bp, Homo sapiens
ctccgtctcaaaaaaaaaaaaaaaaaaaaaaaaagaaaatcactgttatttaggacgtgttaatgatgattaaattttccagttagttcatggattgaagaatatataaagaaattttgacagaactagaagagtaagcatgctgtaggaaatccttggcttagagctgtatagtcttatgacattgcttctagatcaatacagaagcaggagtttgcamcctctcctattggaaggggtagctgcaattgtgtatgggaaaggtgcaccatgcagagatagggaagcttcaggtgtatgagaagggtgggtgagcatagtgaagcagacagtttttggagtaccattcagctcacaacactatgtttctttgaaatatagggttcagcacctggaagtcatattcacttgtccccccccaaaaaaaatagataaatgattctgaaattgatacctggcctaagctgagccaaccatcttccaaggaatttgaaatcttggaataaacatctgccagaacatgagttggtaaagcttagtcaccttaatggctgaataccagaaggaaggtctcctattccttgaagctccctgatttttgaaattccagagacaaaggttttcagtagttccttctatatcatgcaataatgcagt

SEQ ID NO: 319024 - DNA, 482 bp, Homo sapiens
gctcagtaatttggattgcatgctgcaacataaagcactcttctggatctccaggctgaatcacatttagggatgataataatgatgatgatgatgatgatttttgccaatactacttcataggtgggtttatgtttttccaggtaaatttttttttaaagagacagtgtcttgcttagttgcccaggctgatcttgaactcctgggctcaagtcatcctctgctcccacttctgcctcctaaagtgctgggattatagtcgtgagccaccaagcccagcctggtttcttttgcccttttgtaatgctrtctgccattgattctcaatgtttagatccagtaattcactaggattgcaaaagatgttgatattcaaattttcttcttcagtaatttgatggactacttacatcaagagaaactttacctcacctactatttggtatcttggtggcacagtttacatagaaacggcaggacaa

SEQ ID NO: 319025 - DNA, 545 bp, Homo sapiens
aagccagcggtgtaattcagtccgcatctgaagacataagaagcaggggcgtcaatggcatactctcagtccaaggccaaaggcccaaagactcgggggtcaggaggtgctgatgtaactcctggagtccaaagaccccagtgccaggagctccactgtctgagggcaagagaaggtaaatatcctagctcaagaatagagagcaaattcactcttcctatgcctaattggataatgctagcccacattggtgagggcagatctgttttactcaktctactgattcaaatactactctcttacaaaaccctcctcaaagacacaccctgaaataacattatcatcaatacaattactgaaaagagttaaaaattcttttgcatatgctctttccattctcaccccacatatttacaattgtaccgtatccacactgtcagagtattcagccattatgtaccacattatcttctttatatctctcatttagtgtcttagttttgctagaaattattatcaatgctcaccatgaatcattttgtcaa

SEQ ID NO: 319026 - DNA, 503 bp, Homo sapiens
ttgaatttccctttttctgagctacctttggagattctagatcttgtaaaaactgcttaccacctctcggaaaatacttcatacacccatgattaagtcataaccttagttaaggcttgttggcttcatctggcaacttataaagttcagaagccagaaatattggctgtttgtcttggctggagtctggtactaagatatttggttaaaagtcagcttaattaaaagcagatatccaagctgcatacatattcaaatggctttttttttttcttctcttcttggatcttgtttttctggaaaaaagtttttttcttctcagtcractgaattatttttctccactttgtcttcttgtcattcttgatgcccatatgagataattcttataaaatatctaattttataagaatttataacaagaatttaaaataagaattattttatgataaaataattcttataattcttttttgttttttttttttttgagatggagtgtc

SEQ ID NO: 319027 - DNA, 503 bp, Homo sapiens
ttgaatttccctttttctgagctacctttggagattctagatcttgtaaaaactgcttaccacctctcggaaaatacttcatacacccatgattaagtcataaccttagttaaggcttgttggcttcatctggcaacttataaagttcagaagccagaaatattggctgtttgtcttggctggagtctggtactaagatatttggttaaaagtcagcttaattaaaagcagatatccaagctgcatacatattcaaatggctttttttttttcttctcttcttggatcttgtttttctggaaaaaagtttttttcttctcagtcaactgaattatttttctccactttgtcttcttgtcattcttgatgcccatatgagataattcttrtaaaatatctaattttataagaatttataacaagaatttaaaataagaattattttatgataaaataattcttataattcttttttgttttttttttttttgagatggagtgtc

SEQ ID NO: 319028 - DNA, 509 bp, Homo sapiens
aaaaactgtgcatgtttagtatgtacaatttggtgagtctgacatttgcatgtgcatgtggttttggagagggatgaaaatgggtggtagggcaaaggtttctattcacccagctcactttatttatttttcttaccctcctagatactgtagatatttcagtttgtggtccctgctgttgagcaatctgagctctgtgagatatgcagataatgtctccagagagccattagcatgggtcttcagccatgcctccccatccatgccacgagggaattgtttaaagtcattttgttcctgattagctgcctcactcattatcttcctgttcctggaatttgtgrcacaaagaacaatgtatagccaatcagtagctaatactattttaatgtaaattcttaataaacaacttaggaactgcctcttctttttctttaaaaacctactttttatctgttgctactctgagtgtatattcagggcaacttgaatctatgttgctagttgca

SEQ ID NO: 319029 - DNA, 531 bp, Homo sapiens
gatgaggaactccttgccagaaaatattatttcatcatgttcctattagagggcgaggcatggtacaaatatattttgataggagaggtgaataaacaaaagattgagagtggaggctaccctggtaggacatcaggttggggaaaagtaagcttttcaagagcagctttcctaattctcaattttatttagagtgtgctctgattataacaatatgtggatggtgtggagactttctgagagattaaccagtgaataagtctttaagagaagaatgcttgctcatcgactgggtattcatttggagaagattgtgttttccagtttcttagaagataatatttggagtattakctgaacaaaacataatgcacttctttttttttcttcttctttatgcttatcttgccaagtcatgaaagagccaatttgaaatatttcaactgatatttctagctagaaatgaatggatttttgaaacatttcattactgtacttagaaagtgtaactgtggatagagatgattcata

SEQ ID NO: 319030 - DNA, 608 bp, Homo sapiens
gaaaaactatgcaaccaataaaattagtatgttagaatttttggcatcggaaaatggttatattaataacatagtgaatgttaaaaaatgaggtcaccagaaattttttaacttcagtggaggagtctgctagaaaaaggacctattgagctactggaaattcatccttgctattataataactcgagtaatgttccagtcagatatatgagtagcaaacacattaaagaaaaatttgaggacacataaggaaaaatgacagtatgaaagagaagactgagaaaaccaacagaacaagtaccatagaggaagtggataaaaatacaattcactggtgatatgatttggctctgtgtccccagccacatcttttcttgtagctcccgtaattcccacatgttgtgggagggacctggtgrgagatgactgaattatgggggcaggtctttcctgtgctgttctcatgatagtgaatgagtctcatgaaatctgatggttttaaaaacgggagtttcccagcacaatctctgtctttgcctgctgccatccccataagatgtgacttgctcctccttgccttctgccatgattgtgaggcctccccagcc

SEQ ID NO: 319031 - DNA, 608 bp, Homo sapiens
gaaaaactatgcaaccaataaaattagtatgttagaatttttggcatcggaaaatggttatattaataacatagtgaatgttaaaaaatgaggtcaccagaaattttttaacttcagtggaggagtctgctagaaaaaggacctattgagctactggaaattcatccttgctattataataactcgagtaatgttccagtcagatatatgagtagcaaacacattaaagaaaaatttgaggacacataaggaaaaatgacagtatgaaagagaagactgagaaaaccaacagaacaagtaccatagaggaagtggataaaaatacaattcactggtgatatgatttggctctgtgtccccagccacatcttttcttgtagctcccgtaattcccacatgttgtgggagggacctggtgagagatgactgaattatgggggcaggtctttcctgtgctgttctcatgatagtgaatgagtctcatgaaatctgatggttttaaaaacgggagtttcccascacaatctctgtctttgcctgctgccatccccataagatgtgacttgctcctccttgccttctgccatgattgtgaggcctccccagcc

SEQ ID NO: 319032 - DNA, 580 bp, Homo sapiens
gtctaaaggtcacagtctaaaggccatgtctgcctccgatccattcttctaccaccctccaccatgttcacttggtgctagccagacttgatttctgctctccttccacctgccagaatacaacatgctcattcctgccttaaggcctttctacaggtctacactcaaacatcaactcccaggacacaccttccttgaccacccaatcaacaaaagcccctctgctctgtsattctctatcacatcagcccattttattttgttttcaaccttctctgaaattacctgaattttcttgcttatttattaccaatctcacttctagaaagtaagttctcatgagagcaggaattgtgtcttctagttcaaccccgttgcctagaacaaggcttggcacaaagaaggcacccaataaatagatcaaagagatgaatgtaatacacaaaaggcattacagcagagatttccaccatgtttacatttcaaaaacaatcatttgctttctctataaaaatctgtcaagaatatatgacccccttgtttccacggttcccaagatgacacaataagtaaggaaatg

SEQ ID NO: 319033 - DNA, 601 bp, Homo sapiens
gcaatatacatttaaaacaagttcaagtcatctttcaaataacactataccacttcatgggtagtgtgagtaccttgtaataacaaaataatcctcatttctccatcctatccttgtttcattgctttcattcatttcagttatatatagccatacacaaacatacataatcaaatacgttattactatcttgaacaaactgttatctgtcagatcaattaagaattttaaaaagtatattagttggttatcacactgccataaagaaatacctaaaactgggtaatatataaagcaaagaggtttaattggctcatggttccacaggctgtacaggaagcaaggcagcatctrctcagtttctggggaggcctcaggaatcttacaatcatggtggaagaggaacgggaagccaactcttcacatggccagagcaggaggaagtgttggcaggtgtgggggcgttggggagtgaggtgccacacactattaaatgaccagatttcatgagagctcatttgcatgacagcaccaagggggcaatgatgttaagctatgagaaaccactcccatgatccagttgtctcccaccaggcctcac

SEQ ID NO: 319034 - DNA, 611 bp, Homo sapiens
acagtaacgcccaaatctcagacttgatgacaaccaatgttttcactcagttgcatggcagtggttggctgcaaccctgctctatgtctttttcattccaggatccaggctgatgggcagcccgtttggaacatgctgttcttatagaaggaaattaaaaagctggtggaagcacagtggcatatattaatacatccactggctgagatgaatcccttgccaagcccagtgtcactgaggtggggaagtatatttctcttgcaggaagtaactgcaagtgatgytgcagcatgcaggaatgtattgttccacagaatggggaatgaaaaactgagtgcagtcgtactgtaagctgccacactcagtgtctgaaagggagagggagccttcagacaatgccagacaactctgcaacagaccccaatttaggccctgtaaaccagaaatgtaagaaataatttttgcctaatgctgccaactttggggatgctttcttacgataattaaaacatttctcaccaaggaaatttcccattgtctgtggccccggggccaagacttctctcctcacatctggccactcctctatacatgccgggccttacccctgc

SEQ ID NO: 319035 - DNA, 554 bp, Homo sapiens
agctactccaactcaaaagcatagagaaattataaaattcaagaacagatgttagaatggaaaatgagtttaacttaaaagaataccagcagtctcatgtttaaagtctaacaactttgtgtttatttttgctttaatcttgtcatgggtaaatttttagctgttcatttttatacaacaccacaggatcagagatagcatgaacacattagtctctacaaggctaattctacccgagcacccatcaaagcgacccaaatgacacgccatgcatcttgagtgaccgtgcactgccatatactctgagctctactacaggtaatgttacaccaaattgacattgtaactgtgtttcaaatgtctcttagagacaaatacagatcagtaggtataataacctctgaagacttccaagagtaatgaggtttcgccaagscttgttgtatttatcatggatggttttcaggaaataacttacgagaaagcctgattgattttacagtcattttgacctgtgatttatttattaagtacaatttgaagattcctaaaat

SEQ ID NO: 319036 - DNA, 584 bp, Homo sapiens
cacaccagtctgcaagctctatcttagaacatgagggtgggtcatttatatccaaggatcaaagaaaacagaccctggcttgcttaaggagccttaggcaggccttcagctaggataaaggttaatacaggtccaaatcccttgggaccagacaggcttttgggattcagaagttttcagattttttttaactttttagctctatggggcccatgccatgtagcatgctaagagaactctgaggcagaaccttattaacaaacccattgatatttctgaagcaaaacataaatattcagaattcaagtgacataagagtataaaaaacatatacaccatggaatactatgcagccataaaaaaggatgagtttatgtctttgcagggacatggatgaaactggaaaccattattctcagcaaagtaacacaagaagagaaaaccaaacaccacatgttctcactcayaagtgggagttcaacaatgagaacacatggacacagggaggggaacatcacacaccagggcctgttggggggtgggggtctgggggagggatagcattaggagagatacctaatgta

SEQ ID NO: 319037 - DNA, 505 bp, Homo sapiens
gggtgcagctaaccaacatggcacatgtatacctatgtaacaaacctgcatgttgtacacatgtaccccagaacttaaagtataataaaaaaaaaagtgtaaaaaatatcaagtaagttctagtcaagttttgccaccaaatgagatagttgcaaacttatgaaaaaaataactttccaaaagcattgggatttcagaattattgacaggtaataatgtgaaccaattataaggagacaagtgaggactgactacatactttgttaatgaatcgacttatagagaatttatgcctgatgacctctaccctttggaaactatttttgtatccttgataactggggacatacctgctttctcccctttggcctcagggggaggcagtgttttgccctttaccattgttccccaagcacgggcaggcccatttcttaatttccyaggcatatctgagactggctggcaggaagcttagcacaatgagttacttccaattgctgttaaa

SEQ ID NO: 319038 - DNA, 551 bp, Homo sapiens
tgctacatagtacatactttayagtttgcatgcatcattgtttatttaactagttttaaatagatgagtatttaggttgttctctatttctcatatgaaaattgatttgttcaaattttcctctcttttggggataatttttttttaaatgtattttcccagggaattatttatttcaactaggttttcaaaggtatttgcataaagttgtgcaagtagtctcttaaacttaaaaaaaatgtttcaatgcttatgtctctcttatcatttcttatgtatttcttccttttttgttcttaattaggttagctggtggattacctatgtttttcccaaagaagtatttatttttttccaaagatttattagttcttgtagttgttctaatcattaatctgtcctttaatatttattattttctccctcctgccttcttttggtttatgtttctagatttggaatcaaacattttgttcatttatttttatttttccagtttggtaaaattagttaaggctattgattttcctcttatccctgctttacttgtt

SEQ ID NO: 319039 - DNA, 598 bp, Homo sapiens
cattttaaccacttttaagtgtacacttcagtggcatgaagtacattcacattgttgtgtaaccatcactacagctcacatccagaactttttcatcattccaaactgaaagtccaaacccattaaacaataactcacatttcttctccccttagttctgggtaaccactgttttactttctgtctccatgcatttgagtattctaggtacctcayataagcggaatcataaaatatgtatccttttgtgtttggcttatctcacttgccattacgtcttcaaggttcatccacattgtgtcatatattagaatgtaatttcttttaaggctaatatttcattgggtgtatataccacattttgtttctccatttatctgttgatggacatttgagttgtttccaccttttggctattgtgaataatgctgttatgagcattaatgtacaaatatttgttcaaattcctgctttgaattactcgtgtgtatacccagaagtaaaattgctggattatatggtaattctgtttaattttttgaggaaccaccatactgttttccttagtggctgcataattttacattcccactagcat

SEQ ID NO: 319040 - DNA, 602 bp, Homo sapiens
agacatgtaccatcaatacctactttattgagggttttggcatgacagggtattgagttttatcgaaggccttttctgcatctattgagataatcatgtggtttttgtcattggttttgtttacgtgatggattatgtttattgatttgcatatgttgaaccagtcttgcatcccagggatgaagttgacttgatcgtgacggttaagctttttgatgtgctgttggattctgtttgccagtattttgttgagaattttcacattgatgtgactgtcctttccccattgtatgttattggtaactgtcaaaatgttattaatagcagtaaatccatggatttgtatctgggttctctattttgttacattggtctatgtgtctatttttatgccagtcccatgctgacttggttactatagctttgtagtatattttgaagttggtagtgtgatccttccagtttgtccattttggtcagagttgctttgcctattcagggtcttttgtggttccatataaatttggggattttttttccatttcttyaaagaatttcattggcattttgatgaggagggttttttttatagattattttct

SEQ ID NO: 319041 - DNA, 620 bp, Homo sapiens
aaacataggagtgcagatatctctttccttttgagtatatatccagcagtgagattgctggatcatacggtgactcaatttttatttatttttaggaatctccaactgttctccatagtggttgtactaatttacattcccaccaacagtgtatgggggtttccttttctctacatccttgtcagcatttgttattgcctgccttttggatataagttattttaactggggtgagatgatatctcattgtagttttgatttgcatttctctgatgatcagtgatgttgggcacattttcatacacctgttttccatttgtatgtcttcttttgaaaaatgtctattcaaatctactgcccatatttttctggattactagatttttttcctatagacttgtgtaagctccttatatatcctggttattaatcccttgcctgatgagtagtttgcaaatattttttcccatcctgtyggctgtcttcactttgttgattgtatcctttgctgtgcagaagctttttaacttgatgtgatcccatttgtccatttttgctttggttgcttgtgcttgtggggtattgctcaagaaatttttgcccagaccaatgtcctggag

SEQ ID NO: 319042 - DNA, 598 bp, Homo sapiens
ggagggtgcatggcatttctctgtcttccctgggtatgccccctctccaggaaccctcatgtggtcagctagccagaagctcttgcttctatcttctgaagtttcctttaatttttggtagaattcaccagtgaacacatctaagcctgcttctttctattttgcaaggtcattaattattgactcaatatttttgatagatataggctggttcagattgtctatttctccttgtttgagttttggcaaatattgtctttcaaagtgttcttccatttcatctaggttatcaaatttgtggacctagaattgttcagaatatttcttgattaccctttcaatgtctctgggctctytagtgtcccctttttcatttttgatattagcattttgtctcctcttttttcttagtgacacaggttgaatatttgtcctcatccaaatttcgtgttgagatgtaatccccagtgttggaggtggggcctgatgggaggtgtgtgggtcatgagggtggattcctcacagcttggtgctgtccacaaggcagtgagtgagttctcatgagatctggtaatttaaaagtgtgtggcacctcctc

SEQ ID NO: 319043 - DNA, 598 bp, Homo sapiens
ggagggtgcatggcatttctctgtcttccctgggtatgccccctctccaggaaccctcatgtggtcagctagccagaagctcttgcttctatcttctgaagtttcctttaatttttggtagaattcaccagtgaacacatctaagcctgcttctttctattttgcaaggtcattaattattgactcaatatttttgatagatataggctggttcagattgtctatttctccttgtttgagttttggcaaatattgtctttcaaagtgttcttccatttcatctaggttatcaaatttgtggacctagaattgttcagaatatttcttgattaccctttcaatgtctctgggctctttagtgtcccctttttcatttttgatattagcattttgtctcctcttttttcttagtgacacaggttgaatatttgtcctcatccaaatttcgtgttgagatgtaatccccagtgttggagrtggggcctgatgggaggtgtgtgggtcatgagggtggattcctcacagcttggtgctgtccacaaggcagtgagtgagttctcatgagatctggtaatttaaaagtgtgtggcacctcctc

SEQ ID NO: 319044 - DNA, 579 bp, Homo sapiens
gagaagtaattacaagtggcacattctcctaatggcataaaggaaagaaggtagggggccgggcgcggtggctcacgcctataatcccagcactttgggaggctgaggcaggtggatcacgaggtcaggagatcgagaccatcctgactaacaaggtgaaaccccgtctctactaaaactacaaaaaattagctgggcgtggtggcgggtgcctgtggtcccagctactcaggaggctgaggcaggagaatggcgtgaacscaggaggtggtgcttgcagtaagccaagatggcgccactgcactccagcctgggcgacagatcaagactccgtctcaaaaaaaaaaaaaaaaaaaaggaaagacggtgggttttctgaagtgtttgatggcataaaagctttaaaccccagagtaaagggaaaagaaatgggattatgaggaaaaccaattattaaaaaaagtttttcacctcaccttcagcattattcagtttactttaaaaaaaacttttttatcttttattatggtaaaaaaatatatagttcaccctcttagtcatttttaagtgcacagttca

SEQ ID NO: 319045 - DNA, 528 bp, Homo sapiens
attctaattaagctaaaattgcacacactgtgaaatgcttgctctcttgctctctcatgctctctctctctctctacacacacacacacacacacacacacacacacacacacaattgatccttaaaaatcatttctgtaaactgcctgtgtagcacagtgcttctgaaattctcctgtgtcttcccctgacctatgcccacaatgatagmcaatagaataaaataactgtggccctggtaccctaggtccattaaaatattcataataaattgtctaaacattgataacaaagtggttaaaattggaacctctagagccaaatctcctgggttcaaatcccagctctgccactaactgtaactttgtgtaagtcttttaactgtttttatttcctggtttcttaatgtgtagaaggaggataatgatgagatctacttgggaaagttgtaagagttaaatgaaatactggttttttaaatggttagaacagagactgatgcacataagtattcattattataattca

SEQ ID NO: 319046 - DNA, 573 bp, Homo sapiens
tgaaaaagagagaaaagggatttcatgggcaattactcttcaaattaagaaaaatcatctgtaagcaatgaaactcacaatggggtccaaagtcacccaaacatgcagctagtgctcttaattcagcaaactctttgaagaatattcattggattttttattttgaagataagaaccaaaggcaacccatttagagcatcaggcctaagactttaagacatttagttatgattacagaaagcagcatcacagaacattcagcaaccacgggatttgagagctgcagcagcagcagcataaatgccaaccattgacttctaattaccaggcgcttcttagaagacggcagttggcacagtggctggtgatccagtttttcttcggttttcatatgcagtagtaagttatgattgtcagtgtgtttcagttttctgaattctatcatatctctttttggaagttacttgctcatccaaattcattcaccacttgcctacttaactaagcttccttccaaatttcyctggtaatgacaatccttttttccacttacccatagtcaaagacttgcat

SEQ ID NO: 319047 - DNA, 582 bp, Homo sapiens
tgcctcactctggtggttagtaccagtagttgaytgggatctcagttggggctgtcatctaggacaacggcacatggcttttccaagtggcagtgttaagacaatacttttaatatgacatctggcttcctctagggtgagtgtagaacctgtggaaactacacgggtatttatgacatagccttggaaatcatacaagatcacttctcccatactcgattgagccaagcagttgcaagtcacccaaattcaaagcaatgggacgtagctccccacctctcaatgggagatgtgacaaagaatttgggagcaatattttaaaaccaccacaggtactttatactatgtgagtcttgctctcctctataaaatgggactacattgtctctaagactcctctagggcttaaagtctatggggcacttccctttaataatcttaatttatagatacttacattagtatttgtattccaattcttttctatcataaaataaccgtagtacatagaatttttaaaaatagaaaaacaggcttagtttcaatgcctaaatctatatgtatttccatatttcgagttgt

SEQ ID NO: 319048 - DNA, 582 bp, Homo sapiens
tgcctcactctggtggttagtaccagtagttgactgggatctcagttggggctgtcatctaggacaacggcacatggcttttccaagtggcagtgttaagacaatacttttaatatgacatctggcttcctctarggtgagtgtagaacctgtggaaactacacgggtatttatgacatagccttggaaatcatacaagatcacttctcccatactcgattgagccaagcagttgcaagtcacccaaattcaaagcaatgggacgtagctccccacctctcaatgggagatgtgacaaagaatttgggagcaatattttaaaaccaccacaggtactttatactatgtgagtcttgctctcctctataaaatgggactacattgtctctaagactcctctagggcttaaagtctatggggcacttccctttaataatcttaatttatagatacttacattagtatttgtattccaattcttttctatcataaaataaccgtagtacatagaatttttaaaaatagaaaaacaggcttagtttcaatgcctaaatctatatgtatttccatatttcgagttgt

SEQ ID NO: 319049 - DNA, 582 bp, Homo sapiens
tgcctcactctggtggttagtaccagtagttgactgggatctcagttggggctgtcatctaggacaacggcacatggcttttccaagtggcagtgttaagacaatacttttaatatgacatctggcttcctctagggtgagtgtagaacctgtggaaactacacgggtatttatgacatagccttggaaatcatacaagatcacttctcccatactcgattgagccaagcagttgcaagtcacccaaattcaaagcaatgggacgtagctccccacctctcaatgggagatgtgacaaagaatttgggagcaatattttaaaaccaccacaggtactttatactatgtgagtcttgctctcctctataaaatgggactacattgtctctaagactcctctagggcttaaagtctatggrgcacttccctttaataatcttaatttatagatacttacattagtatttgtattccaattcttttctatcataaaataaccgtagtacatagaatttttaaaaatagaaaaacaggcttagtttcaatgcctaaatctatatgtatttccatatttcgagttgt

SEQ ID NO: 319050 - DNA, 557 bp, Homo sapiens
aatttggttatccatatttgaaaaatgattctataaattctcttgataataaaaaggaaaaaatcttcccattgacttttttcttaacaaagaataaaatacataaaatatttctactaaacaaayctcaaatctctaaatgaggatacaggatttaaaatactccgtaatttggtcagaatagcatagaaagttttaacattcataaaaatgcaaatgtacattatatatacttatgtttattaaatatattaacactttactgaagtgattttatatttagtttttcaaaacttagttcttaagtaactgaggacatgaagaaaaattctcttaatagttaagagatttttagatccgagtcattttccctactcaaatttgtaagaagatacacagtagaaactaatttctaagacatgatctgatagattctggtgtgtagactctaagagaaaccatgcaaaatttgttagattacacttaaaacataattctcttgagttatgtaactcataagaaaagcaaaactacaagactccagtgcattataaact

SEQ ID NO: 319051 - DNA, 596 bp, Homo sapiens
aaaataacttctagctcattaggcttctaaacctgacctgaactaatgtgaggctacttttaagtctttatttaccacacttacggtgcatatttttatgttatataccagaaatattagtatgactgattatgggagtgttacctacttcgtgctgcagggtatcacatgttgggactcagaaaatgataccctgaaatatactgctttgaacttccaactgagaggacctgaggagcagcaaatgctgagttccttatttgactaagagaatttccttcagaaggcattaaattgtcttgccccaccccacccttcatccccataatttcatcaaacagatgagactaactcataggaaagaarattgaagctgactccacacttggagctcatacaaactttttcccaggctattgtctgttcttcaagcccattcacctcccctaaaaatcatgtattcttcctcaaaaattgtctattatcttccacttccctttcccccatgaaaagtgttgaggcttattctgagccaatatgagtgaccatggcctgagaacccaatatgagtgaccatggcctgagaaccatctcaa

SEQ ID NO: 319052 - DNA, 557 bp, Homo sapiens
aatttggttatccatatttgaaaaatgattctataaattctcttgataataaaaaggaaaaaatcttcccattgacttttttcttaacaaagaataaaatacataaaatatttctactaaacaaacctcaaatctctaaatgaggatacaggatttaaaatactccgtaatttggtcagaatagcatagaaagttttaacattcataaaaatgcaaatgtacattatatatacttatgtttattaaatatattaacrctttactgaagtgattttatatttagtttttcaaaacttagttcttaagtaactgaggacatgaagaaaaattctcttaatagttaagagatttttagatccgagtcattttccctactcaaatttgtaagaagatacacagtagaaactaatttctaagacatgatctgatagattctggtgtgtagactctaagagaaaccatgcaaaatttgttagattacacttaaaacataattctcttgagttatgtaactcataagaaaagcaaaactacaagactccagtgcattataaact

SEQ ID NO: 319053 - DNA, 557 bp, Homo sapiens
aatttggttatccatatttgaaaaatgattctataaattctcttgataataaaaaggaaaaaatcttcccattgacttttttcttaacaaagaataaaatacataaaatatttctactaaacaaacctcaaatctctaaatgaggatacaggatttaaaatactccgtaatttggtcagaatagcatagaaagttttaacattcataaaaatgcaaatgtacattatatatacttatgtttattaaatatattaacactttactgaagtgattttatatttagtttttcaaaacttagttcttaagtaactgaggacatgaagaaaaattctcttaatagttaagagatttttagatccgagtcattttccctactcaaatttgtaagaagatacacagtagaaactaatttctaagacatgatctgatagattctggtgtgtagactctaagagaaaccatgcaaaatttgttagattacacttaaaacataattctcttgagttatgtaactcataagaaaagcraaactacaagactccagtgcattataaact

SEQ ID NO: 319054 - DNA, 553 bp, Homo sapiens
ggttgaaagagttaagttttgtctaaagacttgaagtcagtagaaacaaaaatgcttgagtaaagataaggggggttgtgagggccaaggtttttggtatgtagatgaagcttcatagatcacagtcttcagagagaatagaagataaatgtctcttttcagactttaaaggtatcagactctcagttaatctctcctagatccaagaaaagcctagaaagagaaggcctgactccattaatggagattctctacagatgcaaatttcccccacaaaagatggctttgcagagccatttcaaaayatgttaaagaaaaataaagtaaaatctgtttatttccttcagggtctgctatctgtcatgtgccatgacatgctataccagtcaggttggaattggtgtcttattgccatagtctgtttactcagtcttatgatctctattttaatgttaatgctggtcagttgcgcctaaactgcaaagggtgggagtatgatgaggcatatcagacctccattcccatcatagctgggaattcagtttttcaggtt

SEQ ID NO: 319055 - DNA, 541 bp, Homo sapiens
atctgggacttcaggttttaaacacgagctggctgaawcttcttgcttggtaccctgcaataaatgtatacatgggagacacccagggacaaatgaggaactctcaaagagatagtttagaattcaagcataaatactatcttcagctaaagacaaaacagagaatggtgtcagggaggacgaggtaactaggaaaagtacagtaaagaagagtaagttttgtaatgcagatgtaagtcaataccttccccactgctaagagcctctagtgatttacccatctttctctttcttatacagagagggagacacacttaaaaaattgagatttactttataaatgcaaatttcccatagaaaagggtttacttctcctttattttcagagcttctcctgtgtctgctgtttctcaaaataattctgctaaagaggcatattttggggtgtcatattctggtctcctatatcattcacgctaaatcatggggcaggatgattttccgttaaagctgaataccagggaaggctttttaaaatttc

SEQ ID NO: 319056 - DNA, 616 bp, Homo sapiens
caccaagtctagttaaaattttccagttgaagggagaccaaggaactaagatgagataagatgttcatggggctgagggacaatgtgctgcagacttgaaggaaccatgcagaatgaaggtaagtcatcatccagggaacagccagcccccactggagtggcactttatactgtcagcccatgggaacaccacggatactaagtcagaaactctaaaacttctggatccattcaagtgagaatcatgtcgcttgtgccaaagaatgacatcaatagtctttcatactagcaactggtaagaagcgcccatccatagcagcctactgcctrcttaatgttaatcagtactggctccagtggcccaagataattttctcaggccttgactgttatgaattaacctaactcaattttgccagtcaaaattatcagattcatttggttatcagtagtttcaaatgcttagaagcagactaaggatacaagactcctcccaaaaacctccccagcaggcttcactgaaaacaatctcagattgcaaagaaaggagtcacacaactgagacagagcagggacccctcttaaaggcctgcagcccacccctcaccaccagtgc

SEQ ID NO: 319057 - DNA, 545 bp, Homo sapiens
gcagtaaaaacatatctatcccccaggttctgtagttaattgactgcgaaaatgtgtgtgcgccaccgacactgggtgcctggaagaagacttggctacttgttttgtcaataagtcccacatatatttggttaacttagttgtttgtgtctagaattcaccaatattgagtcaattttagcttagcttgttgagctctgagaggctctagctgtcttctccctggagactcagaattctcattgctatccacgatagaacrtctctcaatgtataatgtgatagaaatatagcctgatttagaggaaagctggaattttattaaagtaaataaagcatacaatataaagatttacgtccagggtctcttcagagatccttcattaaatgcctatatgaaacccgatagcttttttccattcaaagtatacaatactagttgcaaaatgttttgtgggttgtgttctgcatggtaaattttaatccttgttttgccagtctaggtaaatataattttttattagccattgattttttagaacagc

SEQ ID NO: 319058 - DNA, 545 bp, Homo sapiens
gcagtaaaaacatatctatcccccaggttctgtagttaattgactgcgaaaatgtgtgtgcgccaccgacactgggtgcctggaagaagacttggctacttgttttgtcaataagtcccacatatatttggttaacttagttgtttgtgtctagaattcaccaatattgagtcaattttagcttagcttgttgagctctgagaggctctagctgtcttctccctggagactcagaattctcattgctatccacgatagaacgtctctcaatrtataatgtgatagaaatatagcctgatttagaggaaagctggaattttattaaagtaaataaagcatacaatataaagatttacgtccagggtctcttcagagatccttcattaaatgcctatatgaaacccgatagcttttttccattcaaagtatacaatactagttgcaaaatgttttgtgggttgtgttctgcatggtaaattttaatccttgttttgccagtctaggtaaatataattttttattagccattgattttttagaacagc

SEQ ID NO: 319059 - DNA, 503 bp, Homo sapiens
gcacaagtccacctgcataagagcattttgtgagtctgttatatctgccgacattagcttggccatagtgaatctcataactaagcccaaccttaaaagatattggagactatgctacagttagccaaatccagccatatgcacaaayccaatggcagtcgagcagggaaatgttacttctaaggaagtgaagtagtgaggatacatatgcgtatttctgaaggacctaatctaccacaaataaagatggtcacttttaaaaacaggtttaggcatagttcagcaatgtacaaaatgtggaataaaacccagtgacaattcaaaattaggctttagcttaccacagtgttactgtgggaacgtgtctcagttcaattcagcaaatgctttgtgccaagcactatgggaaatatcaaaggtgaaaatgacatagcaccttccatcaagctttcaacttgaggaaaagataaatgtttctaagagttactgtaataaaatgtcca

SEQ ID NO: 319060 - DNA, 503 bp, Homo sapiens
gcacaagtccacctgcataagagcattttgtgagtctgttatatctgccgacattagcttggccatagtgaatctcataactaagcccaaccttaaaagatattggagactatgctacagttagccaaatccagccatatgcacaaatccartggcagtcgagcagggaaatgttacttctaaggaagtgaagtagtgaggatacatatgcgtatttctgaaggacctaatctaccacaaataaagatggtcacttttaaaaacaggtttaggcatagttcagcaatgtacaaaatgtggaataaaacccagtgacaattcaaaattaggctttagcttaccacagtgttactgtgggaacgtgtctcagttcaattcagcaaatgctttgtgccaagcactatgggaaatatcaaaggtgaaaatgacatagcaccttccatcaagctttcaacttgaggaaaagataaatgtttctaagagttactgtaataaaatgtcca

SEQ ID NO: 319061 - DNA, 503 bp, Homo sapiens
gcacaagtccacctgcataagagcattttgtgagtctgttatatctgccgacattagcttggccatagtgaatctcataactaagcccaaccttaaaagatattggagactatgctacagttagccaaatccagccatatgcacaaatccaatggcagtcgagcagggaaatgttacttctaaggaagtgaagtagtgaggatacatatgcgtatttctgaagracctaatctaccacaaataaagatggtcacttttaaaaacaggtttaggcatagttcagcaatgtacaaaatgtggaataaaacccagtgacaattcaaaattaggctttagcttaccacagtgttactgtgggaacgtgtctcagttcaattcagcaaatgctttgtgccaagcactatgggaaatatcaaaggtgaaaatgacatagcaccttccatcaagctttcaacttgaggaaaagataaatgtttctaagagttactgtaataaaatgtcca

SEQ ID NO: 319062 - DNA, 503 bp, Homo sapiens
gcacaagtccacctgcataagagcattttgtgagtctgttatatctgccgacattagcttggccatagtgaatctcataactaagcccaaccttaaaagatattggagactatgctacagttagccaaatccagccatatgcacaaatccaatggcagtcgagcagggaaatgttacttctaaggaagtgaagtagtgaggatacatatgcgtatttctgaaggacctaatctaccacaaataaagatggtcacttttaaaaacaggtttaggcatagttcagcaatgtacaaaatgtggaataaaaccyagtgacaattcaaaattaggctttagcttaccacagtgttactgtgggaacgtgtctcagttcaattcagcaaatgctttgtgccaagcactatgggaaatatcaaaggtgaaaatgacatagcaccttccatcaagctttcaacttgaggaaaagataaatgtttctaagagttactgtaataaaatgtcca

SEQ ID NO: 319063 - DNA, 553 bp, Homo sapiens
actatcaataatcacaccagaacaacaacataaagaaataagtacttttgtaagaaacsagcatctccagttatgtgctcttctgattgtaattttagcgccttctgtcccattcattaaaatatttcagagcaagagtgagaggaatattatatggggataatctgcagtattttctaatttactttgatgaagaaggagaaagaggaggaggagtcacttgtaaattcttgtactgtaacctgaatgataataagttgcctacacaacacacagctgattgaatgacagcaaaatctgacctttgtctaaagtacaaaacctcctgcccaaagcactcttttccattggccctcatcattggctgtagaataccctgatttaaatctccatcacagtttattcttcagttatgacagatagcccatttcattttatatcatagttgttttcatgttttattgccggtccctgagtataagtctaattatcctcagtagagtgcctcgggagctcgtgtcagctgttcagctggggcgaatgaaaccactca

SEQ ID NO: 319064 - DNA, 552 bp, Homo sapiens
ttttattgccggtccctgagtataagtctaattatcctcagtagagtgcctcgggagctcgtgtcagctgttcagctggggcgaatgaaaccactcagtagaggacttctgcctgccttcaggtgcttctcaggtgttgcctagcagattgaaaatgtgttgctaggtaaaaaccttccttctctattatttcaaggaccacaaacacagacacacaaaatcagggaagcacagttggaatgtttgaaaactgttctgttctctaagatcaaagtaggtcccattagtctaaagtgctggcttcttgaagaaatgtcctaagattcacctgttgctaaaaatagkcatgagttagtcagtacattgctggattaaagatagtgacagctaattagtcattgttcaaacaatagaagagttgaaaagagaaagtgagagacactccagcattctggccagtcttcttttcttctgattttagagagaagaccaagagtgtaatgggaggtcactgtgttcctagtggcctatgattgaggctttcagacctta

SEQ ID NO: 319065 - DNA, 600 bp, Homo sapiens
aattggttttctttgaaatactccatgttctattttatgcatttaaaaaacatcacagtgagaaggggtccacaggcttccctacttcaagaagtccatggcacagacacacaaaaagggaagctcccttggcagagtgaaggcatttgggctctagtctcttttccaggacttgctagagcaggaattttgagattgatgggtttctctaggaagttggtaactagtgccaatgggagatctgcctggcttgatytgttgtgctgcacatggacaactgtggatgctgtcggagcttctgtggagtgggaagggagctccgcagtgtagaatttgaggagaagccctcctttgaaatcttgtaacaataagaaagataactcatatacgatgtgctttgttgggttaggcaccggacaatttattttgtaaacatgatctactttatttctccaataaccctatgtatgagttagattctcttacccccgttttacagaggaggatactgaaccttggttgcttctacaacatttttgtctacttagtaaataagtattcttgttaagtaaaagttgttcctagtaagtactcaataaa

SEQ ID NO: 319066 - DNA, 390 bp, Homo sapiens
tgttcttgacattggaaccaactatatcctctaattaggcaacaaaaggcatatatatgtatatttttaaaagtagataagcaaatataaattayttctctaaaagttaacatgtttttaaaaaaaagcataatttgtaatggcaaaattgatattttccacaacaggtaacatgcaggagcgatttagaatacaaaaggactttccaaaggcaagtcatccagatgtccaaatggtggtgaatacagcctctggagtatacgtgggtggaaataaaagtcaatttcacagtggttagccacctccctgagccttttttttcccctggtgggacactgagacactcgcaaagcagcaaaaggtctcagtggacccttcttgccattactc

SEQ ID NO: 319067 - DNA, 580 bp, Homo sapiens
gaatttgagacagcctgtgtccatactagattccactctgctgattcataccagaatgaggttctagagtacaaatattcacaaccagaaagcacatctggcctcagtgcagctttgtttactttgctacttaggaaaaaaaaaaatcttgaaaagcgagttgcttttgccttaattcagttcaaatacattctaagcttccttcaactgagtcacagtgtcctctatcatgcaaaatctttattatttcctyggccagacatagggccatattgatgaattccaagtgtgctttctaaccaaggctggttcacaacaaaaagctgcttcagctctgagtcatcacctcaaataactgatttctcttctcaggaatgagactagcaactttaatccataattttcttcctcttctaacaacttttctcaaccatatttccacacttattttttcttctgcatttagaccagaaagtaaatctggtttgtttcttttgaaacaaaaatgcacagctggaaagccagctattttgaggcgtgagtgcacagttccaaggcagcatacctaaaatcccccaga

SEQ ID NO: 319068 - DNA, 580 bp, Homo sapiens
gaatttgagacagcctgtgtccatactagattccactctgctgattcataccagaatgaggttctagagtacaaatattcacaaccagaaagcacatctggcctcagtgcagctttgtttactttgctacttaggaaaaaaaaaaatcttgaaaagcgagttgcttttgccttaattcagttcaaatacattctaagcttccttcaactgagtcacagtgtcctctatcatgcaaaatctttattatttccttggccagacatagggccatattgatgaattccaagtgtgctttctaaccaaggctggttcacaacaaaargctgcttcagctctgagtcatcacctcaaataactgatttctcttctcaggaatgagactagcaactttaatccataattttcttcctcttctaacaacttttctcaaccatatttccacacttattttttcttctgcatttagaccagaaagtaaatctggtttgtttcttttgaaacaaaaatgcacagctggaaagccagctattttgaggcgtgagtgcacagttccaaggcagcatacctaaaatcccccaga

SEQ ID NO: 319069 - DNA, 580 bp, Homo sapiens
atctttaacatagttgttttaaagtctttgtctagtagatccattttgaggtatggtttttactgtggttttttttctttgagtgagccgttatttcctatttctttatttgtcttataattttttgttgtkgttgaaaattggccatttgtaagtaataacatgctaactctggaaatcagattttcttctttccctgggatttaagtatttttgttattatggtttttttagttgtcatttttgctatagactgtatctttgccaaaggtcaacctccaatgtgaacttaaagtcttctcagatcttttctgaacttctgtgtttccctgggcatatatagtgattttctaatttctttcatatatgtgtttgcttttgaatgccatagtctttaatatctggtttccaaaaaaggaaaaaaataaaaatgaaggggaggggacaccagctttatacatctcctggaagtcacttcagctggagaagaggcttgcacaattggggaaggtacaacaacaatgctatcacctctgtgtctgcacccctgtgatcagaagtggcaatcagcaactaagca

SEQ ID NO: 319070 - DNA, 617 bp, Homo sapiens
catttcctacatggaaggaagtgggtggggagagttagagtaacaattttaaacttcatagctgactttggggaaaagagattctggtttctatgatttgtcttggaagagaaygaggctgagagataggaaggcagaaggtcagagagaaactttgattctgagactgcttctgatactttaatttgggggatatcattttctgagccccaacagatgcatatgtaagacatataatctttttacttaatcacttctatattgttgccttataaaattttgaatgttctatatttaagttattaatttcatattaacattttaagaaaccacatttaacatcaattagtgaaaatatataacataaatagtttaatttcttacaatacttgtatatgaatggtttaattttctaacacaatatctgtatattaacacaattacctgtctcataaaacaaattaacacgattacgtgtctcataaaacaaaaccacaaggtatggccacattaacagctttttcttggaccattgtgccaacaatggagacatttgttgcagaaagcatgactcagcgtagtccataggggagctatagtgaaaaaatattccaaca

SEQ ID NO: 319071 - DNA, 617 bp, Homo sapiens
catttcctacatggaaggaagtgggtggggagagttagagtaacaattttaaacttcatagctgactttggggaaaagagattctggtttctatgatttgtcttggaagagaatgaggctgagagataggaaggcagaaggtcagagagaaactttgattctgagactgcttctgatactttaatttgggggatatcattttctgagccccaacagatgcatatgtaagacatataatctttttacttaatcacttctatattgttgccttataaaattttgaatgttctatatttaagttattaatttcatattaacattttaagaaaccacatttaacatcaattagtgaaaatatataacataaatagtttaatttcttacaatacttgtatatgaayggtttaattttctaacacaatatctgtatattaacacaattacctgtctcataaaacaaattaacacgattacgtgtctcataaaacaaaaccacaaggtatggccacattaacagctttttcttggaccattgtgccaacaatggagacatttgttgcagaaagcatgactcagcgtagtccataggggagctatagtgaaaaaatattccaaca

SEQ ID NO: 319072 - DNA, 552 bp, Homo sapiens
ttctctattcctcatactagcaagctgttggctctcttcttgactcttgtcatattccatgcttcccttttctacccagataccacatccatttggtgcttttaattgatttacatgaatggtgagatgaatatgccttaggaaattgtctcctggtcatttcttgtgacaaagtgcacgagattttctgcctgaacttcatgctacctsttttggaatctgagagattctgtagcttcttcttagttatcgactgggttctaaatagttaatgtcatagtgcctgcaccagggtatttcaaccttagcactgctgacttatttttgcattggataattgtgtgttgggagggagggaagccgtcctgtgcactgtgggatgtttagcagtatccctcgcctccacccactagatgccagtagcacccaccccacagctgtgacaaccaaaaatttctccagacattgccaaatgtcccctgaaagacaaagttcctctcagtggagaatcactgagctagatgatgtggtcctactgtgggccttagttat

SEQ ID NO: 319073 - DNA, 552 bp, Homo sapiens
ttctctattcctcatactagcaagctgttggctctcttcttgactcttgtcatattccatgcttcccttttctacccagataccacatccatttggtgcttttaattgatttacatgaatggtgagatgaatatgccttaggaaattgtctcctggtcatttcttgtgacaaagtgcacgagattttctgcctgaacttcatgctacctgttttggaatctgagagattctgtagcttcttcttagttatcgactgggttctaaatagttaatgtcatagtgcctgcaccagggtatttcaaccttagcactgctgacttatttttgcattggataattgtgtgttgggagggagggaagccgtcctgtgcactgtgggatgtttagcrgtatccctcgcctccacccactagatgccagtagcacccaccccacagctgtgacaaccaaaaatttctccagacattgccaaatgtcccctgaaagacaaagttcctctcagtggagaatcactgagctagatgatgtggtcctactgtgggccttagttat

SEQ ID NO: 319074 - DNA, 634 bp, Homo sapiens
  misc_feature (1)...(634): n = A,T,C or G
tatccatattaccaatggcagtcatcccgagaaatccaagcagccacacttactctccttcagtgggtagatccactatacttgtcatgtagattagctgttttcactggagacttgcatcccatcatccttctgcacacaagtgaggtggaccatacctctttttttttttttttttttnttagacgcagtcttgctctgtcgcccaggctggagaacagtggcatgatcttggctcactgcaagctctgcctcccgggttcacaccattctctggcctcagcctcctgagtagctgggactacaggcgcctgctgccacgcccggctaatttttttgtatttttagtagagacggggtttcaccatgttagccaggatggtctcgatctcctgacctcatgatccacccgcctcggcttcccaaagtgttgggattacaggcgtgagycaccgcgcccggcaggaccatacctcttgagcaggcttctctgcaggtgcttggtagctggctcgatgggtcagatcataagcctttcatgtcacagaagtggccctgatccatgatcccacaagcacacagactcagagcctacagagaagatgactctggagatctggttccctttactgtc

SEQ ID NO: 319075 - DNA, 528 bp, Homo sapiens
ctgcctcttggcctccaacgttgaagaaattggtgacactgccatggagctgtatatgaaatggctcaaatctggagaaactgaagaagtatccagtgggagctgcaggagctgttgatccatgccaaggaggtgagctagcagatgtaggacacgatgtgtgaggacacagcacctgaccctctaccaaccttcccagcatacatatggctgctgcatcatttctgccttccaaaccttgcacaaattatgctcttggcctatcagaatccaaaaccattcagggaaaggaattcttaaaacatcaatccagtttagctaaattgacaytctatgaaaccaccacacatatctacagatatcaaaaccttataccctttatcttaggtgagcaagaaattagagtgccttcatgttctataactgacttcttcctgctcctgagccccacttgcatagtgctgaaagaaggaaggacataagcttaacagttaaatgcatattccttggtttaaacagtttttgggg

SEQ ID NO: 319076 - DNA, 528 bp, Homo sapiens
ctgcctcttggcctccaacgttgaagaaattggtgacactgccatggagctgtatatgaaatggctcaaatctggagaaactgaagaagtatccagtgggagctgcaggagctgttgatccatgccaaggaggtgagctagcagatgtaggacacgatgtgtgaggacacagcacctgaccctctaccaaccttcccagcatacatatggctgctgcatcatttctgccttccaaaccttgcacaaattatgctcttggcctatcagaatccaaaaccattcagggaaaggaattcttaaaacatcaatccagtttagctaaattgacatwctatgaaaccaccacacatatctacagatatcaaaaccttataccctttatcttaggtgagcaagaaattagagtgccttcatgttctataactgacttcttcctgctcctgagccccacttgcatagtgctgaaagaaggaaggacataagcttaacagttaaatgcatattccttggtttaaacagtttttgggg

SEQ ID NO: 319077 - DNA, 528 bp, Homo sapiens
ctgcctcttggcctccaacgttgaagaaattggtgacactgccatggagctgtatatgaaatggctcaaatctggagaaactgaagaagtatccagtgggagctgcaggagctgttgatccatgccaaggaggtgagctagcagatgtaggacacgatgtgtgaggacacagcacctgaccctctaccaaccttcccagcatacatatggctgctgcatcatttctgccttccaaaccttgcacaaattatgctcttggcctatcagaatccaaaaccattcagggaaaggaattcttaaaacatcaatccagtttagctaaattgacattctatgaaaccaccacacatatctacagatatcaaaaccttataccctttatcttaggtgagcaagaaattagagtgccttcatgttctataactgacttcttcctgctcctgagccccacttgcatagtgctgaaagamggaaggacataagcttaacagttaaatgcatattccttggtttaaacagtttttgggg

SEQ ID NO: 319078 - DNA, 555 bp, Homo sapiens
ttgctgcttctttatgtaacctatttttgacttcataaagttaaatttttgtttatttctcagttattggaattttttgtgtagatgcgcttcactaatttttctgttggtatttcaatgattttcttagagatttataacatgcatgtttattactcactttttcactttgttgttaatttgcagaagttttaaatttaatgcaggcaaacctactgacatttttctctattttcgtcagatagatttttagaattttgatatgtttttattatatagaacttaygtaggcaaatggaaattggttaaaacttaaatggattttgtttccagtatactatgtaggtaattttcctaacaccatttactgaataacctgttcctttcccaattttcgtgctggattgggactagataatttgagaaggcttggctcagtgttaactcttgcagtatttgtgtggaagtcacctatcttccctgtcaatttcctccctccattccttctcattcaccctaggttctgtcctggatcttgtaagctagggtatcttc

SEQ ID NO: 319079 - DNA, 536 bp, Homo sapiens
tgaagttgcttataagcttgaraagctattgggctgagatgatggagatttctggatataggatcatgtcatctgcaaacaaagacagtttgtctttctctcttcctatttgaatacccttaactttttactcttgactgattgtatactttacatacttaaagccatttgtattaagtttcattccataaacgtttaaaaattatttagtaaaaaaaaaaactcctagtgataaggctatttttttcactctctaattttaataattagactcaaacactatgtctgtccaattttcttcattctggtattctacattaggtaaacatttaaaattctattatctgctatattatgctttatcagggacactggtttgattttctttattttaggaagcactgtcacctccttctttaaaacatttttactattttaaaatttgcactgtatatttttctaagctgtgtggttaacaaagcagtacaaattaatttgtaaagtaccaacgggttatataaacatttgaacacaga

SEQ ID NO: 319080 - DNA, 536 bp, Homo sapiens
tgaagttgcttataagcttgagaagctattgggctgagatgatggagatttctggatataggatcatgtcatctgcaaacaaagacagtttgtctttctctcttcctatttgaatacccttaactttttactcttgactgattgtatactttacatacttaaagccatttgtattaagtttcattccataaacrtttaaaaattatttagtaaaaaaaaaaactcctagtgataaggctatttttttcactctctaattttaataattagactcaaacactatgtctgtccaattttcttcattctggtattctacattaggtaaacatttaaaattctattatctgctatattatgctttatcagggacactggtttgattttctttattttaggaagcactgtcacctccttctttaaaacatttttactattttaaaatttgcactgtatatttttctaagctgtgtggttaacaaagcagtacaaattaatttgtaaagtaccaacgggttatataaacatttgaacacaga

SEQ ID NO: 319081 - DNA, 536 bp, Homo sapiens
tgaagttgcttataagcttgagaagctattgggctgagatgatggagatttctggatataggatcatgtcatctgcaaacaaagacagtttgtctttctctcttcctatttgaatacccttaactttttactcttgactgattgtatactttacatacttaaagccatttgtattaagtttcattccataaacgtttaaaaattatttagtaaaaaaaaaaactcctagtgataaggctatttttttcactctctaattttaataattagactcaaacactatgtctgtccaattttcttcattctggtattctacattaggtaaacatttaaaattctattatctgctatattatgctttatcagggacactggtttgattttctttattttaggaagcactgtcacctccttctttaaaacatttttactattttaaaatttgcactgtatatttttctaagctgtgtggttracaaagcagtacaaattaatttgtaaagtaccaacgggttatataaacatttgaacacaga

SEQ ID NO: 319082 - DNA, 394 bp, Homo sapiens
aagaattctatagggaatagtagttaagccttcacttcactatgaaccagtgaagtttaggtttatatccttaaamattagtatgtttaatcttaaatattaacaggaactacttgtgatttattcaatttaaggagtatgtagagagggcgagacaacatgtaaatttcaaaattactgagatgatttatttaggaatgtttgtgaggctgattataaacataattttaaaataaaattttagaaatgaagaatataaatgcctgtctgttaaaaagtaaattattatactaaaatgtaagaagcaatgtctccttttcaaaagtaaaggcatgagtgtggtaagatataacatatgaaaaatgtgaaaataaatgcaaaacccacaggtcac

SEQ ID NO: 319083 - DNA, 634 bp, Homo sapiens
  misc_feature (1)...(634): n = A,T,C or G
gtttgtgaggctgattataaacataattttaaaataaaattttagaaatgaagaatataaatgcctgtctgttaaaaagtaaattattatactaaaatgtaagaagcaatgtctccttttcaaaagtaaaggcatgartgtggtaagatataacatatgaaaaatgtgaaaataaatgcaaaacccacaggtcacgggaaaagagaaaaaggttagtaagtagggcaacagaatatatttacaagtagataataatgatattaatattttgattttattataattatttgtggaaactgaagtattattcaatggtgacacagagtgtgtcacagatcaatgcacccatcaaaatactcttctgcttgagaaaaagggacggtaagacctcatttcaaaaggttttctgttaaaaattacttcagacacggttattagattagactctaaactcaagctgtacactgccagctgtaatatacacagaacaattaaatttgggagattttatgagtcaacggacagaaagtctacactattaaaactattctaggggattgcttttctgaacgctaagtaatttagtgtttaccaaaagaagcatagaaactcatatttaatatgaatattgaan

SEQ ID NO: 319084 - DNA, 501 bp, Homo sapiens
  misc_feature (1)...(501): n = A,T,C or G
tatacaatacttttaatatttcttggtgtaatatggctaccttgttcctgtcattatcttttatatgaaagaaaaagagaaatacctttttttctctttgttgtgaaaacctggtgagaactctttgtatgttttaactgtattgttgtattcgggggtgataaagtgagcacctatatgctagtaaaattgggttatgttaatgaaattttatgtccctgccatctgccatctctgtccttttgacattttattaactggttaagataatattactttttgttgccaaaaatggttaagttacttttatcagtgagtttatttccaatggattagtgaagctataaataggaatttggaaggtttacttgactccactattgtttttaaaaattctgttcactctaggctatataatcactastgctatctctctgaatacttatataaactatcagaatggaggcagattttctatattaaattntaaataaaggttta

SEQ ID NO: 319085 - DNA, 628 bp, Homo sapiens
acagaggttatgtatcctttcttttattctcttcattgcagaatgtgtcatggtgtttagtataaatagactatggaaatctatcccctatgtctgttaggaagtcatttgatggtattggttcaaagaggtcctctaaaaagtcttgagagaaagacggagagagacaaaaggcttgatggattaccctctggacaggagagttccttaagaagaactagggtgttcaagcattgttttctactgcaggcttgttagaaaagatcttgcagtaatatagtgggtgttggaagtactaggccagtttggagcctgtattagtccattctcacactgctataaagaactgccctagactggggaggtctcaggaaacttacaacaatgaccaaaggtaaaagggaaggaaggtaccttcttcacaaggcagcaggagggagaataaatgcaggaggaactaccaaacacttataaaaccatcagatcctgtgagaactcactcactatcacgaraaagcatgggggaaccacccccgtgattcagttaccttcacctggtctctcccttgacgtggggattatgggaattacaattcaggatgagattttgggtggggacacagccaaa

SEQ ID NO: 319086 - DNA, 590 bp, Homo sapiens
atgtaaatgctcctggaaccttggtatggcaacatgaatattagactctgattcaaaaatttaggtaataaatgaagcatcaaattgctagattaaaagtgggcaataaagtaaattaatacttaatgttggatcagaaatcctaccaagatactcatgcatgtgtgcacacacataaccacataaagattttaagagatttttaaaaagagcattaaagaatatttcaaatgtattatttttactacagatgacttgtggtgatgattaactatcattttcttctctccttctaccagctactatggaaaaacaaattacttgctatataaaatacaggttatcagcaatattgctaattgatggtgtagctgccaaattccaagtcacattctgacaaagaatatgacctaatgttactcaataacatttcatcaatcacaagccagaaaataaccaacagtcagtattttctttggatcagtaatgcaacctaatagtggcagttaacattaaattaaaggccagtaaccagattaaaaagtcttagtttgtgatttttttwaactaaaaatggatatgtattaaat

SEQ ID NO: 319087 - DNA, 560 bp, Homo sapiens
ttaacacctgcatcctttcctgaagctatgaggctgcctccatccacagattctactgttaccctactcgatttaatgatttgtaatcatgaattaaactaacttctaggaggacagggacactgaataaatctacagtgtcacttcactaaggcaaggtggtaatgtccatttacactctttttaaaatgtatttgttatttttatagatttaggggttacaaatgcagtttttttaygtggatacattgcatcatggtgaagtctgggcttttaggtaaacatgacctgaataagatgcattgtacccactaagtaattatcagccctcaatccacttccctcctcccacccttccacatctttcacatctgttattccactctctatgtccatgtgtgcacattgtttggctcccacttttaaatgagaatatgtggtatttgactttcagtgtctgagtgatttcacctaaggtaatggcctctagttccatctatgttgcgcaaaacacacaatttcattcttgttttttatggtggcacagtattctatggtgt

SEQ ID NO: 319088 - DNA, 572 bp, Homo sapiens
atctacgtggactattttctggaaatacacaaactaccaaaaccgattgaagaaaaaatcgaaactctgaatagttataaaaagtaaaaagattaaattcatcatcaaaacatttactccaaagtaaagcccaggcccaagtggcttgactggtgaaatctactaaacatttaaataacaattaatagcaatctttaacaaattcttcaaaagaaacagaagaggaagaaatatatcctaaatcatactgtgcagttagtattactccaaaaccacacaaagacatcacgagaaaacagaactacaggtcaatrtatcttatgacaaaaatactagcaaaccaaataaaatactagcaataaaataccagcaaaccaaatccagcaacataaaaaggattatacaacctaaccaagtcagatactcccttttggaatggaagtatttatccaatgcctgtaaccccattgcatcttgggagtaactaacttagtttttttatttcacaggctcatcagtggaaagcactagccttctctcagatgagactttggacttctgagttaatgatg

SEQ ID NO: 319089 - DNA, 580 bp, Homo sapiens
caacaaaataaatagaccacttgggaaaaaatcctagctaggttgactcccaagtatctagcagagtgcagctactgagcaaataaatgactattaagtgaataagtaaatgaatgggtaaaaacattgcagaaggtagtggatttccctgtagcttgtgtaccctcaacttcccccttcccaaccttgtctcccttcctggtccttcggtgacagtctctttgctggacatgctgccgcagatgaagctatcgctagatgtgatttcaggacttctgggaggagagctctctgggtgtgttgaggtggcaagggctcccaagtcatgcccatcacagcaaggctgcctgtaaccttagggayctatagtcatattctacatataaatcaatttacaaggagcagctagcttgatatcagatgtcaagagagcagcgcacattgaatcatcctttaacctctcagagcctctgctaaacctgaggatcattacaatcacttccagccaatatatagaatgagtttctaactgagacttaagattgcatggatttgataattacaagtaagcacagagtgg

SEQ ID NO: 319090 - DNA, 603 bp, Homo sapiens
ctggtgtgaccatgaacggcaacataatgggtccttgctgtgaagagaatgtcttatatcttgactgtgtcgatgtcagtaccctggtttgatactgtactgtggttttgcaagatgttaccattggtaggaaaatgggtaaagggcacaagggatttttctctatattatttcttaaaactgcatatgaatgcacagtaatatcaaaattaaaagtytaatttaaaaaataactagttaaatgaacatagatgaacccctaactcacagtctcaaaagaagaagcaccccccaaatttttaaacagtatatatactgtactgtatagtaaaactatgaggaaaagcaaggaattaaggtgaattttaggatagtactaagagggaagaggtagaaaaggaaatgtcatcaaggtgaaacacccagaaggcctcaaaggtaccaaacaaaatattctgacttaaagtggagaggtgagaaatgcagacattcatttaaacattattctttaaactacacctacatgtttttatattttgctttgtatgtatatttaaaaataaaaagataaattttaactctccctaaaacataaagacccag

SEQ ID NO: 319091 - DNA, 556 bp, Homo sapiens
agtgggactgctgtgcaatcctgtgccaggtgagcagcttgtcctgccctcagcctgcctttccctatgtgtatgtctataacaggcctgttcattacrctctgtgcaccagctccatatttcttatttacttcactgtttacatgcctcaaatagctcatttttcctgagctcttgcttagccaagttccctgcatttggttcctttgatctttctgctaaaatcaatatcttcctctaattatcttctgttccacttctttgaacctcttccagttgcctccatttctcaaggagccgggtgtttaataaagaatctggataagactcaggcagagtcaggtaaatgcccctgcctgctcccaggtagagtgttgcctcttctttaagcgggagagatggtttactaaaaattccagagcccagacagtgtcctactatggcagatgcctagtaataatcaccaaatggaggaagtaattggaatctcttttaaatgtgttaggccatattctaacttgcacttcatttgctttcccattccaccctcagccca

SEQ ID NO: 319092 - DNA, 556 bp, Homo sapiens
agtgggactgctgtgcaatcctgtgccaggtgagcagcttgtcctgccctcagcctgcctttccctatgtgtatgtctataacaggcctgttcattacactctgtgcaccagctccatatttcttatttacttcactgtttacatgcctcaaatagctcatttttcctgagctcttgcttagccaagttccctgcatttggttcctttgatctttctgctaaaatcaatatcttcctctaattatcttctgttccacttctttgaacctcttccagttgcctccatttctcaaggagccgggtgtttaataaagaatctggataagactcaggcagagtcaggtaaatgcccctgcctgctcccrggtagagtgttgcctcttctttaagcgggagagatggtttactaaaaattccagagcccagacagtgtcctactatggcagatgcctagtaataatcaccaaatggaggaagtaattggaatctcttttaaatgtgttaggccatattctaacttgcacttcatttgctttcccattccaccctcagccca

SEQ ID NO: 319093 - DNA, 550 bp, Homo sapiens
tcttcagtcatgatactaatccttaatacactgtatgtattgcatatatcatttcccaggttgtaacttatttttcacttttttaatatgtgttttatgaccagaagttctkaattttataggttgattttatactgaattttatcaaacttttctagtcaatggctttctgtatcttgtgtaagaaattttcttctcccccaagatccaatagacattcattagatttcctaccaagagtcgaaagtgttgagtttttaaaagtctgcaatcagtcaaaagttgatttcttgatatggtatggagaagtcaaatttgatcgttttccttatatatgaccatttttttatcatatttattggacaatccctcttttactcactgatcttatagactactcccatatatactgtatgttaatggaaatatattctattttattattgtttctatctcagcagcaaaactatagtgttaattacaatagcttcaaaataagtcctgatatctggacaggaaagtcctttttgttattctttttcttcagaag

SEQ ID NO: 319094 - DNA, 590 bp, Homo sapiens
acactctagaagattcctgaggagaggtttattgcccaaaggaattcagtggaggtattttcaggtttggctgatttccaagagccccctctcagggccaaattatccaattccctttcttggtgagttcaccacacttcattcattcaccaaaaatatgcatggagagcctaactactacatactaggcactgagcatacagtgctaaaaataaaaaaagataaaatcctagtcctaatgtaggatacatgcattaaacatatgaacatatgaaccctgtatttgtcagggttcttcagagaaacataaccaatagggtataatatatatataattcaccytacatatatataaaattgagcatctgtaattaaaaaatctgaaatctaaaatgctccaaaattctaaactttttgagggctgacatgatgcttataggaaatgctgtggaatatttcagattttcagattagggatgcctcaccagtaagcataatgcaaatattccaaaatccaacaaaatccaacatttgagacacttctagtcccaagcatttcagataagagatactcaacctgtatatgtgta

SEQ ID NO: 319095 - DNA, 593 bp, Homo sapiens
tgttttttgccgtcagtttcatttacagctatcctcccacaccttccggttgccaaatgattttcctttcctttgagtttattcatcactgtctagggagagggagaaaaagaaatggtcacttccaagaactctctcaaaagagccaggaactattttcccagtcatcctcagcagatttctcctcaatctcattggcccaaatagggtgtggtgtttatccttgaacccgtaagtggagccaggggatgggataatgagccacaagccctaccacctgatcaacttcccccaagcacctgggctttgcaggaggaattgaaggtgctcaaataaaagttaaggtagttactaaaagaaggagagtggtgttggaagagcaactacagtgcctattagactcctgctgttctgagaatcagctccaacccactcctagcagcacccaaggaactggggctcytagcctgactcacaactcttggaagctgctgacccctagtgtctgaggaaagcatcggctctagaatccagaggcatgggtttacctctcatgagaatcacagcggctgtgacacactcacacacacaag

SEQ ID NO: 319096 - DNA, 529 bp, Homo sapiens
acaggaaagttaaatttcagctccacccactggagccctcaggtcagacttctgtaatgtgaattttctatgtagctgaggatgtccctttcaggatcaaacattttcattggaggcttttgaaattatatattttttcatttttatatatatttcatatttttcattttctatatgtagcaagtgaaaatgttaatatacataataaaaatatatagagagagtatatacttcaatctgccttcttaaccagagccygttatacataattcactgcgttttgaacatcaaattatatactaaatattgaatgtagtttttgatgtagtaatccagtttctgtgacaatttgatatgtctacaagttagtcaagaataaggctgtgtctcaaagaattattccaaagctaggtacaagatgagctaaagttcccctaatgttctttatcttcagggggacagttcaagaactatgtctgttgtgtgcctaattcacgtcaggcgctgtgcgaggggcagggtaaaaagg

SEQ ID NO: 319097 - DNA, 551 bp, Homo sapiens
cttgttcaccagcaggagataagcatatggcagtggttaagaacatggttcttgcagccaatcagactttgaagtgaattccagctctgccactcactacctatgtgacctttggcaatcatttaacctctctgagcctcagtttcctcacctatagaatggggaaaacaatacatacctcatagcattgtgagaattgaaggagggaatgaacgtaaaatggcttagcgcagtgcctggctcttcagggaagcatgcgctaagtagcagctgttgtaatgtatttctcatttctgcttrggggctttggtgcaacatgaatttagtcacttggttcaaagtgcaattaattatatacccaggtgaataaaaatcagatggtcatgtcagaaaaattcacttgatgctatcattgactagttctttacaaacgcaataggcaggtaaacatgctggttctcaaccttttctagccgaactttttgcccattcttcagctccaaggtgccatgttccttccctggaacccacctagctcattaacaagtttt

SEQ ID NO: 319098 - DNA, 551 bp, Homo sapiens
cttgttcaccagcaggagataagcatatggcagtggttaagaacatggttcttgcagccaatcagactttgaagtgaattccagctctgccactcactacctatgtgacctttggcaatcatttaacctctctgagcctcagtttcctcacctatagaatggggaaaacaatacatacctcatagcattgtgagaattgaaggagggaatgaacgtaaaatggcttagcgcagtgcctggctcttcagggaagcatgcgctaagtagcagctgttgtaatgtatttctcatttctgcttaggggctttggtgcaacatgaatttagtcacttggttcaaagtgcaattaattatatacccaggtgaataaaaatcagatggtcrtgtcagaaaaattcacttgatgctatcattgactagttctttacaaacgcaataggcaggtaaacatgctggttctcaaccttttctagccgaactttttgcccattcttcagctccaaggtgccatgttccttccctggaacccacctagctcattaacaagtttt

SEQ ID NO: 319099 - DNA, 551 bp, Homo sapiens
cttgttcaccagcaggagataagcatatggcagtggttaagaacatggttcttgcagccaatcagactttgaagtgaattccagctctgccactcactacctatgtgacctttggcaatcatttaacctctctgagcctcagtttcctcacctatagaatggggaaaacaatacatacctcatagcattgtgagaattgaaggagggaatgaacgtaaaatggcttagcgcagtgcctggctcttcagggaagcatgcgctaagtagcagctgttgtaatgtatttctcatttctgcttaggggctttggtgcaacatgaatttagtcacttggttcaaagtgcaattaattatatacccaggtgaataaaaatcagatggtcatgtcagaaaaattcacttgatgctatcattgactagttctttacaaaygcaataggcaggtaaacatgctggttctcaaccttttctagccgaactttttgcccattcttcagctccaaggtgccatgttccttccctggaacccacctagctcattaacaagtttt

SEQ ID NO: 319100 - DNA, 518 bp, Homo sapiens
tttgtttgttttgtttttctgtttgtttttttcatgctgttgtccaggtccacccctaaaattctgctttaattggtcatgagtagagcccagggaattggtgctttttaatagggttacagatgaatccaaagggcagcaagggttggaacgactaaagtgtctgaagactaaggtgggcaactctaaaaccccatgcttcccttccccagtccccagtcccttcccacagcctggcagtgtttctgaaagtgtgccccattggaattacattagaaaaagtaaaacaagcacattggtaagaaaaacaggaacaaaataaaatttgggaatatatatgttgtagattccctggccccctccagatacactgtagtaaaatctcgaaacatttagaatttacacaaactcccagtaastttgggaacccctgctgaggcaaagcaccaagacgtttgcactgtctttatttaacatcaaatcctagcccgcatggtatgcatcacattttgccttga

SEQ ID NO: 319101 - DNA, 600 bp, Homo sapiens
tgggagaataataggggaaggtctgtcatagggcaggctctgggcagaagaagagctaagttactctgcatggggaaagtagctggcactagtggctggtgctggcagtgggaggggtatgtatggaagactaggcaagtaacctagcaatggggaggctctttatggagggacagacacaaagggacttctggaataagaatggccaagggatttctacagcacagattcttaatattaaacttggagtttttagctgttctatgctctgagtagcccacctctattgcctaaacctacattccacatttgctagcatcctcctttttgtgatggtggtgctttgggaaggagggtgtcaaaactttattcagcaggatgctgtgtgcacagaggcaaaaccaggaggcacagagagggattttaaaggaagcagcagcctgaagaccaaagagcccagaaaaatgacagttccacacttcctgttcttcytcctaatacatcctaaagatatggaaaaggtctttgaatttcccccagttaatgaaatggggtttacatcagttttctcatgagctaagaggccaaggtgacttagca

SEQ ID NO: 319102 - DNA, 566 bp, Homo sapiens
tagaatgccttcagctaaaagcaacaatattggtataatgtacctattgttaaagcctttgggcgtgtggtcaaataattacataatggaatcacagaagccagtagcaaatgctggtttcactctttccttctgaataggcctagcaaagtaacaacaaactcaggtgttgtcctggcaatacgataggacattccaaagataagaacttccattgataggaaaaattttgactctgacttcctaacctggtatccatgtactataaagaaggctcagctcatcctaatatcgaacggtgggtgagaattcaactccaaagccagatggtctggatgaaaatccagattcttgccttactagttatgtgatcttgggcaagttacttatacacygtgtgcctcattttcctcatctataaaatggggttatcataatactagtagggttattgtgaggcatagtcaatgcatgtggagtgcttagattactgctggcatatcataagctcctaggagtgttcattaaaactatatcagatttaagagtacttgggggtgagatcc

SEQ ID NO: 319103 - DNA, 594 bp, Homo sapiens
  misc_feature (1)...(594): n = A,T,C or G
aaaagaatagtaagggaatattatgagtagctctataccaataaatttgataacttctacatgaaaragaaaaatttcttgaatgcatactatgaaagctcacttaagaagacataggcctattaagaaacttaaatttgtatttaagaacattaccgttataaaaacaaacacctccagactcagttgccttcactggtgagttctaacaaagattgaaggaaaaagtatcaattctacagactctttcagtaaatagaagtgggcacaaggccagcatgaccttgattctcaaagctagacaaagcaattataataaatgaacattgtccacaggagaaaacaggaaagatctaaaatagacaccctaacatcacaattaaaagaactagagaagcaggagcagacacattcaaaagctagcagaagacaagatataactaagctcaaagcagaagtgaaggagatagaggcatgaaaaacccctcaaaaattcaatgaatccaggagctggttttttgaaaagactaacaacatagatagaccactagctggactagtaaagaagatagggngntttcaaaatggcatcat

SEQ ID NO: 319104 - DNA, 606 bp, Homo sapiens
gaatcacgtttcttttagcatattgctttattgtctaaaaatatataacaaaacagcaggaaagcactttacttggaacaactccgttaattctcacaaccactccatgaggtacataggctcaggataactctcatgttgcttatgtcatagactattgttacaaattattctatatgaaatattttgggagattgtcaatttttttgaataaataaacacagatttagaatgcttagttcactagagctagagttgcttggttggttttgatgccctaaaaccaatattttttacaataattttatataaaataatttctttataaaacttatctttttctactttctyttatttacctagcaaatctattacatctcatttgctaaggcaataaatgagtagttgctaagtactgtagatattgtaatttaagcttaagtgaaagccaaagagttaaaactatgttttaatttttttttacaagattgaattaaaagatttctaagtaaagtgtttcgtgcccctagaacaatttctgaaccctaaagaaaaagtgagagacgatctaattgatctaatgccaattcttctttaaataatatg

SEQ ID NO: 319105 - DNA, 606 bp, Homo sapiens
gaatcacgtttcttttagcatattgctttattgtctaaaaatatataacaaaacagcaggaaagcactttacttggaacaactccgttaattctcacaaccactccatgaggtacataggctcaggataactctcatgttgcttatgtcatagactattgttacaaattattctatatgaaatattttgggagattgtcaatttttttgaataaataaacacagatttagaatgcttagttcactagagctagagttgcttggttggttttgatgccctaaaaccaatattttttacaataattttatataaaataatttctttataaaacttatctttttctactttcttttatttacctagcaaatctattacatctcatttgctaaggcaataaatgagtagttgctaagtactgtagatattgtaatttaagcttaagtgaaagccaaagagttaaaactatgttttaattttttyttacaagattgaattaaaagatttctaagtaaagtgtttcgtgcccctagaacaatttctgaaccctaaagaaaaagtgagagacgatctaattgatctaatgccaattcttctttaaataatatg

SEQ ID NO: 319106 - DNA, 577 bp, Homo sapiens
gcctagtcagtttactaaagagatagcacagtttgataagtcatcttttcttaagaaaaagcaagctctccatagcatgtggcataatttaaagccattattcaggagaaaccctgcaaagctgagctcctaaatatggaatcactttcattttcctacagtcagcttgaatcatggatgtcacgtaggtgtagtctgagaaatcccttgcatttctcagatgttctagagtgagccaaaagataataggggggctccaactttagaggaacttgagtagagcatgaaatcaaactcgaagaaattttgtaatggcacacatagtgtttctaagcattcagttgtttttcttttttgaggcaaattttttcagtttatactttcattctactagtatattcttaatatagatatttttgagaggataagagatagcttttaaaattatttaaatatagaaagcaaacattgagagtattttgacacctcaattctaatctycttttgagtattttttatatatttgtatagctgagaccatacacagaagctcttctttaataaagacattgtttat

SEQ ID NO: 319107 - DNA, 610 bp, Homo sapiens
aacagtacatattcagataaatgaaccattgaatgytgtctgtaatagcaacagctggcacctctcagataacgctgagctgcccagcccccaaaagatcagaaaataggcaacaactaagtagaatttttatagatctgaaatctgctgaatacccattgaaagagagcaaaatgtgcattagacctcgctgacaaatgcccaaggttcaatctctcaaacggttttgcaaactaacaaaaacaggagtgaaagggattatctccatcctcaaattttcaacatggtcaaagggactgtaaaatccttctggtgagcaagccaggtttaatggtcaggaacaaatgcttctttagtcacagggcaagccttttggatttgtaatttcctgttagggacagcaaaggcagtgcacaccctccactcctactctgctctgctttccagccttcttccccatattgtttttccttctttttttctttccctttttttctagtgaaaatctaactatactgcagggtctcctggagtctgcacattgagggcatgagggccatactgtgaactgttcaccaccattctgcacatgaaccctctctctagagaa

SEQ ID NO: 319108 - DNA, 610 bp, Homo sapiens
aacagtacatattcagataaatgaaccattgaatgctgtctgtaatagcaacagctggcacctctcagataacgctgagctgcccagcccccaaaagatcagaaaataggcaacaactaagtagaatttttatagatctgaaatctgctgaatacccattgaaagagagcaaaatgtgcattagacctcgctgacaaatgcccaaggttcaatctctcaaacggttttgcaaactaacaaaaacaggagtgaaagggattatctccatcctcaaattttcaacatggtcaaagggactgtaaaatccttctggtgagcaagccaggtttaatggtcrggaacaaatgcttctttagtcacagggcaagccttttggatttgtaatttcctgttagggacagcaaaggcagtgcacaccctccactcctactctgctctgctttccagccttcttccccatattgtttttccttctttttttctttccctttttttctagtgaaaatctaactatactgcagggtctcctggagtctgcacattgagggcatgagggccatactgtgaactgttcaccaccattctgcacatgaaccctctctctagagaa

SEQ ID NO: 319109 - DNA, 531 bp, Homo sapiens
taagttatttcatagtgatttcatgtaaaagtagcatttgtggtcttatctgtgaacttaaacacaaattataagtgttcctgtgggaaaactgtgtttccagttccgaacgactgaattaaaaatgaaattttggaatgtgtgctttgtatgttggcaattgcctgtatctattcatcttcaagaattcaacttaatgatatccactagcaaattcatctctagcctatcaacatttttaaaaagcagggatttccaaacaattttagctycatggtttagattttacttagactctgagaatatattatgacttctagatttcctcttttttcttaagtaaataaatcatgttcaaaggatgtaagagaaaggagaggcaagtatttttgtttgtttttctctgaatatctgaatttcatagaataacactatacttctcccaaaagaaacactttcaagataagttatgttgtcttttcttttgtaaaattcccatgaaaaagcttacaaaccatacttcaaaaaata

SEQ ID NO: 319110 - DNA, 531 bp, Homo sapiens
taagttatttcatagtgatttcatgtaaaagtagcatttgtggtcttatctgtgaacttaaacacaaattataagtgttcctgtgggaaaactgtgtttccagttccgaacgactgaattaaaaatgaaattttggaatgtgtgctttgtatgttggcaattgcctgtatctattcatcttcaagaattcaacttaatgatatccactagcaaattcatctctagcctatcaacatttttaaaaagcagggatttccaaacaattttagcttcatggtttagattttacttagactctgagaatatattatgacttctagatttcctcttytttcttaagtaaataaatcatgttcaaaggatgtaagagaaaggagaggcaagtatttttgtttgtttttctctgaatatctgaatttcatagaataacactatacttctcccaaaagaaacactttcaagataagttatgttgtcttttcttttgtaaaattcccatgaaaaagcttacaaaccatacttcaaaaaata

SEQ ID NO: 319111 - DNA, 562 bp, Homo sapiens
  misc_feature (1)...(562): n = A,T,C or G
ctagaagaagggagccatgaaacttttgctaattggagcaaaagtcaacactaaagtttgccacctagccaggcctcagtgggaaaaaaaattcttgtgtgaaattgaaaccaagactgcactgacttaaataattcataattttaaaatggagacaatgtagcaataaagattataaatactaagtgattataatataaaagaagtttatttttaaaactaacaaataaaatttcttgaaataaaaactgtagtcaatacaattaaaaaatctatgcaaaaattcaactacagattagacacagctgaaagtanaattaataaactgggagttgtatctgcgaaagtcatataaaatgtagccaatcaaaataaaggcatattaaatattcaatgagtaatattcctatatatttttatatattctataaaagayacaatgtatgatggttaatttatggtgtctatttggctaggctacagtatttagttgcttggttaaacaccagtccagatattgctgtgaaggtattttttgggggggatctgattaacatttaaa

SEQ ID NO: 319112 - DNA, 602 bp, Homo sapiens
cccagtgctgctcattaagcatctaaagaatatgcctcattctctacctgatgatgctcctttcacacgacacatttttctacttaagacaaccaaccacatttttccagagccttcttttcctgtgattatgtcctgattatgatttgcttttttgtaaaccatttcatttcaggtatggtattgtgtcatctcatcatactggtcctctcttctgtcaagtttttggttggcttgcatctttttaaaatgtagcattctgtgttggtcactgtgtagaagattaatactgttgaatgtagtattgagacacagaaaaaatgtagcactttgaaccatttttcctatcaataaagcctgacttaattcataccatttagtagcaatatcaccatcacatcacactttctgtccaccgacatccaggcatcctcctatgtacactgctgttcaccatgtcatgctgttcacctaatcccaaatatgtgttttgttaatttaattgttggttatatgtatcaataagtgttcagatggaaataaatagcattccttcctctgaycccaccccaaattagaaggattttatgtgactttctgca

SEQ ID NO: 319113 - DNA, 513 bp, Homo sapiens
ctccacacccagtgctattacttactgctgaaaatggaggagttggggtaaaaggcgggaaggaggaaaaagaagcaaaaaaaaaaaaaaagacctctttagtttctcctttaaagaaaagtaaygattttctcctggaaggaaatcaaaggctgcatgaaatgtctacccctttaaaaaaatgtaagctgatttttttaatgctaggtacttttatctttgtagcttaaaggcaaagaatgaatgaaatgtggaaaatgaaggacatgtgacagcatcaaagaagtgaagcaaagctggagattgtgtgtctggctatgtcaggccagggtggccctttttaggcagaccattaaggcaatctggctgccagatgaagtcttcatgaaagggcagaaaagatgtataaagtctttttgatgttttaaaggaaactcttctttatacctacccctccctcttttcctccatcatcttgtcccgaccaatgccatctcctctggcaaggcaaac

SEQ ID NO: 319114 - DNA, 589 bp, Homo sapiens
tctcaacttctccagcaattggttacatcaggctctttctttgaaatgttctactttatatctttttcaatgacaatrccacttcaattttcctctataatctggttattcctaaatttatgtcctttgacctaatccttcatcatgtcctgaatatatttcccaaagcccatcaggcaaacccatgtcctcccacctaacatgtcctctatgaagtcattatcttcccttccaaacattttctagtaccaatttaacttctaagattggaacccgttcctgtgtctgttcttcctgctctttgtgtgactgggtcattcttgtcattctccccattgctgcagtgagactaacctaagcatgctatcttcaaacagctgcccagggactctcacacagcatcttgtattaataatccacagagcactctcatcatcagatagtgttatttatttgtttatgtatgttctgtcccctccttattagaaaacaaactccaaaaacatcagggactcacatttatttattgctgacacatagtaggtgtttaatacttttgaataaatgggcaatgacctcattctattca

SEQ ID NO: 319115 - DNA, 623 bp, Homo sapiens
gtagatagattaaaacttggttaatcagaagcttagctatagataggcagatgtctgaacacaaacacacatacacacacacacacacttcttttcagaaatccaccaaagaggaaataataattaaggaaaatttagatctatctgtgctttgcaaattaaggatggtccagatagattgtgtttaattatgagagaaatgtgagcagggcaggctagtcttaatgggttagtttttctctaccccacaggcctcatctgctgtcactcccctcttgttcttaatgctacaaatatgccaaacttcttatcaccaggggcctgcatggctgagccctggaatatctctccctggttcyctgcataattggcttcttctcatcttagagttctcagttcccttcccaccccatccagggtatcctgatccctttagctctgttgcataatctctaaagcccttattaccatctaaaaacatcatatgtgtgtgtatgtgtgtatttccttgttctttatatgttcatatgtttgttgcaatagagaatgctaattgtggtgggccagggaacttgtctattttatcccctattcagccccagtgattaccataatacctgtca

SEQ ID NO: 319116 - DNA, 555 bp, Homo sapiens
atgtagggttattatgtactgccaattcaaaaacagggcagagataaatctgtgtgtgaatatgaagactgaaagctgagcaggaacagaggcacagccatcaaaaggagaagcactgggcaaggggtaaaagagcagtgagagtaaagtagcaagtactgagccaggggatgaaagaaaaggaaggggcccatggaagagtagaattgaagaaggaaaaccaactctgtcccaacagactcagcaggttgagcccatattcctaggataagcagaactatccatcttaaagtattttttaaaaaatatttcaagatatattggtggaaataaacaagttattcaaattgttcctttttctaaataatacaaagaactccaccagcccatcaccactgtgtttgatttgggaaagatatcttgaaagcttttattattattattwtttttttactgaccaatggatctgtcaggtataagagatgatatccctggaggggagctctctctgtgccatggtgggaggcagaactatagctgcatttcctgagaatc

SEQ ID NO: 319117 - DNA, 636 bp, Homo sapiens
ctgctcagtagcaacttcacatgctgaaaaagtttaagactagacatgctttataccaagtttaaaaatgtggttcttttcacctgaaccacagtgggaataaaagccttcctcaaattttacaaaggactccctgggttatggcctgaggtaggagcccctcaagggttctcatggtcccctctacacctcctacctcagcagttatgcatatataagcagtgtgctacagagatggggaacaaaagtgtcaggatcaaaactacctgattttaaacattaacctgggcaaattacttaatttttcaaattctcagtttctcattcatagttgaagacactaatatctccatagaacctttgtgtgaaataaataagcaaatactgtgcaaaatgtttagcacagtaattggcacatgggaacactttacaataagtgaagagaaaactgcaatccaatgtwcttcttctcacaagcctgtagaatgcctcgaggcagagactatgttttaatatctgtgcagaacataggaggcacttggttaatttggaagaaatgaatgcaagaatgcgtgcatttgtaaacaaaccatgaaactggatctcagataattaaataacttgttcaaagttagc

SEQ ID NO: 319118 - DNA, 636 bp, Homo sapiens
ctgctcagtagcaacttcacatgctgaaaaagtttaagactagacatgctttataccaagtttaaaaatgtggttcttttcacctgaaccacagtgggaataaaagccttcctcaaattttacaaaggactccctgggttatggcctgaggtaggagcccctcaagggttctcatggtcccctctacacctcctacctcagcagttatgcatatataagcagtgtgctacagagatggggaacaaaagtgtcaggatcaaaactacctgattttaaacattaacctgggcaaattacttaatttttcaaattctcagtttctcattcatagttgaagacactaatatctccatagaacctttgtgtgaaataaataagcaaatactgtgcaaaatgtttagcacagtaattggcacatgggaacactttacaataagtgaagagaaaactgcaatccaatgtacttcttctcacaagcctgtaraatgcctcgaggcagagactatgttttaatatctgtgcagaacataggaggcacttggttaatttggaagaaatgaatgcaagaatgcgtgcatttgtaaacaaaccatgaaactggatctcagataattaaataacttgttcaaagttagc

SEQ ID NO: 319119 - DNA, 588 bp, Homo sapiens
cataggactgtccttcgcaataaagaattattcattccaaaatgtcaatagtgccaaggctgaaaattctgctcaagagatttatttgtactggcccttggatgtctgccctccaaactattccctcatcaattctaaaatatgcatgagaacttagttaatgtgttgttgaattatgcagtaattaagagcatgaacttcagagttgaatggcgtgtgtttgagtcctggtcaataagatgtgygacctctgctcacttatcatcctctccaaacttcaacttcttcatatacaaaggctaacaacatctctaaggtttatggcgaggactcaagtgctagtaaaagtattaaatgaattgtggtgaaaatgaataaaagggatggaactagataccttgtaataacagtatctctgtattattgtgtaagcagatatgcatgaagcttaagtatttggccctgtgcctggtgttccatttcatacttcttaccttgaatgtattgctaaagcttcatgctcattttttgtctcctgattttttcacttatcaacaatcattagcattgccaccataaccacagagg

SEQ ID NO: 319120 - DNA, 588 bp, Homo sapiens
cataggactgtccttcgcaataaagaattattcattccaaaatgtcaatagtgccaaggctgaaaattctgctcaagagatttatttgtactggcccttggatgtctgccctccaaactattccctcatcaattctaaaatatgcatgagaacttagttaatgtgttgttgaattatgcagtaattaagagcatgaacttcagagttgaatggcgtgtgtttgagtcctggtcaataagatgtgcgacctctgctcacttatcatcctctccaaacttcaacttcttcatatacaaaggctaacaacatctctaaggtttatggygaggactcaagtgctagtaaaagtattaaatgaattgtggtgaaaatgaataaaagggatggaactagataccttgtaataacagtatctctgtattattgtgtaagcagatatgcatgaagcttaagtatttggccctgtgcctggtgttccatttcatacttcttaccttgaatgtattgctaaagcttcatgctcattttttgtctcctgattttttcacttatcaacaatcattagcattgccaccataaccacagagg

SEQ ID NO: 319121 - DNA, 500 bp, Homo sapiens
gtttaatcaaaaacactttggaaatcttaaaacacacagaaattattgaggtctaaccaaagggggagagactctatgtttgccaagttcaccaaaaagtgatagttctttctcatatccccaccagttacagtgctctaaggatgttaaagaaatggcatgagcctmcagattcacatctggaaacagcagcatataaagagctggttgtcttcccccatcccccgtccatgcctcagatacagctgagaaagaaagaagatgcaaaaaatttaaattgtgccttacatgaaggatagggtatggatttatgccttatatttccattatagcaaataaaaggcatttgggttggccaggcagaggagcatttgtggtgtacatgaccactctacttatcaaaaagacttccctttataaacaaagtaagaaggaatggttgcatcttgcctactacacacacacattttttttttaatggccactcctaatagtttagg

SEQ ID NO: 319122 - DNA, 584 bp, Homo sapiens
gagtatagttcttcctgatgtaaaggcagcaccagcagaagtacaacaggaaacattgtacaaatgcactggggaaacagcaacataaaattccttgctatgctgattctgttgctgcaaaattcattccatacttcaagttaagtaatagatccaaaatgcatgtcatcagcttcttttttcacagaaagrgatggatctgttcaaagttcacttacatttctaacattccattgttcatttttatttcctcttaaatgagcatctcttatattctggatgcaagtggcgccaacttcaaaaaaaaatgtaacatctgccttgcattccagctcagtgtatacagtgggagtctacttttcctgctctgtttcacgagatcttagttttgaatccctgctttgggatagtagttagaaatacctgcattgatcttatcacattgccctgtaggatgagatgtcataaagagtcaatgagttgacacatgtaaagtgcaaagcagttggcaggtgcctgccacacagaaaaggaacactccagtaagtgttggttattaatattgttagtgtttactattatta

SEQ ID NO: 319123 - DNA, 635 bp, Homo sapiens
aatacaagtgatattagtggatataaccattaattgtttggactcagccttatcttacaaatgcaaggtcatttatctagatcagtacttaaaaacataaaatttaataaaatgcaatataaaagttggtttaattttgatatgtgctttataggagtgaagctgaaaatatttaaccatatcactcaatatacagtttcttatatatgttactrtaaaaatattcatcttttttttttttttttgagacaaagtcttactctgtcactcaggctggagtgcagtggcgcgatcttggctggctgcaacctctgcctcgcaagttcaagccattctcgtgcctcagcctcccgagtagctgggattacaggcatgcaccgccatgcccggctaatttttgtatttttagtagaaatggggtttcaccatgttggccaggctggtctccaactcctaacctcaggtgatccacccacctcggcctcccaaagtgctgggattacaggcatgagccaccgcacccagccccatccttttttatggtaggttaatcagttcctgcggttgagagcagacatagttcattatgatcaccttcctatttttgtcctgattacattctttgttgtgtttgt

SEQ ID NO: 319124 - DNA, 456 bp, Homo sapiens
ttctgacaagtatgacttggattatttttattttttgagttttatggaaatgcatagcccattaaaaataatagattaacaatattttaaaaacatcaaattctaagcaaatcatgattttagaataatgaacatatattttggagataaaatgaaaaaaatggattcactacaaagttgggtttttttcctagttaccaatgaatcaggctccattgtgtctyatcattcattatttgattatagtcaatataaagtgaaaaaaacacaagcagtgtaaagatgtacaatcagttttaataataaaaggcaccaaataaatttattccgcacctgtaatgtccctgctggtattttcacatatgttgacaaacatgtgaaagactagtgtttagaagtgagatcataacgctagaaattagagcatctttcttagtctaaattccatcacagtat

SEQ ID NO: 319125 - DNA, 456 bp, Homo sapiens
ttctgacaagtatgacttggattatttttattttttgagttttatggaaatgcatagcccattaaaaataatagattaacaatattttaaaaacatcaaattctaagcaaatcatgattttagaataatgaacatatattttggagataaaatgaaaaaaatggattcactacaaagttgggtttttttcctagttaccaatgaatcaggctccattgtgtctcatyattcattatttgattatagtcaatataaagtgaaaaaaacacaagcagtgtaaagatgtacaatcagttttaataataaaaggcaccaaataaatttattccgcacctgtaatgtccctgctggtattttcacatatgttgacaaacatgtgaaagactagtgtttagaagtgagatcataacgctagaaattagagcatctttcttagtctaaattccatcacagtat

SEQ ID NO: 319126 - DNA, 574 bp, Homo sapiens
gatgctgctgcagaggataaagatagctgttataaaggcagagagctaagaaggagaagacccaagcactctgtttttcttttgttgtttttttgtttgtttttttagttgagastttttcttatcaaaagtattatccagtcacttgtacactcaaccaataggagataaacatatttttgcaagcaactttacgaaatgattgcataccaacaccaccagcaccacagctacacacatcacacatttatgtagtgccttctaagttaaaactacttgcatgcacatcattattacattggcttctggttgtgaaagacagagaagtaatctagcaaaacgaaataagtcttaaaatatgacacaaacacatataattatttttaaaaatgggcataagaagtaagccttggtgaaattttccaattttagtttatcttgtggactgtcaagactgaaaatgaaccggtctaaattcttcaccatttatgaacaaagtatagccattaaatactgtcttatacctctagagcaatgttagaacaaacaaaccatattttatatgagtgttttt

SEQ ID NO: 319127 - DNA, 654 bp, Homo sapiens
aatagcttttgccactcatgacacgtgactcagtggatagatgtcagggtctgatttatcggattcatcctctctcctcctcacttggagtggagacagtgatagggtgaaatggattgaattattccactcatagaaaagtgaggtgagactgacacacagaagagagaaagaaaagagaggaccaggtacaggagaaatgcataaattgtaacagcaatttagagaggatcagatattttgagcatgctttcaactctttactttctatcctttacatactaacctttgtggatatgttgtatataattacagataaaggcatgttatatattaattatatcatcaatggactgttttattacttctttcaaccaattcttcaattttactcaagctgcaaatcacactatcaaaagttaaagatgaaaaacacttgcraggtcacggcttgtcctttttcctgagtagggggaggaaaaccagtgttttcttcagtattttgtaaaagtgatattctatctttccacgcttgtgtgcactactgaggtctgcgcaaatgctcttgctttgctggttggttttgctcagagacaggttttaaatgcactagaggaaagcagcttttgctaaatgttttataacgtgtcagga

SEQ ID NO: 319128 - DNA, 566 bp, Homo sapiens
atgtggatccacgaatgtcacccgatattgaaataactcaatcttggagagtcataaggccaaggtatcattgtactggaagttcttgcagatagaaaatagaaatcagcaaaaagaggctccccycatccttacttttattcagaatttaaaaattcctttagccttggccagatgtatgattccccctcgagtagggtaaatacacaatgccaattctggctactttttctttttctctcaactataaagatatgattttcatgtcctattttatcattttctttcttttagtatttcatcaatcttttgtgttccatacaggggcattcttataccccctaaagccaaaagataaagtcagttctattagttttttatttcctgctctcttgacgatgagttttaattgaactttgggaaaagattgtaagaactatgcagttgctataactcctctggtctggcttgcagtcagtataaatgctgtaagttcagttggtgacaaattgaattttacacactctgtcaccctccttcactattccccatgcctaatcacagca

SEQ ID NO: 319129 - DNA, 566 bp, Homo sapiens
atgtggatccacgaatgtcacccgatattgaaataactcaatcttggagagtcataaggccaaggtatcattgtactggaagttcttgcagatagaaaatagaaatcagcaaaaagaggctcccctcatccttacttttattcagaatttaaaaattcctttagccttggccagatgtatgattccccctcgagtagggtaaatacacaatgccaattctggctactttttctttttctctcaactataaagatatgattttcatgtcctattttatcattttctttcttttagtatttcatcaatcttttgtgttccatacaggggcattcttataccccctaaagccaaaagataaagtcagttctattagttttttatttcctgctctcttgacgatgagttttaaytgaactttgggaaaagattgtaagaactatgcagttgctataactcctctggtctggcttgcagtcagtataaatgctgtaagttcagttggtgacaaattgaattttacacactctgtcaccctccttcactattccccatgcctaatcacagca

SEQ ID NO: 319130 - DNA, 515 bp, Homo sapiens
ctgtagcaaaccagttgaagccaactaataattagaacaaaacatctatcctggtctcatagaatatgagaaattgaaaacattccaagtatcatctaggccaaagcacttattttgcaggtgaagataccgaaacccacggaggttaagcgtcttgcccaaggttaaatggtttgttagtagcatatctgggattagagcccagatctcatgacttctaagccagtgcttttggtcaaattcaacatcgtctgcccatatggccaaaccatatggcagagtcctcaaagacctagstatactcccagaaaatctaagctgactgttatcttctcttcaattttgtttccaattcacctatccatatatgtgaactctaattagaaaggcacagatttataagttggagcatatatattcaaaggagtaagtaggttagattggggtaaggagacaaagaggaacaagcccagtacagataatgacttgagaaaagacataaacatgataatttg

SEQ ID NO: 319131 - DNA, 562 bp, Homo sapiens
cacaacaacagtgaaacttcttattgacagtgtcagaaggttaattaaaaagttgttaatgtgaagatggatgttttcatttcagattggtacctctcaagatgtcagtgtaactaacatttgttggttagtactaaaatatgtcatagacaacgtgrggaaatacccaacagccacagaaactttaaatgtggggaggagggtaatatgcttcagaatgctgtgacactctaaatgaaatcatattcctctcaaaagataactaatggcttttgatttaagagtatctatttaacatgaagagatgggctcttagatttgtatttgtgctgaaagtaataatagtaatagcattttattatttgtgtatcttctatattacaacatgctttcatagtcatgcttagttcccacaactaagttctgtaaggtggtgtcatcatgtttattttcacagttggtggtttaatgcaccttctaactaccacgtctgaatctggcagttgtaaagatgaaatatggctcctctgtttgcatttatcagttatgatagctgtcattc

SEQ ID NO: 319132 - DNA, 575 bp, Homo sapiens
ctcacagttctacagactgtacaggagcatagctggggaggcctcaggaaactttcaatcatgctgaaaggggaagcaggcatgtcttacatggccggagcaggaggaagagagtgaagggggaggtgatacacacctttaaacaaccagatctcatgagagctcattcactgtcatgagaacagcaaggggaaaatctggccccatgattgaatcagctcccaccaggcccctcttccaacactgaggattacattttgacatgaaatttgggcaaggayaaaaatccaaaccatatcagtgagtatgttaacagtccccaagaatattaatgtcagaaaatgtatctaattaattgctgctagaaagaaatacttttgacctcctagtctttttagtagtttttgttgttgttgttaaatggaatgtttgtgcttggccaaagaagtagtatttgttctaagtacttataacatatttataatagcattatgacaaacagcttggactcagatctggagatgtttgctcattttcgttcaatcattttttcaaattacaaatgtttttgagat

SEQ ID NO: 319133 - DNA, 654 bp, Homo sapiens
aacagtccaagataattttcatagtgttttgtactccaagtgactcttttaaccattagttttgccctgtatgtaggaattgtgcttggccaaagaagtagtatttgttttaagtacatataacatccttataatagcattataacaaacatcttggagtcagatctggagatgtttgctcatttggtcaatcattttttcaaatgacaaatttgaaaaattcatacttcatccaggtataacttagttgtaaaaatcacaacactgccaaacaattcaaacacctttagttgagtcattatgtttaagcttctttgatccttccttctctagagttacrctaacatagtaacaaagggcagatttacagtccaaactgaaaagtcataattcaacacataattcctcagttgtcagccccaagtacaagattgatgatgaagttttgaactgacacaattattttaaaaatacttacttccaaatctacacaggaagtttatgtctataatgacttaggacatccaaaatgaacctatttcctaaggaggcacatcattcacagtatcagaaacccttgcaagtgttgcataatgatgacatcaatataacttatgcaaagtaaaagcgttaaaacattcctaaatacttagc

SEQ ID NO: 319134 - DNA, 581 bp, Homo sapiens
atcattctcccatggaaataacttggtaggtactggtagattccaagagcattcatgacacctctgtagcaaatgatgcagccaaataataatgctatgaagaactatttcagttattcctaaggttcttttcagaaaatacattttctacagkaaaatagataccatattttagaaattagttacctcatttatttctttataaaaacattggatttttaaattaaatatatattgaacttatatatatatagaaatatatatacaagatggtgaacaaaatagaaatagtctagcactcatgaaacttagagcctaatctagaagtctgccaattaaaacaagcaattagagcatcatgagtgctatgacaagatgctatggagatgcccaaagatgggactcaattttttcagggtaggtgtttacatgtgggtgaagaaggggtagatgaaaggttaaagaagataagaagactgtctagagaaaatctttcctaatatttctaaacagaatggagaaaaggcaataaagaatcacctgtttttttgatattgttgttgcttgcttgtttttttggt

SEQ ID NO: 319135 - DNA, 581 bp, Homo sapiens
atcattctcccatggaaataacttggtaggtactggtagattccaagagcattcatgacacctctgtagcaaatgatgcagccaaataataatgctatgaagaactatttcagttattcctaaggttcttttcagaaaatacattttctacagtaaaatagataccatattttagaaattagttacctcatttatttctttataaaaacattggatttttaaattaaatatatattgaacttatatatatatagaaatatatatacaagatggtgaacaaaatagaaatagtctagcactcatgaaacytagagcctaatctagaagtctgccaattaaaacaagcaattagagcatcatgagtgctatgacaagatgctatggagatgcccaaagatgggactcaattttttcagggtaggtgtttacatgtgggtgaagaaggggtagatgaaaggttaaagaagataagaagactgtctagagaaaatctttcctaatatttctaaacagaatggagaaaaggcaataaagaatcacctgtttttttgatattgttgttgcttgcttgtttttttggt

SEQ ID NO: 319136 - DNA, 581 bp, Homo sapiens
atcattctcccatggaaataacttggtaggtactggtagattccaagagcattcatgacacctctgtagcaaatgatgcagccaaataataatgctatgaagaactatttcagttattcctaaggttcttttcagaaaatacattttctacagtaaaatagataccatattttagaaattagttacctcatttatttctttataaaaacattggatttttaaattaaatatatattgaacttatatatatatagaaatatatatacaagatggtgaacaaaatagaaatagtctagcactcatgaaacttagagcctaatctagaagtctgccaattaaaacaagcaattagagcatcatgagtgctatgacaagatgctatggagatgyccaaagatgggactcaattttttcagggtaggtgtttacatgtgggtgaagaaggggtagatgaaaggttaaagaagataagaagactgtctagagaaaatctttcctaatatttctaaacagaatggagaaaaggcaataaagaatcacctgtttttttgatattgttgttgcttgcttgtttttttggt

SEQ ID NO: 319137 - DNA, 581 bp, Homo sapiens
atcattctcccatggaaataacttggtaggtactggtagattccaagagcattcatgacacctctgtagcaaatgatgcagccaaataataatgctatgaagaactatttcagttattcctaaggttcttttcagaaaatacattttctacagtaaaatagataccatattttagaaattagttacctcatttatttctttataaaaacattggatttttaaattaaatatatattgaacttatatatatatagaaatatatatacaagatggtgaacaaaatagaaatagtctagcactcatgaaacttagagcctaatctagaagtctgccaattaaaacaagcaattagagcatcatgagtgctatgacaagatgctatggagatgcccaaagatgggactcarttttttcagggtaggtgtttacatgtgggtgaagaaggggtagatgaaaggttaaagaagataagaagactgtctagagaaaatctttcctaatatttctaaacagaatggagaaaaggcaataaagaatcacctgtttttttgatattgttgttgcttgcttgtttttttggt

SEQ ID NO: 319138 - DNA, 563 bp, Homo sapiens
tgtttttttgatattgttgttgcttgcttgtttttttggtagagatgtctgattcccataacagacctacagaatctgaattttaggagagagttgatcctggtaatgtatatttttgtacattctcataatagatatatttcttgagtttttattttatagtaacctttgtgctatatattggtaatacacagataaaagtccaaattttgccatcacaatgactattgtagatttgctgagagatatctgtaaacaaagaacatggggtggagttgaagcttaggtctaattgctggtctctgtttacacctgcataacatgtaataaatattcctttgatcagtatctcctttgagttttcaaatttggccttattgatasattttgactttaggcatatgcaggctattagttttgatacacattgaagcagagaattatccatatgtgacctctagagacagaatgattgaagtgatggggataaaactaaactgatagatgatctcctttttaaggaaacaccctagatttaaaactgaggaaacaagacatggttg

SEQ ID NO: 319139 - DNA, 578 bp, Homo sapiens
tatctactctgaccccttatcacactcctccataggcattacaccagccacgttatttaagtgattctgttcctgaagttcttttggctgctttaacagttccatcagttcacacttgcttttcacaatgatataagggataacaacccaaatatcacacaccatgtaaaagatgattgttctgcgcatccagttgttaaatctgttgtgctccgagtatgcccgtgccaatccgcacgtactgattattcgctcgcagggttagtgactgtaacatttttgattaacctctctgtacacttcacaagcacttactctgggccatgttcagatcatgaagatgccctaaatcactgagatgttggtraatatctgttgacatagtttttaccagtgtggaataactcagtgctcttcaaattcaaggagagtcaaaatagcatttttctctagctttatttgttttcatctcagagatactagacactgaatttcaatccaaaaaaagaatagaaaaaaattatttgagattacttatgtaatgcctatatgccaacatttctgtattcatagccaca

SEQ ID NO: 319140 - DNA, 576 bp, Homo sapiens
atttgtcttgtcatgtaaagatttttcaaaggtaaatgaaatgctccccatctgaaagacttggtgagccttgtaaaaacagcaacaacaacaaaaaaagtatatttacaaacaaacaaaaaaaacaacgcttgcagtaagccagacattgtgctagacaatgactgatctcgttttgcaacacatgcttcattttggtattgaaacaagctcaaattcatattaaaaacrgaagctggagaagaccagaaatcctggccaccaaaagtaggaaaaacatctagtatttcccacccttccacccatactatgtaactaaataaaacattacagtgaaatgaagactacaatgccaggaaagttaaacatgaaaacaccagctaaaacaacaaaataataagtccagtgctttttatgaattaaacaccacatcatcaccagctctacagtcatcatccctttgctgaccctagttcagtcacacatccacttctttagttgtgcacagtgtttgctaagtcatgatgagtttcagacagaaaacggaaagccagttgcagtcagggtgcaattgga

SEQ ID NO: 319141 - DNA, 320 bp, Homo sapiens
tgaacctggaagctcagagtcatggactgtgttgaagatattgggaaagaccagctatcaacagtcctggaccctgttgctattttcagtaacacttgttggtagggttgggggtggagaactgagggtgcttttgtagagatctttcttgcagggctggagggacctgacaggtgaggaagtatggtgggatcaaaggattgtggcttggttttctcttggagcactcatattaggatktccactgccacccctgagcctggctcctagggtacagggattaggctgtgaaaaacacaggcccatgagtggatataagc

SEQ ID NO: 319142 - DNA, 593 bp, Homo sapiens
ctgtccaccagccaacagtggctcatgcctgtaatcccagtactttgggaggctgaggtgggtggatcacttgaggtcaggagttcaagaccagcctggccaacatggtgaaaccctgtctctactaaaaatacaagaaaaaaattagccaggcatggtggtgcatgcctgtaatcccaactactygggaggctgaggcaggagaatcccttgaacccaggaggcagaggttgcagttagccaaagtcacaccactgcactccagcctgggtgatacagcaagactccgtctcaaaaaatcaaaccagaacaaaacaactgccaaccaagaattctatgtccagtaaaaatatcttttaggaattattaatatacaaatattaagaaattaccagacgaaagaaaactaagataatttttcaccagcaaaactacccaaaaaaatgggtaaaggaagttctctaaacagaaacaaaataataaaaagagggacttgaaacattaggaagaaagaacacagtaagcaaaaactatgaacaaatacaacaggtttttcttttcttcttgagttttctaaattatgtttgaaggtt

SEQ ID NO: 319143 - DNA, 577 bp, Homo sapiens
tagagacatccagcaccctagccttccctggatgtactatgacattttaaaaggctgaataatgccaaggcaagcagaagagtgattatgcacttattcttgacacagtcttaagacaagctctgctcarttggttcccctgtgaactcaagctgattctcttccctcttgagttctctattgtctttgtgttgtttgcaactcattcagaaactaattaagtttcaggatcagtttttcctgttagagaatgtgaatatgctgaagtggtagtttttaataacttaaattatctcagtgaaaggacaattataatttgtttctaaaattggccaaaagtcagcttttatcaaaataattctcagcagacattagtctccccaaggtattgtgtgaaaggcaacaaagaggatttaaatcagccatggagaatgtgttgataatcgggctatattaatcctgttctctagcagtgtgtgaaattacttgtttactccgcttctctgggcctagaggtagctgatcactcgttgacagagccatattttgtgatcacctttcagcagtgagcttcagc

SEQ ID NO: 319144 - DNA, 588 bp, Homo sapiens
attttatctggagataagtcagagcacaataacaatagctaccactatcagagcatccacaatatacctggtattgtggtaatcacattacatatattatttaatctgctctttacagcacctcttcaagatagatattaccatctgagacgttaaataccctgcccaaggatacatggtcagtgaatggaggagtcaggatttgaatcgggaattatgtgtctccttgacagagtctttttgcattatacctcacaatcaagactgatattagagatgtcccattctatcgtagcttgcatagtattttatgtacaatatgtatgtaaaaatacaatatgtatttcctaacacatattaaaacagtggatttggaagagatggacttggcatgagcctataaggatagggaaagttagaaggacagtgatggctcttggagataggagaggccagtgaargctgcagaagaggagtgtagattccaaggagccagttaatgcattgggaaaagcggaattcaggaagatattgattgaagaataagctgttcttatcagttgataaagagagtttgtaacacactta

SEQ ID NO: 319145 - DNA, 423 bp, Homo sapiens
cctgggcatgcctgggtagaatcaagctcgtgagtgtgtggcccttggcagtgaccctatgattggaggagtacttgttctcattgggaacacccaaattatactccaaacttctaggtggttgcttcaatcaccattaattcaattttttcattgaattttaatacacaatcattgagatctttcttggaagctctaagtaattctgaaaactacctacctttggatcaattccatatggaagcatgttatgatgaaccatgggctttggtgagttgttggtaattattgttagtgacgatttgtgcggttatatgtaacacatcaattatcagtggactctactacaagattattgtttgtagtaataatatatccrtatagtgttttatattcacaatatccatccacttatgttatttc

SEQ ID NO: 319146 - DNA, 535 bp, Homo sapiens
atttaaccccagcatgtattgagcactatggcttgtgtcctcaaagacctcagtgtccagtaatctcaccctatcttagagacagagagctggggtctcagacagtcrtgtgaccttgagaaagaggacactacatgaaatcttgacttaaatctttttctttccctgaatgtgtggtaggaagaccatctcaagggtgcctaggttacctttatgtggagggggcctaaaataaatcatgccatagtggtggttgtactaatttacatccccaccaacagtgtacaagggttcccttttctccacatactcaccaccatttgttattgcctgtctttggatacaagccattttaactggaatgaaatgatatctcattgtagttttgatttgcatttttctgatgatcagtgatgttgagcaccttttcatatgcctgtttgccatttgtatgtcttcttctgagaagtatctattcatatctttcacctattttttgatgagattattagattttttttcctgtagagttgtt

SEQ ID NO: 319147 - DNA, 594 bp, Homo sapiens
cccagcatgtattgagcactatggcttgtgtcctcaaagacctcagtgtccagtaatctcaccctatcttagagacagagagctggggtctcagacagtcgtgtgaccttgagaaagaggacactacatgaaatcttgacttaaatctttttctttccctgaatgtgtggtaggaagaccatctcaagggtgcctaggttacctttatgtggagggggcctaaaataaatcatgccatagtggtggttgtactaatttacatccccaccaacagtgtacaagggttcccttttctccacatactcaccaccatttgttattgcctgtctttggatacaagccattttaactggaatgaaatgatatctcattgtagttttgatktgcatttttctgatgatcagtgatgttgagcaccttttcatatgcctgtttgccatttgtatgtcttcttctgagaagtatctattcatatctttcacctattttttgatgagattattagattttttttcctgtagagttgtttaaactccttataattctggtgattaattccgatccctccactgtttttcattttctcttccccct

SEQ ID NO: 319148 - DNA, 535 bp, Homo sapiens
atttaaccccagcatgtattgagcactatggcttgtgtcctcaaagacctcagtgtccagtaatctcaccctatcttagagacagagagctggggtctcagacagtcgtgtgaccttgagaaagaggacactacatgaaatcttgacttaaatctttttctttccctgaatgtgtggtaggaagaccatctcaagggtgcctaggttacctttatgtggagggggcctaaaataaatcatgccatagtggtggttgtactaatttacatccccaccaacagtgtacaagggttcccttttctccacatactcaccaccatttgttattgcctgtctttggatacaagccattttaactggaatgaaatgatatctcattgtagttttgatttgcatttttctgatgatcagtgatgttgagcaccttttcatatgcctgtttgccatttgtatgtcttcttctgagaagtatctattcatatctttcayctattttttgatgagattattagattttttttcctgtagagttgtt

SEQ ID NO: 319149 - DNA, 549 bp, Homo sapiens
tcaatgtcctcatctaaaaccatgtgtttmatgttaatctggagtacgtggtattgatattcctgcccgttaggaatctgccttcttttgtatccagcatttacttctattaagcctgtctttaaaccaactcttaatcattcccaaaattaaacactcatttttctggccatggattttagagcaaggtattcctggagcattttgtagagaaaaattatggcttaatggtctaagatcataaggtaaataaaggtcatggtgctgatggtccctgatctcagggatggtgaaataaggtaaggcatccatgcctcttaaaatgtggcaccaggaggtatcaagtacaatggaggatttcatcaagggagaagatagtggagcaatgacatcagggacctgcactcttcacttctgttaataccttctataactccattaagaatggtcatgtggtttgtgatcaattaaaactcagatactttctgtgcaaactgtgccaagacaagattttgctatttgatacttgtgcaattattttttttactc

SEQ ID NO: 319150 - DNA, 571 bp, Homo sapiens
agaagtgggattaggatttgaactcagatctttgtgtctccaatacccatgttgtcttcatgacactgcacctctctcatccagttctctgtggaggcagaataacccaacgaattaccactagtctataaaattaatgtttttctctcctttggttctaggcatccaaattattcctttcatcaatgtcctcatctaaaaccatgtgtttcatgttaatctggagtacgtggtattgatattcctgcccgttaggaatctgccttcttttgtatccagcatttacttctattaagcctgtctttaaaccaactcttaatcattcccaaaattaaacactcatttttctggccatggattttagagcaaggtattcctggagcattttgtagagaaaaattatggcttaatggtctaagatcataaggtaaataaaggtcatggtgctgatggtccctgatctcagggatggtgaaataaggtaagkcatccatgcctcttaaaatgtggcaccaggaggtatcaagtacaatggaggatttcatcaagggagaagatagtggagcaatga

SEQ ID NO: 319151 - DNA, 430 bp, Homo sapiens
ctcattttaaatgattgtataatatttcacatacaaaatctaccacagttggttgaaccagctttccattattggatatgaattttcaaagctttgctattatgaataattacaggataaatttcttatatataagggacatctggccccaatcaccctgtatttgagatttttttttttcctagaagtaaaattatcatgataaagagtaggaacattcttaaagtgatccgcccaccttggcctccactgggattataggcgtgatcccctggccggggattagataagttttttagccattgaaattcctggaakgaggattgaagtttttcattgtttatttgaaccttgggacacaaacagttctcagcttctccaatctgattcaccaaatgttagcttgaatttcaaggtttccaaattgtgt

SEQ ID NO: 319152 - DNA, 614 bp, Homo sapiens
gttttcaaatactatatttcaagagctccttttcgtcggagtagttagtcctagagactttttttttttaacccaaagactagttcctgttgaaagattatggtcttgaaactgtgtatcaaaggaacaaaattttgttaccttttcccctactttgatcaatgttggtcttttcaaactgaattctggagaaactaggatttgtaattggggagcatattttagcctacctcaattgaagatttgcttaatctagtttcttccaattactactgttatgtgacaattaccctgaaatgtaataggttgaattgaagcaaccattttattaagctcatggattctgtgcttcaggattttaggcagaacacagtggattacttattccagttccacaatgtctaggacctcagctgagaggaccagaaggctggggataatttattggccagagtttcagatcgtgtgaaggcatcttcacycaagtgttaggctaggacttccagttggagcacctacaagtgaacttacctacatggcaatctctcagggtaaggacatagaccctccttcttaataagaagagtgtcaactttttgccacatagttaaacc

SEQ ID NO: 319153 - DNA, 514 bp, Homo sapiens
attacattttacaactctaataaatatttcctgcaattcaatggccagaagcagttcatcctgtagatgaaccgtgatttacctaccagtccatagtggtgcacacataagtgattcattctttaactcattcagtaaacatttattgaattcctattatttaccaggcacttttctaagggctgaggatacagaagggaacaatacatggtcccagcttttgtgctagtgggtagaatagaaaatacacaataaatgtgtaacacattggtaaacaatrgtaagtgaaacaaaaataaagcaggaaatggggtagtgaatgataggggggcttgtttaaaaattatgaccaagaaaaacttatctgaggaatatctgcacagaaatctgaatgagtaagcagtgagccatttgtatataaggacagagtattccaacagaataaagggcaaaggccatgacacgggcatgtgcttagcctatttaaggaataaagtttcagttatgcaagatg

SEQ ID NO: 319154 - DNA, 514 bp, Homo sapiens
attacattttacaactctaataaatatttcctgcaattcaatggccagaagcagttcatcctgtagatgaaccgtgatttacctaccagtccatagtggtgcacacataagtgattcattctttaactcattcagtaaacatttattgaattcctattatttaccaggcacttttctaagggctgaggatacagaagggaacaatacatggtcccagcttttgtgctagtgggtagaatagaaaatacacaataaatgtgtaacacattggtaaacaatggtaagtgaaacaaaaataaagcaggaaatggggtagtgaatgataggggggcttgtttaaaaattatgaccaagaaaaacttatctgaggaatatctgcacagaaatctgaatgagtaagcagtgagccatttgtatataaggacagagtattccaacagaataaagggcaaaggccatgacacgggcatktgcttagcctatttaaggaataaagtttcagttatgcaagatg

SEQ ID NO: 319155 - DNA, 574 bp, Homo sapiens
ctccgtctcaaaaaaaaaaaatatgtatatatatatatactatatgccatggaccgtctttgtcatgaggatatgagaatgaacagttatgatccctgtcctcatgaagctcctattctaaaagggacacagagatgtatgaatcaatgtttttttaaaggtttgggtaggggattcaggggaaagcatattcaactttacattgggaagaggagcccaggaaatttttatagagaagatattacttgaagtagatctttggtaatgagtctgccaggtatataaggtagagaataacactgtctagaaagggaaaattatgctgtgtgcaaaggtctgacctcaacaggggaatccaatycccaatctccaaagcttgaaaattctaatgacaaatggttcttagtaggaccttataaaggggtcatcatcttcttggctagagctctgcctaagccatacacccagaagataatatctcttctatttttaaaagaccttttgagaaggggagtctgtagtcatcatagggggccgatgggctttgaattatggaaactttttagcacagatg

SEQ ID NO: 319156 - DNA, 611 bp, Homo sapiens
gtcattattgttgttcagtttgaagaattttttagttttcatcttaattttgtttttgatccaatgctcattcaggagcaggttatttaatttccaagtatttgcatggttttgaaagttccttttggagttgatttccagttttattccactgtggtctgagagagtgcttgatataatttcaatttttttaatttattgaggtttattttatggcctttcatatggtctgtcttagagaaagttctactcactgttgaatggaatgtgtattctgcagtcgttggatgaaatgttctgtatatgtctatytataagtccatttgttccatatagtttaaatcgtttctttgttgactttgtcttgatgacatgtctaatgctgtcagtggagtcttaaagtttcccactactattgtgttgctgtctatctcatttcctaggtctattagtaattgttttctaaatgtgggtgctccagtgttaggtgcatatctgtttaggattgtgatattttcctgttggacaaggcttttaccattatgtaatgtccctcttcatctcttttaagtgctgttgctttcaagtttgttttgtctgataaaatagct

SEQ ID NO: 319157 - DNA, 590 bp, Homo sapiens
aagttctactcactgttgaatggaatgtgtattctgcagtcgttggatgaaatgttctgtatatgtctatttataagtccatttgttccatatagtttaaatcgtttctttgttgactttgtcttgatgacatgtctaatgctgtcagtggagtcttaaagtttcccactactattstgttgctgtctatctcatttcctaggtctattagtaattgttttctaaatgtgggtgctccagtgttaggtgcatatctgtttaggattgtgatattttcctgttggacaaggcttttaccattatgtaatgtccctcttcatctcttttaagtgctgttgctttcaagtttgttttgtctgataaaatagctactcctgctcgcttttggtgtccatttgcatgaaatgcctttttccacccctttactttaaacttatgtgaggccttatatgttaggtgagtctcctgaaggcagcagatggttggttcgtgactttttatccattctgcagctctgcatcttttaagtggagcatttaggccatttacatctaatgttagtattgaaatgtgaggtaccattgcattca

SEQ ID NO: 319158 - DNA, 590 bp, Homo sapiens
aagttctactcactgttgaatggaatgtgtattctgcagtcgttggatgaaatgttctgtatatgtctatttataagtccatttgttccatatagtttaaatcgtttctttgttgactttgtcttgatgacatgtctaatgctgtcagtggagtcttaaagtttcccactactattgtgttgctgtctatctcatttcctaggtctattagtaattgttttctaaatgtgggtgctccagtgttaggtgcatatctgtttaggattgtgatattttcctgttggacaaggcttttrccattatgtaatgtccctcttcatctcttttaagtgctgttgctttcaagtttgttttgtctgataaaatagctactcctgctcgcttttggtgtccatttgcatgaaatgcctttttccacccctttactttaaacttatgtgaggccttatatgttaggtgagtctcctgaaggcagcagatggttggttcgtgactttttatccattctgcagctctgcatcttttaagtggagcatttaggccatttacatctaatgttagtattgaaatgtgaggtaccattgcattca

SEQ ID NO: 319159 - DNA, 596 bp, Homo sapiens
gaatggaaaggggaggaaggaacattcaagatatagttctagtcttctctaatcctgtaaggagtccagtctatgctctttgtgtatggctgtgactcagaaggatggtctttgttttgttctggagtgtctgagcacatttttgttgtggtgrtggtgcattgcatgtgaactgggccttgagagaagttcaaatactgagtgaaaataaagtaatggtctgattataactgtcagatcgggtggttagactggttcctgaaacataaccaattccaaggcaaaagaaaagacatctcttcatctacccttgacttagcacctgctgaatagtaggcacttgttaggcatcgaggaaatagatattagctgtaatggaagcatggacaacttgctatgggatcatagaaaaaggcagggcctcgaggagcaaataggagtttgtcaggttagaaggggagtctactcaaaggggaacagcaaaggtctgggcaattgaatatgcatggaattctgagcatttcaaacaatctagtacttttttaggcactcaaaaatgttggctaggtgaatgcatgaatgaccattaaatgaga

SEQ ID NO: 319160 - DNA, 597 bp, Homo sapiens
ttggtgatatgtatgcagtagcagatctggatctgagtagggaaaagggagaagggagagagataaacagaaaattgttttttgatatttggtatgtgtgactcttggtgatgtcacctatgttgtctctaccctttcacctgctagtctgtctttaaggtcattttttgaggattgtmatgtgggaccatgagcccccttcaatcctgtatgttctatctttagtcctctaggtgtggatcttaagagtcaggaatagacaacagagcagggataggagagtactttcagagaaacagaacatgcttgtttgtaagggggtaatatattggatgaatatttcagtggctgtttcttttcaaccatacatcctgactgaccattcgggtcacagaaaatgctgtatcttagcacagtcaccctgtgtgtggctcaattcctatccctgggatttatgatgatgcttatttgttgaacattgcttttgatgagctccaggtgttagcacagcaacactgggagggaaccagagttactgctctttaaccagtgataaaacaggctcagggtgattccttacctgcctagggtcataga

SEQ ID NO: 319161 - DNA, 672 bp, Homo sapiens
atcacttcattgcaacacaaactgtcgtccttattcttttgttgttgttgttgacagctgcattgtattccattgtttggatatactattaccttatttaaccaactctccattgttggattttagattgtttataatatgcagctacttcaaatattgctgtgatgaatattattgtacataggtttagagaagtagaattgctggatcaaagggtatatgcgtttacaattcggaatggtattgctaagtctcccagcataaataagccttatactaatttgcatttccattagtggtgcaagagagtgcccattctcccatagcatcaacagcaagctatattgacaagtttttgttttgttttggaagttgacagttattttagtatagtttggatttaataatatgctacraagtagttgtgatggtaagcatcaatgtcttattcctgacttgagtgatatgccctttgaatttccccataaacctgatccattttatatggtttggctctgtgtccctacccaaatcatctcaaattgtaatcctcatgtgttgagggagggacttggtgggaggtgattggatcatgggggcatttcccaccatgccggtttcctaatagtgcgggagttcgcacaagatctgttggttttaaaagtgtttggc

SEQ ID NO: 319162 - DNA, 508 bp, Homo sapiens
tttaaactcctttccccctttccccatctaatttctgttatttgcatgtatctacacagtcaagatattaacatatcagcattagagtgttgtttcygtcccagcaccctaatactgacagtttattttggtcttatttgaagagttaaatgtattcagtgcactgtttttttgccatactttcctcagtcatctcataattgtcctctagtatttttctcaagaaagactccaaattacaatatatctgtaattcctatatgttcaaaaatattagtcagtggcctttataactaaaggacagtttggctgtatttaaaatctttagctcttaatttcattctttgaaaaccttgcaagtgttgctatattgtatttcagtggagaatttctctgtagaaaaatcggatgcaagtctgatttataccccatggttttgcatggttgcctaggcaattctttagagcgtgtgataaactttactaagacatgtctcagtattgactat

SEQ ID NO: 319163 - DNA, 604 bp, Homo sapiens
tgtctgtgccagttcactttttattgctcttcagtgagcaaaagtttgattttcctgaattagtgatgcacaggaaatttctctttgaggtgatgagagtccagagtaaacttaagggttctttcctttgctgctgctgcatagacagactcatcttattatgtctgtgcactgtcttctcatcttctctcaaccagatttagtacagcagggcttctgctaccagctctgcccaccccacccccatccattgcaaaaaagggatatgtcttctgcacttcaggtaaaaccctcacttacaaacgaggaaatccatcagtgttgagttcctttataagtctatttattcacttttttccctcccaggacagcttctgcttgctctgagctgcttttggcagctcttttgtatgttttgatkttctgtagcttaaattcgtcttctagtcccagtaaaaatggagtttgagtttttaaaaaattgtttattacttttatatgattttcatgagaagaacaaaagtgttgatttatgcatcaatgagcatatcagaagccctgaagactatttctgccaaaataaaaaacaaagcaaaacaaagga

SEQ ID NO: 319164 - DNA, 604 bp, Homo sapiens
tgtctgtgccagttcactttttattgctcttcagtgagcaaaagtttgattttcctgaattagtgatgcacaggaaatttctctttgaggtgatgagagtccagagtaaacttaagggttctttcctttgctgctgctgcatagacagactcatcttattatgtctgtgcactgtcttctcatcttctctcaaccagatttagtacagcagggcttctgctaccagctctgcccaccccacccccatccattgcaaaaaagggatatgtcttctgcacttcaggtaaaaccctcacttacaaacgaggaaatccatcagtgttgagttcctttataagtctatttattcacttttttccctcccaggacagcttctgcttgctctgagctgcttttggcagctcttttgtatgttttgattytctgtagcttaaattcgtcttctagtcccagtaaaaatggagtttgagtttttaaaaaattgtttattacttttatatgattttcatgagaagaacaaaagtgttgatttatgcatcaatgagcatatcagaagccctgaagactatttctgccaaaataaaaaacaaagcaaaacaaagga

SEQ ID NO: 319165 - DNA, 523 bp, Homo sapiens
ctgagcaattactatgtggcagacactgtactaagcgcttaataggattaccaaattacaggactccaggaagcatcactcacattgcacttggtataaaatgtaccaaggacagttgtgcaattagatattctcacatttattatcacaattatacatctgtcccatagatacccacaccaataaatgagtcctttggcttccagtttttgttttttttaaattggaaatccaastagaagattggaagaaagaatgaggtcagggtgtacgttcccctgcccctttctctgcaaggtcaccctgagctggttatattactgatcttctcaaggtagcctcttctatatgacccttttcctctgggctctgtctccttctattttccctttgtacatatgggttactgcaatgtcccttgatggtctgctgtatcacactcatcctaatttcggtgtgccatctatttcctatgaggaccttgactcaacaggatgaatgctttctgattagaaagttaagg

SEQ ID NO: 319166 - DNA, 523 bp, Homo sapiens
ctgagcaattactatgtggcagacactgtactaagcgcttaataggattaccaaattacaggactccaggaagcatcactcacattgcacttggtataaaatgtaccaaggacagttgtgcaattagatattctcacatttattatcacaattatacatctgtcccatagatacccacaccaataaatgagtcctttggcttccagtttttgttttttttaaattggaaatccaactagaagattggaagaaagaatgaggtcagggtgtacgttcccctgcccctttctctgcaaggtcaccctgagctggttatattactgatcttctcaaggtagcctcttctatatgacccttttcctctgggctctgtctccttctattttccctttgtacatatgggttactgcmatgtcccttgatggtctgctgtatcacactcatcctaatttcggtgtgccatctatttcctatgaggaccttgactcaacaggatgaatgctttctgattagaaagttaagg

SEQ ID NO: 319167 - DNA, 523 bp, Homo sapiens
ctgagcaattactatgtggcagacactgtactaagcgcttaataggattaccaaattacaggactccaggaagcatcactcacattgcacttggtataaaatgtaccaaggacagttgtgcaattagatattctcacatttattatcacaattatacatctgtcccatagatacccacaccaataaatgagtcctttggcttccagtttttgttttttttaaattggaaatccaactagaagattggaagaaagaatgaggtcagggtgtacgttcccctgcccctttctctgcaaggtcaccctgagctggttatattactgatcttctcaaggtagcctcttctatatgacccttttcctctgggctctgtctccttctattttccctttgtacatatgggttactgcaaygtcccttgatggtctgctgtatcacactcatcctaatttcggtgtgccatctatttcctatgaggaccttgactcaacaggatgaatgctttctgattagaaagttaagg

SEQ ID NO: 319168 - DNA, 438 bp, Homo sapiens
ttttgtgttaaatacaatcctaatcatatctgcattttttttaagaaaagaggactgttgtaaattttagataacctgtactgtaattcatggatatggtatacattaattatggtataattaatacatgcttattctggattttgaacagcgatatcatataagaactcatgtttacacattttgcttaatgctttaaaacataatccttcctgtttctytgatataaaagtaatatatgcatgttcattaaaaacctagaaaactttatttacaacttagaaaataccaaaattcgcaatgctaaaaattaaaatcacctataatcccatgactgtgaaagaaattaacattaacattgtggtgtatttttctctaggcttttatctcatgcatacatccaattttctttagcggttttcatatatacagttaatg

SEQ ID NO: 319169 - DNA, 438 bp, Homo sapiens
ttttgtgttaaatacaatcctaatcatatctgcattttttttaagaaaagaggactgttgtaaattttagataacctgtactgtaattcatggatatggtatacattaattatggtataattaatacatgcttattctggattttgaacagcgatatcatataagaactcatgtttacacattttgcttaatgctttaaaacataatccttcctgtttctctgatataaaagtaatatatgcatgttcaytaaaaacctagaaaactttatttacaacttagaaaataccaaaattcgcaatgctaaaaattaaaatcacctataatcccatgactgtgaaagaaattaacattaacattgtggtgtatttttctctaggcttttatctcatgcatacatccaattttctttagcggttttcatatatacagttaatg

SEQ ID NO: 319170 - DNA, 438 bp, Homo sapiens
ttttgtgttaaatacaatcctaatcatatctgcattttttttaagaaaagaggactgttgtaaattttagataacctgtactgtaattcatggatatggtatacattaattatggtataattaatacatgcttattctggattttgaacagcgatatcatataagaactcatgtttacacattttgcttaatgctttaaaacataatccttcctgtttctctgatataaaagtaatatatgcatgttcattaaaaacctagaaaactttatttrcaacttagaaaataccaaaattcgcaatgctaaaaattaaaatcacctataatcccatgactgtgaaagaaattaacattaacattgtggtgtatttttctctaggcttttatctcatgcatacatccaattttctttagcggttttcatatatacagttaatg

SEQ ID NO: 319171 - DNA, 429 bp, Homo sapiens
tggcacgtgtatcaaactgtcctccattttcattgctatatggcattccatcttatgaattgaccacgatctagttattccccatccttttcttaggctgcatgttgctgttgttatttctaatttactcattcaggattggaaagaaatctatccagctggcatttaccagtggacagattaagtggagtctcatcaatcckcttcactattcacttagtgctagcatttgctacttctcagttgactatctgaaggtcaccttgatatacctgacttaagttgctgaatccagcaggcatttatttagagtagaccttccaggctagagctggaactctgacttaaccacaagctcagcacccagtgtagtacatgaaagacagcacctcctacactgcactgtttcctgggcattctcacttcggc

SEQ ID NO: 319172 - DNA, 556 bp, Homo sapiens
cactgcactcaactctgggtgatggagcgaaaccttgtctcaaaataataaaataaaatctgcttggactgacttgctcaaggacaattcctcaaaactggagaaatttgcaaaggtcaccaccaactcatcaagaacatctcacattttcagttatcttgtgtatcccacatttcatggtgcttccgtcttccactgtgmgagccacatatagtgctgcaagaggaaattgacatttggggcatatttcccccttctgtacaaaagccagagcaattgagggtgaagatatgtctttatatttatatagctattaaagtggttagttaaaattatttgaataattcaaaaaattaagcaggaaagcatgaaatatctgcaaactgagaaagatacaatcacttatttatggaacaccaattttaattttatattttgaaaagatggcaataaatatttatatgtttctcatttttttaaacacaaaagccagggaggaaaatgcagactacagtgaaagcttgtggtttaaattccctttttagattttataata

SEQ ID NO: 319173 - DNA, 576 bp, Homo sapiens
atcatacattctaacactctgtagttgtacagaatataatgaatatttgctgttgtctagaagatgggatgttcacatccagtttctgcgctaaggtcctggaagagaatagaacacacatgtggatgggaaacatggtaaataggtaaaacctactgagaaatgatggaaccttagaaacattgtccacaaaaggactttccaagcatgatccttcctggctaacaataaaaattattaatatttattgaatgcttacactacatagcaggcactattctaaagctttatgccttaaagcatttgatcctcccgtgaggtaattgctgttgtccctattatacagatgaacaaaattaagcacagaaaacttacccaatgtcacagagctaataaatagcaaagctrgcatttgacaaccatcaggttgttgagcttgtgctcttccccatgatgatatatgatttcattcattcagtggaataagaggatatatttttattaattatttctgtttataagacataatgcttcaagtatatacattagcatccctgacttacatcatatatacat

SEQ ID NO: 319174 - DNA, 685 bp, Homo sapiens
tttatgtttataaaaacataaaccatgtcttacatggtttctacatagtcatctcttgaactcctggcctcaggcattcctcctgcctcagcctcccaaagtgctaggattacatgtatgagtcatcatacctgtaatctggctagtcatctctttcatagggatcacatactcactccgtcaaagttcagatgttttaaaaaaaggcgtcactgtgaatgagccaggaaatcaaatatatcatacattctaacactctgtagttgtacagaatataatgaatatttgctgttgtctagaagatgggatgttcacatccagtttctgcgctaaggtcctggaagagaatagaacacacatgtggatgggaaacatggtaaataggtaaaacctactgagaaatgatggaaccttagaaacattgtccacaaaaggactttccaagcatgatccttcctggctaacaataaaaattattaatatttattgaatgcttacactacatagcaggcactattctaaagctttatgccttaaagcatttgatcctcccgtgaggtaattgctgttgtccctattatacagatgaacaaaattaagcacagaaaacttacccaatgtcacagagctaataaatagcaaagctggsatttgacaaccatcaggttgttgagcttgtgctctt

SEQ ID NO: 319175 - DNA, 533 bp, Homo sapiens
ggaatcaccaccctgcgtctttcaagtccttgatggtggcactgatctccgcagtccctccagggatgcgatattatttttgatttactatttttctaggyagaaggagttctaatggcttccatttggcctttcccaccacaatagctctcatcctaccattcaaggagccaatgtgggagttctgccagctgctaagtatgtctatgccaattatgcattctggcactggggaaatgaccacaggatgagtctggggacccactggacccactgtaagttggacctgagctaaaactccgttaattacctgacttttactggcagaccacagtgacattttgggtaccctggaatcaatgtcagctcagagccagtgtccagtagtctccaaaatgtctgatcatttcccttttcccaatgcacagttaccctggtaaaaggctgtaagtctccttgggagggaagggagaaagattcactccataaattgtcagtaatatagtggggtccttcctcaagggcacccggcc

SEQ ID NO: 319176 - DNA, 533 bp, Homo sapiens
ggaatcaccaccctgcgtctttcaagtccttgatggtggcactgatctccgcagtccctccagggatgcgatattatttttgatttactatttttctaggcagaaggagttctaatggcttccatttggcctttcccaccacaatagctctcatcctaccattcaaggagccaatgtgggagttctgccagctgctaagtatgtctatgccaattatgcattctggcactggggaaatgaccacaggatgagtctggggacccactggacccactgtaagttggacctgagctaaaactccgttaattacctgacttttactggcagaccacagtgacwttttgggtaccctggaatcaatgtcagctcagagccagtgtccagtagtctccaaaatgtctgatcatttcccttttcccaatgcacagttaccctggtaaaaggctgtaagtctccttgggagggaagggagaaagattcactccataaattgtcagtaatatagtggggtccttcctcaagggcacccggcc

SEQ ID NO: 319177 - DNA, 533 bp, Homo sapiens
ggaatcaccaccctgcgtctttcaagtccttgatggtggcactgatctccgcagtccctccagggatgcgatattatttttgatttactatttttctaggcagaaggagttctaatggcttccatttggcctttcccaccacaatagctctcatcctaccattcaaggagccaatgtgggagttctgccagctgctaagtatgtctatgccaattatgcattctggcactggggaaatgaccacaggatgagtctggggacccactggacccactgtaagttggacctgagctaaaactccgttaattacctgacttttactggcagaccacagtgacattttgggtacccyggaatcaatgtcagctcagagccagtgtccagtagtctccaaaatgtctgatcatttcccttttcccaatgcacagttaccctggtaaaaggctgtaagtctccttgggagggaagggagaaagattcactccataaattgtcagtaatatagtggggtccttcctcaagggcacccggcc

SEQ ID NO: 319178 - DNA, 515 bp, Homo sapiens
ttagtatattaaaaagaatcatcctgccggttgtacttcctccttccctcttcctcctgatatggtctagtgtcacctgagtcttaggcaagtaagctgaggtcagggaaggataaaggctcctctgacctgggacagtcccagaagtcactctggagttgatttgtgggcctgagcctgccttctcctgtgtccctggctgctgtgcgcaattcatttaatttcatggagggcatattctttactaaatatagactacagatcagagaarctaattaaccgctttgacatttctgggacagaaatctttcccactgggtaagctttaattatttaatagaataattcattttgtcaaaaattgaagtaggacaatatttactcaaaaaagattaatagggtaatatagaatatttaaacatatcatctatatctgtgtgcctgtgtgttaaagtactaatcatatatattctttaagtgtactgaaattttaatattagaattttgtaccctac

SEQ ID NO: 319179 - DNA, 515 bp, Homo sapiens
ttagtatattaaaaagaatcatcctgccggttgtacttcctccttccctcttcctcctgatatggtctagtgtcacctgagtcttaggcaagtaagctgaggtcagggaaggataaaggctcctctgacctgggacagtcccagaagtcactctggagttgatttgtgggcctgagcctgccttctcctgtgtccctggctgctgtgcgcaattcatttaatttcatggagggcatattctttactaaatatagactacagatcagagaaactaattaaccgctttgacatttctgggacagaaatctttcccactgggtaagctttaattatttaatagaataattcattttgtcaaaaaytgaagtaggacaatatttactcaaaaaagattaatagggtaatatagaatatttaaacatatcatctatatctgtgtgcctgtgtgttaaagtactaatcatatatattctttaagtgtactgaaattttaatattagaattttgtaccctac

SEQ ID NO: 319180 - DNA, 600 bp, Homo sapiens
ggcaaaaacagaattcatcactattataccaccctataagaaactcactgatagagcaaacacacaaatgagggaaaggactcaaatgttaccacttcagaaaatcatcaaactgcaaggatagtcaataagagaaagaaaggaacaactgatatacaaaaccagtaaacaattagcaaaatgacaggaataagtcctcacatatcaataatcttagatgcaaataaattaaatgttccacttaaaagatatagactggctgagtgaattatttttttcaattacccaactatatgctgcctacaagaaattcacttcacgtgtaaagrcacagatagatagaaaataaagagatggaaaaagacattccctacaagcggaaaccaaaagcaagcaggagtaaacatacttatattaaatacagcacactttaagtcaaaaacagcaaagagatgcaaagaaggtcattatataatgataaaggtatcaattcggcaagaggatataacaattctaaacatgtatgcacccaacactggagcacccagatatacatagaaagttagattgcaagggagagatagattccaatacaatact

SEQ ID NO: 319181 - DNA, 447 bp, Homo sapiens
tcatatcaataaaatgaagtcgtaataagcatcttctcagaccacagtggaaataaactagaaatcaataacaagtggaactttggaaactgtacaaatggatagaaactgaacaacatgggctgggtgcagtggctcacacctataatcccagcactttgtgaggccgaggcgggtggattacgaggtcaggagttcgagaccagcctggccaacatggtgaaaccctgtctctgctaaaaatacaaaaaattagccaggtgtggtggcggttgcctgtaatcccagaagaaaaaagggacattaygaatatagcagattttttcaatgttaagatgaaattataaataattatgccattaaaatattaaaacttgaataaaataacataataacaataataaacaatatacaagttgtcaaattgactcaagaaaaggtaaccta

SEQ ID NO: 319182 - DNA, 532 bp, Homo sapiens
taacggcagtgattgttatttctcttctgggtctggccacctagtggagcttccgagttctgggctggtactagggagtgttggcaaagggtgctgtgatgtgatctgtcttcaggtctttcaacagcaatagtatagggaggatacaagtttgccctagggttgtctggataagttttgtgttggttggcctccagccaggaggtggcgcttacaagagagcatcagctgtaggtagtatagggaaggaggatacaggctttccctagtgacacctggataagaatttgggtttctcaggtggtgggtggggccgtagagctccggacagattatgttctttatctctggctaccagggtgggttgagaaagaccatcaggttggggcagggttaggggtgtctgagctcagactctccttgggcagggcttgctgcagctgctgtaggggatragggtgtggttctcagtccaatggagttatgttcccagggcaattatggctgtctgtgctgtgtcatgcagttcacc

SEQ ID NO: 319183 - DNA, 315 bp, Homo sapiens
tgtgtaagttacaggacatcaagaagagtaaatatcagccaaagactttgcatcttcttctggggaaaggattggtgcattttcagttgtacccacataattccatacctcatgttaggtagaggtataaccttattattgtccttatttgaagatttaaatatggtttaggagatgggtatgagtgccaaggtgacaaggagtgagcttgtgatggttarttttctgtatcaacccttctaggccacagtgtctggatagttggtcaaatgttattctggatatttccaaaagggtgtttgtggatgagatcaa

SEQ ID NO: 319184 - DNA, 592 bp, Homo sapiens
tttcagttaagctcagacctacgtaatcgcaaagctcatggcctttccacttcactgtattctttcctgattcccagattttctctttctctctctccccactacctttgcctaattgcaataattttcactcaaattatttttcttattttttccaaagcaaatatctcaaataaacaaatcctttgcctattcacaattaatactaaaaaaagatgyttcttgagggaagaggaagtccattttattaaaaatataactttttctaaaaactgtaacatgttttcttttctgttatataatctcttaattgtgatctatcacaaatggcattttctatcctactgatggccacttgaagcctgtaattgattcaaaagtatgttgcacataggaaatggacagttatctattttgctcaatgtaacacccaagtccacactaaagcacaaatgctatgacacctatgacagtgtccttcaccagaaaatgttttttagaaagagtagatatggcttgaacctgggaggcgaaggctgcagttagccaagattgtgtcactgcactccagcctgggcagcagagcaacagc

SEQ ID NO: 319185 - DNA, 516 bp, Homo sapiens
gacataagaattgttgccactttttcaagaaaagtcaatttttgcttttataaaaatttttaataaaattttaaataaaaattctcctgatatttaaatttcttaaaattaattttccaaagaacactatgctgttctgcattgcgtgggataaacgattctgtgcaatctctgggtgaccttttgtgatttcttatgtaataattgagaatgtagtttttgtagtcaggcagcctggggttcaggtcatgcagactcctgtgggtcactgaacaagtgactcaaccatactgtgcttcatattctcacctgtcacawgggataataattgcaattctttcacaggatttatgagggttggatgaggtaatgtgtatacacagcttagcacatggacgcatagtaagtatccaagtacatttggtgatgctgatggacgtgcattaggcaaaaactcaactgatggggtttaaatttgaaacaggcaaggaaatactgaaatgtctgagtataatt

SEQ ID NO: 319186 - DNA, 618 bp, Homo sapiens
taggtattcaggaaatcagttaaagccrcactgaagacattaaaacaaacaatcagatatttgatacatagaaagctgggcaaatgactgttcagcactttaaaggtaggaagaagaggagactagatcagtcagagagaaagagtttagtcattttcatatcatgattcttcccttcccagtggaaagtatatatgagcatgtatgtttatgtaatatagatagatgtggcagtaaattgcctttcactttctctagtcaaaatcaaaaataataatttttaagctaggaaaattcagtaatttgatgagggaatttggctggaaaagtgaaaaacaattcaaggataggtatttataaatatatcagaatattatacatgtatttttgtatgcacatgtgttttatttaggaaggaaataacatgttaacttttgcgtatcttaattttttattcagcattgacttcccacctgttgtttaactttttcattctttgtttttttttttttttttccgttgtggtcaagtgcgtatcgaagaccaccttagcttagctgagaacgttgtacttgtgaagcatttgaatgtgggccacatcaaaggtgaacaaaataa

SEQ ID NO: 319187 - DNA, 488 bp, Homo sapiens
ttttgggatgactctttagggttttgtaggtatacgaccgtgtcatcaggaaacagtgacagtttgacttcctctttactgatttggatgccctttatttctttctcttgtctcattgctctggctaggacttccagaactaggctaaatagaagtgggtgaaagtgggcatccttgtcttcttccagttctcagggggaatgctttctacttttccctatttggtataatgttggctgtggttttgtcatagatggcttttattaccttaagttatgtcccttttatgctgattttttgagrgttttaaccataaagagatgctggattttgtcaaatgcctttactgtgtctattgagataatcatgtgatttttgtttttaattctgttcatgtggtctaccacatttattgacttacatatgtcaaactctccctgcatccctgatatgaaaacccatttgatcatggtggattatctttttga

SEQ ID NO: 319188 - DNA, 624 bp, Homo sapiens
aatgaacatttaagtagtcaaataactatatatggagcatgattgagactccagttaaataaaagtacaaagagattcattattggtaaattggttttaaatgctatctatttatcaacttgtttccttaaagggcttaatgcctgtatgaatttctaaaatgccatataatgcaggtttaatggaaaagaaaatagaggatacaaataaaataaacattattaacagattaaaattgatcataagataatatttaccttgaataaacatgggtatatacatgccaagaaccatgttaagtgctcggaacacagagttagattgccatttagaaacttaatatttaaaggagtatacaaagatatcttagctaaactatgaatctctagattggattttccagggtagagcctgagatagggattcaagagttgttctgaggcatgctgtttaggamtagcctctaaggaagggtgtgaggcaagacagagaaggggaaagagcagtacaaggatgtggtctcaagtaaaacccagccatgtccttatgtgcaaggtgaattgttctgaaacctaaaccacatgagcatttttggcctctgaggcaagggggttggccttttgc

SEQ ID NO: 319189 - DNA, 584 bp, Homo sapiens
tctattaacctccttgtctttcttaatctgtatagcttcagccagacctagaagtttatctgctgaagctgtatacaccccatcagtagcccatcctgcagttggctaactctgattccaaattcctttccggtggcrtccatctgctgtgcaaaatgttgtgaaaaggcttcctattgactgtgattctccaatgtgcagagcagagggaatgactttcctcttgatagacttgggtgtgtgaagaactatccctcttataaccgcaatgaaatttgagtactggagcgaaatttggtaatttcatcagttcatggtgttttttttttttttttaatgtagtaattttctgtttttaaaagactactacttcacaaaagcctaacaagaagatataacactaagagaaaactttgcttatggttatcaataaactttagttaattaacagtataataatttttgtatataaattgtattaaaagatatatacattttcctcattccgctcttaggctacctattatatatgtgatgttgaatagttgcttgtttctgcatgctcattatattttttaatatca

SEQ ID NO: 319190 - DNA, 586 bp, Homo sapiens
cattttttgccctttcttctttgtccacatctttttcctacaggctgaaatgtgacaaaatagttggactgaaacagttactttggcccatgagatgatcttgagattggaggtcacataaatagtagagcagcaagagatagaattcatatgcttgaaacattcatgggatccagccctatgcaagtcctagcctgcataacttcagrcttttatgtaagagagaactaagcatacctcttctgcaagtaacagtcattaggtgcctcagcaactcaaaaggaacctcaccctatatagtaagtgtgaataagttccagtgtgtttgtttaaaatatatacttttagaataacagtaaaaactcaatgtatagttttagaataacagtaaaaacagaagtgttttgtaatttaataaactcagttatgctttatactcatgtttgtgtattatcatttaaatactaattttcaaaaaactttgggagttgggaaaaatattggagtacactgaggtagccaggaatgggagtggtggtaaggagaagctgcattccagatttcctcatacagagtttaggagagg

SEQ ID NO: 319191 - DNA, 586 bp, Homo sapiens
cattttttgccctttcttctttgtccacatctttttcctacaggctgaaatgtgacaaaatagttggactgaaacagttactttggcccatgagatgatcttgagattggaggtcacataaatagtagagcagcaagagatagaattcatatgcttgaaacattcatgggatccagccctatgcaagtcctagcctgcataacttcagacttttatgtaagagagaactaagcatacctcttctgcaagtaacagtcattaggtgcctcagcaactcaaaaggaacctcaccctatatagtaagtgtgaataagttccagtgtgtttgtttaaaatatatacttttagaataacagtaaaaactcaaygtatagttttagaataacagtaaaaacagaagtgttttgtaatttaataaactcagttatgctttatactcatgtttgtgtattatcatttaaatactaattttcaaaaaactttgggagttgggaaaaatattggagtacactgaggtagccaggaatgggagtggtggtaaggagaagctgcattccagatttcctcatacagagtttaggagagg

SEQ ID NO: 319192 - DNA, 586 bp, Homo sapiens
gcccccttttaaaaggatatgctttctactccaaaagtgaagtggtatccttaggcaggaagcctatacttcctcccctaagctagtcttggaataaaaagccactttctttataccaggccttgctcttgttaattggactctgcaagcggcatgcrgctgaacctgtgtttcagttacaatatcgtggatgacacaagaatggttttcatagttgaagaaataatgtggttatcaaagggatgatatggtaagcaagactatcctcacatgaaacattagcataaatgactgggctcttggagggagggtgtgttctgactcgtggatcgatatagtctcaatgatggagctatgggtgagaaagtgttcagtttccatactcttcaaaaaggctgacatagttggggagcagtttatagtcatctcccaaaactgaagacaattatcatttgcctttgtcttcccatatagaactgttcacaaagggataatgaaattttgttggagattttagtagtcagggaaatgttatagccatagctctcaccataagctaataaattagaagtctacttatttatta

SEQ ID NO: 319193 - DNA, 571 bp, Homo sapiens
gggctactaaggcactacaaaaattcatattttaaaaatattggctactttatagttttttcttatactagttttattttggaagaatgcaatggtatcttagtgtgcttttttttttagcagggacagaatctttcccaggctgtattgcagtggcgaaatcacagttcacttcaacctcaacttcctgggctcaagcaatcctcccacctcacccttccaaatagctgggaccacagacaccaccatgctaacttttttgttatttgtagacaaggtcatgctatgttgccagactgttctcaractcctgagctcaagcattctcctgtcttggccttccaaagtgttgggattataggcatgagccaccacgcccagcactttgtaattctaaagttccatcaaagagtgatggcctaggttttgtgttacgtctatattatcacaaaaatatttataatctctaaacatctgtgcctcctttatgcacatgatgcattagcagtgtaagataagaagacaatatgcatttttctgtactgtgttagaggtaaattccttgtgtgat

SEQ ID NO: 319194 - DNA, 642 bp, Homo sapiens
tattgttcaaggccttttgtggttccataaaaattttataattgttttttctatttatgtgaaaaatgtcattgtaattttgatagagattgcattgawtctgtagattgctttcagtagtatacacattttaacaataataatttttctaatccatgaacatggtatatctttgcatttatttatcttcttcaatttctttcaatgtcttatagttttcagtttatatgtttttcacctctttggctaaatttgtacccaggtgtttgtgtgtgtgtgcgcttgcatgtgcatgcatgtgtagctactataaatgggattgttttcatgatttactttttagatagtttattgctagtgtatagaagtgctactgatttttcatgttaattttgcatcctgccactttactgaattctattattagttcaaacagctttttggtggagtctttaggattttctatatttcaggttatttcacctgcaaacagggacaatttaactttttcctttctaatttggatacgtttcattcatttctcttgtctaattgctctggctactatttccagtactatgttgaatagaaatggcaagaatgggcacccttgtcttgttccttgtttgtgtgtgtgtgtgc

SEQ ID NO: 319195 - DNA, 627 bp, Homo sapiens
ttcctccctcttcactttcctttaagaggtaacaaaatataattgacaattttatctaatctagtctctgctcattaccagaaagacataaatagtcataaacctattgctttgaaactgatggatatcccaacctcccccagacccaactttgcttcacttgttggaaatggtggttttggaattgaaacaaacaaatgaacaagaacaaacaaacaaacaaacaaaaaatctactaagcttactgaggttttacatgggctttgaccttgactgttccactatccttgcctcctcttgtggtatttaacaaggcaccaaccctccagccgtcattgctgcctttgcctttgtgcacccrttagcattgacctatgtagaacagagtcccacagatcccctggcagtccatattagtgaataaagctccttaacagctaccctaagaggccatttacaacctgctcaggaatgtaaattaaatgcaaaataaagcaaacaaacttaaccacagtacaatttggttgattcattcatttaaccaatccttagagaagcaattttctttgactttaaatgttaacttagattttggcaaaaacacagttttgtttgtttgtttgtttg

SEQ ID NO: 319196 - DNA, 627 bp, Homo sapiens
ttcctccctcttcactttcctttaagaggtaacaaaatataattgacaattttatctaatctagtctctgctcattaccagaaagacataaatagtcataaacctattgctttgaaactgatggatatcccaacctcccccagacccaactttgcttcacttgttggaaatggtggttttggaattgaaacaaacaaatgaacaagaacaaacaaacaaacaaacaaaaaatctactaagcttactgaggttttacatgggctttgaccttgactgttccactatccttgcctcctcttgtggtatttaacaaggcaccaaccctccagccgtcattgctgcctttgcctttgtgcacccattagcattgacctatgtagaacagagtcccacagatcccctggcagtccatattagtgaataaagctccttaacagctaccctaagaggccatttacaacctgcycaggaatgtaaattaaatgcaaaataaagcaaacaaacttaaccacagtacaatttggttgattcattcatttaaccaatccttagagaagcaattttctttgactttaaatgttaacttagattttggcaaaaacacagttttgtttgtttgtttgtttg

SEQ ID NO: 319197 - DNA, 618 bp, Homo sapiens
tgatttcaggtaaagggagcagaaagctcgacaattaaaggcattagtgcattcaactaggaggaagaagtcaatatgtgtggtcatcagaataagaacaagagtggtaagaaaagatgttggagagatagcagagggcctaagtcatgtaaggccaactgtttattgtaggactttgtattttactccaaaagagatgggaaactattgggttggggggagttggrcagaagagtgaggtcatctgaaaaatgtttttagaggaccactttgctactgtattaagcctatgatgtagaagagaagcaggggaagaggcacagagttcagcaaggaactattttaatagcatatggaaaaaaaagacaaaagcatgaactaggatggtgagaagtagccataagctggatatgtggtgatatggtttggctttgtgtgctgacccaaacctcacctcaaatcataatccccacaatccccacgtgtctagggagggaccttttggggggtgattggatcatgagggcagtttccctcatgctgttctcataacagtgagtaaatactcatgagatctgatggtttcataagcatctggcatttcccttgcttgagctg

SEQ ID NO: 319198 - DNA, 618 bp, Homo sapiens
tgatttcaggtaaagggagcagaaagctcgacaattaaaggcattagtgcattcaactaggaggaagaagtcaatatgtgtggtcatcagaataagaacaagagtggtaagaaaagatgttggagagatagcagagggcctaagtcatgtaaggccaactgtttattgtaggactttgtattttactccaaaagagatgggaaactattgggttggggggagttggacagaagagtgaggtcatctgaaaaatgtttttagaggaccactttgctactgtattaagcctatgatgtagaagagaagcaggggaagaggcacagagttcagcaaggaactattttaatagcatatggaaaaaaaagacaaaagcatgaactaggatggtgagaagtagccataagctggatatgwggtgatatggtttggctttgtgtgctgacccaaacctcacctcaaatcataatccccacaatccccacgtgtctagggagggaccttttggggggtgattggatcatgagggcagtttccctcatgctgttctcataacagtgagtaaatactcatgagatctgatggtttcataagcatctggcatttcccttgcttgagctg

SEQ ID NO: 319199 - DNA, 614 bp, Homo sapiens
aagtcttaggaaagttctttacagcagtgtgaaagcagactaatacayggagtgaaggaagataccacagaatttactgatagtttagatatagggttgaagaagaagtaaaggataaaaggagaaaggatcccaacagcaaggggaaattcctcatcttcatttaagatggctccaaatgtgataattatcaatctatttaaagccttctcctgatgaaaagcatatatttgggagcaagtatacccttcagaaagatccatgaaattattgcttagagagatattattagaggaaaacaaatttgaggtgagcctacacctaaaaagtaaatttaaagcagcagcttaatacttataaagctggagacagctttagggagtattacttacatggtttcagtaatggtcggtcataggtaaagggtttcactaacagaacattaatctaagataatacaaatatggaatagaaacttattttgtcacagattcagttaaaattatctgtgaagaggtgaaaataaagtggtttttaaaacaagaccataaattcaaaattcttgggaaataaatctgcattatgactacttttaatgttcaaacatatatctt

SEQ ID NO: 319200 - DNA, 588 bp, Homo sapiens
tatttccattttttgttggagtctctcaaagaacatcaaagagaatgcaattcataacccatagtaaggcttttatttctaaatccctattccactcactcttggtctgtcccacaccctgtagctgccctcaaattctttctatccatccccctctccaacattttcctctcaaacttccaatcccacacgattctcccaaacctagtgccttgcgtcattagttgtctcccctttctgatcctctctctgtctctctttgttttccagtgaccaaatattccataatcacttttcactcaattactcagacccacctgtctccctccacttctcctgtctttctacccattgtcctcatccccaacccaagctggggcctraaactggcagaggatagcccagcccatttcaagcctagggggaggggacctagtcagttcttcgaaatggatttcttgtgaaggggctgataaagttgaatatttgtccccacccaaatctcatattgaactgtaatccccagtgctggaggtggggcctgctgggagtgtttgggtcatgggcatagatcccgcatggcctggt

SEQ ID NO: 319201 - DNA, 565 bp, Homo sapiens
accaatcagaggctgaagtaaagttacaaagttacacccctatgcaaatgaaaactaggctcgtgtccactctgattggttgtgagagggaagccatcagaggtactttccatttctcatctgccatgcagaaagggggtggggattgcaaagggagtagcttctattcttttgttatgtggaaagttgggtttttccttttgatttagttctaggaagtcaatgtgaattggccttaggttccctgcccccagtacctattttcctgcctcatttctcccccatgagagatgtgatccccataaagtcttcacggcaggcagagagactgacggtctttcttctgtaactgcttcatcytgaattgggtgcagtccctacctattggggatcacagaaatcctgccctgctctgtctagtggagagaggctagcttcttgatgtccaggggtggtgtctttacctggaagccttgctgcatcattatctgcagcttgatggtctccaggcaagaggaaatgaatttggttaagagatttaacaaacaacatccgaaacccaagg

SEQ ID NO: 319202 - DNA, 570 bp, Homo sapiens
ttgggatgatgatggagataaacaaagccaacagtcctctgccagagtggggctggtggtatttaacaktctttccattaaatgtaaagttcttaataaatacccagaatccattaactgatggagagctaaagagaagctgttgtaaaataaagttgattcccatatgcctggtcccagtatacacaggctatgggtgactattatggaacacaaaaaatacatatttgttattttgttctatagaatgggaactttggggtaggggtggtgatggatacctatcctgtcaggaatgattgttacaaaaatggattacaacattttactttgcttaattattagaaaggaagtgattctatctgtttggaggaaagaaattaattgtaaaaatataacaatggctactattatccagcctacagcaactatgcaacaaagacaccaaggaaatttgggaagtatttacttatcttttggctgtcttttaaacaggtacttcaggtcttccacaggttcataggtgtactggctgatgacagcttcagattccaagtccagggcttcagg

SEQ ID NO: 319203 - DNA, 473 bp, Homo sapiens
ctttggggtaggggtggtgatggatacctatcctgtcaggaatgattgttacaaaaatggattacaacattttactttgcttaattattagaaaggaagtgattctatctgtttggaggaaagaaattaattgtaaaaatataacaatggctactattatccagcctacagcaactatgcaacaaagacaccaaggaaatttgggaagtatttacttawcttttggctgtcttttaaacaggtacttcaggtcttccacaggttcataggtgtactggctgatgacagcttcagattccaagtccagggcttcaggtgtctcaggcttgaccctggaaagatgtatccaaccatctaatcctattactttgaccacagaaggcatgaccagtcccactgaaaatggtcccttccatttggtttgcaatttttgagcaggtgatccctccttccatgtttcaacaagtacatta

SEQ ID NO: 319204 - DNA, 329 bp, Homo sapiens
agtaaccactcttaggttcttaaggagaaaagccacatgaggcattactttcaaaggagtaaacagtaataatgacagttaacttctcaacagaaatggtggaaaccagtaaaaaaaaaaaaaaaaagacacctttaaagtggttaaaggaactaatatccaaactagaattctatgcccagtgaaaatatcattgaaaagtgaagattaatagacatatttccagacaaacaaaaattagcaggcctaactaagataytaaagagatgtccaccggtataatacaacaatcctgcacagaaattcaggaagatgtagagaacagaaaa

SEQ ID NO: 319205 - DNA, 589 bp, Homo sapiens
tagccttttcttgctcatctttctttcccatgccatacaatattctctaaaacatttgttcatagctgcatagcatgccttcaaatggtggtgccctaatttggataccactcctttattcttgggctcctaagtttttttctcaatattcaccattgtaactatcacatctctgacatccttgttcttaatttgccttcatctgagattatttttcgggatactttcctgcaagtttgctatataagtaacatcaaattactctccatggtgaaatctactaatttatgctccctggcccgatgggttttccattccacctttccttgatcaccaaacatcattacagctttcaaaatatctcccaagcttctaagtgagaaatggaatgttgctatagaattctttccatttctggtaacttcaaacatttgtatcttctttcgtgattacctaatcacatcttttaaccatctttttattgaggtgcttctcactttcttatttagaagatctctttgggtattaakaatattatgcacatataatgcagatagtttctccaagttattacttcccatttgaccct

SEQ ID NO: 319206 - DNA, 484 bp, Homo sapiens
gcagttccaggttagcctgggtgacatggtgaaatcccatctctacaaaaaatacaaaaattagccaggcatggtggtgtgagactgtgtgtagtcccagctactggggaggtggaggcagcaggatcacttgaacctgggtggtggaggctgcagtgagccgtgatcacgccactgcactccagcctgggtgacagtgagactctgcctcaaaaaaaaaaaagactgaattgagggcaacactaaactagtaaatgttcattgttagccatcagaacctacaagctgggaggacagagcagagggcacggcccactgtgtacaggagcctcacaggcccccgaggctggctttggggtgttggaagaagtagagcttggagcccacagctggggkacacccgaacagaaaggagccctgcagcctcctgcctgttgtcaggacccaaaggagaaatgtagtttgcaggatcccacagcatgat

SEQ ID NO: 319207 - DNA, 484 bp, Homo sapiens
gcagttccaggttagcctgggtgacatggtgaaatcccatctctacaaaaaatacaaaaattagccaggcatggtggtgtgagactgtgtgtagtcccagctactggggaggtggaggcagcaggatcacttgaacctgggtggtggaggctgcagtgagccgtgatcacgccactgcactccagcctgggtgacagtgagactctgcctcaaaaaaaaaaaagactgaattgagggcaacactaaactagtaaatgttcattgttagccatcagaacctacaagctgggaggacagagcagagggcacggcccactgtgtacaggagcctcacaggcccccgaggctggctttggggtgttggaagaagtagagcttggagcccacagctggggtacacccgaacasaaaggagccctgcagcctcctgcctgttgtcaggacccaaaggagaaatgtagtttgcaggatcccacagcatgat

SEQ ID NO: 319208 - DNA, 556 bp, Homo sapiens
ataacctaatgcaattaaatgaagccatcctctaattgtttgctggatctgtgctttctctggtgagggtgctgagctgggaggctgtgtgcctggagctgctgaaggccaccttttgtcattgcatggagagagactgctgagtataaggcatcttagaaaatgaaaccaacatagtgagtgagaaatggaacagagtgagtccttatgtcacctggggcccctggatctgccatgcctgcagccaattaattcccctcttccttttctaatccagtttgagctggattttttttaacctaaagagtcctggtagatgtgctgtttgatgatactgttaaaaaccaatccggcataggttcaggggacattgctgtgccacatgacatcaccatattgaaaccatgtgaactcatagagycctttgtcccctgggtctccgggatgcactagagacctatttccttcctgcaaagtgctgaggtctcagcttttctggcctgaagaaaatggcaagttaaagtagaaaaatctgttttagaaagtcttctgctat

SEQ ID NO: 319209 - DNA, 556 bp, Homo sapiens
ataacctaatgcaattaaatgaagccatcctctaattgtttgctggatctgtgctttctctggtgagggtgctgagctgggaggctgtgtgcctggagctgctgaaggccaccttttgtcattgcatggagagagactgctgagtataaggcatcttagaaaatgaaaccaacatagtgagtgagaaatggaacagagtgagtccttatgtcacctggggcccctggatctgccatgcctgcagccaattaattcccctcttccttttctaatccagtttgagctggattttttttaacctaaagagtcctggtagatgtgctgtttgatgatactgttaaaaaccaatccggcataggttcaggggacattgctgtgccacatgacatcaccatattgaaaccatgtgaactcatagagtccttygtcccctgggtctccgggatgcactagagacctatttccttcctgcaaagtgctgaggtctcagcttttctggcctgaagaaaatggcaagttaaagtagaaaaatctgttttagaaagtcttctgctat

SEQ ID NO: 319210 - DNA, 556 bp, Homo sapiens
ataacctaatgcaattaaatgaagccatcctctaattgtttgctggatctgtgctttctctggtgagggtgctgagctgggaggctgtgtgcctggagctgctgaaggccaccttttgtcattgcatggagagagactgctgagtataaggcatcttagaaaatgaaaccaacatagtgagtgagaaatggaacagagtgagtccttatgtcacctggggcccctggatctgccatgcctgcagccaattaattcccctcttccttttctaatccagtttgagctggattttttttaacctaaagagtcctggtagatgtgctgtttgatgatactgttaaaaaccaatccggcataggttcaggggacattgctgtgccacatgacatcaccatattgaaaccatgtgaactcatagagtcctttgtccccygggtctccgggatgcactagagacctatttccttcctgcaaagtgctgaggtctcagcttttctggcctgaagaaaatggcaagttaaagtagaaaaatctgttttagaaagtcttctgctat

SEQ ID NO: 319211 - DNA, 595 bp, Homo sapiens
ttacaacacccttggtaagcactttcaatgggttagccccattcatacttacaacaaacccgcagggaaggcagtaggattattcccattttatagacacagaggctgaggctcaagttgtgagaggagctgctatawccactgctttttcagaagtcagcttctgaggatccaataaaatgcagcatggaaagtagctcagaaaaccacccaaagccatcgtacttcgttcactctgcgagtggctgtcagccagctttccttggtcagggatctggtccacaagtgctgaacccgaggacggagcagcgaggagcacagacaagtctgggcactgggggaacctgcagcccaatgagtcgtgtgggaaacagatgttcatcaaattcacaccagttcagctctcacgccccctctgtctatttgctgtagtatttaccacattctgccttatcatgtacttaatgctgtgcacatctgtctcctttataagacaggaaggtttttgaaacaagggcccatatgcttttcatctgtcctagtgcctcgcgtggtgctttgcagagcagtccgagtgtaatttcagaaagaatca

SEQ ID NO: 319212 - DNA, 559 bp, Homo sapiens
gcgtttaacacataaagataagcaaatcatcacacatcagcagrcacttgagagaaatcaacagtggggtgcatgactccaaatgcatccaactgaagaaccaaaatgtaacgaatgggaataacccagcaaactgaagaaaatggagcaactttaggtactttggagagattcaagtatgtaaagcatcatctatgatgtaaatgaatccaccagagatctaagaagttaaaaatgggattattgaaatgctgtattaagctccatgcatgggctgagtagcagaatggatatagctaaagcttaagggattcttctagaatgcaccaacattctatgtgtaagatagatgagagaatgtaagatagataagaggcatagagaatgaatctccacgatggacatctagttaaagaattctgggaaggaagaaaagaggcaatgtggagaaggaattgaaaagaaaaaatcagtgaaaattttccagagttacaaaaagacacgtgtcatcatattgaaggtacccactgcattgggagcaggagaaataagaaaggcc

SEQ ID NO: 319213 - DNA, 595 bp, Homo sapiens
ttacaacacccttggtaagcactttcaatgggttagccccattcatacttacaacaaacccgcagggaaggcagtaggattattcccattttatagacacagaggctgaggctcaagttgtgagaggagctgctatatccactgctttttcagaagtcagcttctgaggatccaataaaatgcagcatggaaagtagctcagaaaaccacccaaagccatcgtacttcgttcactctgcgagtggctgtcagccagctttccttggtcagggatctggtccacaagtgctgaacccraggacggagcagcgaggagcacagacaagtctgggcactgggggaacctgcagcccaatgagtcgtgtgggaaacagatgttcatcaaattcacaccagttcagctctcacgccccctctgtctatttgctgtagtatttaccacattctgccttatcatgtacttaatgctgtgcacatctgtctcctttataagacaggaaggtttttgaaacaagggcccatatgcttttcatctgtcctagtgcctcgcgtggtgctttgcagagcagtccgagtgtaatttcagaaagaatca

SEQ ID NO: 319214 - DNA, 598 bp, Homo sapiens
acgccctgctggaaaggcagtgatggcttcccctcatcctaactctgcagcctggatgtcacttcctctctgaatctcatggtccagctcttgtggtgggagctgcctggagctccatagaaggattcgaaggccaggtcagagcttcctggagcctagggccatgattgattagtaatgcctccagggcacaggacgggtaagcaggggtgtgtttaccatcwatctctctctctggcaacttgtggtcacttgagcatactatatggttttgggagcctgagttttgaatgtccctttcatttcataggatattttaccctctttgggtcactttgcaaactcttaattgtccttcaagactcttctctgcagaagtcaatcctttgaggttttaacagaccccacgagccgtgttatccccagttgctgctataaacccttggatatctctctgggccttcacttcatgccctgcaatcgtgaacatactcctcccccatctttccctgcctgccgtttacaatgggttcctgaaagcacggagggttttagaaattgcaaattcccagtagctggcacataatcaatattcaaa

SEQ ID NO: 319215 - DNA, 565 bp, Homo sapiens
tccgagagagccctcactgcagagtagatgtgggaaggaatgttggactgtgaggtaacattgggatgggtggcaagggccaggaaagggccacatcttccttccaggtcagcctttcatttattcatcattgatggagtacctactatatgccaggaaccattttaggtattgaagctacaaatatagcagggctgaataatatcttcatattcacatgcacatagaatactgaaagccctcattttctttatatcaaggaatgaaaactctgagtcttcatctttcctggcaagaggaaaatgcaacctcattagttttgaggaattaccccccatctgcaggccccayagaagttgcagggttttaggcagcaccaagcattgaggaggctgccctggccattgccatcaggcaaaggtgcctgtgtgccagggtaagacctgagaggtccaggggctctgctgcaggtgctgtcctgggctccaggaatcactggccaggagctctgggatgcaaggcaggtgtgtcatacaggtgtgtcctaagttgtagccagcgctgg

SEQ ID NO: 319216 - DNA, 589 bp, Homo sapiens
aggaaatggaggcacgtgggggcgaggtgacttggtgacttgtccaagtcatacagtggtgaggagcagagctgggattcaagctggacagccttggtccagagggcacatayttcactgtggatctgtgccatcccctccattattcagggccacaatggaggagctctgggcctcctgtgctgggtgctggcctggccatcctttgaggggagggggacactgccaggctcttgttgcagaggaggaagactagatgccctgcagtgtctgggagtacttctagctgcttcttctcaggtgaggaggaatcatttgatctgtcaaaatgagtttgggccagtgagggttacccaggtcacaaactctggttaagcagaagaggatctagtaagagcatgagaactctgcttgggaaatggcaagatcaagggcagagctatggtccaggtagcaggagctggcaccagacatctcaactcagtgtatctggtgggaatcaggttaactcttttccctatcttgtgtcatcttggctaacagaatatctgggggttggtggaaagagagctcatgagattgccccagc

SEQ ID NO: 319217 - DNA, 589 bp, Homo sapiens
aggaaatggaggcacgtgggggcgaggtgacttggtgacttgtccaagtcatacagtggtgaggagcagagctgggattcaagctggacagccttggtccagagggcacatatttcactgtggatctgtgccatcccctccattattcagggccacaatggaggagctctgggcctcctgtgctgggtgctggcctggccatcctttgaggggagggggacactgccaggctcttgttgcagaggaggaagactagatgccctgcagtgtctgggagtacttctagctgcttcttctcaggtgaggaggaatcatttgatctgtcaaaatgagtttgggccagtgagggttacccaggtcacaaactctggttaagcagaagaggatctagtaagagcatgagaactctgcttgggaaatggcaagatcaagggcagagytatggtccaggtagcaggagctggcaccagacatctcaactcagtgtatctggtgggaatcaggttaactcttttccctatcttgtgtcatcttggctaacagaatatctgggggttggtggaaagagagctcatgagattgccccagc

SEQ ID NO: 319218 - DNA, 589 bp, Homo sapiens
aggaaatggaggcacgtgggggcgaggtgacttggtgacttgtccaagtcatacagtggtgaggagcagagctgggattcaagctggacagccttggtccagagggcacatatttcactgtggatctgtgccatcccctccattattcagggccacaatggaggagctctgggcctcctgtgctgggtgctggcctggccatcctttgaggggagggggacactgccaggctcttgttgcagaggaggaagactagatgccctgcagtgtctgggagtacttctagctgcttcttctcaggtgaggaggaatcatttgatctgtcaaaatgagtttgggccagtgagggttacccaggtcacaaactctggttaagcagaagaggatctagtaagagcatgagaactctgcttgggaaatggcaagatcaagggcagagctatggtccaggtagcaggagctggcaccagrcatctcaactcagtgtatctggtgggaatcaggttaactcttttccctatcttgtgtcatcttggctaacagaatatctgggggttggtggaaagagagctcatgagattgccccagc

SEQ ID NO: 319219 - DNA, 365 bp, Homo sapiens
ccagtgcactaagcaatggcagggcacttgacttatagccagcccatcccactaagcaaaggcagggcaccttgacttatagccagcccaccccaccaagcaatggcaggacacctgacttgcagccagcccactcgactaagcaatagcaggacaacttgacttgtagccagctcaccccaccagcaatggcaggataccttgacatggagccagcctacactactagacaatggcagggaaccttaacatacagccagcccaccccaccaagcaatggcagaatacctttacttatagctakcccactcaactaagcagggcactttgacctcccaccaacccaagaccatacacagtgggag

SEQ ID NO: 319220 - DNA, 365 bp, Homo sapiens
ccagtgcactaagcaatggcagggcacttgacttatagccagcccatcccactaagcaaaggcagggcaccttgacttatagccagcccaccccaccaagcaatggcaggacacctgacttgcagccagcccactcgactaagcaatagcaggacaacttgacttgtagccagctcaccccaccagcaatggcaggataccttgacatggagccagcctacactactagacaatggcagggaaccttaacatacagccagcccaccccaccaagcaatggcagaatacctttacttatagctagccyactcaactaagcagggcactttgacctcccaccaacccaagaccatacacagtgggag

SEQ ID NO: 319221 - DNA, 403 bp, Homo sapiens
tatatttgcctgctgatctcattcttctgtgggggtcttcaaactggttgctggaatttggggtctgaaaatcatcttaagtgattcttaaacaaaagccttatgattttaatgtcagaaatcctatctatagagacaacggagatgcaagtcatcaatatctaatgctacctgacatttaacaacaaggaagtgggccagaacgcaggtctattgatgcttaattataaccatatttctgtccagaatctggcacgcaattcttgtgaatcctgtggggacagtttcaataatttctatttccaaatgaatgctagaataaatyactttattggttaattaatacccttgttatgataagctgtggttgtttgctaagtcaaagatgtaattgaatatatat

SEQ ID NO: 319222 - DNA, 573 bp, Homo sapiens
tatatatacacatatgtgtatacaatctatagatacagagatacaccaccaggttggcagaaggggaagttggatctggaaaaaagaggcagcagaatcattatgcagttccaaattcacatttcggaggcactcattgctaatatcagctaccaacatgaagcttttcctgaggtgttaccactcctgctttaacacatgggtcccaaaatagaccaatctcccacccaccttctgtttagaaaagctgagatctttcaaaaagactagttaactcagattcctccttcaagaaaccagggctaagagggtgagccaggcatccttgtttgtggggrtgggtgtggcatgattgtcagtgggtgttgaatttcatttcaattccaacaaggtctcgcatacacacccacaggattgaggatagcttccttcacacatattctttttgctgttcaggagtatctcagtttctgggagaagcagaaccgtcaatctcaagctgaacagggcaaaggatcaaatgtcagtcagagcctataaactaaacagactcactaccagaataaaacatca

SEQ ID NO: 319223 - DNA, 526 bp, Homo sapiens
atgcctccagctttgttctttttgcttaggattgtcttggctatgcaggctcttttatcaagctaccactgactttcttcacagaattggaaaaagctactttaaatttcatatggaaycaaataatgggagtatttcaaagggacacaggagtcaaatgaaacagtccccaatggccaaagctggaataatttgagcaataatataaataaggttggtttggattataacccaaagtataatacaaaaatcaattaattcatactggcataaataaatcatgggatggataaataaatgggagagaagagacaaatatcatgtacagaagaacttcaaataatttatgtagatactctgctttcaagcaggtgaggcagaactccaccctcctcaagtgttgactgcacatattgactttcttctaaagactatagtagggaaggggaaaaaacaaactatgttggaggagcctcatacagtacctctgctgggtgagcaagattaacgttaatagtaataagta

SEQ ID NO: 319224 - DNA, 522 bp, Homo sapiens
ttttttctgtacgctatgaagtgattttagaaggatgtagtagcctgaagaattgcaaataaagaacattattatttcaaccattctyatctattcaataaatgtttcttcagtgtctatttcatgttcaaaatcctgaaaaatagaaaataaactgtaacttttcttctttgtgtgaacatgcagattattatatttattttaaagctagagataacttctagtgtagcagataaggtggtgggaaattttgggaaaatatgtagataattataggcaaaagttcagcataatgtcacagtaaattttataaggtaagcttcatggaagtacaaaataaaaatctaaattaagcctgaagtctcaatagtaactctctttctttcccttcctcctgcatcccttctgcatgtagattatcccatgtcttctctttaacaataatttatacatttttctctagaacttcctatttttgatccatgcaccaaaagtttctgtgataaaataatataaataagc

SEQ ID NO: 319225 - DNA, 554 bp, Homo sapiens
tataaacccttttggaaagcattgtgaaggtctaaaacatgaaagattgaaacatattttatatattttgatcgaagatagacacacaagacatatgtgttcttatttaacatataaaattgattaaagatatatacctttcaatcatatattcactgttcagaatactatgcagctgctgaaatggtaattgtatgtttgaagcaactacgaaataatatacgataaaaatttgcatttttttcttgaacttgatgttctatttctgcctgtaattaaattttgtgctgttgtagtttttaaataattgccagacgttctttagaaaagtcagcaaatagataaaaaattaaatatatagtgttattttgtatcgaagctgtttgtatttagctttaaacttaacattataaatgtgttttctagtttatctgcagagcacttayagttatattaaggattatacaaatgatattctttcattagctgtgcatgaaatggtaaagagatgagcttcttccaagatgtgttataactgaaattcagacagaaat

SEQ ID NO: 319226 - DNA, 584 bp, Homo sapiens
attcttcatacccagctgctttttggcattctgaacagaatttttttccttcattttgagtgttgcgtgtagatatatatgtaattgtatatatttttaaaatagcattgcttcattaagaaattttttaaaacccaaataaacaaaataaaagaaaatatagttcaactatccctgcatctcaaaacagacactatcctttccccatgcagagctcttttttttttctyttatgtcaatccatatagattttctttagttcctctctttcatgttggtgaggggaaggaaatagattttttaatgtagatactatttaaaatagttcttatttttctgatgcttatagaactctaggaagctaatctccctgtgttcatgtcctaaattttaacagattgtcttatagaagttacgttgtaccaccactgtgtgtttacacatacagaagcacatgtgtttacagcaggtcctctaataacattgtttcattcaaggtcattttgttataaagatcaactttaattttttccccccatcaagggggaagaaattgcttcctggtcagaccactgtctgggtac

SEQ ID NO: 319227 - DNA, 569 bp, Homo sapiens
gtttcatgactgcttcatgagacacgcgtggaaaaagttcaaagaatgaccatctggctggcttcagctgctttctcaaatgtcaaggtgtcacattttgggggtagtattagtttgttgcacaagtaattgcggttttgccattacttttaactgcaattaccaacctagtatgttttgaaccaacctaatatgttttgaactccatcattagagaccrtcctaagtcagaagtgataacctgatgtcacttaaatgtaaagaaaggaatggatatgtgattccataaaaggaagttttgttttgcctttttagaatacaaggccaccccttagcacaataaatatgagggatcaatagtggagtcaagcctctgaactcaaattgaacaggagggcgagtggtataaaaatataaaatccacttataagatttctcaaccagattagctatatgcataaagtgctggttcattttctttgtgttttgtttttaatttgttgttgttgtactgttagagggggttttttcttttttcttttttttttttttttttcgttgctagcagc

SEQ ID NO: 319228 - DNA, 564 bp, Homo sapiens
cctttggcaatgccctcgcagacacaactaggaacaatactttccatccttcartccaataaaattgatactcagtgttaaccatcacacccctacagatagcaccttatagcctcatcccaaaataataataattgttgacataaaacagttgtttactctgtgtgaggcactggggtaatcgctttacatagatgatcttaatctattgctcacaaaaatccagtaaagtaatttttaaaactacttttttcagatgaagaaggaagtcaaatggcttgcctaaggtcataaagtttgtaagcaatagagccatgaaggctcatttttttcacacttaagcaatactgctttgtgttatgtggttcaggagttctgatgtcttgccatagaagtgagcagtctccatgagggaatgtatagtgtgtatttgtggcatctgctaattcaacagtaactgagtaagcacctaccatatgccaaatactgtgttcatgtgtgttcgtgtagtgagcatgacaagtgtaaagtctgccatcctaccacttgtagacaagcaggaaa

SEQ ID NO: 319229 - DNA, 564 bp, Homo sapiens
cctttggcaatgccctcgcagacacaactaggaacaatactttccatccttcaatccaataaaattgatactcagtgttaaccatcacacccctacagatagcaccttatagcctcatcccaaaataataataattgttgacataaaacagttgtttactctgtgtgaggcactggggtaatckctttacatagatgatcttaatctattgctcacaaaaatccagtaaagtaatttttaaaactacttttttcagatgaagaaggaagtcaaatggcttgcctaaggtcataaagtttgtaagcaatagagccatgaaggctcatttttttcacacttaagcaatactgctttgtgttatgtggttcaggagttctgatgtcttgccatagaagtgagcagtctccatgagggaatgtatagtgtgtatttgtggcatctgctaattcaacagtaactgagtaagcacctaccatatgccaaatactgtgttcatgtgtgttcgtgtagtgagcatgacaagtgtaaagtctgccatcctaccacttgtagacaagcaggaaa

SEQ ID NO: 319230 - DNA, 665 bp, Homo sapiens
gccaaatttcacttgggcaactgtggctgggggaaattttgtagctactggatggaaattttatacttacttatagcatgccagttatccatgagtattttccagcttcccatgcasttgggttagagccatgcaaccagctctgattcatgcaatgcaaccagaaataattcaagtcacactgggacaaagactatttagagaaaacttgtcttctccatctcttttcctcctctgtctcagtaaccttggaagctccacattaaagaaaatactaactacaagatggagtcaccctagataattgaatacacagtttgaggagagtgacagaaaagcatatctctattctgaaaaaataaaaataaaaagattaattgttcaattaaatgttacactcttaagccacagagatttgaggattctttgttttgcagagtaggctaacctatgtagatgcaaactatagatacaaagcagcttaaccttagagaccttaggaaatcatagcaagttccaatgaagagagccatgctgtgtatattcagacaccatgggcagagaacagttatgcaactgttgcaaataagagcctcgtgttcaaaatcacagagttacgtgatattaatagtaaatattacacactgagttcttcaagaagttga

SEQ ID NO: 319231 - DNA, 535 bp, Homo sapiens
ttttaaacaattaaaacaacaaatttttctttacgattctaacacaaattgaacaacatactagcattctgtcataattcagaacatgatttttaaaaaatgtttgaagcttttttgatgaggaggtaaatagctgaatgatcacaacctctccctaccctccttccacctctctgtctttcctctgccagccaaaagactctagaaactcttatatgtttaactcagtgcatatgtatacaagtggaaatgggtcaaacagccagtgacagacaaaatttaaraaacaagttgatatgcattttcagggagagaagagaaaagaatacatttaggaaatgaggaatagggtaatggaaatcaagtgccaacacacactaggcttttagagaggtgtgtgaaaatttggccaaggcaggtagagatggaaatgtgaatggtggtgctaaaaagattaaggacaactttgtccatgaattggacttgcagagagggagaagatttttgaaaccattgatttttccccataaaggga

SEQ ID NO: 319232 - DNA, 550 bp, Homo sapiens
tgaacagtttacatatgtgtgcatgaacatatacacacacatacacacaggaacaatgcaaatactgtatctaataccattctagtatcagttttcaacatctaataaaataactttgtgaacttcttagcatgcaccgctaattgaaatatttctcccgtggtctggattactttcttcagtccttgcaatcaacactatgtttcaatttcttgatgtgttccaaagccaattttggaggaactgaactttgcttaaatgtttctcttctttttttttttcacctgaatctgtttttatctccaaatatggaatactcttagtctatcctaccatttcaaactttcagacttaaaaagcaagggttgtgtctattgtttcattaattttgtttgcttttgtttcaatttacaatagtctttgcaatggtattccatccagtaaaaagtggaatatttctacttttttccatctaraaacatctcctcttttctgttctgtaaaacataggctgctgctttcatctgaatgctataggttatagttagtt

SEQ ID NO: 319233 - DNA, 592 bp, Homo sapiens
aggactgttttttctacttcttcagtgccttttttttttttcagtaatgtgcagttaaaaccaggtactatgagtgcgcacttgatttttgtttttttctgaggttttatttggtgtgtgtagatagttgttaaattggtgtctttgtgggggtggggtgattagtgaagccttcttttcagccattttgctccacctccaattggctattttaaaaataactactaaaggtaatattaaagagatcaaaagtaagactgaaagagcaagagaaaaataaattarcaatagtgtaaaatgaaggatttactgttagggattccgagaaacacctgcaagtggctttgtgatttaagaactgaatgcttctgagagcacagaagccttgcctgccctagcttgttcttacccagacaagaaatgcgcagcttcatcttctggcattgcaatataaagtttatcatcaagaggttgcctcttaacaatgtcttgctaagaataccagtgaagaaagttggatgccaccccagtttgggaataattactacgtatgtgttttcaccaggttactttgtcacttaaagtgttaact

SEQ ID NO: 319234 - DNA, 619 bp, Homo sapiens
gagctaaaatttgtctaactttctttgttcatagataagaaaagtttttcatggccatagtagaagtcagaggtgaaatcggaaattccaatttgcttcatcagggaatttcttttaggtgkattttaggattttaaatattattaaatactaagagtgacatttgctacttggtgtttaatatgtagtagttcacatgttaattcctctgggaaggatttacatcttcaaaagttaagaaaatgacaaatataatattgcagaaagaacaagtcaatttttactgagtgtatctatgccttcaaacaaaaaaactgagtgcctatcaagcgtctcattgttctctataaagtaaatgatattgttaagacaggtactgttgcagctcttctgattcaaagtgttttctctgcgattagagaaccaaagataggtaaagttgacatcttagcattattctattctgacactttgttccccttttctaagaaatggaatataaatgtacatctgctccaattttctactcacactggacctcctcaagttctttttcaccacatgattaaaagcaatgtctgactcatttgaacttgacattcatgttgtatttttcttg

SEQ ID NO: 319235 - DNA, 588 bp, Homo sapiens
tctctctgtgtagcactgaagtaatttcttctagtttatcttttaatttcctaattctcttctgttgagtgcaatgtgctgccaaaatgttcacggagattttaattttggttatcatttttcttttctaaaagtcccatttggtactccttaaatctgctrtgtccctttttatagtttactgttctctgcaattattgttcatgtttattttgttaaatacagtaagcatatttactttatatctgtgcttgaaaactacgccaagtggcaatgccaatatatttctgctgcatttaaaaaacacattttttttttcctgttggttctctctctgccttgttttcttgagtgctctggtaatttttcgactggttattgcccttgaaaattatttgtaggaaattgagttgctgaggtcaggatacataatgcccttttccagagaagttttatgtttgcttctgctaggttcctgggcagcattagctatatgagattcactgtttgagattccttggcctacccactcaaagtctgtgttgtaacaatttgtaagtggtctagcagtaacttctcagggatgtg

SEQ ID NO: 319236 - DNA, 315 bp, Homo sapiens
aagtctgtagtgtgggccttagtgaggagcracctggcaggtctttccaggatcccaggagccaatccttggctggcccacatctacccgcccttgtcactctgtcccgacccatggctccaggagggctctgctgctgtcccgcttctctgtaacccctctgtccactttctctgggagagagcagaaggccagccagggtgtccctacccacttgcacccatgggtggtttaccccacaagaccagagagtgctggccaggtcgcagcatgctctgggcctcagcttacacataaagcttctggtagtttcca

SEQ ID NO: 319237 - DNA, 519 bp, Homo sapiens
ataagaaacatgacatcttgaagaaaataataaattttatatacaaaaaaattctaaagtattgaagctaatatgggaggccccacaggttttcagtcgccctagttttcttgtgattttatgccactctcacaccccaatttctgagtagaagatttaaactttggaaacacctaagtttctgaattatcagaagaattttattctaaattaaatttttacttcttataaccctagaagtatttactttgattttaaagaagtccttgtcccaagcaagttaaattatcttgtagaaaaaaaaaaacacgtgctaatttggcaggttcctctcattcttagaacactattaatctgagactttttttccctaaaagaaaatcatctcatgcttctgcaatattattgattggctattccatcrtgtaaacatactaaatatttctcaggagactatatttacataaataccaagacatttcagacaatggctaaatagatttcatataccttgtattt

SEQ ID NO: 319238 - DNA, 561 bp, Homo sapiens
cccatcatgtgattcagcatccttctctgcttgacattcagttttacagaaaatcaggaatcataagactaggtgtttcaaagaaaatgattcttattgtttagacataagctttatcagccttggagtttaacaatgtcttatgtgagatactgtaatttgaggtcaaggtgacctgcacttacaaatatcatgggtttttttttttttcaccatgttagttttatcragaatttgctcccttttaaatgtaccaatctgtaatttcttattcattagagtcattaatgactatgtgtatacaatgcaaatcttctaagttttttgctaacaaaagagaagggaataagacaataaagaatagtgtgagtctgcatggaggatttattatcttaaggcacaattatactgcagaccattttcggttgtacagcaaaatctttcctacttataaataggaattttaaaatatttattcaggtattttgttataaaactgacctctgaccctaatgaaaatatgagacaagtttcagtagcaaaaaggaaaaagacaaggcc

SEQ ID NO: 319239 - DNA, 604 bp, Homo sapiens
gaggatcaggaaaaataactagtgggtactaggcttaatacctcagtgatgaaataatctacacaacaaaccctcatgacacacatttacctatataacaaacctgtacatgtacgtacccctgaacttcaaataaaagtataaaaaaagagaaaaatatctattaaacacctactgtatataacagcaaacatacaaaaagaggagtaatcctgttcctacttttttaggagtatataataataacaatgttgttcttttagataagtatattgagctataaactctggagactccatagtagtaaaaatgaaatggaggtgttgaaaatgcaaattatcaacaaaaattattttgtaaaatattattagaaatgctgcaccatattttaatgatgacaccaagtagctaataagactatatgcagtcaaaagttgggaaatagattagttacttatttgtcaaacttttattttgaaataccaaatctttctgactaggcaatatyatagcatagtatcagagtaaaaaggcagcagaacgacttgtaatactttcttttaccccacttgcagccaatgtccagagggatatatgtgtgtga

SEQ ID NO: 319240 - DNA, 619 bp, Homo sapiens
ctccagtgacatatctaccctaggttttgttgtcaacgtgggtatgcctctgtgtgtgtgtgtgtgtgtgtgtgtgtgtgtgtgtgtgtgygcgcgcgctccccttctcccccaatttgtaatgtaaaaaatctccatatcattagaatattctgttaacaaaaagtgactgggcaaacaataaaataaaaaatgtaatctttattagttttgcacattttaaatgttggttagcattatttagcataatagtagcattttccagcatgcagttcacgaatacagtttatctaagtagttttaaggaaaagaggagcctatggtttgcttctgtaagaaacacaaaatgtcctgatgtaattgactatataagttgactactctgtttttgtggaaaaaaaaattatgaagcccacattctatttagaacaatctagagcagcattactccaaagaaatgaaaacataaaccgaagtcagaaaaaaagaacaaaaataacataagcactaccttcaattcagttagtgcaggtactaccagaaatataaataaaattttaaacccttttccaattgcaaagcataatttggatatgaatcgtgaacctattttgctcct

SEQ ID NO: 319241 - DNA, 530 bp, Homo sapiens
tgtgtaactttggcaagttttcctttgttcaaaatatgtttatttttctcatcttaaggctggaataacagtgtgtcttayggcataaagactgaatgggacaatatatgccctccaatagtactttgtccatggtgaacatttaaacaatagctgttattaacataacctgaattactaaggacctcacatttttactcattattctagagctcactcatcgcaaaaacaaatgtatttcttttataattactttagtaatgtgccttttttgttcccaaaaggtacaactttaataactcaatttatttaaaatttttatttaaatggaattaagtagtaattttcttgacatcaccttacacttttgaacatttttaacttccaaatagcttttagatcttcataacatttctataagcatcataggacagatatctcatttaataaattaggaaacggggtaatatagatttagcgatttgctcatagtagagttaaggcttataagctcttaatctagtatccat

SEQ ID NO: 319242 - DNA, 537 bp, Homo sapiens
ctataaactaatgcttcatgccgtaaaaaaaggcatggaaaataagtcaataatggcaaaatttctaatctgttatgcatgatggaaaatgattattgcatctttgaaaaggataaaataacattttgtgtgactctgaccaataagatgcaagttaaggttaatgtataaattacctatagtaatgagtcaaaattatattttctgttcattataagtgttttactttattgttataaaaatgatgtggatttgtatgtaatctttaagttagtattactagttttataaattcagtcaacacttaatatctaaccatctaatcttgaatatattcaaataatgcaaactttggcattatacagacaaaagttttaacaactcctttcatttttttcttracactcatacttaggcacatgtgtgattcacattattttcaggaaaactcgttaagtacagtatatcatcacaaagaataagtacctgatatagaatttactttagattaccattatatcattacacatagtactt

SEQ ID NO: 319243 - DNA, 584 bp, Homo sapiens
taataaacataatagaaaaaaaacctcaggaagttttaaagggttaaattacatttagatttaaattatagtgtaaacaattctgaaattgaaacataatgtaacttctaatgcttgaaacctcaatattacaaactttctcccttattgatgtgataaagcaattcttcctttgagatttctctcaattggctcatttcacagtaacattgttaagttttttaaatagcttagttttgcctttgttcagggtcaaggaaatataatgcatkcatgattcttagctcaagaaacactttccacaagaaaccctcatagtcttgctgggttagtatctttttggggtaaaactactcaatatgaaatcaggatagttttgctgtagctttctaaagctgaaattttgccaagttgataatagaaaacatgatgcttaactttaacacatcttgaagtcagtcacttgttttcagtaaatgcagtattaatcattggggatacaaattctataaagggctgtttgggcttgccgtaaatctagtttacattctaggaaaactttcactgctgaataaagtagactt

SEQ ID NO: 319244 - DNA, 536 bp, Homo sapiens
attctgggagccaaataagatacatatataaaactcttagaacaaggtcaaatgggataagtgtagtagtgacatagggtagcacagagttttgttttaatatcttctgctaactttaaaaaataaatatgtgattttaagtgcatattacactaatttaataaaaatctcatattttgcctttatgctcagtctraaacatggaagatttaaagttactaatactgtaaaactgcttcagctctgacgaatgaagtatctgtgtacagaatgatgagttgttagttaatagtactctttgggccatgcttgggatattggccttttctaggagtctgtatgagaatagtcatttatctccttatgctcaatgctttcaacttgtcaaatgaccatgtttcataagatacaacataaaattgttctataattaacaaaagaaaaaagaattctatctgctgagaaaatagaaaagacgttggagaagagagaatatttgacccagacatttaaaatatccgccgaatttgctatgt

SEQ ID NO: 319245 - DNA, 434 bp, Homo sapiens
aatctacacataatcgtgattttatgtatgactgaatgtttaaggctgattccattttagaatacaatatataacataaaaagctctactctcagttccaagagttataattagtttrgcatggatttttattgtcttagaaaaaactgatattcatggtttttataattctatctttgggtaataggcaattggactctctttctatatatatttgcttattaaaatgtgttattataattaagctttaggctgtgtccacaagatgggaaaacattggagtaaaatatagtaaaaccatagaaattgagagtgggttgaaagtcttgtttaatctgtaattacagatgaagatagtaagaatgtaaatgtccatagaagacttcagtggctttgttaaaggcatgtgttcatcagtgttgaagtaaaactca

SEQ ID NO: 319246 - DNA, 603 bp, Homo sapiens
caaatccaaactaacatggcaatgggccatggaaactcactggtctagttttaaaactagtcttaggcaagttatttaaactcagttttattatttttaaataaagacmagagctatcttgaaagaatctgtggattaaaaaagaacagtaattatactgatattatatatagcatgtagagtacatagcttttttttttttttttgcctgcttaggacaccttttctaacagttcctcttctcttccttttggagtaaatctctgccccactgtcttcccatgtggcttggtggagctgacccaccccttggcaacacaggttagtatatgacagagaccatcccataccaaggagaccatcacataccactagccaaagtgagtggttcagaggaggccatgtgacctaattagactcaattctaggacaactgctagagcttttgaaggaaacctgggccttttttctttcttctttcttgttttagcagaagatagtagttacaaggctgtaggatgttagtttagcaccactggtggctatttctgccatcttgtggaagagccagcctgcaaatgaagccagcatgggtgacagcag

SEQ ID NO: 319247 - DNA, 475 bp, Homo sapiens
aacacaggttagtatatgacagagaccatcccataccaaggagaccatcacataccactagccaaagtgagtggttcagaggaggccatgtgacctaattagactcaattctaggacaactgctagagcttttgaagraaacctgggccttttttctttcttctttcttgttttagcagaagatagtagttacaaggctgtaggatgttagtttagcaccactggtggctatttctgccatcttgtggaagagccagcctgcaaatgaagccagcatgggtgacagcagagctgaccatggaaaaggagtaccctcatgacattgtttgaggtactgggtattttgatattaaaaccagattcactagacacatttcctttatttttccccaaaagttgtttctgttgggttttggaaactttcagttgaaggatctcctatagatatggcagatactctaaaaatgccaagcat

SEQ ID NO: 319248 - DNA, 572 bp, Homo sapiens
tgtcatttctaagactttactaattcattacttatcataaatgttctagtactagatgaggtttttgcttctgggcattatatatctctgtttcccgtagaagaggacacatgtattacgttctggacttgaggaggcatttatcacagccaaaagatgtttatacttgaggtgactgggagtggtaaaccatatggctttggtgaccctcaaagtgcagatggaggagctttatttaaagtaatcctaacccatgaagycttacagttaaactcccttgggcatctgcttttctccagtcaaacaaatatgtacgatagctcacaatgaagtatttcattttccctgtggcatttcacacagaagtcttaactgtaaaggcaaccttataaatgctttgtacccgaagaaactggccttttataagtaaatcattatgtagtttcttcctttggagggcagctctgtgtgactgcttgggcctctgtggttagatctgtttggttaacgggcttttgggctttcacacaaagctatactctccacaaacttctgtgagataaaaaggtgat

SEQ ID NO: 319249 - DNA, 518 bp, Homo sapiens
attttgacaatggagatggagaataatggatagagtcagaattggttttggaggtgtttaggtgtcagacagaaggaagctgatggcctcattttcttagataggaagtttgagaagaaagatactgaacctgaaaattccaatactaaaattggccatgctttggagaaacagaaatgttcttatatgtgtatatttaagagttagaatacagagacgcattttaaatattttaatccttatayttttattgacactttagaattcactaagggcattgacatgttttatttcactttatcctcaaaataatcctaagattggtattagtataatcttctccattgagatggagaaattgaggggaatagtttgctcatagttctcacacagcaagcttgtaatcaagctgggctcaaaagtgttctttccagtcaaagaaaaattaactgaccatataatagtgtagcagacccatggtatgtacattctgatgatatagggctgaaaaatgtttc

SEQ ID NO: 319250 - DNA, 604 bp, Homo sapiens
tttgcacccttaacataagataaaacaaatcatacttatattttcataatgttgcttcccagattattaaactgttaattaccagggttattaccaatttttctatataacttccttcttgctttttctttaaaaccagaaatgatttttacatggcaaggattgctgaagaaggtatgagcttgctgaacaatggatggtttaagtttaggtctgtgctgcccaatayagcagagattaattagccttgtgtagctattgagtatttgaaatatgtaagtgtaactccatatttcaaagatctaagacttagtataaaaatatacatatctcaaaaattttttatatcaatttcattcccaaatgataataattcagatatgttgggttaaagaaaatactgttaaaattaatttcacctgctttgtttttcttttaatgtggctctcaggaaatttaaaatcataactgtagctcagatttgtagcttacattatatttctgttggaaagtgctggtcaaggtaaccttcatcaattcttctatattctattaaaacaaatagttgagcatctcctagtttataaatgtcttggtgtcataa

SEQ ID NO: 319251 - DNA, 604 bp, Homo sapiens
tttgcacccttaacataagataaaacaaatcatacttatattttcataatgttgcttcccagattattaaactgttaattaccagggttattaccaatttttctatataacttccttcttgctttttctttaaaaccagaaatgatttttacatggcaaggattgctgaagaaggtatgagcttgctgaacaatggatggtttaagtttaggtctgtgctgcccaatatagcagagattaaytagccttgtgtagctattgagtatttgaaatatgtaagtgtaactccatatttcaaagatctaagacttagtataaaaatatacatatctcaaaaattttttatatcaatttcattcccaaatgataataattcagatatgttgggttaaagaaaatactgttaaaattaatttcacctgctttgtttttcttttaatgtggctctcaggaaatttaaaatcataactgtagctcagatttgtagcttacattatatttctgttggaaagtgctggtcaaggtaaccttcatcaattcttctatattctattaaaacaaatagttgagcatctcctagtttataaatgtcttggtgtcataa

SEQ ID NO: 319252 - DNA, 582 bp, Homo sapiens
acatatttatgaagcatatagtggttttaatacatatgatgtatagtgatcagatcagaataattagcatatccgtcatctcaaacatttatcattttttgtgttgggaacattcaatatcttccttccagctatttgaaactayataataaattatttttaactgtagtcatcctacagtggtgtggagagctagaatgtgttcctcctatctagttgtaattttgtgtcctttaacagatttctctctgtccccacctttccccgatttttgtctagaatcctctgctctttttacttctaggcagacttcctttttggaaccttttgtgtttggtttctgaatcttgcctcttttactttttagtactcagggcagaaatatttcccctcccttcttttagatctctagctttgccttttactttaccactccttgtctgtcttttctgttttggtcatttattacctctggtcatggtttgggctgaacagtggccaaggagccagcatcacaggtgttctcttctaagtatggtcctgtctccttaggatgagcctggttattttccttatccacgg

SEQ ID NO: 319253 - DNA, 582 bp, Homo sapiens
acatatttatgaagcatatagtggttttaatacatatgatgtatagtgatcagatcagaataattagcatatccgtcatctcaaacatttatcattttttgtgttgggaacattcaatatcttccttccagctatttgaaactatataataaattatttttaactrtagtcatcctacagtggtgtggagagctagaatgtgttcctcctatctagttgtaattttgtgtcctttaacagatttctctctgtccccacctttccccgatttttgtctagaatcctctgctctttttacttctaggcagacttcctttttggaaccttttgtgtttggtttctgaatcttgcctcttttactttttagtactcagggcagaaatatttcccctcccttcttttagatctctagctttgccttttactttaccactccttgtctgtcttttctgttttggtcatttattacctctggtcatggtttgggctgaacagtggccaaggagccagcatcacaggtgttctcttctaagtatggtcctgtctccttaggatgagcctggttattttccttatccacgg

SEQ ID NO: 319254 - DNA, 582 bp, Homo sapiens
acatatttatgaagcatatagtggttttaatacatatgatgtatagtgatcagatcagaataattagcatatccgtcatctcaaacatttatcattttttgtgttgggaacattcaatatcttccttccagctatttgaaactatataataaattatttttaactgtagtcatcctacagtggtgtggagagctagaatgtgttcctcctatctagttgtaattttgtgtcctttaacagatttctctctgtccccacctttccccgatttttgtctagaatcctctgctctttttacttctaggcagacttcctttttggaaccttttgtgtttggtttctgaatcttgcctcttttactttttagtactcagggcagaaatatttcccctcccttcttttagatctctagctttgccttttactttaccactccttgtctgtcttttctgttttggtcatttattacctctggtcatggtttgggctgaacagtggycaaggagccagcatcacaggtgttctcttctaagtatggtcctgtctccttaggatgagcctggttattttccttatccacgg

SEQ ID NO: 319255 - DNA, 313 bp, Homo sapiens
aatgtcattcagggacagaatccctcaatgaatcagagaaaaagagggctaagtattgttggcayaggggattgttcttctagtaagcacaggtgaaattctcccttccttcaaatgcgctttgtggtaaagctctatctgttttctggactcatactccttcaaagatgatagagggaatgcaggcagaggtgagacttggagcagtgcttctcaaactctgttgaggatgtgaggtctctattcttctataaaatgaagtaaaaattagtttctagaaaactgaaatgaaaaacaggcccacaacaacatc

SEQ ID NO: 319256 - DNA, 586 bp, Homo sapiens
  misc_feature (1)...(586): n = A,T,C or G
tgatatgataacagaaaaatctacttccagactcaagtttatccatagttatgatataaaacacttcagtgtatcttagaataaacctttaagtatattttctgtcagagaatgtcaggagtctttggccagtacttagttaattcttgaaatntcctgatgatttttgtgaaggaagtactggaatattggctgaatttcaaattcaagtcatgagttatgatgctgccatgcaaaactgtttgcttagtaaagactccggaagttaatgagagaagttggcatatatttccaaatggtcttaagggatttggtttcatgattcccattggtgttaaaaaggactccacgactaaattcatttgttaatcaatttaggaaaacaattcacttctgattgtatcttgtttgatagctttgacaataatagatattaaaataccattataattatcataagctcatacttttttttaaaggattctaaaatttraacggccattctaattttaatatgacagcaagaaatttctttagtggtataaatatgctattactaaaattaaaagatttgaaacataaaaat

SEQ ID NO: 319257 - DNA, 586 bp, Homo sapiens
aagttcaacttatatttttaataacatatatacatttgggattttgaaactgtgtcttaatgtagtcttaaaataaaactgaagagcattttattaaagtcattcctagacaaaattacgcagcaagaggacaatgctcattggccctcaggcctgctggcrttatactgattatcactctcttttgcctgtacctggtgttcacctgaagaccaccactcttggacatttacccctttttctttaaaatctacagtagccaaaccaaatgtggtcaaagcaattgcagaaaagagccaatatggtagacattggttccagttaaattccagataaatacattgaatcaagaatcaaaaagggttagttacaaatgccatgtgaagacaacattgaacctcgcaaagttttcatttccatcaggcacattcacttcatgtcaggccaatatagttccaagcgtggtcaccaacaaattgaaaaataatccaaagtttcagggttgtagaacttgaaaattcagtagactgaagactaaactaacagaagtggaactttttgtagagctttcagaaaccagaagcat

SEQ ID NO: 319258 - DNA, 643 bp, Homo sapiens
ggtttttaaaatgaagagatttggaattgtatcaaatgcttttcagcatcaattgaaatgatcatgtgatttttccttcatttcatggatatgatgatgtatcacattgattgatttgtgtatgttgaaccattcttacatccctgggataaatcccacttgttggtgttgaataatttttctagtgcattgttgaattcagtttgttaatatttttgtgagaatttttgcatcaatattaatctgagatattgatctacagttttcttttttgatgttaattgtgtatcttcatgtggacttttattctaagagaagatccctagaaagccatggaattaaagtttgtgcaaatatcataatatgataatggaaataggatgttgttctacaaaaaaaaaccctcaaatatgagagaygattaaaatttttttattcttttcatggttgctgtgagtttggaaattggcaaggatgtaatgtcaaattttctgtttcagaaaatctttacatgactcaaggtgattcatccactagggatttggaagactagggactgtgagtgcattttcatggtggtttctttacttatatgtctggtccctgagttgtaatggttaaatgatggactcaggcaatactc

SEQ ID NO: 319259 - DNA, 643 bp, Homo sapiens
ggtttttaaaatgaagagatttggaattgtatcaaatgcttttcagcatcaattgaaatgatcatgtgatttttccttcatttcatggatatgatgatgtatcacattgattgatttgtgtatgttgaaccattcttacatccctgggataaatcccacttgttggtgttgaataatttttctagtgcattgttgaattcagtttgttaatatttttgtgagaatttttgcatcaatattaatctgagatattgatctacagttttcttttttgatgttaattgtgtatcttcatgtggacttttattctaagagaagatccctagaaagccatggaattaaagtttgtgcaaatatcataatatgataatggaaataggatgttgttctacaaaaaaaaaccctcaaatatgagagatgattaamatttttttattcttttcatggttgctgtgagtttggaaattggcaaggatgtaatgtcaaattttctgtttcagaaaatctttacatgactcaaggtgattcatccactagggatttggaagactagggactgtgagtgcattttcatggtggtttctttacttatatgtctggtccctgagttgtaatggttaaatgatggactcaggcaatactc

SEQ ID NO: 319260 - DNA, 501 bp, Homo sapiens
agaataagtagtaaggctggatcatatagcagtgtgtggataactttttaggaactcctkaatactttttcaaagtggtggtatcattattttatgcccaccagtagcatttgagaactcttaactgttcagtatcttagccaaaagttggtgtgctcccacacaaatcttatcttgaattgtagttcccataatccccacatgtggtgggagggtctaggtgggaaataattgaatcatgggagcaggtttccccatgctattatgatagtgagtaagtcctcaggagagctgatagttttataagggtcttcccccttcacttggctctcattctttttcctgctgccttatgtagaaggatgagtttgcttctctttccgccatgattgttaagtttcatgaggtcttgcagccatgctgaactatgtcaattaaatctctttcctttataaattacccagtcttaggcagttctttatagcagcatgagtatggact

SEQ ID NO: 319261 - DNA, 661 bp, Homo sapiens
tgtgactggcagggaatgggttaaatatgaaccctccatgctgacatttcacattttgttcctatggcaacccatccatcaaaatgacactatatatatgtgtgtgtgtatgtatgtatatatgtaaacatatacatacataaattgtgtttttatatgtgtgtgtgtgtgtgtgtgtataaaatatatactgtccaattgtgaacctgtgagaagtcggatgacattgcccagggctcctgcaccccttatatatgctacaatacatctgtacctcatacctccaggtatcaatcacagcaggtgtctagcttcaaaactaggcactgatcccagacatcaagtgaagtgggggatttcctactcaggatacagagatcagcaattgatattttcctacactctcattgttagagcaacatagcaagaaactacaagtccctctattttttttaaatattaaagcaaaaatgaactttattattttgacacaaagagacagaaagaaaggtataatcattccaattgtgttgatggcttttctttacaatcatcatcttcaaaattttttttaattcctcaaaagattcggatacwttatgatgcataatatttgcttttcatccgtacaaaaacttgacaaaattaaaattacctcacg

SEQ ID NO: 319262 - DNA, 552 bp, Homo sapiens
ttctccagcactatttttaaaagttccactttgagtcagtgctttgagatatttagctatgctggattttgtactccgttatgtattcttctggatggtattctgtttcactcttttgtctgcttttgtgaaaatactacatctttttaatttaattttattttgaagaagttatcaagcagattttaatatgtgacaggatccgtccttaattattctgtgcaggttttttctaaaagtttttgtgtgcttatttcttctaagtgtggtatagtatcaacttactaccctaaagaaaaaaaamcatattgattgtatttttaatggaatcaaaataaaattataaattaaaccaaattagggaaaactaaaattgtgatgtttcaagacatttaaactaagagcaagggacatatcgttccattggctcaagtctacttttgtgtatttcaagagtggtttatgctacacacatgcacacacgtagactatggagatatgatatgtgtaattgcccaatggacttattttactcaccagccagaaaagccc

SEQ ID NO: 319263 - DNA, 586 bp, Homo sapiens
atcctaaacatccttaaaaactcccaaaaggaaatacagaaaaccctatttcaaatgcatctgttagaatagcttaaaagtcttttgacaaactcaaggttcatcacaatggtgggatttattaggaccctttatggacatgctacacaaagaaaaagcagtattatccaatgcagaaacctgtagctgcaagagagggaaataccatttaaatgcaaatctyctaatccaggagattcactctctaaatagaagtgagtcttcagggtgactcatgaagttagcaatatatgaccattcttccgggattacttattttaagaaatttaataatctgctttattatgtgaggaaaccacatttctaccacttatctcccagacttttcacagtgactgttgcttataatatgtggatttcctggttattaaaagtttcagtggctccttaagttataaatcaggtaccaaaaatctccagttctagctacattagtaaatggtctatgataattacatagtatatattcttcagtcacaattattggaaacgtattgaagaatagcatcttacaaagacgcatgag

SEQ ID NO: 319264 - DNA, 612 bp, Homo sapiens
aaatttatttcttaatataagttttacttttggtcacataattaggattggaaggtctgaaactgactgatttcctctactaaaaccagcgtcatgctttaaaaatctccaagaaacagaaaaaccgtatgagtttataaattagtttacattccttgaaggattataggcatgtgtctggctaggtaatgaagtgtttcagtgaaatagggcagaaagggatttcaggtcagaatcatagcatatgcaagtcaagggaggtttaaaaatcagatatgttgattgaggtatgttggtgaggacatagaagaaaggaaacctttgtaccctatcgaaggaaatgtaaattaatatagccattcttattctggaaaacaatatgkaatatccttgaaaaattaaaaccagaactaccatataatccagcagtctccttacagggtatatatatgcaaaggaaatgaaatctattatcttgaagagatgtctgcactctcatgttcatttttgcattatccattatagcaaagaaatgaaatcaaccttaagtgtccatcagtgaatgaatggataaaaaaattgtggaatatatacatggtgggatgctattca

SEQ ID NO: 319265 - DNA, 612 bp, Homo sapiens
aaatttatttcttaatataagttttacttttggtcacataattaggattggaaggtctgaaactgactgatttcctctactaaaaccagcgtcatgctttaaaaatctccaagaaacagaaaaaccgtatgagtttataaattagtttacattccttgaaggattataggcatgtgtctggctaggtaatgaagtgtttcagtgaaatagggcagaaagggatttcaggtcagaatcatagcatatgcaagtcaagggaggtttaaaaatcagatatgttgattgaggtatgttggtgaggacatagaagaaaggaaacctttgtaccctatcgaaggaaatgtaaattaatatagccattcttattctggaaaacaatatggaatatccttgaaaaattaaaaccagaactaccatataatccagcagtctccttacagrgtatatatatgcaaaggaaatgaaatctattatcttgaagagatgtctgcactctcatgttcatttttgcattatccattatagcaaagaaatgaaatcaaccttaagtgtccatcagtgaatgaatggataaaaaaattgtggaatatatacatggtgggatgctattca

SEQ ID NO: 319266 - DNA, 612 bp, Homo sapiens
aaatttatttcttaatataagttttacttttggtcacataattaggattggaaggtctgaaactgactgatttcctctactaaaaccagcgtcatgctttaaaaatctccaagaaacagaaaaaccgtatgagtttataaattagtttacattccttgaaggattataggcatgtgtctggctaggtaatgaagtgtttcagtgaaatagggcagaaagggatttcaggtcagaatcatagcatatgcaagtcaagggaggtttaaaaatcagatatgttgattgaggtatgttggtgaggacatagaagaaaggaaacctttgtaccctatcgaaggaaatgtaaattaatatagccattcttattctggaaaacaatatggaatatccttgaaaaattaaaaccagaactaccatataatccagcagtctccttacagggtrtatatatgcaaaggaaatgaaatctattatcttgaagagatgtctgcactctcatgttcatttttgcattatccattatagcaaagaaatgaaatcaaccttaagtgtccatcagtgaatgaatggataaaaaaattgtggaatatatacatggtgggatgctattca

SEQ ID NO: 319267 - DNA, 552 bp, Homo sapiens
taacttacatatatcctcccatgtactttaattatcctagattatttataatacctaatacaatataaagactattaacgtttaatagcatttaaaatacaaatagctgttattatgtgttttttatttgtcttatttttttttttctgagtatatactatctgtgctcattgaacttgtggatgtagaacctgcaaatagggaaagtcgactgaatctgataacagatataaattatgaaggagaagtcagggccagcctggagttgatactcagattatttaaactccaaaatatcgcattccataatatatatcttttgtaaaccagttctactacaaattayattggcaatacctttgttaattcttaaatgctttcatcatttctctattactttttgtcttggatcaaactcctacagggtccagtctatgtttaacatttctaaattttactcgcagtctatttaaaattatattagacctatattagaattacccgctataaactttacaaataagcaaactaagattcagtgaaatgaagtaa

SEQ ID NO: 319268 - DNA, 552 bp, Homo sapiens
taacttacatatatcctcccatgtactttaattatcctagattatttataatacctaatacaatataaagactattaacgtttaatagcatttaaaatacaaatagctgttattatgtgttttttatttgtcttatttttttttttctgagtatatactatctgtgctcattgaacttgtggatgtagaacctgcaaatagggaaagtcgactgaatctgataacagatataaattatgaaggagaagtcagggccagcctggagttgatactcagattatttaaactccaaaatatcgcattccataatatatatcttttgtaaaccagttctactacaaattatattggcaatacctttgttaattcttaaatgctttcatcatttctctattactttttgtcttggatcaarctcctacagggtccagtctatgtttaacatttctaaattttactcgcagtctatttaaaattatattagacctatattagaattacccgctataaactttacaaataagcaaactaagattcagtgaaatgaagtaa

SEQ ID NO: 319269 - DNA, 581 bp, Homo sapiens
gcagtctatttaaaattatattagacctatattagaattacccgctataaactttacaaataagcaaactaagattcagtgaaatgaagtaacattttccaggataggaaagctacttgctggcaaagcaagagctgaaacacaattctaactcactgagaagttcwcctttgaacacactattaaaaaaaaaaaaatcaggcctgggtgcggtggctcatgcctgaggcaggcggatcacgaggtcaggagtttgagaccggcctggccaatatggtgaaaccccatctccactaaaaatacaaaaattagctgggtatgcttttgcctgcatgcctgcagtcccagctactcaggaggctgaggcaggagaatcgttgaatgtgggaggcggaggttgcaatgagccgagatcacaccattgaactccaccctgggcaacaagagcgaaactctgtctcaaaaaaaaaaaaataataaataattgcgttaataatcacatatttttttttaatttttcaagcaattttgaagatgcaaaaaccacagtagaataataaggctcatatgaataggacata

SEQ ID NO: 319270 - DNA, 544 bp, Homo sapiens
agctgggtatgcttttgcctgcatgcctgcagtcccagctactcaggaggctgaggcaggagaatcgttgaatgtgggaggcggaggttgcaatgagccgagatcacaccattgaactccaccctgggcaacaagagcgaaactctgtctcaaaaaaaaaaaaataataaataattgygttaataatcacatatttttttttaatttttcaagcaattttgaagatgcaaaaaccacagtagaataataaggctcatatgaataggacatattgtagtagatattttgttttaaaaaattttttaaatcagaaagtaagatatgttccctaagtttttatccatcactagcacaaagatgttattatcattccagcagtactgggacaaactattagagtgattttacctaaaaccagaacacataggaaatggaagttagtaaacatttgagttatgtaccataattgaaataatagattctagattaaaagagataagtgaagacaaaaaaactaacaagtttttacagatcatgaaataaa

SEQ ID NO: 319271 - DNA, 591 bp, Homo sapiens
tttaaagaataaacaaatttacatttttgcatacaacttgcctcatcagaaaaagcattgaatattcagatatgtgtaatttgtctttgctgtcacattggtttagggtgtgatttacctgccttttctaagatatttaagttataccatgattaaataacatgaaggtgatagaccaatggaacattttaatctcacgaagaaaacaggtgcrcaaatgttagagagcaccctactcccactcaccctgcaatataccaaattcaagtgttgcctatgataatattcaacctccaacctgttccccagaggcatggcactgccaggagcaacttctcactagcaacaggtccttttacctctgacacttccaaaggccctgtcaccataaacaagctcgttttttctctcttgcctgattgctccagttacaaaataatgtgagacttgggaactttagagcaagaaacagtgcctttgttaccacctctatttcataagtgatggaatgtatttcatctaagcaccaaagatgccaaataatctatctgaattgaatagtcatttgggggcagaactgagtttagaaaa

SEQ ID NO: 319272 - DNA, 591 bp, Homo sapiens
tttaaagaataaacaaatttacatttttgcatacaacttgcctcatcagaaaaagcattgaatattcagatatgtgtaatttgtctttgctgtcacattggtttagggtgtgatttacctgccttttctaagatatttaagttataccatgattaaataacatgaaggtgatagaccaatggaacattttaatctcacgaagaaaacaggtgcacaaatgttagagagcaccctactcccactcaccctgcaatataccaaattcaagtgttgcctatgataatattcaacctccaacctgttccccagaggcatggcactgccaggagcaacttctcactagcaacaggtccttttacctctgacacttccaaaggccctgtcaccataaacaagctcgttttttctctcttgcctgattgctccagttacaaaataatgtgagacttgggaactttagagcaagaaacagtgcctttgttaccacctctatttcataartgatggaatgtatttcatctaagcaccaaagatgccaaataatctatctgaattgaatagtcatttgggggcagaactgagtttagaaaa

SEQ ID NO: 319273 - DNA, 496 bp, Homo sapiens
tcgcctggggcctgccagtggaccataaagaacacctgtggggttactgctctcaagacttaaagacaagcagggaggagatggtggctctcacacactgtgacagggagccacctgccgcttaccgaaagccaacctgagcaccgtgtccacacacccagctccagggattgggtgtagcaacartgcttgctttccatcatccctcaagagggagttggtgctgtctgtttcctcatctgccttttgtctaatctgttgggcaccttggtgtctccacagctcccgtctgaggtcactctggggtggatccagtagcagtgatgccctggggatggtggtgcacagagtgacttagccctggggtgcacataaccctgtggcagcttggccccaggggcagggggcaaggaaacctaggaccagggggcggggtggaggtaacttggaaccgggggtggggggtggaggtaacttaggctcaggggtgggacgt

SEQ ID NO: 319274 - DNA, 530 bp, Homo sapiens
cacggggctctcggctacctacagggtagctcctggttctgcccttgctgtgatgttggtttgcgggagagtgtgggggacagcccttcctaggcacctgtgcctgcacccattcaccaccttctcagccctcgtgggtgaacaggtaccagagacactttcaacaaggaacaaataaaactctgtctctatcaagaggggctgtcctaaggcctggccccttcaggcckgttccccggagccgggagcccagtagcaaagagcacacttgctgggagagggtttctaaatggggttgtgccctttatgcacaggcgtgaagacccctgatgtagtggcactgtatggcacaggaggtgagatgcagaggtcacaccacacagctagagcaacgggagactgagttgagccccagaggggggccgtgggtcaggaaggggcaggcccctcgtagggcccctggagcccgtcacagaggctggtggcattctcttgggttgacttcagctctggactgcttgaggcttcag

SEQ ID NO: 319275 - DNA, 481 bp, Homo sapiens
ccatgtgaagacagcaaacttaatcgataaatgttctgtgtgttctgacttctccgccaactggccactccttgtccctctccatctccttaggccttgctagtccgtgagatacaacaatattgaaattaggccagttaataactctacagttgcctgtaagtgttcaagtgaaaggaagagtctcacatstctcactttcatttctttttaattttaagagatggaggtcgtgctctgtcactgagactaaaatgcagtggcacgattgtagctcactgcagccttgaactcctgggctcaagagacccttctgcttcggcatcctaaagtgctgggattacaggcatgagccactgtgcccagctacatctctcatttttaatcaaaatctagaaatgattaagcttagtgaggccgccagttcaaaagccaagctagtccaaaagctggaccttttctgaatgataaaaaagtgaca

SEQ ID NO: 319276 - DNA, 625 bp, Homo sapiens
agcaaacttaatcgataaatgttctgtgtgttctgacttctccgccaactggccactccttgtccctctccatctccttaggccttgctagtccgtgagatacaacaatattgaaattaggccagttaataactctacagttgcctgtaagtgttcaagtgaaaggaagagtctcacatctctcactttcatttctttttaattttaagagatggaggtcgtgctctgtcactgagactaaaatgcagtggcacgattgtagctcactgcagccttgaactcctgggctcaagagacccttctgcttcggcatcctaaagtgctgggattacaggcatgagccactgtgcccagctacatytctcatttttaatcaaaatctagaaatgattaagcttagtgaggccgccagttcaaaagccaagctagtccaaaagctggaccttttctgaatgataaaaaagtgacacggacttattgctgatatgaaaaaaagtttgagtgatctggatagaagatcaaaccagccacaacattccctgaagccacagccacagagaaggccctaaccctcttcaattctatgaaggctgagaaaggtgaggaagctgcagaagaaaagctt

SEQ ID NO: 319277 - DNA, 625 bp, Homo sapiens
agcaaacttaatcgataaatgttctgtgtgttctgacttctccgccaactggccactccttgtccctctccatctccttaggccttgctagtccgtgagatacaacaatattgaaattaggccagttaataactctacagttgcctgtaagtgttcaagtgaaaggaagagtctcacatctctcactttcatttctttttaattttaagagatggaggtcgtgctctgtcactgagactaaaatgcagtggcacgattgtagctcactgcagccttgaactcctgggctcaagagacccttctgcttcggcatcctaaagtgctgggattacaggcatgagccactgtgcccagctacatctctcatttttaatcaaaatctagaaatgattaagcttagtgaggccgccagttcaaaagccaagctagtccaaaagctggaccttttctgawtgataaaaaagtgacacggacttattgctgatatgaaaaaaagtttgagtgatctggatagaagatcaaaccagccacaacattccctgaagccacagccacagagaaggccctaaccctcttcaattctatgaaggctgagaaaggtgaggaagctgcagaagaaaagctt

SEQ ID NO: 319278 - DNA, 488 bp, Homo sapiens
gggctcccagaaactctgccgtgagctgctagggcactgtcatccggggacaggagtgggattaggcmcagccaccaaccctccccaagtccccacaccctcaccctctcccttcttgacacgtcagtgagaaagctgggccggggcctggcggggtcacacagccagcctggccagaggcccaagctgctgccgttagctgtgggctggggccattcactgctttatgtgctatctcatcacaacacaggcgttttcaatagcggtttaaaggcccacttgttaccatacattgtatttcagactcctacaggttttgaacgagacagatagcaaagccgggtattgagaaaagctggcgcttggggttttcattgtcctggataaaagtaggctttcgtgcccagaccttccaaacagtccccagcctgaaggtcacaaagcaatgtgaccaagccaaggcaagcatggggtgagcagtaagtctc

SEQ ID NO: 319279 - DNA, 548 bp, Homo sapiens
ttacagacggcatccgagagctttagaaaagttaactcaccccttgtcaaatggctcttcattgtggagcccggctttgcactgggacagtcggactgcagagctgctcctctaaaccctagaggaggaacgttaagcagagaggacttgggtgtgcagccaccattccaggggtgcagagagaatgtggaatactcatctctagtcacgagaagcttaactacctggtggaattaccagccaggcacgcacgaaacagttaagccataatgtaaggtggcaggtaacaaaatgtgcacatgaacgataaagtgggtccgaccagacacctccagcccaggatcaacttctgatatgatgccagtcctcagcgagagctgtgtgatgggccgctttgtggctcccatccttccccacgtgcatccgtgccttctgccatggaactstgcatccctctttctaaaatggttgagccaatctcctttactcttgggtctgaaatcagtgataggatgtgttttggatcatacagcagttcacagaaacat

SEQ ID NO: 319280 - DNA, 548 bp, Homo sapiens
tctgctccatgcattggtgacatatgcctcttagactgtgatgcctcgatgccctaggctcattctgtcattgtcatcatctgtatcacatactatcattttctctttatgtgtctgcttctcatatatcctattagctcctcaaggccctagccatgtcctcattaatctctgtatccctattggccagcatttaatagatgtttgtggaatgaagtaataaacgaacaatcacatggcgaggagatttgactgtcatcaagcccagttttatagggcaagactggccagsgcaggtcttaggtggaaggcagggctggctcaatgcatatttgtagtctggttattagaaattgtaagcaatgtatcttagttagcgattactgcatactgctgggtaacaaaccaccccccactcagtcttttctgacaagcatttatttcttgtgcccaggcctgtgggttggctgggtttggctgattcctgatgtgcttggctgagtttggctccaggcagtcggtaaggtgctggtgtgccccatgtttct

SEQ ID NO: 319281 - DNA, 548 bp, Homo sapiens
tctgctccatgcattggtgacatatgcctcttagactgtgatgcctcgatgccctaggctcattctgtcattgtcatcatctgtatcacatactatcattttctctttatgtgtctgcttctcatatatcctattagctcctcaaggccctagccatgtcctcattaatctctgtatccctattggccagcatttaatagatgtttgtggaatgaagtaataaacgaacaatcacatggcgaggagatttgactgtcatcaagcccagttttatagggcaagactggccagcgcaggtcttaggtggaaggcagggctggctcaatgcatatttgtagtctggttattagaaattgtaagcaatgtatcttagttagcgattactgcatactgctgggtaacaaaccaccccccactcagtcttttctgacaagcatttatttcttgtgcccaggcctgtgggttggctgggtttggctgattcctgatgtgcttgrctgagtttggctccaggcagtcggtaaggtgctggtgtgccccatgtttct

SEQ ID NO: 319282 - DNA, 610 bp, Homo sapiens
ttttatccttccctcttaatttttgaccaaggagcagagaaacactgtatatttggagaaaccctgagtaagcttctctgtgttgttgttttgcctgagagccttttgggcaagagaagtctttgtggaagcccctgtgtaaaagagataaagagctgaatcagataaatcaggggtaaacatctcccggccccagttagaccccgattccrtttccttcccggcttagtgggacctgtaggtctcttgggaacacactctgcaagcctattagtattctagagtaggaatcactacattctttggctcttagctccagcagcaaaattaataagtgtctcatggacattatgttgagtgaaagaagccagacataagagagaacatgcaatgtgattccatttatatgaagttcagaaataagcaaaactaatcaatgtggatggaagtcagatagcagttgtttctgataatgattgggtgagagcatgagagaactttcttgggacactggaaacgttctgcattttcatctgggtggtggtgatacaggtgtacacacatgcaaaaacttcctgagctgtacacttcagatcagcactcattgcat

SEQ ID NO: 319283 - DNA, 610 bp, Homo sapiens
attcttggttttggggggctgtcctgagcattgtgggatatttagcagtatccctggtctctcctcactggatgtgaatagcatcctccaccccattgtgatcatcgaaagtgtctctagacattgtcaaaaatcccctagggacagaatcaccctggttgagaaccactgctacaagtaggaaattttcactgcagcttatgattcaggaactgggagaatcaggaccactaatgctagctgagttccatgtttaaccataacatatactgatgctgctcctaaaagcccatagaccattaacaagagctgagaatgtcatagctgcctgctgtagttgtgtgcatcatggccacayggccaaggacatggtggctgtatgtgttatggggcagtggcgatgccagcttcagatgtctatacagtggctgttgtagagctctggaagtcctgggagctctcgtgcaaacaagtcacattggactttaagcagtgatgcttttatagactatatgaatccatattctgatgcatttttaatccatgtaaactcacagccaaccaccccttattataccacattagggagtttaattacttatttaatcag

SEQ ID NO: 319284 - DNA, 564 bp, Homo sapiens
actctaggggaaccataagatgaatcttggtgactcttggttaataatggaaacatttagctttaacctttttcaccagttcagtatctccaggccctgcttggtaggcagtgtttcataaaacattttaaatggacataaattagtattgtctccctctgatttttcttcaatcttatcttcagattcagttagaataactaggagacccccaggaattctgtgatgctaggtttggtaagcccaaggtctctggagggagggatgagtctgaagacattactagtattctttctttstagaaagagctggatgttgccagaatgagatatcttgggagccaagcaaataagtcctgggcccatgggcttgaactttagtatacatacaagcttgtccacagagtctcagcctcaagatattaatctctgctgggtgctgatgtctgagttccctaaatgttggtacaatccaagcatagcactttgacatttttcccccattcctggaagaaaaaaatcatatgaagccatttccctgaaattaattgaaaacactagactt

SEQ ID NO: 319285 - DNA, 559 bp, Homo sapiens
gaggttgaatggttcatccagggtcacacagtgtgagaggtgaaagcaagattcaaayctgacttctacagacactactcaggccactgagaccctcactcctttggtagctggggaatgttctgttgtctgagcagccaaggctcacagaaatcttctcttgagagctgatatatgggggtctgagagtggggttggggatcctttatctttggtgcaccagcaaagccagtggggctgtccctaggatggagtggttttgtatgttccctgtggatgttgggaaagtgaccttgcccaaggaaagacggggctttgggcgtacaggtcaacacacttgtcattcagagacacactccctttcatgcacacactcaggtgagccacactctcatggcaagtttcatgtgggctgccaggagggagaggccaaagagtaaaatgcttagatgaactggcacatctgtgcacccttggaccctggcagtgacacagctagaagagttgaaatgctccctgtaacttgccctcttcctttcaggaggagaggacaccgtga

SEQ ID NO: 319286 - DNA, 583 bp, Homo sapiens
tgaataatacctgcgagacacgagagtaaaaaaggcatacactatcttactattgctgggaaaatagttttgacacatgaatctcctgaaagggtcttgagcccaccagggacctttggaccattttgagacctgctgttctaggaaaacaggcacaagcagattctgaaatcaaacctgagtccctttggagccagggaaatctaccagtcatgcactttgatccaagtgtagaagtccatcagaattccatttctttactcagacatcactgactgccccatgggtgttgacttaaagcaaactggctacaaccatgcatgttcagttgctasgaatgtggaaaatatacaagaaagacttcacctattataagaaaacagagtgggggctgtttgcttgctctggagaagaacatgggcttgatgtcacagtaaacattattggttgattgaagagactcagcacgaacaggatttacaaaatcccattggtgagagcaggaggcatgaatggcatgggatgagagaatttataagcagcaccttgctggttgggcatcccttcattgcactgtagctct

SEQ ID NO: 319287 - DNA, 615 bp, Homo sapiens
tatccactctatgtccccagtaagctaaaaatcccctgtgtaaaaaccctgaatagagagcccccaggctcatgcatgcaaatgaatcttgcacaatttgtgcccttgaggaagagcagactgatttgctacaggtaggtaatgtcagatgttttttcccattcaccttcttttccttctacccggtgagcctgtacacagaacagtctggaaggtctcaacaggtactgtcaggcatggagccatccctaaaggtaagaaatgtagaatagccttagggacatttttytctataattgccaggtatttcctcatattttttggaatgattttgttttccacatctaagctctgtagtgctgatgaatacagaggtcccttgctgggagcatctcactcttttcccagcttgaccatacctgctctaaagctctcatgggttgctaagaatccctcccccaaaggtcttcacaaggtatttatgtacatcaaggaaggattttcacagaaacactttgaggaagcagggccaatatgagtttctccattctacaaaaggaagtgcagaaatgattgcaaaaactcactcaaggtcctcacaacccagccacagca

SEQ ID NO: 319288 - DNA, 566 bp, Homo sapiens
aatcaactgaaaactctttttttaatgtggagaattatatggcataacagcagaataaaactgcayatgttgaactgctgggttaggtggccgtgagagctgtgcattgtctgagctcaccattctaggggagacattgtcaagcccgtccctctgattgcagctaccagtttcgtggcagtgagatccatgtcatttacccctggagccaagcacatatctggtttttccatttgttaaatgaattgtttagcgaatgaagaaaagtagcaacagtgaagttgcattggcacataagaatttcctaaaggctgcccatgaaaaaaagaattataccaagctgccaaaagggctatagataaactcacacatggcagctacaaacaggaagggaagaagcaaatgttataatgaagccaagttcattcagcaaacaccagccgagggctttctaagcccagtgctgcagcctgaagagaaatagaaagggcctaaagataagggaaaggaggaaatatttactgaacatctactctctaattttattcatgttgaatttcatcttt

SEQ ID NO: 319289 - DNA, 566 bp, Homo sapiens
aatcaactgaaaactctttttttaatgtggagaattatatggcataacagcagaataaaactgcacatgttgaactgctgggttaggtggccgtgagagctgtgcattgtctgagctcaccattctaggggagacattgtcaagcccgtccctctgattgcagctaccagtttcgtggcagtgagatccatgtmatttacccctggagccaagcacatatctggtttttccatttgttaaatgaattgtttagcgaatgaagaaaagtagcaacagtgaagttgcattggcacataagaatttcctaaaggctgcccatgaaaaaaagaattataccaagctgccaaaagggctatagataaactcacacatggcagctacaaacaggaagggaagaagcaaatgttataatgaagccaagttcattcagcaaacaccagccgagggctttctaagcccagtgctgcagcctgaagagaaatagaaagggcctaaagataagggaaaggaggaaatatttactgaacatctactctctaattttattcatgttgaatttcatcttt

SEQ ID NO: 319290 - DNA, 566 bp, Homo sapiens
aatcaactgaaaactctttttttaatgtggagaattatatggcataacagcagaataaaactgcacatgttgaactgctgggttaggtggccgtgagagctgtgcattgtctgagctcaccattctaggggagacattgtcaagcccgtccctctgattgcagctaccagtttcgtggcagtgagatccatgtcatttasccctggagccaagcacatatctggtttttccatttgttaaatgaattgtttagcgaatgaagaaaagtagcaacagtgaagttgcattggcacataagaatttcctaaaggctgcccatgaaaaaaagaattataccaagctgccaaaagggctatagataaactcacacatggcagctacaaacaggaagggaagaagcaaatgttataatgaagccaagttcattcagcaaacaccagccgagggctttctaagcccagtgctgcagcctgaagagaaatagaaagggcctaaagataagggaaaggaggaaatatttactgaacatctactctctaattttattcatgttgaatttcatcttt

SEQ ID NO: 319291 - DNA, 618 bp, Homo sapiens
ttggtcctggctcagtggcctctgagcccaggtctgcatgtctctacccttctactgagctaaccaacattatttcttagacaattttaatcaataataaagcttaaatgtaaaacttggacaaatcagttaaatcctacttgcctccccatagaaaggcaacagactgcttggaattgacattaccattttcatgcatctttaatactttatattagggaaccctgagcactacacagcaatcatcctgtatactcttaaacttcatacaaatggtgtcatactctatgtatccttctgaaactggctttatctcactcaacactatgattatggattattccaggatgatacatgtggctattagttcactcatttttactgctgtggctctaatagaattccactgaaagaatgtatcacaatttgtacattcctttacgggcagacatatgagttatttctaatgttatgktaatataaataatactgctgtagaccctctggtacatagctcttggtctttgtgtgccagggttcctagagggtatattcctaggagtagaattgataggtcctaccacatgagcctccccaggcttactagataatgccata

SEQ ID NO: 319292 - DNA, 556 bp, Homo sapiens
tcccctggagttgcatgattttcacagtcttttttattttttagaggtggggyctcactatgttgcccagtctggcctcaaactcctgggctcaagccattcttccacctcagcatcccgagtagctggggttacaggcacacaccactattcttggcacagctgtttctttctttctttctttctttctttctctttctttctttctttctttctttctttctttcttcctttctttctttctttttttaactggtatattgtttcttatacacttttataaggctattatgtacattcttggacaagtctttctttggataccagcaaccactttttcacctgtccaattagaaaaggtcaaaatcttggataacacattttgttggcaaggtcatgtaggcaggcactctcatactgctgatgggagcataaactggaactacttccatggagggcaatttggctaaatatattactcacgtatatatgagtaattttgagatatatatagatatctatctatatacatttgactctatacatatacattact

SEQ ID NO: 319293 - DNA, 425 bp, Homo sapiens
cgtaccatgcaatactactcagcctcaaaaaggaagagaattctaacacatgctaccacatgatgaaccttgaggactatgcttagtgaaataagccagtcacaaaaggatgaakattgtatgattccacaaatagggtggcagctagaaagcacaaattcacagaaacagaaagttgaatggtggttgccagaggctgtgggggaagggaaaaagcggattgtttgatgggttatagagtaccatttttacaagatgaaaagagttctggagaaggatcatgatgatggttgcacaacattataaatgtattcataccactgaattgtacacatgtaaatggttaaaacagtaagttttaggttatgtgtatttcaacacattttttaaaaattggtaaaagaaagaaagagagaaagaagaaa

SEQ ID NO: 319294 - DNA, 425 bp, Homo sapiens
cgtaccatgcaatactactcagcctcaaaaaggaagagaattctaacacatgctaccacatgatgaaccttgaggactatgcttagtgaaataagccagtcacaaaaggatgaatattgtatgattccacwaatagggtggcagctagaaagcacaaattcacagaaacagaaagttgaatggtggttgccagaggctgtgggggaagggaaaaagcggattgtttgatgggttatagagtaccatttttacaagatgaaaagagttctggagaaggatcatgatgatggttgcacaacattataaatgtattcataccactgaattgtacacatgtaaatggttaaaacagtaagttttaggttatgtgtatttcaacacattttttaaaaattggtaaaagaaagaaagagagaaagaagaaa

SEQ ID NO: 319295 - DNA, 425 bp, Homo sapiens
cgtaccatgcaatactactcagcctcaaaaaggaagagaattctaacacatgctaccacatgatgaaccttgaggactatgcttagtgaaataagccagtcacaaaaggatgaatattgtatgattccacaaatagggtggcagctagaaagcacaaattcacagaaacagaaagttgaatggtggttgccagaggctgtgggggaagggaaaaagcggattgtttgatgggttatagagtaccatttttacaagatgaaaagagttctggagaaggatcatgatgatggttgcacaacattataaatgtrttcataccactgaattgtacacatgtaaatggttaaaacagtaagttttaggttatgtgtatttcaacacattttttaaaaattggtaaaagaaagaaagagagaaagaagaaa

SEQ ID NO: 319296 - DNA, 522 bp, Homo sapiens
tttgctactaatgtcagtcagaatcagtgtctgttacttgcaattaaggaccctgatatatgagtccttttctgaggatgagtgattcagaaacatcaaggttccaggcacacccagaaaattgatggtacagtcacagtagaagcatatcaacgtgattatgtgggctgtggtgcttcttggaaaaacaacttaagctctattctcttctggagttcatccacatcttgcatagatactgttggamtggcacatgtaatccttcattcaggagggctgaggaccctacaatgattaattttacatgtcaacctcactgctccatggcgtgcccaaatatttggttagatattattctgggtatgtctataagggtgtttctgcatgagattaacatttgaatcaagcagattgccctccccagtgtgggcagacctcatcccatcaactgaaggcctgaattttaaaaaggctgagtaagagggaatttactctctctgtctacctgatggccttggaact

SEQ ID NO: 319297 - DNA, 621 bp, Homo sapiens
aattaggacatttccagattaagaaaagctaaagaagcttattactactaaacctgccctataagaaatgctaaaggaagtcattcaacctgaattgaaagaataggcagtaacttggaaccatatgaagaaataaagaatattaataaagataattacataagtaarcataaaagctagtattattgcacttttggtttgtaactcctcttttcttcctatattatttaaaaggcaaattcattaaacaataattttaagtctaggttaatggatacacaggtaaaaagatgtaatctgtgacaataacaatacagagggggagggacagagatgtataggagcagagtgtttgcatactattaaaactcacttggtattattcaaactgactggaggcttaaaatgttaattatgatccccaaggtaaccactaagaaaacaactaataaccaaaagagtcatagagtgattatattatcagacaaaacaaattttaagtcaaaacaggttacaagagacagaagaccattatatggtgataaatgttcaatgatcaggaagatttatacaattatcaacatatatgcacctaacaacagagccccaaaatatatgaag

SEQ ID NO: 319298 - DNA, 565 bp, Homo sapiens
aatattcagaaaatatgaagaactcctacaactcaacaacaaaaagacaaacaatccagttaaraaatgggcaacagacccaaatagacatctctctaaagaagataaaaatgacaaagacattcaacatcattaatcattacagaaatattagtcaaacctcccacagaatgccattttataccactaggatggctataaaaaaaaaaaagaaaaatctcaagtgttggcaaagatgtagagaaattgaaatccttgtgcactgtgggtgggaatgaaaaacagtgcagttactgtggaaaatagtttggtggttcctcaaaaagttaaacatagagttacaatttgactcagcaattacacttctgggtatatatgcaaaagaaatgaaagcagaactcaaacaggtatttgtacaccctgcaatattattgacaatagccaaaaggtggaaacaaccgaaatgtctatcagactgatggatgataagcaaaatgtggtatatacatgtaatggaatattattgtgccataacaaggaagcaaattctgagacatgctacagc

SEQ ID NO: 319299 - DNA, 600 bp, Homo sapiens
tttcttaatcttgagttctaatttgattgcactgtggttcaagataatttttgttatgatttcacttcttttgcctttgctgaggctatgtgatcaattttagagtgtcatgtggtgataagaagaatgtatattctgttgtttctgggtggagagtgcaacagatatccatcagctccacttgatccagagctgagttcaggtcctgaatatctttgttaattttctgtcctgatgtatccatcagatccacttgatccagagctgagttcaggtcctgaatatctttgttaattttctgtcttaatgatccgtgtaatattgtcagtggggtgttatattttcccactttttttttagagtctaagtttctttgaagggctctaagaatttgctttatgaatctgggtgcttctgtattgggtgcatatatatgtaggatagttagctcttcttgttgaattgaaccccttaccattaggtaatgccmttctttgtcttttttttaaatctttgttggtttaaagtctgttttgtcagaaactaagattgcatcccctcttttttctgttttccacttgcatgtaaatttttctccat

SEQ ID NO: 319300 - DNA, 590 bp, Homo sapiens
tgtatctttgcgtgtgagataggtctcttaaagacagcatactgacgggtcttgattctttatccagctccccactctgtgtcctttaattggagcatttagcactcttacatttaaggttactattgttatgtgtggatttgatcctatcatcatgatgctagctggttattttgcagacttgtttatgtgattgcttcatagtgtcattgtctgtgtacttcagtgtgtttttgtagtggctggggagtactgacttgttgccagcccaaatgtacctgtaggaggtggctggagaccccagttgggaggtctcaccctgttaggaggaacgggatcagggacccgcttaaagaagcagtctggctgcattttggtagagcagccatgctgttggggatcacttcagccccctccccaccctcaatcagtttyggctctccaaggcccacaggctggactagctgagacacccaaatagaaaaggtagtagcccaccccgctcccctggcactccatcccagggagaaattagaattctgtcagctgtagaacacaggtaggggtggctagaggtcctggctgggagg

SEQ ID NO: 319301 - DNA, 590 bp, Homo sapiens
tgtatctttgcgtgtgagataggtctcttaaagacagcatactgacgggtcttgattctttatccagctccccactctgtgtcctttaattggagcatttagcactcttacatttaaggttactattgttatgtgtggatttgatcctatcatcatgatgctagctggttattttgcagacttgtttatgtgattgcttcatagtgtcattgtctgtgtacttcagtgtgtttttgtagtggctggggagtactgacttgttgccagcccaaatgtacctgtaggaggtggctggagaccccagttgggaggtctcaccctgttaggaggaacgggatcagggacccgcttaaagaagcagtctggctgcattttggtagagcagccatgctgttggggatcacttcagccccctccccaccctcaatcagttttggctctccaaggcccacaggctggactagctgagacacccaaatagmaaaggtagtagcccaccccgctcccctggcactccatcccagggagaaattagaattctgtcagctgtagaacacaggtaggggtggctagaggtcctggctgggagg

SEQ ID NO: 319302 - DNA, 590 bp, Homo sapiens
tgtatctttgcgtgtgagataggtctcttaaagacagcatactgacgggtcttgattctttatccagctccccactctgtgtcctttaattggagcatttagcactcttacatttaaggttactattgttatgtgtggatttgatcctatcatcatgatgctagctggttattttgcagacttgtttatgtgattgcttcatagtgtcattgtctgtgtacttcagtgtgtttttgtagtggctggggagtactgacttgttgccagcccaaatgtacctgtaggaggtggctggagaccccagttgggaggtctcaccctgttaggaggaacgggatcagggacccgcttaaagaagcagtctggctgcattttggtagagcagccatgctgttggggatcacttcagccccctccccaccctcaatcagttttggctctccaaggcccacaggctggactagctgagacacccaaatagaaaaggtagyagcccaccccgctcccctggcactccatcccagggagaaattagaattctgtcagctgtagaacacaggtaggggtggctagaggtcctggctgggagg

SEQ ID NO: 319303 - DNA, 568 bp, Homo sapiens
tttccttcttcgcttcctttcatctctctctctcctccacccttctttctcttttctgcccctcttcmtctcgttctttcatccatgaagagtgaggaagatgtttttaagcactgttgagccacatgagaagatgaccctgaacgagtttagggggttaaggccttaagagtgggccaagggcggggcgtggtggctcatgcctgtggtcccaacactttgggaagtcaaggcagtggatcacgaagtcaggagatcgagaccatcctggctaacatggtgaaaccccatctctactaaaaatacaaaaaattagccaggtgtagtggcacgtgactgtagtcccagctactcgggaggctgaggtaggagaatcacttgaacctgggaggcagaggttgcagtgagccgagattgcaccactgaactccagcctggacaacagggtgagactccgtctcaaaataaaataaaataaaatgaaaaaataaagaaaaaaaagagtggaccaaatactgtgataatggaaagaaatgagagggaaagctctcatcaaatgcccatgtca

SEQ ID NO: 319304 - DNA, 589 bp, Homo sapiens
aatacaaaaattagccaggtgtggtggcacacgcctctaatcccagctactcgggagggtgaggcaagagaattgcttgagcccaggagatggaggttgcagtgagctgagatcatgccactgcactccagcctggccaacacagcaagactctgtctcaaaataaataaataaataaataaattaattaattaatwaataaggatcagagagttactaaaacctaagatgacatagttaacaaatggagaagatagaatttatgcccagacgttcattctccagagcttctactctagatgatgatgctgtactgtgtcttagacaagcaatgagaagaaaggaactccttataatctgtactgggccaactctgggcctctggcttgagtcatggtctatagagaaggttttgagggatggtacaggttgtagctcccctagttcttgtcctgttccccttttttgccaccggagtaacctttcctcattttggagggtaaggtaggagagtctttagtcctgtgttttgaatggaatggtcaaagagctttgagtaggttctaggagtccttgtgtgtgtagccaa

SEQ ID NO: 319305 - DNA, 624 bp, Homo sapiens
tatgccatagattgcctcactgagtaattattttgtgcccattctttgtggaaggtgaaaggtgctggagatcatagaatgcacctccctcctctctgagtcctcatgatgccttgatcatggtattgttcacatgattaacttccacaaataatttcttactgaagctaaatgttgaggggccttgaagatcatttaatccaaactgccttttgatgcttgaatccatattcttgtcaagagttattcatcctctacttgtataccttcagtgatgttgaagcttgctactttttgggatattctagcctttctttagatagctcttttagaaaagtaaatttagtgtatcgtgttmacatttatcctctatcacctttagtcatctgttcttgttgtatactttgggactccatagaactagcctgttttctttttccacttggaaaatattggtattttacagacagctcttaaatcctccacagttctcttctccagttcccgttagctacatttgatgtggtttggggtcatctcactaatctgcttacctttctctgcacatggtcctctttgtcaatgtctatttcttagagtggagcctaagaaaagacccaattc

SEQ ID NO: 319306 - DNA, 522 bp, Homo sapiens
acgtgggtattccaggcaagtgagtgttccttttgttataaacttcttccaaatgcrttagcctcctacctgcctcctgtggcttcagattttccacttgccatcagggaccatctctggggttagccttgctctgaataagaatccctggtactgggaaattctcactgcaactaactacaactagccctaggctaatctaagtcagccatctgagcttcagtgtctccatctgtcaaatgggataatagaatttccaactcagaattatcaaatggactatcaatgagctgtttcatgaaatgacttagctactactattgttgataaataacaacaacaacaacaacaacaatattattatgattaccatcgagctgaccatctgaattaagtcaggagacctgagtttaaatcttagccccagcacttatggtgtgccattaggtaaatcagtaaacttctctaagcctcagattcctatgtgtaaaagaaattataacatatgctgagcccataata

SEQ ID NO: 319307 - DNA, 522 bp, Homo sapiens
acgtgggtattccaggcaagtgagtgttccttttgttataaacttcttccaaatgcgttagcctcctacctgcctcctgtggcttcagattttccacttgccatcagggaccatctctggggttagccttgctctgaataagaatccctggtactgggaaattctcactgcaactaactacaactagccctaggctaatctawgtcagccatctgagcttcagtgtctccatctgtcaaatgggataatagaatttccaactcagaattatcaaatggactatcaatgagctgtttcatgaaatgacttagctactactattgttgataaataacaacaacaacaacaacaacaatattattatgattaccatcgagctgaccatctgaattaagtcaggagacctgagtttaaatcttagccccagcacttatggtgtgccattaggtaaatcagtaaacttctctaagcctcagattcctatgtgtaaaagaaattataacatatgctgagcccataata

SEQ ID NO: 319308 - DNA, 521 bp, Homo sapiens
agaaaacaaagcacagacacataacataatttgtccaatcaatagagtacctctgtcatcccatcccacacatagtttcctggaacaaggtaacaactcaggaaatactgtatatttcctgatactggaaatactggagtgacatgaacctaaaactcaggccatttggcactcaaatgactttccactataataaaaaccatcattgagtcagtgcctatyaagtgccactcaccgtggtacatgcattatctcttataacccttgcaacatgactatgaagtaccattatttccattttacagatgaggaaacagagtaagagttaagttgcctgatcaggttgacacagctaataaggtagaagccagatttcaagccctggcagtctgacttcagagcctatggctgtaactcactctaatgctgcactgggctttatgaatgacagcaccattaaaggcaggggactggacttgggccaggtcctttgcacctattcacatgagccaaataaccac

SEQ ID NO: 319309 - DNA, 478 bp, Homo sapiens
caggtgaaacatatatgacaaaaattctamttgtgatacagcaaatgactgaagcttagaaaacacaacccaaaaggaaagattctggttcagattgtcccaagtctcccttccaagttcacctttcactactccatggatcctcatgcagattcccagctccctcagcaagccctgcactctcacgggtctggcccagttctgctctttctacttcctgagtcttccttatctcctcctcatcctgccatcagctggttctattctgtgaaatgattttgtcaatgtagagaggatataaaggtctggctctttaagaaagccaagggtggggtggggggttacaaaacatgtattcccttgaaaaaaagagccctgagtcaatgagataagaatagctagaagagcagttctacacctaggaatgtattttgaggtaataatcagaagagcacacagatgattgcgggcattgaca

SEQ ID NO: 319310 - DNA, 616 bp, Homo sapiens
acacagtaaaccagcagagtccccaaacaaagaaaatcaggcagggaaatttgcatatattattcatccttcctcagaacaaacgtctagtaaacaaagagcacaatgaactcttaatcatattctttattcccatgrgaataaaatgtattcctttagaggaataaaaaaaaaaaaatagttgcattagtcaagccagtctccctgtggcccacaaacacaactttcccccactcctgtatcttcgcttgtattgcttccttctgccctccacccatatttccaggtcaacgaagcaaaggccaactctcccagagaatctagcagagaatttagcatgcaggaaacccctgctgattgcttatcacatagaccagttcctacccagccaacttccatgtacatgatgactttctgagcacataatcaaatcagttgctgtgcctggtctgtctgattcatggagaatcaggaaatactagtcctactatatagaccacataacacaaattaaaccaactgacaacttgtaggtctttggccattactaataaacatcctaaaggcaacaaatgcaagtacatgaccatggtcatgcaatttatttctaccaaca

SEQ ID NO: 319311 - DNA, 616 bp, Homo sapiens
acacagtaaaccagcagagtccccaaacaaagaaaatcaggcagggaaatttgcatatattattcatccttcctcagaacaaacgtctagtaaacaaagagcacaatgaactcttaatcatattctttattcccatgagaataaaatgtattcctttagaggaataaaaaaaaaaaaatagttgcattagtcaagccagtctccctgtggcccacaaacacaactttcccccactcctgtatcttcgcttgtattgcttccttctgccctccacccatatttccaggtcaacgaagcaaaggccaactctcccagagaatctagcagagaatttagcatgcaggaaacccctgctgattgcttatcacatagaccagttcctacccagccaacttcsatgtacatgatgactttctgagcacataatcaaatcagttgctgtgcctggtctgtctgattcatggagaatcaggaaatactagtcctactatatagaccacataacacaaattaaaccaactgacaacttgtaggtctttggccattactaataaacatcctaaaggcaacaaatgcaagtacatgaccatggtcatgcaatttatttctaccaaca

SEQ ID NO: 319312 - DNA, 403 bp, Homo sapiens
tatcaatcacacaatgctataaatgaaagctgacactgaggatcacaggaaatgatgaagactagtgaacagggctatgtgtcttatctagacgggacagtctccactcattccagtctaatgttgacatgtaggaatgttgtcacatattctcatttttcaaaagaaactagaaatctcaatttttatataaactatacaacttttttagtagtgatcacatttaagagagaaggataaagagaaggcacaacccactaacaactaacgctaatacaaaggagactggaagtacsataaaaataaatagataaataaataaggcaaagtgaggaaaacatgcagttaagaattaatatcttgcccatccccagggtgaaagctctagaaaggcctccaggag

SEQ ID NO: 319313 - DNA, 644 bp, Homo sapiens
acattttaaactgctgtgcagttttgaggggttcaagaaacccctatggtttatctcagaaattaaaaagtactccttcattcaacaaacatttatgaagcagctactgtgttagctattgtgcagtgtgcagggttcctgccaatagagctcagattagatgagtggagatggataagggaatggtgagtttgctgtgataaaacatgcaagtacagtgggaccagaaggctcagtccattctgccttgggtcactgcaggagtatttgcagagaacaacacacatcagaagcgtgtaagatgactagggttccacaaagtggtgaagtgtcctaggtagtacatgtgccaatgcagaggtgagctttagttatgctacctagtccaatccagctacctgaatttgtccagaattactctcaaagcactttcccatctgtcacctcatttactcccmactctacaggcagctggggcaggagcatgcaattattcccattttacaaatgggaaaactgaggtacagttagggtcatcaaccaccctggtttgctcaggattgagggggtttccaggatgtggaactttgggtgcaaaaaccaagactgtcccaggaaaactgggacagctggttaccctagct

SEQ ID NO: 319314 - DNA, 567 bp, Homo sapiens
gcaagatgcccatagtcaagtctttgcagtgactcttaagtgttttgtggaccaactgatgttctttagactcattagggatattaggataaagattcttggactccaaaacctactgagtcagaatcttgagggagtggctcagcattttaaatatgctttctcctcctccctcccctttatgtccattgaagtaggagaactgttggtttccagaggaggcttcatggaagaggaaggatctgagtcaggtatagagaggagcaggaaggactttccaggtacaggagagctggcacaaagccagagaggtgtggagcgagaggttgtgcaggcagtgtgcaatttggatggagcaaatggtagtatcagtgtgttaatatggacgctaagactaaaaagagtgattgagacatgatagtggaaaaccaatcaacagttctctaccattttgtttgtttgatgagatacatatgacttttcrtatttatcagcacaacacattgtcctaagcatgtgaagactttgataccacctctcaactcatcttctacctggcaaaactca

SEQ ID NO: 319315 - DNA, 360 bp, Homo sapiens
atcacaagccaaggaatggtggcaatcaccagaagatggaagaggccaggaagatgctgccctagagcctccacagtagtgtggtcttgccaacatggattacagctcagtaaaactgacttagaacttctggcctctagagctgtgagagaatacatttttaagctacccattttggaaatttttacagcagccacagaaaactaatgcagtaatgagytgttgtatctgcacttggctatagttcagggtcctactctctaactatgggaagtggcatatataaaattgggggaaggaagaagttacagaaagcacgctcctcatcttcatagaatctgaaagttagacatggaaaca

SEQ ID NO: 319316 - DNA, 569 bp, Homo sapiens
ctgctatacctttcctttatttttcccatcaaccataagtggccaactttctatggctctggaattgggtcaaatcaataaaaaagcattgactgacccaatcaatcaagccttgaactggaaaccacatcttagcaatgaaagagcaggaagacacacaactttggctagtgggaaaattccagatcaaagcagagtcattctggggcaatggctactgcttgattttctctgggtctcagtttttcagtctgcacagtgaaggatctggattagagtattttaygtctgcagcactagagaatcaacaatgttaggtctgaaatggatgtgctagatcaccttgtatattccagccactttacagatcatgagagtgaggtctagattgtaggaatgacttgtccaaagccgcaaagcaaggcattggtggagcttgattacattctaaaacctggggctgctgacgcaggctttcttgattatactaatggatttttaatggaaaagattgcttcaaggatggatgtcaaggtttctgtaaactccctgaatttgtatgccaaaat

SEQ ID NO: 319317 - DNA, 527 bp, Homo sapiens
tttcattcagtgactattcatggagaaactattgcttcaggaaagtatatgggatgctgcttgtgagatacagagaaaaatctgtatcctactatgttagtcagataactaggctatgttgaagtaacaataaataaatatcattgctttaacatatgatttatcacacatgctacttgttcagcacaagtcagtgacaaacttctccacacagttgcttagggctccagaccagtggaaactctgccgttgtgtacttgtgccatctggaacacatggtgtatgtggccactgtggaagaacacagaagggagagctcaatttatttacctgctaaataagtgtatttaccatcragttataaagcttttccatagtctcagaatgttcccaggtgtgttctgtcattcatttccccccttctgcccctttctccctccaaaagagacaaccactttctaatttctatcaccatggttttggtttgcctattctagaatatcctatgaatggaacctcacagaata

SEQ ID NO: 319318 - DNA, 416 bp, Homo sapiens
tagaatggttaccagaggtggggaaggatagtggtgaggttaggggaagtggggatagttaatgagtacaaaaagaaaatagttggaaaaatgaataagacctagtatttgctagcacaacaagatgactatagtcacatttgactatagtaaaaaaaattaactgaatcacacattttaaaataatttaaaaagaatgactggattgttcataacacaaaggataaatgtttgaggagatggatatcccattaaccctcatgtgattattacatgcctgaatcaaaatatctcatgtaacccataaayatatatacctactatgtacccaaaacatttttaaattaaaaattaattttaaaatgttaaaaaactatatggtgaaaatcaggtcctagagatggggaaacatgaat

SEQ ID NO: 319319 - DNA, 627 bp, Homo sapiens
cacaataagtaattattatttagagctggaatgtggctagcatgtggctttacgtaaactaattttttttcctttgtttgtttttttaagtcatggaggacagttcccaaaatccagttttatttccattyctatcaatgagcagagacaagaactgaaatcaagaaacttcaaaaggatttttccttgaacttcaaaaattcagttggataattctccctagacatgttaatgtctgcaccagaaagaataaaatagtttctataattccacaagctttagactttcagaggaaaggtaatttgtcactgaagtaaagagatgaaaagtgggggtaaaggtgtctcagaggaaagaggaaaaactagatcaatactggaaaacgttagaatatacaagtaaagtctcaccccagcatcctctgttcccctcactttatttttcttcattgcacttcacacctgacaaggaatatgtttatttgtttacttattgtctacctccccaccaagaacatgagcaccatgtggccagtagctatgtctgttttgttcattgccctatcaccagcttctagaaaggcaatggcacatagtggctactaataaataatcgttgaatgtttgt

SEQ ID NO: 319320 - DNA, 627 bp, Homo sapiens
cacaataagtaattattatttagagctggaatgtggctagcatgtggctttacgtaaactaattttttttcctttgtttgtttttttaagtcatggaggacagttcccaaaatccagttttatttccattcctatcaatgagcagagacaagaactgaaatcaagaaacttcaaaaggatttttccttgaacttcaaaaattcagttggataattctccctagacatgttaatgtctgcaccagaaagaataaaatagtttctataattccacaagctttagactttcagaggaaagrtaatttgtcactgaagtaaagagatgaaaagtgggggtaaaggtgtctcagaggaaagaggaaaaactagatcaatactggaaaacgttagaatatacaagtaaagtctcaccccagcatcctctgttcccctcactttatttttcttcattgcacttcacacctgacaaggaatatgtttatttgtttacttattgtctacctccccaccaagaacatgagcaccatgtggccagtagctatgtctgttttgttcattgccctatcaccagcttctagaaaggcaatggcacatagtggctactaataaataatcgttgaatgtttgt

SEQ ID NO: 319321 - DNA, 627 bp, Homo sapiens
cacaataagtaattattatttagagctggaatgtggctagcatgtggctttacgtaaactaattttttttcctttgtttgtttttttaagtcatggaggacagttcccaaaatccagttttatttccattcctatcaatgagcagagacaagaactgaaatcaagaaacttcaaaaggatttttccttgaacttcaaaaattcagttggataattctccctagacatgttaatgtctgcaccagaaagaataaaatagtttctataattccacaagctttagactttcagaggaaaggtaatttgtcactgaagtaaagagatgaaaagtgggggtaaaggtgtctcagaggaaagaggaaaaactagatcaatactggaaaaygttagaatatacaagtaaagtctcaccccagcatcctctgttcccctcactttatttttcttcattgcacttcacacctgacaaggaatatgtttatttgtttacttattgtctacctccccaccaagaacatgagcaccatgtggccagtagctatgtctgttttgttcattgccctatcaccagcttctagaaaggcaatggcacatagtggctactaataaataatcgttgaatgtttgt

SEQ ID NO: 319322 - DNA, 528 bp, Homo sapiens
ttagaatatacaagtaaagtctcaccccagcatcctctgttcccctcactttatttttcttcattgcacttcacacctgacaaggaatatgtttatttgtttacttattgtctacctccccaccaagaacatgagcaccatgtggccagtagctatgtctgttttgttcattgccctatcaccagcttctagaaaggcaatggcacatagtggctactaataaataatcgttgaatgtttgttgagaagatatttgcatttctacaaccctttttctgaattatgtattatataagaacatttaagtattatagcaatatcaactgatgattatcttcaactatttaaatgaaattygatatgcatgcaaaaagtagaaatctatgctatcagcaacatgtccacttaccatgcaaactggtaccatggttgattgaatcataaatcacagcagcatcacttttgcaactaaaacacctcagaaggagcaaataggctacagagctgtgctgtctaatacattaatca

SEQ ID NO: 319323 - DNA, 444 bp, Homo sapiens
tactgtgctgagtgagtcacaagtagtggctcatctgatccttcaaataacccatgaggtgaacactatttttttttatttgacatagaaaaactgaggcacagagaggcaaactaccatgtgtaaagctatacaactaggaaacaacggaaatgacagagccaggattaaaacccatcagattataaagcctacatagtactaccttttaaaagtatatatttgtatctaactcaaattaaatgtcccctaaaattgttccttccacctttcctcctyataaataatatgtgtcgagaagactgttggcgtttgaatagtagtccaggccttggtcatggcatgaagaagtgagactgtgtgtttcacaggactggccaacatcactggagaatgagctctcacacactgccttatggggtacaaattggtagcaacccatta

SEQ ID NO: 319324 - DNA, 588 bp, Homo sapiens
catccatcaacaagaaaattaaaagtaactgcaaattattgtcattcaaggaattaccacattttaaaatgaatcaactagaaatgtatgtttcaacatggatgcatgtcaaaaacaatattaaaagaaaaaggtaaattgcaaaaagatacagtatgactccatttccataaagctatacaatatgtaaattttatatttggtttatacatgcatatatatgtaataaatgtaaaagcatttggggaagatcacagttagctctgggaatggagaaagatggggaaagccacacaagagtcatttttatgtgcaatattttattyctcaaacttggtaaattttaagtgtgtactatattgtcagttcattttggatgcttgaaagatttcatcattttctttaattgttcaggaatgcaactttcataccatatccaagcttttggccttgagaatcttctgctcagtcatttcttccctccttctacatattctccacagtctccctcactccacatcactaatctggaccccatgctttctttcaatcaaaagatgtcatttatttaaaatttaaaatccaaac

SEQ ID NO: 319325 - DNA, 712 bp, Homo sapiens
taagactcagctaggtgaacagcccttctgggagctgactggggagatggacagagccacccagaatagaggagaaaaatccaggctgagaaccagcaggctttattctcattccagctctgccactcacgtgctgggtgagcttggacaaggcttccccatctctgggcctccacttgatcaccaggttctaagataacagcatcctagctcttatcaatgacaaataacttcagtggtttgcaaccctaagtcatatacacagaatataacctggccctttctagataatctgcctgaacacaggtcctacaaagcagcagaacaggtcacagctatctatgacttgagatgtcctccacccatttcctattctactgagtcatataccttgatgtttcccctaaaaaccatattgtctaccgctttcagccaataggctttggggagagttccaccsctaatttcaggtataaatcattgaagtgaggcctaaaccaatcagactatcctatcccctcttgacagcgattggttcagggatggacacatgtctcaggcagagataataaaagaaattgccttttgctgagaatgctagagaggaggcagatgctcttccctgctgggtatgaagctgaaaagatagtaggtcttgagtttctgctctcatcttggagcctaaaagcaagcttaaacaaacaaacaaaaa

SEQ ID NO: 319326 - DNA, 591 bp, Homo sapiens
ccccactcccatcaccccagatattatattctcacccattttccaatgtgaagcatactaaattagtattatcctgatataaactgtctttttaaaaagaaaaactttagacaaaataaatttaacagagtttatttgagcataaaaggatctatgagtcaggcattactcaaaactgaagaaggtttggggagctctgagttagcaatgtgaacagagggtttttataaagctgaatgcagaggtaaaaaaawtaaattacttaattgggtacaactaagcatttgccttattagggtgtgttccttatttttaaactggattggagctacatgttttataatcaattagagcacacaatttataaagccactcaaaacaaaggaaaaatcctacgtatttagtgattcataataagattttcttaaaaccacaaggaaaatacttttatatatgttttgcctataaccttctgtagaagtcacagaaaacttctcagtaaggaaagatttgaaatagctacaacaatgcttgcctgcctgttatattaatagtataattggaagaagggccaattgaattttaattgat

SEQ ID NO: 319327 - DNA, 614 bp, Homo sapiens
gatcaaattacgctacaaagcaccaacacaatccttagtgctgaataacacaaaggtgcagtcttgagagactaatactttgtctgtaatggatttattaagtatattattatcttcagtttaggtttgcatgtttgagtgagctgtcacacttctccatcattaaattcatgccctttctctttagaacctcatacagatattaagggcttcatatataaaagttaatatttattaagaatttatcatgcatgcattttcagatttaatcttcacacaaccttatgaattgagagtatttttgtcatcaatgtagagattttgaaaaccaaaaaataaaaaataagaaaaaacttgtgtgactttagtggggttcagtaataattctatgatcacataactatgaagtagaagagcttgaaattgagctygtttctcccattcttgcatcctgcaatgctgtgtttcactatttaaaatgagttacaagttgagcagatagcagtacagaagattggaagggctgtgaagcttatcaacaggaggaaaaatggacattttaaacgagatacagaggaagagggaaaagctgaaatgtgaaagaagaggtcagt

SEQ ID NO: 319328 - DNA, 598 bp, Homo sapiens
tattttatctgttaaatattgatttscttttttgtgcccattgcattaggcaccctatatctttaaggctaactaattaaatgcatctacagattttatttttgggaaacaaaaaatagagttccaccaacttctaccgcaagaaaagtagagcaaatgttggtttctaataattagaataaataaaacaatattcttttgactgcatttatcatttggattgaacaaatgttcttaagggaaacaaaaaggaaactagaataaatgaaacttttagttcagcaaatatcacaggtatgcaaatgcttcatgtaaaataagttatcaaaatgtaatatttctcagcattaactttagctgccaaaactagaggatttcttattgatcttcccattgtccattcattaactattgattgtaaatcaccaatatatataaatattttctcactaaacctctaactcaatattttaaatgtaattattttctggattcagttgtgtttgaaattcagagtgtcaagtctgcttttctttaaataatgctactcctccgtaatttgcaagaagcaatttacttgaaagtacaaacaaatacc

SEQ ID NO: 319329 - DNA, 598 bp, Homo sapiens
tattttatctgttaaatattgatttccttttttgtgcccattgcattaggcaccctatatctttaaggctaactaattaaatgcatctacagattttatttttgggaaacaaaaaatagagttccaccaacttctaccgcaagaaaagtagagcaaatgttggtttctaataattagaataaataaaacaatattcttttgactgcatttatcatttggattgaacaaatgttcttaagggaaacaaaaaggaaactagaataaatgaaacttttagttcagcaaatatcacargtatgcaaatgcttcatgtaaaataagttatcaaaatgtaatatttctcagcattaactttagctgccaaaactagaggatttcttattgatcttcccattgtccattcattaactattgattgtaaatcaccaatatatataaatattttctcactaaacctctaactcaatattttaaatgtaattattttctggattcagttgtgtttgaaattcagagtgtcaagtctgcttttctttaaataatgctactcctccgtaatttgcaagaagcaatttacttgaaagtacaaacaaatacc

SEQ ID NO: 319330 - DNA, 604 bp, Homo sapiens
attcatctgtatctgtaaaaactctatgaatacattaacgttcatttcaaatgtcacctacctgatgaattttatttatctgttgcccaaatatggcctctctctactttggctcccagagtaatctgtttttgcctctcttaaggccctcactagacatgtctgccagtttcagtttccaatacagggaaattccttggtgaagagcycattacatacccatactcgcccaggtgtccagcatatgctatggactcagtagggttgaatcaaaatgattatagctcatacaatatctctaaaaagttaagctgtactttcaaatgcatttgtcagggaaatttaattgttaaaaacacttctgtcagaatgattttcattataattttattcctattaaaaatgattaaatcagtgcctttaatacattttttagttggctgataccattaccatataaataactgttgatatatgattttaaaagtctgattaagtaaatgatcacataatattaatgattacattgcaaaagtgagaaaaattcctatttttcatttgatttctaagctacctactaattatttgtgattcactgacagca

SEQ ID NO: 319331 - DNA, 622 bp, Homo sapiens
tcagtgtatactgctcgggtgatggttacaccaaaatctcacaaatcaccactaaagaacttactcatgtaaccaaataccacctgtaccccaataacttctggaaaaataaaaaagagcatagagaaaaccaacatttgggaatgatgctagaagtcgttggcagcacagagtagaggggtagagccactgacactttttctggcttaggtctgctaatccttccaatctgtttagcaatggagtgacctagctcagtcaacttctttttaaaacccaataaagctactcaggtctttaaagattgaactcatgattawtgagaggacaaagtggtaaaatgaagagaaagcagtgcatgcgaatatgtcacactggatgctcacacatacactggagatacacacagaaacacaagtacacgtataggattatatatgcatatttatatatgcaaacgtatatattgtaacataaagacgggttgaatgatagatgttataaatgcattagagtatatagagtgtatagaactaaaggactcaatatttctttaattaatagatgaataacagaattagctgaccaagtcaattgttgcaagtatttaaagcagactagg

SEQ ID NO: 319332 - DNA, 562 bp, Homo sapiens
cctgtcttttaaaacgcttaattttttaagattactgaaagagattaataatctttgtgttaatgacaagaaaagggaatctttgttagtgtttaatatgcttattttgaagtgtggtaaagtaaatatgcttattttgaagtgtgataaaggctagtcatttctattacaatcttatcaaaatggaaaaactttctcccaattatttattcagttatctattcacttacttgaaaaaaatagaaataatgactctttttatcaaaagtttctgtgtattgaccacccaagtttgaagactcgtattgtcttactgattggattaatttgtccattccgtgagtctgctttyagataccctattgtgttcttctctcttgaaatccaaatatgcactcactgttaaccagagatgaaattatctcctgcacaaatgtgtgcaagagtgaaagatgtagagttataatactggattttttttctggcacaggtaatagtagatgtgttgacagtttgttatatttctgtgtgctctggtttttaaatcaagcttatcttactg

SEQ ID NO: 319333 - DNA, 589 bp, Homo sapiens
aataacaacctaatgaaatgtttgactttttaatactatattagaaatatcacccggtatagtatgagtatctgcatatgttattgtaaatacacataagaaaatgttaataggcattaataaatgtgctgattttttccatgtgtacttctagttcatcgttctttagatgttttygttccccattcatttacagtatactcttggcattcaacctggtgttaggaatactacatgcctggcttcctccaattctgacatcactgttgctctgtggctcatacagtagcaggtgttgaacattgatataaacagaattttgtctactaaagccaaaattctcccatttctaatctccattggccaatggaacattaatgccaaagttacttccaaattcaagtcttaggcatgacagttcattatgctgcctgccaaaactactggcccgtggaaacccttattttaaaaagtaaagcacagtaaaacactctgtcaaataaataccgtgtgattttaggttatacccttcaatttttgcaaatttctctgaaattagtaaacttagattatattgcagttaattctt

SEQ ID NO: 319334 - DNA, 551 bp, Homo sapiens
gcaaattaaaaccacaatgggatataattttaccctcattgtagagcggaaattagatacaggagcagagggtggtaaaggaagccttggaaaactatttagtatatcctgcaatccggcagttgtacttctgagctaaacacataatgaaatattactttacactcactacattgacaaaagtataatataaaataaaatttaaaagtaaaataaaataatggacaataccaactattggcgaggaatggaggaagtagaactgtcataaaaagatggcaagagtgtaatcaaaawtcttttaaaggcattttggcattttggaataaagttacacaggtgcataccttatggaccaataatcccttgcctaaagaaacttttgcatatgtctatcaggaaacatgaataagaatatccagtgcagcattgtttacaatagtgaaaagctgaaaacaacttcaaaatatttatcttaggaaaactgattaaaaacctggaggaatctcagacacccaatattgagtaaaaaaggcaagtatgaaaaccat

SEQ ID NO: 319335 - DNA, 522 bp, Homo sapiens
tttgtctggcttctagtatgtcataagcaaaaatcgtgtcattggattatgggataggtatagaaataaatatacaaagtacagaaagtacaacacaacattaatttcccattggtttggcaatctctgtttttgtttcggttttattggaaaacattgtgctcatagcatcatgtaatttggcataaaatttgtatctaaacagctctctctgtattattttaaatagcaataactatatgtcaatcatatygttttaaatgaaatcaccttaactataacaaagaaatgtctcaactggaatgacacctagattttggaatggacttttaagtgtattatgttgatgttgatagaaggatcagaactaatagaagatttagttagcattaatatcactcttctctgcaatgccatagtgctgtattagtgggtttttttgttttgttttgttttatttgtttgtttttctttggagagagtctcactctgttgacaaagctggtatgcaatagttccatc

SEQ ID NO: 319336 - DNA, 583 bp, Homo sapiens
acaggcattacccactgcccctggccttcttttgcacttttatcagcaactagcttgtgaatctcttatcacttagatatggcaggtaggaggctggattctctgaatgagaaagatatcaagttattccaagtagttttgccacccctacrtcttccaaatagttttgttaaactttttccactggatttgaggcttctttcttgagaagagaccgggacgtatagcacatcagcagctttttcaaaaatgcttcactttctccattctccctagcttttgcttctccaacctctcataagccaaaaatggataatcatctctggggccatactctcatttttttcaagctttacatgctacatgttggtcttagaaatgtagcatcaattgtctttatgcctcaactggaactgaagcatcagtagtgatactttaatatttttacagtacctggttttgatataagttgccacttatttaaaatcagagcataggctatcctctgagtaatcataatataattatataacttaaaataattatatcatataatataaatactatgttcataatattttgt

SEQ ID NO: 319337 - DNA, 583 bp, Homo sapiens
acaggcattacccactgcccctggccttcttttgcacttttatcagcaactagcttgtgaatctcttatcacttagatatggcaggtaggaggctggattctctgaatgagaaagatatcaagttattccaagtagttttgccacccctacatcttccaaatagttttgttaaactttttccactggatttgaggcttctttcttgagaagagacygggacgtatagcacatcagcagctttttcaaaaatgcttcactttctccattctccctagcttttgcttctccaacctctcataagccaaaaatggataatcatctctggggccatactctcatttttttcaagctttacatgctacatgttggtcttagaaatgtagcatcaattgtctttatgcctcaactggaactgaagcatcagtagtgatactttaatatttttacagtacctggttttgatataagttgccacttatttaaaatcagagcataggctatcctctgagtaatcataatataattatataacttaaaataattatatcatataatataaatactatgttcataatattttgt

SEQ ID NO: 319338 - DNA, 574 bp, Homo sapiens
cattgtgtcaataaattaaaaactaaccagatgctcagggaaaaaaaaaaaaacacataattgtccttaccattaaaaagaaattaatgctatggatccttttccagaagacattttgtaatagaacagatgtccataatgaagttaaagtaaaaacagttaaacagttttaaagagttcttctattttcttggtttgttttctaataacatcytgagccagttagatttatctgcaactttccctttttctgctccagcctatattgcaggcagcggatcccttcagaatgagtttctcaggttgtaagtcagcagtctcttgctggtttcagctaacaggacaactgctaggacacttagtggcaggagtaaaagagaagctgaggtatttccctctctctgtcttcagtggtgtctccagctgaggttatgcccccctatctgcccttgtgtgcacagacattccagccccatcactttctccctctagactaggtttagtaatggctccattttgtgaatttctgggctacctgagtatcccctgattggcttatcagttcctgatcact

SEQ ID NO: 319339 - DNA, 574 bp, Homo sapiens
cattgtgtcaataaattaaaaactaaccagatgctcagggaaaaaaaaaaaaacacataattgtccttaccattaaaaagaaattaatgctatggatccttttccagaagacattttgtaatagaacagatgtccataatgaagttaaagtaaaaacagttaaacagttttaaagagttcttctattttcttggtttgttttctaataacatcctgagccagttagatttatctgcaactttycctttttctgctccagcctatattgcaggcagcggatcccttcagaatgagtttctcaggttgtaagtcagcagtctcttgctggtttcagctaacaggacaactgctaggacacttagtggcaggagtaaaagagaagctgaggtatttccctctctctgtcttcagtggtgtctccagctgaggttatgcccccctatctgcccttgtgtgcacagacattccagccccatcactttctccctctagactaggtttagtaatggctccattttgtgaatttctgggctacctgagtatcccctgattggcttatcagttcctgatcact

SEQ ID NO: 319340 - DNA, 574 bp, Homo sapiens
cattgtgtcaataaattaaaaactaaccagatgctcagggaaaaaaaaaaaaacacataattgtccttaccattaaaaagaaattaatgctatggatccttttccagaagacattttgtaatagaacagatgtccataatgaagttaaagtaaaaacagttaaacagttttaaagagttcttctattttcttggtttgttttctaataacatcctgagccagttagatttatctgcaactttccctttwtctgctccagcctatattgcaggcagcggatcccttcagaatgagtttctcaggttgtaagtcagcagtctcttgctggtttcagctaacaggacaactgctaggacacttagtggcaggagtaaaagagaagctgaggtatttccctctctctgtcttcagtggtgtctccagctgaggttatgcccccctatctgcccttgtgtgcacagacattccagccccatcactttctccctctagactaggtttagtaatggctccattttgtgaatttctgggctacctgagtatcccctgattggcttatcagttcctgatcact

SEQ ID NO: 319341 - DNA, 505 bp, Homo sapiens
gccatttttatatcttttttggagaaatgtctattaaggtttcttccccatttttaaaatcacattgtttgttgtctcatatcgggttgtataagtcctttataacttttgtatattataacttcttataaattttggatattaacttcttatcagatatcagatataaggtttacaaatacatttttttcccattctgtgggttgccttttcattttgttgattrtttccttgctatgaagaaacttttttagttttatgtagtcccacttgtttatttttgcttttgttgcctatgcttttggtatcgtatccaaaaagtctttgtcaagaccaatgccacagaacttttccctatgttttcttctaggagtttatgatttcaggtcttacctcgaagtttttaatccactttgagttgactttggtacgtggtgtaagacaagggtccaatgtcaattcttttgcctatagatattcagcattcccaataccatatattgaa

SEQ ID NO: 319342 - DNA, 585 bp, Homo sapiens
tggttagtttgtattgtcatgttattttaagattaccccatgtgagtgttaaaagtacatgtagtagattttataatctgcatgaataattatctaaaagagatatactttagtatagaggaatttatagaaacttgtgacatttctacggatggaaatatctgtaacacccttacatgttatattgtgccacatggtctgttttataaaatgcaattattatgaaaagtgtaatatattttccatattttcaacagatcttattcacttaggtgacatctctttccatccagtcctacaaccaaagtccagtttttaaaattcaacatactaagacatttatcttttacatacacttaaccctctattataaaaataaaacagatacaagttgaactgaatggtatttttctggactgtgacagacttagattaataataatgaatatccatctatattcaacatatgatagtttaaaataaactgattcttctgaawgctatttcacaaatactggcttaaacaaagtaaattatatggaaataaagataagtatggaaataaaatgaaaatttaatatgtaa

SEQ ID NO: 319343 - DNA, 505 bp, Homo sapiens
gccatttttatatcttttttggagaaatgtctattaaggtttcttccccatttttaaaatcacattgtttgttgtctcatatcgggttgtataagtcctttataacttttgtatattataacttcttataaattttggatattaacttcttatcagatatcagatataaggtttacaaatacatttttttcccattctgtgggttgccttttcattttgttgattatttccttgctatgaagaaacttttttagttttatgtagtcccacytgtttatttttgcttttgttgcctatgcttttggtatcgtatccaaaaagtctttgtcaagaccaatgccacagaacttttccctatgttttcttctaggagtttatgatttcaggtcttacctcgaagtttttaatccactttgagttgactttggtacgtggtgtaagacaagggtccaatgtcaattcttttgcctatagatattcagcattcccaataccatatattgaa

SEQ ID NO: 319344 - DNA, 614 bp, Homo sapiens
aggggtcacaaaatgtgtaattaagatgatagtttaactgaaagaaaagcaggggacatttcttcctcttcagattctattaatatcatggtcaacatcataattggaaaagtctgcccttggcatttctgcaggagccctcctatgaacyaggtaaacatagtttatgatgcccaaaggtgtcccatgtcagtcctgaaagtaaatatttctgctattcatagacttgctatgtaaacttcatgaatctttggaaattaccgcagggataccttataggagaagaacagattcccaaagcaattctaatcatccaaggtaccacaggctgggatataatctatgacctaaactaaaatgcttcactttggggggtagcgggagataatgaagtgaaatgataaatatttattgtatttacctttttctgaatgacatgtcatgatgtctggggatctgtttattacatgagcactcctgtgaacggtgtcccagagcagtggcaaacagactaacatttcttgagatttacttcaagagaggccaagctcaaagcaatggccctggttcctcagggcgatttcagcagattcacctaagtatcctgtttcttt

SEQ ID NO: 319345 - DNA, 457 bp, Homo sapiens
caattctaaaacttttatctccaaaatagactctgctgaactatgcacttaacatatgttcttggatgtctagtaggcttctcgaacctgttmggttccagataccagcttctattcttgtacaaaataggtgcctccttaaatctttgtcatctcatttaataaactgtatgttcttttagccacttaggccaaaaaatgtaaaagtattcttatatcaattattttctctcacattccatatgtaatcaatcaaaggatcccgttcatttgaccttcaaaacacataaaggatccaatatctttgcaccacccctatttataccatcctggtacaagccaccatcatctaccatctggattagtgcaatagggctccctgttctctcccacttagcgctattttcagcaaagtagtagagtgatcttgtaaaaacctaatttggatcatgtcact

SEQ ID NO: 319346 - DNA, 606 bp, Homo sapiens
gtggagaaaggcaaatggatgccccatatctttgaatggaactattttctgccgcaccccttgccatgtatgccttcagcaggtatctactgcacaccgctctgggccatgcagtcctgtagacacaggggatcaaggggtgaatgtgctatatctgtccacgtggcacttatatttgacttctgatctattattactcaattcatgcattcttctttctatgaggcctttctcaacacccaagccgaaacagataatctctccccatgcttccatagtacttcaaagaattaccaattgtcatcctcataatgtgcactgttttaaagttagtcttatttactrgaccatgaacttcttgagagcagattttttggattagtctttcaatccccagtgcctcacaggattcctggccccaaatgaattcttgataaatgcttatatagtgaatgggtaaatcaatccatctataaacaataagtaaatcaatagaggaccttcaacagaacaaactaaaaaaattaaaaattcatattctaaaatttaaggctcaaaaaagttataattaaaagttaataaaatcatggacttacacttacattt

SEQ ID NO: 319347 - DNA, 571 bp, Homo sapiens
tttaaaaattttaaaggtaatttttaaaagatgtctgctatggcttgaatgtcccctccaaaactcatgttgaactttaattgccattgtaactgtattaataggtaggaattttaagaggtgattaggccacagggctttgccctcataaatggattaatgtcattatcatgaaaatgggttcattatcataggaatgggttcmttataaaaagatgagtttggctccctttttgcctttctcttgctgacattctcttgcctgtccaccttctgatataaaataatgaagcaagaaggtccttacaagatgccacctccttgatcttggacttctcagccttgagaaccatgataaataaatttctattgtttataaatcactcagcctgtggcattctgttatggctgcacaaaacagattgagacaatgttcatataaattgttcctctaactggaaaatgcaaatgtgagtgcagtgaggccagaggggaagagagaatgggaggagataataaagagaaagctgcttcaagcaaaccccagatataagcaagacccattaaacag

SEQ ID NO: 319348 - DNA, 403 bp, Homo sapiens
tattttcatcatttcctttcaactattacaatgygtcgccattgtggcagtaaagacaggacgggaaagaaaaagaaatgcagagatcacagatacaagaatgaaaccagtaaaaagtggtagaagcttgtcctgtcttttatataaaatctcccctaaatactggcctctattctgagaaagaaaaggaaaaaaatgcattttagttacatcaaaaagtcaaccaaactgtggccagaggaacatatggagaaacccatcttgaatctgggggtatcttggctctgtgctctgtggaatgaggacctgcatagggaggatgcccagggtactaactaaaatagtggaagcctgttggcccaaatctgtaaacaaaagtgtgatgtggatgaatatgtaggtt

SEQ ID NO: 319349 - DNA, 574 bp, Homo sapiens
caaccaaactgtggccagaggaacatatggagaaacccatcttgaatctgggggtatcttggctctgtgctctgtggaatgaggacctgcatagggaggatgcccagggtactaactaaaatagtggaagcctgttggcccaaatctgtaaacaaaagtgtgatgtggatgaatatgtaggtttcaattttaactggatgttggaatttcctggacttttcccrtaagagcaacaattatttccagttagcttcataaaagggggtgttcctcagctctcttaccctcaggtaacagctgcaaccacagccagtaatgaaagtgttgtatcttacctgtccagaggagggcgccaaaatgagtttctgctcttcaccctatccattagtttgccccatgctctggttgtgaaacatctagttctccactttgcaggccaagaggtagccaaggacaacagtaaagtaagcttgaatgtttaatcagttgcatatattggtttgtaaagcccaagacaaagaacctaagacaagtcaggtggcaagtatgtaatcagtgatgacccagccatcac

SEQ ID NO: 319350 - DNA, 563 bp, Homo sapiens
acctaagacaagtcaggtggcaagtatgtaatcagtgatgacccagccatcaccaacacacttatagatctgtatggccgtttggccagaccctcaaacaagcataaagtaaatttctattccttgttatagaaacagattcaaccttattacttgtcttcagtcaggatcagagaaaatattaacctaaactagaagatgttaatttttaattayatttgacaagaatgtaggataccacttaaaaggtagatgcaaaaagggggactcatcagagaaacaaaaagaggtgtccatgactctatcaataattctttcaatgaatcaatatatagctttatgaaagacgtgtgaatcaagacatcatttgttgaatgattgatttcttattagcccaaattagtcttgttctatttgaaaactaactttttaagattatacctatataacaacaaaacaagaattggtttgaacagttttatcaaccaattagacaactgaagttttgtttggggttttcaaagaacaaaaagggtcaataataaaacaatacagcacaggtg

SEQ ID NO: 319351 - DNA, 492 bp, Homo sapiens
cctttcactatctccatccaatttgaagtcctctaggtctgatccctcacccccgccccatggccagcctttgaagagagagaaaaattattttytaaaggaggaaaattaattaagtggtaaaacattcttttggaagatggtgtttgacattattattatcaggagagttaaaaattgggtcaatctcggactggtgtggtggctcaagcctgtaatcccagcactttgggaggccgaggcaggtggatcatctgaggtcaggagttcgagatcagcctgggtaacctagcgaaaccccatctctattaaaaatacaaaaacaaaacaaaacaaaacaaaacaaacttagctgggtgtggtggcggtgcctgtaatcccagctacttgggagtctgaggcaggagaatcacttgaacccaggaggtagcactgagctgaggttgagccattgcactctagcctgggcaacagagggagactctgtctcaa

SEQ ID NO: 319352 - DNA, 615 bp, Homo sapiens
aacttggtggtgtttattaaaaatcttcataagccagcaaaaaatcctactataagctttatagtgttggttatttacacacgcttactctacaaatctgtgtttatgtttttgtgtgcatatcattttttgaaagaagcctagggatattaacaaaggaaatacaaggatatttttattaccgtatgaagaaatatatgccctcattcatcttcccaacacaatgaattatcacttttcttggcacgtatattaaatgattttgaaataaacccctcacaggtaattatgatgctctattagaattcttcacattaaccgagaattaactcattcctcccagtggagaaatctgtactctagaacacttacagcgattttaagcataaacgtttaaactgttgagagatattatttttgaacaaaacattatttgcagtagtagcagacaggagccatctatttgttaataaagagctatagacaacataaggaaactattactctatatctcygataataaaagtaaaaaagggcaaaacttactcatcaattaatgtaggatgttatgttttcactctatgtggatatatttgatatcttataatttgaact

SEQ ID NO: 319353 - DNA, 615 bp, Homo sapiens
aacttggtggtgtttattaaaaatcttcataagccagcaaaaaatcctactataagctttatagtgttggttatttacacacgcttactctacaaatctgtgtttatgtttttgtgtgcatatcattttttgaaagaagcctagggatattaacaaaggaaatacaaggatatttttattaccgtatgaagaaatatatgccctcattcatcttcccaacacaatgaattatcacttttcttggcacgtatattaaatgattttgaaataaacccctcacaggtaattatgatgctctattagaattcttcacattaaccgagaattaactcattcctcccagtggagaaatctgtactctagaacacttacagcgattttaagcataaacgtttaaactgttgagagatattatttttgaacaaaacattatttgcagtagtagcagacaggagccatctatttgttaataaagagctatagacaacataaggaaactattactctatatctccgataayaaaagtaaaaaagggcaaaacttactcatcaattaatgtaggatgttatgttttcactctatgtggatatatttgatatcttataatttgaact

SEQ ID NO: 319354 - DNA, 554 bp, Homo sapiens
atatgcctatcttatagctttactttgacaaaatttcctttgaaaatgaaatcaaatcaacttctttgaatatcctggaatattaactttctccatgagtgctggttcctggcaagaatcatttagagagtttgcaaacagtatgaggatgtagtgcaactttaggctcatcttacatactcaagaggcacaaataatttgtattagctatgtacaagaaggagacgcaatcaatcaaagctgaagaaaataagaacttctggtattttttcataaacatggcaaatgatacctccatctctattccacaacactgcctcttaaacattatttgatttataaaatattaaacataytgatacgacttcaacctgtagtttgcattattgtggatatctatgtagacaacacaatctattgcagtgcaaattttaaatatgctggaggaagggggaaggtatacacaacattgtggataaataaaatgtgggttctcatgggaaaagggaaagtcaaggcatttaattgatggggataggtaatatgatactaat

SEQ ID NO: 319355 - DNA, 554 bp, Homo sapiens
atatgcctatcttatagctttactttgacaaaatttcctttgaaaatgaaatcaaatcaacttctttgaatatcctggaatattaactttctccatgagtgctggttcctggcaagaatcatttagagagtttgcaaacagtatgaggatgtagtgcaactttaggctcatcttacatactcaagaggcacaaataatttgtattagctatgtacaagaaggagacgcaatcaatcaaagctgaagaaaataagaacttctggtattttttcataaacatggcaaatgatacctccatctctattccacaacactgcctcttaaacattatttgatttataaaatattaaacatactgatacgacttcaacctgtagtttgcattattgtggatatctatgtagacaacacaatctattgcagtgmaaattttaaatatgctggaggaagggggaaggtatacacaacattgtggataaataaaatgtgggttctcatgggaaaagggaaagtcaaggcatttaattgatggggataggtaatatgatactaat

SEQ ID NO: 319356 - DNA, 554 bp, Homo sapiens
atatgcctatcttatagctttactttgacaaaatttcctttgaaaatgaaatcaaatcaacttctttgaatatcctggaatattaactttctccatgagtgctggttcctggcaagaatcatttagagagtttgcaaacagtatgaggatgtagtgcaactttaggctcatcttacatactcaagaggcacaaataatttgtattagctatgtacaagaaggagacgcaatcaatcaaagctgaagaaaataagaacttctggtattttttcataaacatggcaaatgatacctccatctctattccacaacactgcctcttaaacattatttgatttataaaatattaaacatactgatacgacttcaacctgtagtttgcattattgtggatatctatgtagacaacacaatctattgcagtgcaaattttaaatatgctggaggaagggggaaggtatacacaacattgyggataaataaaatgtgggttctcatgggaaaagggaaagtcaaggcatttaattgatggggataggtaatatgatactaat

SEQ ID NO: 319357 - DNA, 552 bp, Homo sapiens
aagtcctctgagggtcagcatttttgaaggatagacaatctactactttttctaccacaaatttagtaatttaataaagaataatatttaatcagtatttcatyattaaatgtcactttaaaataacaaaaatataggatacattagtttactataccaaattgcagaatatctcctttttatacctttcaaagctgtgacgagtattatttcaacatagtgttcaaataaaaaagcaatgtaggaaataataagcataatcaatcattgatcacataaggaattcaatatacactaatcacatatttcatctttgaataatgaacttcactcatgcgaaacattaataatactatctacactgaggtagtagagctatttatctaaagatttgtctgagaataaagaacatgaaatctaacatgcatcaaaagcattctggtctcattttaaatccatgattctcttcagtattttactcaggttctgggatagcttcaaatatggaagaataagtatttgttcctccctcacaaccatttaaatttgaaa

SEQ ID NO: 319358 - DNA, 552 bp, Homo sapiens
aagtcctctgagggtcagcatttttgaaggatagacaatctactactttttctaccacaaatttagtaatttaataaagaataatatttaatcagtatttcatcattaaatgtcactttaaaataacaaaaatataggatacattagtttactataccaaattgcagaatatctcytttttatacctttcaaagctgtgacgagtattatttcaacatagtgttcaaataaaaaagcaatgtaggaaataataagcataatcaatcattgatcacataaggaattcaatatacactaatcacatatttcatctttgaataatgaacttcactcatgcgaaacattaataatactatctacactgaggtagtagagctatttatctaaagatttgtctgagaataaagaacatgaaatctaacatgcatcaaaagcattctggtctcattttaaatccatgattctcttcagtattttactcaggttctgggatagcttcaaatatggaagaataagtatttgttcctccctcacaaccatttaaatttgaaa

SEQ ID NO: 319359 - DNA, 552 bp, Homo sapiens
aagtcctctgagggtcagcatttttgaaggatagacaatctactactttttctaccacaaatttagtaatttaataaagaataatatttaatcagtatttcatcattaaatgtcactttaaaataacaaaaatataggatacattagtttactataccaaattgcagaatatctcctttttatacctttcaaagctgtgacgagtatkatttcaacatagtgttcaaataaaaaagcaatgtaggaaataataagcataatcaatcattgatcacataaggaattcaatatacactaatcacatatttcatctttgaataatgaacttcactcatgcgaaacattaataatactatctacactgaggtagtagagctatttatctaaagatttgtctgagaataaagaacatgaaatctaacatgcatcaaaagcattctggtctcattttaaatccatgattctcttcagtattttactcaggttctgggatagcttcaaatatggaagaataagtatttgttcctccctcacaaccatttaaatttgaaa

SEQ ID NO: 319360 - DNA, 599 bp, Homo sapiens
caataagtagttggaacatattttagctactgatgggggtgggaaggcttatataactaaaagtgtaagcatacatacaattagaatttaatttttatcaactctgacatgttttcatcaaccagatatctactcttcttgtggtggtggttttccacaaatgttacggagcatatctgatctgcctrgggaaagggttaggcactagagatacatagagtgaagatgtggtcccaaccttcagggattttatattccacaggtacatagacatttaaaaaacaaaaacattgtgttattagagagagaaaagaatggagtgttatgggagcacagaacaatttgacataattctgaaagtatatgagagttttgagaaggatttccatggaagaggtgctatctgtgctgttttaacatggagaagagtcaagggaaaaatactaggataatgtgacttggattggagtgcagggatatggaaagaaatcaagttgaagaggtcatgataagtacagtatagtctggaatttaaatttggccgtttataggccatgggagcatttgagagtcatgacctgttttgtgttttagaaata

SEQ ID NO: 319361 - DNA, 599 bp, Homo sapiens
caataagtagttggaacatattttagctactgatgggggtgggaaggcttatataactaaaagtgtaagcatacatacaattagaatttaatttttatcaactctgacatgttttcatcaaccagatatctactcttcttgtggtggtggttttccacaaatgttacggagcatatctgatctgcctggggaaagggttaggcacyagagatacatagagtgaagatgtggtcccaaccttcagggattttatattccacaggtacatagacatttaaaaaacaaaaacattgtgttattagagagagaaaagaatggagtgttatgggagcacagaacaatttgacataattctgaaagtatatgagagttttgagaaggatttccatggaagaggtgctatctgtgctgttttaacatggagaagagtcaagggaaaaatactaggataatgtgacttggattggagtgcagggatatggaaagaaatcaagttgaagaggtcatgataagtacagtatagtctggaatttaaatttggccgtttataggccatgggagcatttgagagtcatgacctgttttgtgttttagaaata

SEQ ID NO: 319362 - DNA, 599 bp, Homo sapiens
caataagtagttggaacatattttagctactgatgggggtgggaaggcttatataactaaaagtgtaagcatacatacaattagaatttaatttttatcaactctgacatgttttcatcaaccagatatctactcttcttgtggtggtggttttccacaaatgttacggagcatatctgatctgcctggggaaagggttaggcactagagatacatagagtgaagatgtggtcccaaccttcagggattttatattccacaggtacatagacatttaaaaaacaaaaacattgtgttattagagagagaaargaatggagtgttatgggagcacagaacaatttgacataattctgaaagtatatgagagttttgagaaggatttccatggaagaggtgctatctgtgctgttttaacatggagaagagtcaagggaaaaatactaggataatgtgacttggattggagtgcagggatatggaaagaaatcaagttgaagaggtcatgataagtacagtatagtctggaatttaaatttggccgtttataggccatgggagcatttgagagtcatgacctgttttgtgttttagaaata

SEQ ID NO: 319363 - DNA, 599 bp, Homo sapiens
caataagtagttggaacatattttagctactgatgggggtgggaaggcttatataactaaaagtgtaagcatacatacaattagaatttaatttttatcaactctgacatgttttcatcaaccagatatctactcttcttgtggtggtggttttccacaaatgttacggagcatatctgatctgcctggggaaagggttaggcactagagatacatagagtgaagatgtggtcccaaccttcagggattttatattccacaggtacatagacatttaaaaaacaaaaacattgtgttattagagagagaaaaraatggagtgttatgggagcacagaacaatttgacataattctgaaagtatatgagagttttgagaaggatttccatggaagaggtgctatctgtgctgttttaacatggagaagagtcaagggaaaaatactaggataatgtgacttggattggagtgcagggatatggaaagaaatcaagttgaagaggtcatgataagtacagtatagtctggaatttaaatttggccgtttataggccatgggagcatttgagagtcatgacctgttttgtgttttagaaata

SEQ ID NO: 319364 - DNA, 522 bp, Homo sapiens
atggtgacaggatttgggaagagttgggcagggtatcaagagcctttgaaagagacagaatcaygccagctgaactaatgatcagttggacttttcgaagtagtagtctgaaagagtatttatttctaagcctatgcatttgcttttgggttaacctgtattatttttcccacagtctcctgggaataccaactttgcttcagatggactaaggaaaaaaaaaaaaaaaaaaaaaaaaaaaatatatatatatatatatatatatatatatatatatatatatatatttctttcccccctacacaaagaaaaagattaagaagatactgtcttaacgcagcaaatcaatcagttttcctggacacacaaggagaaacacatgtgagatatagagaaactaggagtaaagctaacgccaaacagggaggccagggacatctgtgaattcttatccctccctccacgcagtctacgcaccatagcccttagtgcacttttattcattcatccagtcattcacgt

SEQ ID NO: 319365 - DNA, 522 bp, Homo sapiens
atggtgacaggatttgggaagagttgggcagggtatcaagagcctttgaaagagacagaatcatgccagctgaactaatgatcagttggacttttcgaagtagtagtctgaaagagtatttatttctaagcctatgcatttgcttttgggttaacctgtattatttttcccacagtctcctgggaataccaactttgcttcagatggactaaggaaaaaaaaaaaaaaaaaaaaaaaaaawatatatatatatatatatatatatatatatatatatatatatatatttctttcccccctacacaaagaaaaagattaagaagatactgtcttaacgcagcaaatcaatcagttttcctggacacacaaggagaaacacatgtgagatatagagaaactaggagtaaagctaacgccaaacagggaggccagggacatctgtgaattcttatccctccctccacgcagtctacgcaccatagcccttagtgcacttttattcattcatccagtcattcacgt

SEQ ID NO: 319366 - DNA, 516 bp, Homo sapiens
gaacccctttttctgaattgtttccatcaacacgttgactgtgaagtcaggaagtaccttgccagtaagggacaatcttttaaagtttatttaatattgaacaccacccttggctacccaaaccccatgggcttaatatcaaaggcattaaaataatctacttgcccccaaayataagctctttattcagtctctagatcagtgggtcataagcatctttaaagctcattacacatgatacttagtggaaagaactgtcaatgctatagaagagaactctgatagagacatcatgaatgtctggaaggattataccattgaagcattgaagatactgtcattgttattttgaaaatccatgaaagccttcaggcccataacaataaattcaacatggaacaataatttatgcctgtacaggctgatatataaatgtccttctgatagatgatctttgagcacagacctatagacctaactcaaaatgcatatgcgatctgcttcttttttacctct

SEQ ID NO: 319367 - DNA, 596 bp, Homo sapiens
gggaattttttatatttcttattaccatctgaagatctattcctaatcttatacttgaaaaggatgtttattgtgccaattagtcagacaagttgtgaagctaaacatttacctttggtaatacatgaccttcttaaactggattccatgagaaaattagctcagttggagattatttgattggctattttctcagttttccagtttcacataccaccataccacatgcataggagaaaagagagttcatgacatataataagtgcattggggcaatagggtttaattctcccacagaatccctttggagaaagcctgcataaagcctcaatgttcacatgattttcaagaactgtgaaggacaggagattttatcctacttgcaagctaacaaattcatttgccacagtcatttagatgctggtataagacatgagactcctggatcagaggcataggactttactactcacagcacagcacagcaggcagcattggtttcatgtttacattgtgatccttcgccctgtaagtttcatggggataatggggagtagttcaaatgggtgtamacgttctctaggttcatgtaactg

SEQ ID NO: 319368 - DNA, 475 bp, Homo sapiens
ctgtcctttgtctaatagagtttccaaaggcagagcatttcttctgtaattgtatatttctgttaaagaaaataataattattctttgtaaaatatttctagcatccyttgtacaattaatgtgatttttaaaaacaccaccttaatctctgtaagtgaattgaaaaaatctacacatttcaaataagatatttataaatatctcctaaataaaaccatatatactctacttcccaagaatgtataatagagtacattattaattatactgtccctctagcaataaaaaacaatgtaaaaaaagaaaaatgtttgatgatggtatcatgcacatttttgtagattccattgtaactactttatttgcttctctaggctcttcactgaaaagaatgccaaatgcctctggaagtaataaagagactgaactaatctaaaattgtttgaaacactcaagtcatttggaaccaatata

SEQ ID NO: 319369 - DNA, 524 bp, Homo sapiens
gattcttcttttaccaatggtttgcattatttaaggattagaagcatggaaraaatttgcatattttagagaatattaagtaacgatacatgtttctgaatagattgtagatatagctgtaggaaatagcaacctaaacctaatatacacacctacacacacacacactcacagacagtatgctcatacacacacacacatacaccggttgaaaagaagtaagaatctcaaaggatgggaccacccctgaaaacaaaccaggctgttgttccccaggctggagcactgaaagaatctatgaagttttcagcctgaaatagctaatggcacctgcaaacagcttagagcctgaaaactatcaagcagttgtctgtgctctaaggataagactctaaaaaggagaatcaaaatcatttgctcagagaacttttcttttcatcagaagaaaacgacattaaacaaataaatacacaatacaccatacaaaatctcttaatagtatgaagaaataaagcaaggaaaga

SEQ ID NO: 319370 - DNA, 552 bp, Homo sapiens
ttaatcagtaaataaagttttatttaattttttcacaaagagaactttgtggtcatgaacgcctgctgtctgctccattaaaaataaagaagtcttctaaagagactctctcaaacatattcaaatacaggacttgggaagatatttcattctaatttaggagtacataattaatgtayttctttgcagctagcgtttaatgtcattgcttttatggcttatgatgtagtttgtttctttttatttaacagaaaggtcaatgtgactaataattagaactatgactgagagaagaagactgtaattagactatttttcagtgaataataaagtgtcagaaaaaaagaaagtgaaacctttgtgtcagcaaaactggtttacataaggacaggaaaagtgattcttttatatagatgcacacttacgtgaccttcccataatctaacttattgataatttaataattataaatatacataaagagcatggtctagatattcaaaataaagcaatggttctcaaccaagagtgattttgcccataagagatttg

SEQ ID NO: 319371 - DNA, 588 bp, Homo sapiens
aaacatttttgcttgttatgactggaggagtgccactaacttttagagggtaaagtccaggaaagctgccaaacatcttacaatacccaggcagtgcctcacaacaaagaattatccagttgcaatgtcaatagtgccgattttgagaaactcaaaagttataaaaccttttgattttgaaattaatgagtaagctttgaagtagtccagagtaattggagctctgtgctgaaatgtctatctattgacattatattgtgagatgcattttgtaaccattgtagattaaatgggaaaaaaaatgaagggtgctatactacttataactgagcattctgagacagtactgagattcagtacacttagatctcatgtaaatgcctattggggctattcatttattgggtaagaggcaggttagaagcactctaccgcaaactcactatgtagcgagttttaggggaataaatagttttgaagatcttcatatcttcattgatccagtgacatagtcagtgagcaaatatttgttgagggcttactctatgctggataytgttcatgctttggccaacatggttaacatga

SEQ ID NO: 319372 - DNA, 603 bp, Homo sapiens
tatccttagttgtaggcaacaaactgttttgaaactgaatacaattaaacgttctttgtaaattaatcttttatgtcgctagctgtcctcacaaattcartctttccttcttttctttcttctttgttttgttgtggttttttaaaacaaaaacaaaaacaaaaaacaacaacaaaaaaaaaaacaccttattttagcttacatggaattaggataaacaactaaactacagatttgacttttcatccttcctagcagacatgtgtggccaagggattaagtttaggtcaaagaggatgtgatcgcaaaagacatgtgcaagtacagtgtcactgccttgaagatgaagttattctgaacttcctttctcccgcctccaatccatgtggaagaggatcataccctacataatgatggaacatcaagcagaatattatcctattctaaacatggatccatgaatgactctctgaagtagacctattctactggtcttgatctctctccttttgtgaaaatatgaggaaacagccttcaatttcatgtaaaataattatttttggttcatttgttataaagatttatcttatagcctacctaata

SEQ ID NO: 319373 - DNA, 603 bp, Homo sapiens
tatccttagttgtaggcaacaaactgttttgaaactgaatacaattaaacgttctttgtaaattaatcttttatgtcgctagctgtcctcacaaattcagtctttccttcttttctttcttctttgttttgttgtggttttttaaaacaaaaacaaaaacaaaaaacaacaacaaaaaaaaaaacaccttattttagcttacatggaattaggatamacaactaaactacagatttgacttttcatccttcctagcagacatgtgtggccaagggattaagtttaggtcaaagaggatgtgatcgcaaaagacatgtgcaagtacagtgtcactgccttgaagatgaagttattctgaacttcctttctcccgcctccaatccatgtggaagaggatcataccctacataatgatggaacatcaagcagaatattatcctattctaaacatggatccatgaatgactctctgaagtagacctattctactggtcttgatctctctccttttgtgaaaatatgaggaaacagccttcaatttcatgtaaaataattatttttggttcatttgttataaagatttatcttatagcctacctaata

SEQ ID NO: 319374 - DNA, 578 bp, Homo sapiens
tggttatgtataggataactgcaaatatgtgtatacacacaggttagtatacacacaggtttctgtgctttgttatctgagaaagcctggaaacagggacacccaaatagcaacaaacccacttagtacccaaatcttggtttttaatatgattctccaataaaaagaacaagggttccttggaaaaataacttattctaggactagggcaggaatatrcaagatgagtcttgcatatgagatgccggaagcatctcatagtgcccaaacataagaaagtgctccacaacaacaaaaacctaattgatgggagtatataaaaaagacacaggagcagagtgaaaggaaggccaaagctgcaacaatttgagcaacaaaataagtactactagattgtaactcaaagtataaaataaatatccatgagtccatactgacataaataaatgactgatataaataaatgacttagtgactaagtaagtaaataagggagaagagacagatctctcttcagaaaaatttcaaataatttatgtatataatcttccttcgagaaaggagcaaaaattccttgt

SEQ ID NO: 319375 - DNA, 653 bp, Homo sapiens
aatgataaactgattttattgtggcattttcctaaattttaagggaaatgagatatatcttatctttcacctctacttactatgaagttagcacaatttctttataaaagatcttaaaatcttttttatcccttttaaatcagtaaaaaaagatttttaatgcattaatgccaatatttttgatattctacttgtcccaaatttggccatatgagcttctgcaagacagcaactattttaatttaaacataattttgttcctatgttcttttctcagcaccagtagtattgatttctggctttctggtaaatcaaaatgctctagatcacatgatacttttcctgccacaaaccaggaatcacccatttttcaaaaagtactgacttattttaatggagaatattatttataaaaccaagatctagtttctagatggtctcattgtaaatagtttattattgattccaaccccattccatgcacagagctaaataatatatacatatacatactttgtttccttacttagactgctactatttaattgtcaagtataattataactttgatayaccccattactcatatgacaatgagtttattcaacttgttactttatttcactctcctcctcccgtgttttagttttatt

SEQ ID NO: 319376 - DNA, 471 bp, Homo sapiens
acaatatatttcaatgatatagagattattaaatgttttaatggaattcatttggaagaaagactttcatcttacaattaattttccagttaccaaaatgttaaattaataaaatgttcagatctttttcatgtaattaattatgtaattgaaattcacaaagcccaatatctagtgcttttgtttttgyatggtttacttattgattgaaccaagaatatatggttatatatgagaaattgaaaggatacactgttcagtggagagtgaggatatatctatggttcttcatttctggtatactatatttgtgtccactctttatcttattgctgtctttataagcgatactccaaactacttgaaagaaagtgttgctactactaggtacttccaacatttggaaaaaaaataataattggcacataaaggtttttgagaaatattttataaatgtcctttttatttcat

SEQ ID NO: 319377 - DNA, 575 bp, Homo sapiens
ctacatctggtaaaatgcctttagacaatattttcttgtttgtttttgtttttaccaaacaactaattttgatcgttcagacctttatccactaaaaatagtacttaaatacaatcactcctagtcttccctaaatatactaaaacaataaatctctacccttaatcattggatggcataattatatttttatggtccaaaagttaaagaacacagcaggataccttatatttttagaaatctacaagcatataatgtgagacctwaagacatgtaccaatttcactggagaaaaataagtgactacggattgtctagggagtttaaattacttcagcattgataaaatgcaataagaacaattcaaatgcagcattcttctttaatcctgaaaaggaaagctctttcaaataagaagataaaggtaaggtataaatactgaatggcaaacggcttccaaagcatcttaaggaaaaagtaatgaagaaaaatttagatataagagtctcgtattaatttcctaaggttgccataacaaattaacacagattgcatgatttgaaaaacagaaattt

SEQ ID NO: 319378 - DNA, 600 bp, Homo sapiens
gaatgttcagggacatgaaaataaatgttcagtcacatctttgacttgcctggggcccaggagtcctgtgggtaagaaacttgaacacagctcataaataaaatgtaggtacatagagacctatttaatgaaccagaaaccctaacggaagctgatttagataaagaggggaaaagagaactcagaaaattacatatataatttaatttcccctcttaccctgcatctgagcaagacaataagaaggcccaggaactctgtctcctggtgccagtggggaagttcaaaacatattgggctgggccttgtgcagaaatgctcacagcagccccactctctaaccacaataaaaaacaaagccattarctatccctttgctcgagccattccaaactggtttgagtgtccaccctgctctccccagaaagtctcattatgtgagaaataaaccttttcatactgtcttggtacatgtgtggcatcctcagtctctagttcaaaagaaattgtgaatgggaaagattgacccccgccctccacaggtaaccacaaaacagcagtgattttgatagagctaccaaaaagtcccataaaatataa

SEQ ID NO: 319379 - DNA, 600 bp, Homo sapiens
gaatgttcagggacatgaaaataaatgttcagtcacatctttgacttgcctggggcccaggagtcctgtgggtaagaaacttgaacacagctcataaataaaatgtaggtacatagagacctatttaatgaaccagaaaccctaacggaagctgatttagataaagaggggaaaagagaactcagaaaattacatatataatttaatttcccctcttaccctgcatctgagcaagacaataagaaggcccaggaactctgtctcctggtgccagtggggaagttcaaaacatattgggctgggccttgtgcagaaatgctcacagcagccccactctctaaccacaataaaaaacaaagccattaactatccctttgctcgagccattccaaactggtttgagtgtccaccctgctctccccagraagtctcattatgtgagaaataaaccttttcatactgtcttggtacatgtgtggcatcctcagtctctagttcaaaagaaattgtgaatgggaaagattgacccccgccctccacaggtaaccacaaaacagcagtgattttgatagagctaccaaaaagtcccataaaatataa

SEQ ID NO: 319380 - DNA, 678 bp, Homo sapiens
atttaaaatgaaacaatgcttattgcaaatcctggccatatttaggctattttcttctgttgagcatatctcagataagcacaacaggaaggaaagatggctagagatgtagctaagatgggaagggctaatctataaatattagatgactgcagtgtgcttatgctgtgctagacactacatactaggaataaaaataactaggcggaaattctgacaagtgtcagaggagagaataatagtgttactatcttaagaagaaagcctgagagcaaaccacacatcttktgtatttgactgcaatgatcaagatgaccatacccaaagtagggtggcataccgttaggaagtagaaaggctgctagattttaagtcaggtctagatgctcacccggccctggcattaattttctcttccaatttaggcaatttgctttaaaaaaatgagctgctattttgtcatctataaaatggcctgttgtatctctaggcattctttcagctctaactagatgatccatagactctttgtctaattctttctctaatcccattgaggaaagaacaagataaaataatttagattataacgttctgagttttaattagaaataaggacatgtttccaggcagtgagagtgactcagtattggcaagtgtttctaagggaagccaaga

SEQ ID NO: 319381 - DNA, 607 bp, Homo sapiens
agttaaacatagttaaattatatttttaatagttatatataagaaatacattttcaagtgttaaaatagatgaccatttatgttaaaacacatgcctcagttttgcttgtttttgtttttttttagtcttttttatccattagaaaacctctaccttggaaaaagtagagaaaacttcattaaaaattttgaagctgatgatatatgaggcatatgacaaaatcttttattatcattgtagaaaaacagatacagcagtcaaatcaaagataaatttcaaggtagatgctagtttctttattgcaggtttagcaataaagaaagaaatataaggcaacttaatatttctttaataataaagaaatattgattagccacattttaatcaataatttaaagcatgacagtaacygctgctatagtttgtggctgacaaagaactgggtgaaataactaatatgatggatgacaaaaatgatgatttgaaatgatcttgataatttagaatacaagggtgagataaaagagtcaaaatttaatgagataaaggtaaacatcagagctttggtataaaaaaattgtcacagtacagaatgaggcttaacag

SEQ ID NO: 319382 - DNA, 627 bp, Homo sapiens
aaaacaaaattatgtagtcaataaaatcaaagattattttcttttatgtaactataaatgcaaatgtttctcgttgatgggcagcctccagaacccaagtagcatcttcctataattcttggaacccagatcacattgtacaaacaacatcactgttgctcttattctgctggtgaaatcgatccctgtagctacgcctcaaygcaagggaggcagcttatagctatgttcaggttctgcttccctgtgacaggggaagtttcaatttctgtggttggttagccatctttgacatacttccacttatactaaatgtttgaattagtgattacatttcaagtgatatggttattcatgactagtgcactttggctaggtgtacattgaaaaaatatttttttaaatgttttatattttaggatttctgtgtttagccaaacatttggctctttagagaacaatttgtgaataactgatcctttcttgaaagcaggtttgatgaatattggagaaaataaatgaaggtctatatcaaattaagaagagaaaacagaaaaagcaagggaaagaaatataatgcaagcatttaaaggcttctgatagggctgagactgaattattttccaa

SEQ ID NO: 319383 - DNA, 610 bp, Homo sapiens
agtgccctttgtcctcctggattctgattgctttgctctcctctgatgctcaaagcctatgactaacacatctcaaaggccatggcctggcacaaacactgctgcttgtgaaattcatatctcactaccttcaccacaaatcttgctgtagaaacctcagaggtctacctgcaacccttatttggccckggttggggtgctcctcccttcaatccttatttgggaatcactttatttcatcaatagtgaccttcttctggcaagatccttagggaaccaaaggtgccttagaaaagctacacttgggaccacttttttaccttaacaggctacactgacacatcttgaagtcattctgcaccagtgtttttcagaacccctgcaagtatcttccttcttctgaagtccgaaatggaaaataggggtctctctctgactttgctagtattctctctcttttttcccacatatctcttgtccagagcccagagaaaggaaaatgtgcacctataattagttttttcattctatgctctctgtctctttcttctttccagaatccacgagacaagacttcacagagagcagagttatgctctttaaattatag

SEQ ID NO: 319384 - DNA, 550 bp, Homo sapiens
gcacacacaataagaaatgtatagagtgtaaatttaaatgtaaaaagttggtcttcatgcagaagagagaagaggtgatttttaggggtcagaagttctgcataagcaatctctgtccttaagctgtggaaaaaaatcaattcatatctatactcctaaactgaattaggattttaaatgcctatcaccatgtataaaagaattcatctcacttccaaacaaagaacactgaacagggcaacaattagttgattaattattcatcacatcgccaatgttcttacaaagaaggaaatatacaaagcaatcgcctacattttcttactttcacaaggacatttgctaagtgcctattaaatgaatgtaactaatcatggtatatcagtgcaaactgtgcataaatacatcaaaaatcaaatcaccaatccattcaacccrtaaaatccagcaggtggtctgaagaacatttaagaacaactaatctactaagcaaccttcatcacccactaaataaccttcagcaagagccttaattgtatgcaggtgcaga

SEQ ID NO: 319385 - DNA, 619 bp, Homo sapiens
aatctgggaacaatttacaatgttagcattaatcaatgttaaatatgatactatatcaacatttacttctttacactatgtgactatgctatgtactcaacctcttatgctgctataatcaatgcagaagctctttataccgccttttcaaagcattaaaattcaaatccaaaccattaaacrttatatttcatgtttgcctactcttaatctgcaatacaacaattaaaaaccataaaatagtgatgtaaaatctataatgaaaagagttacttccctctgagatttgactaatattatgacaatctgctttcttgttactatacattttaaatgaagtgatgtgtcttgtgccagtatttaaaaactctcttttggattcctaccaaaaatagtacttcaggctaaacctcaaagacaaaaaacatttagtagatttgttgaaatggagtttaatattcacattagttgaggctccttttttgataggtgatataattctaatatagtctcatttagaaatttacagtaaaagagcacaccacaacttcttgagaacaacttgggagatatcatagaatattatactttttaaaaatattcttgaaaaaagtaaaga

SEQ ID NO: 319386 - DNA, 577 bp, Homo sapiens
attatctttagcaaactaatacagaaacagaaaaacaaatactgtatgttctctcttacaagtgggagctaaataatgagaacacatggacacataggggggaacaacacacactagggtcctttggaaggtggggaataggaggagggcgaggatctagaaaaacaactaatgggtactaggcttcatacctgggtgatgaaataatttatacgacaaacccctatgacacaagtttacctataacaaacctgccaattttaccgctgaacttaaaataaaggttaaaattaaagtaaaatagaatctggctagtccaaccgacaaaggcaaaagataaccagtcaaagcataaatgcatagtcatatcaccttcttgctccctgtattccagctcatttgcatgagtattaccccttgttttccarttgctccaaggttcactctgactcattcacaacaagggcactatcttttgacaatgcagtttggtcaagtactatgtccgacctcagattcctctcaaggatgaccttgagtctcccctcatggccatgcatcacaactgcatttgaca

SEQ ID NO: 319387 - DNA, 611 bp, Homo sapiens
catttattgtttgtgagggactttgcatgtacttgcttaatatttagcataaccctattaaatagaaactattagtatgatcccaagtaacttgcccaaagatgcaataatagaaagtggaggactcagaattcaaactcaagagtctataccctctgtgtatgtctgtatatgtgagagatatattgtgagagatgtagatgtagagagggcttcacggccctctcatgtcttattaccctcatgctcagtaagtttttgtgctttttaacccctctgagaacatctgctaatcctgccttatacaaagaggacaaacgtgagatctgattctggctgagaaatggggtgtgggaaaattggagtcagtgacccattatattaacaaacaccaygtccttgtgctgaagttatggaagtaagatcttgcactgggagctcaattttaaggctttggtagagcacaataaccaaatctactgagcttccctatgtttgcggttcttaacccaaggacagcaacagagctgatgtttcacacatctctttgttgtcatcattgacagtttgctcgccttactcaaaacactgcctcctaaacattaagagat

SEQ ID NO: 319388 - DNA, 588 bp, Homo sapiens
aatgataaacaggctcccatgaaaacctaaatggcaaaagtaaaaaaaaataaataaataaactgctaaaacgaattccaaagtgcacttttggatgtgattgtgagacaagaccataagcttgtggcagttttaaatataaaattgtaggggtggattgatgtgtgtgattatgaatgaacatctgcatcttggcctgtccagaccaatttatttgtgaaatagaaaacaaacctgatactcatcaaattggcttatgacttccctaaaaaactgactgaatacttgctatggaatatagtattaaatatgattgtcaaactcatagtagatgtcasttaatagaaaataataaaatgaaatgtgtaattacatatgttagaagtatgatgatactcaagactattccatagtataactaaagttagatgtatatctaactaaagcaaagctcctaaaaatagatttttctttaatttgaatcagaatttttcccaaaatagaggaataaaacctagaatgatgaatttaaatcattaaaattatccagtatatctagctaattcacttcatagataacagagaaaa

SEQ ID NO: 319389 - DNA, 601 bp, Homo sapiens
ttcatccaggaactcccgtaagacccctgccaactgggctgtctctctctctcactattttttccccaacctcaggggaatgagcagtggaggaggagtccaagraatagatacacagggagagttgtgcgttgttcatttagaccagtggttgcaaaatgacggcctgaaagacaagtccagcccagagcagctttgggtttggccacaccccagcagtgttgtgcaggtaaccacaagctccacccagccctattgtgctgccttgccaccacactgatggtaggttaccagccctgcctctgaaaccatttgagtttataaccctagatctagaaagatatcaataccaagggaaaaaaaatagattaaacatctgtctgctaatggtttggactgacaatttatttatttggaggcttttaaaacacgtttaagcaaatacaatatggttctgaaacaaaaatcaggtggtttctctgtggctcttaccgcatccaactgccaagatatgaaatttggttaccagattgtaagaagtgattttgagtctccatgattctgagacttctaaaaaataattggggaaacagtcattggt

SEQ ID NO: 319390 - DNA, 573 bp, Homo sapiens
tcacatttctctgtcactaacactttgctctggttatttctctgtgaaattttttcccaagaaatcctttggctgaatgtggaggaaaagagcggaaggacttggggctgttgcagcaaaggagccccacctctgcaggttttgcccacactatgaagatgctgtgcagcccggggtgagggtgtcctggcttccatrccgactaccatattcccctgtcccttgcaacccagtcttcctgctgtggctactaaagtctttgcctccctgctcatcaccgctcctcacacacttgaggttttggaagttgtcatgctggatctggatattgttaagttgttgatccttccaagaccagctgctgctctaccatttataaaaggccaagaagcctccatctccctttgtccagcacattctgattgtggtcaatctcaacagaaacacatgtagtgaaatgaaggccgggtatgtgggtcttttcctacgctgcaaaatggattcattgttctgcggaatttgagcctgaccagaacagcaggacttataagccccaggactgaaaataaactc

SEQ ID NO: 319391 - DNA, 557 bp, Homo sapiens
aaaataaactccacagtctttcagattcacaggggtcaggaaaggaggagacctagaagaatctcatgttccaaagacaaactctcctgctaccaaatacccacattctcggaagccgagaatatttggacatctcccagtgccagacttgcttgcatttcacatctgggcatggtgttgccctagagccaagataaactcatggtggggaagtccagggacaccgaagtgttcaagaaatggcttttctcattcaggaatccttcccctgtcaaatcccaggaattatcttgggggtcagacagaaatttaagttccatcatcacaactgccttcacaaccaccactgccataaccggtcatcagaatgacttgcccagggccacacaggtgagacattcgggccaggacaaccatgcaggcccctgactctgggacccgtgcttcctsttcttcacatcataaattaaagggacattcattatttttagatgatccaagggcggatctataggaagagagttgagaaaatatgcattcggccaaattttataagt

SEQ ID NO: 319392 - DNA, 593 bp, Homo sapiens
gctttggtttttctttttcttttggaggtgctaatacccaggcctgaacttcaagattgaattagaacttgtctttacacaggaaggagaaaacccagagaaaagtagaaaagcaaggttctccatttgcagattacaaaataagtcaggtatcctggaggctaagagaaaaattaccccattctgtatcctaaaccaatgarttggagtatacgacagctacgtgaaccttgtaattctgtaaagtaaggtcagccattcatatctaatcttgttattgcatttctaaatttcaaatttaaggagtccactattcccacaattagagacagagatttgaactgtgtgatcctgcgttattattttaattcagattctgagccttggccaaaaccatccgagctgtttcccttataggatgtggatccacagacttacttcatccctaagatacctcatgctatactcacattagaatcactccacctaaacaatgctaatcctgaaatgcaatgttaccaacacaaaaaaaaaaaggaagaataaaattaatggcataaaaattctgattattagacagaggactaaacaaa

SEQ ID NO: 319393 - DNA, 593 bp, Homo sapiens
gctttggtttttctttttcttttggaggtgctaatacccaggcctgaacttcaagattgaattagaacttgtctttacacaggaaggagaaaacccagagaaaagtagaaaagcaaggttctccatttgcagattacaaaataagtcaggtatcctggaggctaagagaaaaattaccccattctgtatcctaaaccaatgagttggagtatacgacagctacgtgaaccttgtaattctgtaaagtaaggtcagccattcatatctaatcttgttattgcatttctaaatttcaaatttaaggagtccactattcccacaattagagacagagatttgaactgtgtgatcctgcgttattattttaattcagattctgagccttggccaaaaccatccgagctgtttcccttataggatgtggatccacagacttacttcatccctaagatacctcatgctatactcacattagaatcactccacctaaacaatgctaatcctgaaatgcaatgttaccaacacamaaaaaaaaaggaagaataaaattaatggcataaaaattctgattattagacagaggactaaacaaa

SEQ ID NO: 319394 - DNA, 593 bp, Homo sapiens
gctttggtttttctttttcttttggaggtgctaatacccaggcctgaacttcaagattgaattagaacttgtctttacacaggaaggagaaaacccagagaaaagtagaaaagcaaggttctccatttgcagattacaaaataagtcaggtatcctggaggctaagagaaaaattaccccattctgtatcctaaaccaatgagttggagtatacgacagctacgtgaaccttgtaattctgtaaagtaaggtcagccattcatatctaatcttgttattgcatttctaaatttcaaatttaaggagtccactattcccacaattagagacagagatttgaactgtgtgatcctgcgttattattttaattcagattctgagccttggccaaaaccatccgagctgtttcccttataggatgtggatccacagacttacttcatccctaagatacctcatgctatactcacattagaatcactccacctaaacaatgctaatcctgaaatgcaatgttaccaacacaaamaaaaaaaggaagaataaaattaatggcataaaaattctgattattagacagaggactaaacaaa

SEQ ID NO: 319395 - DNA, 546 bp, Homo sapiens
cactcctttaatgacagtgcagttaaatgcattttcatgtgcttattaatcatgggtatatatttatatatacatgtttatatacataagtatatattaaatatgtataagtatgtatatagaggggatatgaaatatgtattaaaatctttcccattttttacttcmgttgcttgacttcttactgttgagttgcattctgaatataagtcctttatcagatatttgatttgcaaatattttctccttgtctgtgccatgaatttttattttaaggtcatgttagttgcagaacctttattaagttcatttaccaagtttttgtttgacgaatgctgtttttaatatcatatctaaaacatttttgttttatccaaaatcgcaaagatttcattctatattttcttctagacactttatatttttcattttaacagttagatctatgacacattttgagataatatttgtatatggtgtgagttaaggatctaagattatatttcttatgaagacatctcattgtccagcatcatatatcgaaaa

SEQ ID NO: 319396 - DNA, 556 bp, Homo sapiens
aaagcttttacagtcctgacagagaaaataaaacaaaatgtcttcaagctcagtggctcattatttaactacccgcagccataaaatctcatctttccttggggacarccaggacctatgaccagagtagttaggcaatttggcttccagaaagacggagatttgtgccagaatgatctctggactccccatcttccctcgaagggcttttctttgtaaatcagaaagtgctctatgcaggaagattgaagaattagctactattcctgaagactagtaaaaatatatatttaattttagaatttaaagttttttaccttgagagttacaggtcagacaacccatccaacacatgattagcagagtaatttttcgcctttgcaatccaatgtcaccaaaggcatttactatctgtcacatgccaagcagttccagagctgccctggggtctctgggttttctgatcctcatttgattacctagccatcacatccagattaactcaactcctttaggctgatcatgctccctaataactatttatttaagcttcctt

SEQ ID NO: 319397 - DNA, 556 bp, Homo sapiens
aaagcttttacagtcctgacagagaaaataaaacaaaatgtcttcaagctcagtggctcattatttaactacccgcagccataaaatctcatctttccttggggacagccaggacctatgaccagagtagttaggcaatttggcttccagaaagacggagatttgtgccagaatgatctctggactccccatcttccctcgaagggcttttctttgtaaatcagaaagtgctctatgcaggaagattgaagaattagctactattcctgaagactagtaaaaatatatatttaattttagaatttaaagttttttaccttgagagttacaggtcagacaacccatccaacacatgattagcagagtmatttttcgcctttgcaatccaatgtcaccaaaggcatttactatctgtcacatgccaagcagttccagagctgccctggggtctctgggttttctgatcctcatttgattacctagccatcacatccagattaactcaactcctttaggctgatcatgctccctaataactatttatttaagcttcctt

SEQ ID NO: 319398 - DNA, 570 bp, Homo sapiens
tgatgtgggcctttgaagcccacccctccttcgtggggagacaggcacactggaaacttcttggatgttggggttagacaaaccccaagctaattatgtgaacctggggaaattacctagcctctctgagcctaagaattaaatgcacaatacttgttggttgagtgaagaaatggcattgggttggtgcctgtggagctatcaaggtgcagcctaatgtgccatgattccaggtggagggcaggtgaacaacaagctatgaaagttgggaatcacagaacattgcaagaaatcatgttcagaaggtcaggactggagcttctggaatttcaaataccagaataaagaattctggctcttttcctgtaattcaaagtgtccaaaagtgtgtttattataacacgagatcaaagaaatattgatagaaaggtgtcaacaakgttataggagcagttgaaaaacaccgggttaaataaagtctaattgtttgctttactatatagttgcttagcatcttcctacatctttaaatatgcatgttgtaatctctaaagcaaggagatatgtttt

SEQ ID NO: 319399 - DNA, 495 bp, Homo sapiens
tttgttccactattcattaaatattagggaaccctcagttttcttaactgtaaaatgggccataagtaaatcaggattaaaagagaagatttatgtagaagtcctggttcacagaaggacatcagttaatcaaaaaaygtcagttcccctccatctttattataaaacagggaattaagtggcatgtcagtatatgacaagctaaacatgatctaactctcacgttgtgccatattttatgctgtatgactcagtttttaatgggctaattcatcagtacatagccagctgtaccaccctcaaaggtaacataatacagaaaaaagaactgccttggacttctgggagcatgggtttattttctgactttctgactcacctgcctgaggaattgaaaactagaattacgtacttggcattctgcaggtcattttgaggtttcagattccaatgtctcaccaagaagcatttcaattccatttttaataaactgaa

SEQ ID NO: 319400 - DNA, 510 bp, Homo sapiens
taactatttttttaaacttcactgtctgcttttgaaggtgacaacataatttatattagtgggagtatgtctcatttatgaaaatactttcatggcctttaggttatgtaaagatcttaagtaaccaaacccaaaccaagtgtacaaggaacttaaaggaaatgagagagagagagagagagagaaagagggagagagagacaacactgaggaattactttacagagcaagttttccctggggtggggaggacacatcactgtagagattttattttggtcttaaatgtttttttttttttctttcttcccctggtagatgcaaaaatggggtaygagggacctgggactagggaatgagtaaaaccaggagaagagggctctgttccaaggagaaagaaatccaatcaatggggtatagggtcaaagcagaagtagccattggggaactcccagaaaaaaggcatggtcaacagttaacaaggttttttggattttgtttttaatggtc

SEQ ID NO: 319401 - DNA, 616 bp, Homo sapiens
tggtcttacttttaccctgaaaaacagacttctttcaaaggattctctttcttaatttgtgcagcattgaaaatgcttctgctttgctcagtagatagcattatcatatttatatacagaaaaatgtyctttatgggatggaaaaggataaagggatgttcaaaccattgctgcgttctgttgcgcaccctcccactccctgacaactccgttaaaacatcaacagtacaaggggccactgtatatttctgggattacacaccaagatctaggcttttagaggacctgtgaagggctgaggtggaagaggagaacattcaacatggattaataataaaaaaattaagcaactttcctctcagttcagcaaagtagggagatctaggttcagtgtttcttgatatttacagttttgaaggtaaatcacttggctgatgaggttctctattttggggcagatactgcttaatatcaccagagacatctagccatcttcgcagtatgttttctttactacgccttttccttgtagagacttcctgtatttggcaaatttaatcaaattttatttatctttcagaggtcacataggtacattcactcactttcaaccaat

SEQ ID NO: 319402 - DNA, 616 bp, Homo sapiens
tggtcttacttttaccctgaaaaacagacttctttcaaaggattctctttcttaatttgtgcagcattgaaaatgcttctgctttgctcagtagatagcattatcatatttatatacagaaaaatgttctttatgggatggaaaaggataaagggatgttcaaaccattgctgcgttctgttgcgcaccctcccactccctgacaactccgttaaaacatcaacagtacaaggggccactgtatatttctgggattmcacaccaagatctaggcttttagaggacctgtgaagggctgaggtggaagaggagaacattcaacatggattaataataaaaaaattaagcaactttcctctcagttcagcaaagtagggagatctaggttcagtgtttcttgatatttacagttttgaaggtaaatcacttggctgatgaggttctctattttggggcagatactgcttaatatcaccagagacatctagccatcttcgcagtatgttttctttactacgccttttccttgtagagacttcctgtatttggcaaatttaatcaaattttatttatctttcagaggtcacataggtacattcactcactttcaaccaat

SEQ ID NO: 319403 - DNA, 585 bp, Homo sapiens
acgaaggctaggactgccctgttactgcttcacaactggcctttgcttatgtgagtgggaagggtatgacctcattaagctggtgactcaccactaggcttccgatgacaccagcccaatagttggggagggggacctcactgcygatgactgggcacggaaatcttcactgacgccatgatgaaggaggaggacttagttacatactggtggctgaaaatccccactccctatttggctttttctgacactatcctggaggcagtgactggggctcacagttagaccctggtgaatacagaagcctaggctccccactcagcttttgctggtatggctgtatgtgtggtcacagcatttctggtgtttgctaaagtagaacacttattgtttaaaagttttccatgttgccatgttgtccttgttttttcctttggcttgaggatgagtttttgttgcagcattttctatctgtgctttgtgtttctagcctgccggctttttcaactctaaatgtaggacatatgagacaaaaacaaaataaaataaattaaaaaaaaaaaacagggacctcgcaactgtgtc

SEQ ID NO: 319404 - DNA, 585 bp, Homo sapiens
acgaaggctaggactgccctgttactgcttcacaactggcctttgcttatgtgagtgggaagggtatgacctcattaagctggtgactcaccactaggcttccgatgacaccagcccaatagttggggagggggacctcactgctgatgactgggcacggaaatcttcactgacgccatgatgaaggaggaggacttagttacatactggtggctgaaaatccccactccctatttggctttttctgacactatcctggaggcagtgactggggctcacagttagaccctggtgaatacagaagcctaggctccccactcagcttttgctggtatggctgtatgtgtggtcacagcwtttctggtgtttgctaaagtagaacacttattgtttaaaagttttccatgttgccatgttgtccttgttttttcctttggcttgaggatgagtttttgttgcagcattttctatctgtgctttgtgtttctagcctgccggctttttcaactctaaatgtaggacatatgagacaaaaacaaaataaaataaattaaaaaaaaaaaacagggacctcgcaactgtgtc

SEQ ID NO: 319405 - DNA, 516 bp, Homo sapiens
caaactgtcaatctcaagtccctaatctgtgacctgcttataattcttactccacagttatcatggtgaagaccaacgagatgatgaacatgtagcacatatctgtatcacgagaattccacgagaagagctcaaacttttatcatttcatttatgcctgttagcatgaaaaaagaggctgagaagggaagatggtgacaaggaattgctaagcagcaggtcacatgggtcacccagcgtggaccggcctgaacacagcttccatgtccccactcttgccaatgttctcatgtggacacagctggctttgttacatcagaatgaaggcctcccttatgatggctcagtgtttccatagaaatgtccaaggaacatgattatagagtcagtccattcattaacacagagggttaggggttgggaaaatcatctaatccaacagscttattttgaaaatgaagtttccaagccctagacgttcatggaagctcatgaaaggctcctaatcacagtgcc

SEQ ID NO: 319406 - DNA, 516 bp, Homo sapiens
tattcttcatggttctgctgccttgacctacacatacaagtgcaatccatctcctatgtgacagcccattaggtatctgaacaccttgtcatgccttctctaagttttcttttttccaggctaaaaattcaaaggagttcagaaaaaaatattaatatgtgtttatgtgtttaatgttgaaatctacctctgaatgtatcctacatgttgaattaccaataagagaaactgatttattcttattaatctctttcaggttacttagatatttcagtcctcctttttggcttctcctgcctgagacaaaaatatatataacttatgctwggcatagtggctcacacctgtaatcctagcactttgagaggccaaggcaggcagatcgcttgagcccagggctctagactagcctgggaaacacagggagactccgtctctataaaaaatacaaaaattagtctggtgtgttggtgcatgcctgtagtcccagatactcaggaggctgaggtgggagaa

SEQ ID NO: 319407 - DNA, 631 bp, Homo sapiens
accagccttgccaacatggtgaaatcccatctttactacaaatacaaaaattagctgagcatggtggcgcgagcctgtagtcccagctacttgagaggctgaggcagaaaaatcgcttgaacccgggagggggaggttgcagtgagccgagatcacgccactacactccagcctggcaacagagtgagactccatctcaaaaaaaaacctatatatgtatgtatatatatatacacacacacacacacatacacacatatatagtaaaatgtctagttctcaaaaacattagacttgcaaagaaataataaagtgtgacccatattgtaccttaagaggccatgattttggatggatattgaaattacctttagctagagaagaccaaggagcagagataaagcttataagccttaaatattcatgggacccctgcgatgttttaggcacttttatctgcatgctctgactccatatttgctgcttaatcagattgattgattgatttattatgaaygtaaagggtgtgtctgtgtatgtgtgtgtgcctgtgtacgtgtgtgtgcctgtgtatgtgtgtgtatgtgatagaaacaatttaccatattagaatcaccaaccatcactacat

SEQ ID NO: 319408 - DNA, 574 bp, Homo sapiens
gctccaaacaggggcaggggaccatcagccaatgagtaacaaagaaaattacattaaaaaaaaatatatgcttcatctaccctctccatggtcatttcattaactacacagttcccatgtttagctgagttataaagggaacatgatggccctaagttgcttaaaagcctttgataattacctgttttccatgcaaaaatatatagactccctggcataattattcaaatcctacacmatctcccccagtccacattcttatcaccagctgctcttctcactttatgaagtgcccattatggaagccacagctgagttataattctctgaacactggtactcattcctttcctctgcttgattaagctttacctcccattgtacccagccccaaaccctatttattgcatacatgtctgcctttctatgacgattgttaattgtttgaagctcagaataaaatcttgaaaacacctttagcccctcctaaaattagcgtaactcctggaaaatagtaaacattgaaataattaaaagagtaaaaagggcattcaccctggggaaggaaactaca

SEQ ID NO: 319409 - DNA, 576 bp, Homo sapiens
gaaaacaaatgacctcagaaaataatgtgaatccactgatttaaaaagagagcatctgtaaagataattatgtaattatattacaaattgcataaatcgcattcttctgtttgtttcttttaaattatttaaaaagcaattgtatcaaacacacatatatatagatacagatagatatagatatatgtacacacacattgtttgactcataacacgtagaaatgtaatatgtttttcaatgacagcacaaagaagatgggtgtaatgttggtaatggcaactttgtagtttctgtcttttaaatctgatatcttgtcatactcagaggctgtttgtttttcttttttattttctagtatgtggttattatttgcttgtcaagtcaaagttgtattgggctaagaggttactgaagatgataactgtaatttataggaataaacagaaattataaatcagtaggtttatgtaatgaaagctacagatatctacttactctcatttctaatctcaccttatttaaaagatggaaacttgtataaagtaaaaattrtaatgtaatattgggtatgtaac

SEQ ID NO: 319410 - DNA, 569 bp, Homo sapiens
cgaaatattacaaaatctgtattttataatagaaataatttagtttttagtatatttagaacatatctgttatcacttagcattgctcatgtagccaaatctgttaaaatctattctgttctactgactcatagtttgggtaattttctgcttcatctatttcatataatcccttttcagcaacccctgacaaagcattcactgtgaaaaatgtcttaaaatacactttggttacaattaggcattccagttgcctgctgtaatgttatttcagttctttacccagtggggtgcccttccccagccacgtttttgggcattattaaggaaagagttgaggctaagccttcaacctgggcctgttagtaacgtcccagtagccctggtgcccgtcaagcagtggtgcattcttctgtggactttcctggcacagcaccatcaaccctcccaatgctgcrtctccctccactcttccacccacttgtgcctagccacctccacctacctgtgtctcattgtgacaggcagtgacggttaatactgagagtcaacttgaatggactgaagga

SEQ ID NO: 319411 - DNA, 533 bp, Homo sapiens
agcaacccctgacaaagcattcactgtgaaaaatgtcttaaaatacactttggttacaattaggcattccagttgcctgctgtaatgttatttcagttctttacccagtggggtgcccttccccagccacgtttttgggcattattaaggaaagagttgaggctaagccttcaacctgggcctgttagtaacgtcccagtagccctggtgcccgtcaagcagtggtgcattcttctgtggactttcctggcacagcaccatcaaccctcccaatgctgcatctccctccactcttccacccacttgtgcctagccacctccamctacctgtgtctcattgtgacaggcagtgacggttaatactgagagtcaacttgaatggactgaaggatgcaaagtatcgttccttggtgtgtctgtgagggtgttgccaaaggagattaacatttgagtcagtggactggaaaaagcagacccaccctcagtctgggtgggcactatctaatcagctgccagcacagccagaataaaaa

SEQ ID NO: 319412 - DNA, 565 bp, Homo sapiens
catataatcatgaaagagctttcaggaagacatgaggctggataaggaagtaaattgggtaaagcaaacacttgctgtatatatgctgtagtaaaaaaatgtatctaaaaactcatgtgtgaataaactaatacttaaaaacagatggtaaatttaaatagtatactaccgtaaatccagaaatatcactgggtgggtagtgtggaaaaaatgttttggtctaagtatacaatatattcttacagcaggaatgactgtgggaatgttttaataaaaatattttaaatatgtatgggggtatttctgagcctttgcaattctagcatgatctgtggaaaaaawgtttcaagttccaatgagaagaattgactactggctttttcaccaaagatgcccctccagggtttaatatacagcaatttttgaaatgctgaatgaaatgcctgaaatgaaatgtcagattctttatatacttatctcgagccttcactttgtattcattaatgtttgcctctcaaacaactctctcacgtctcactcacagaaatgtaagagctatcattgt

SEQ ID NO: 319413 - DNA, 454 bp, Homo sapiens
aaaagaagaactgactctattaagtggatgctataataaaccaaccctacattttcagttgctcaacacaaccaacatttctttcttactcatactaagcccagtgtggattggcaarcaggtcacctttgacacagtcattcgtagatccaggtaccttccattttccaaaaccaccattctgagaggcttcagagtcttctggtggcagacaaagaaaaagagagaggagggtcacaagaaggttttatgaacaagaatggaggaacacatgtcttccatgcattcctgtggtcacacctaactacaaaagaagctgccaaagtagcctggcctttacaccacaaagaggaggcagaggcttttcataaccttacagcagtctgccatacttgctatagcatgatttcataatgtgaccaaaaagttcagggatagcactggttttgctggc

SEQ ID NO: 319414 - DNA, 579 bp, Homo sapiens
tctctgtcttatgtcttacaactacatgtgaatctataattacctaccaataaaaacttgaattaaaaaaaaagtttttagaaaaacaaaagctgaaatatttggtgacagaaaaccagaacaacaagaaatattaaaggaagttttcaaaattaaaaaaagtgaatccctctggaagcacagcaatgcaagaagaaatgaacaactcaagagagagtaaatatgcgggtcaatgtaaaagaatatgttacttaggctgggcccgatggctcatgyctgtaatcccagaactttgggaggccaaggcaggtggatcacttgagctcaagagtttgagaccagcctagccaacgtggcaaaaccctgtctctactaaaaatgcaaaaattagccaggtgcggtggtgggtgcctgtaatcccagctactcggaaggatgaggcagaaggatcacttgaacccaggagtcagaggttgcagtgagccgagattgtgccactgcactccagcctgggcaatagagccagactccatctcaaaaaataataataataataaaataaagattatcagttatttt

SEQ ID NO: 319415 - DNA, 508 bp, Homo sapiens
gaagaacctggagggtcattaagctgtgtcctttgtcttcaggcaagattatctccaaaccaaccaaatggggtagaacccacattgacactctcctggcaacaggctcaaggctattgggaaatcttccgacttgtgtcaaatctaacatttgtctttcatttagttgagaccaatctacataagtccaggttaaagggaagcttcttcccgccctccagaagacacaggcagtggctcaggtgacctgccagcatggaacctgtctctctcaacagtaagttactgagcacctactacgtgtgagatgctctcctggatgtgtttcattttatagtatttgacatctgttttctcatgtgagcctcacaacaattttatgtgtttaggtcatgstggggggtatgaccattataggatggatgaaaaaaacgaagcttgaagaagttatgtgaatctcctgaagtccagaaatggcaaagttcaaactcaggtctcctggctccaa

SEQ ID NO: 319416 - DNA, 603 bp, Homo sapiens
atgtaggaagggagcccccacctgccataatgagaacccccccagcacctcagactctttctcatccaattcatggggaggaatgatttgacaagcaggacaagttctatcctcaggccatgtgagtgctccagccaagatgattgagcctcttctggggtgggactgtttgccagtggtttgctgcatcagatggccttttggatcctggacacagctacaatcacagaagcgatcttggaagccactaagccagccctaccattttgcagatgaggaaactgaagactgcgagggaggatattcagcttgaatttagggtcagcaaaaggatgcattgaggaaagagcccaaggtgatcagtgtccagttggcatctctatacctcatggtgctgtcttcctgccccattgccaggcttggattgtcaaaataaggaactgatctccaggagataaattcgtcaagtagaagacaggcttcaagaaaagaaaggcactctgttttgcagtggggagcactctgctgggggcctatgtggctcagacgttgatggaaccgtcatctctgtaagtggmgacagtaagcactgtcctaactaaa

SEQ ID NO: 319417 - DNA, 622 bp, Homo sapiens
aggatcctggaaatgaattagtgttctttcctccatgctgtggtatctgttaggctgggtggtataaccagtcgcccatagttctgcatttcattgcaatccaagctgcagtgaggtggagctgaggccccagcactgaagttgagtgaygaaaaggcacctgaaactcaggtgcatttcagttggtgactggttttcatgggaactgctaaaatgtaaagagaatggctttgtagcccataacgcggagtctgcagtcatccctcccatggcatttttggagctacccatgaccatgataggttgccattaacagggatggatttggctgtgactgatctgcagtgccctccaaaggtctgacaaagatctgagcaaatagattttacaagaatgttcactattttgttcccagcacctagcagagtgtcttatacatagcaaacactgatacatatttgccaaacaagatagatattaatgtcttaatttattgaaacaaagactccaagaagctaaatgcattaacttgttgcacatcacgcagatctaactaaggtgcaaggtaagatttgaagttgggtctgtctgactgtagagcccctgcctcgatcactaaaac

SEQ ID NO: 319418 - DNA, 603 bp, Homo sapiens
aaaaattgacaatatgggaatatagtatcatacacaaaacatgtctgttattgggtatgtttgcacacacttgccttcaaagcacacagggctattttctgcccttgagcacaccccaccgttacatgggccttaacatgagtatggtctgaatggtttggggccctcccgcgctgcacatccttggaacattgggtcttccccgtgaaggtgaggtagcacctcaccctccacagcaatggagagtggaactaattgaaatgtatgatgtcctgtcaattccactggacatctaacactgtgggtcagaggaattgacaattctgtgacaattttcagaatggagtcctgtgtttatagaagaggaggagaggtaagggcaaacactgagagccagcacccttccattgggagtgtaaagcaatagcagtttgttcagttccatcagcggctctaagggcgccaggcatttgagttggtttccattgtctcacagcatctaatgacgcrgaagaccttacatttctgtaaggctttcagttcattcccctgctttaccattgcgagtcactaacaaggcacagagcccaggggttactaccc

SEQ ID NO: 319419 - DNA, 583 bp, Homo sapiens
aatagccgatttattccaaagtgagaaggtgataggaaaataaataaatccacaagagtgagagggaaaggcagatatgcactcagaaatgcccatcggtcgtattttctggttttgtagaaagcagatttmttttgtgctttgtgagcagtgagcaggcgtcctctacttctgtgtcacgtaaggacttttccaggtcttaactactaatcggtgttttaatgccacattcctttcctgccttccaacacaagaactcaaactgaggtttaaatttactgcaaatttctttctttccatccactgaatgccgttaagcaatctccatgtgtaatcaaaatgctgggtagcagtagtgttggaagctttgttctttaaatgaaggtggcctatcactctttgtcagtgctcttaaaaacgtaaaaataccttattgagatataattgatataccgtatacttcagtcatttaaaatgtacaattcagtggtttcttagtttaatcataggattctacaaccattgccacaatctaattttagaacattttcatcccccaaaagaaaaccacacccattagctg

SEQ ID NO: 319420 - DNA, 583 bp, Homo sapiens
aatagccgatttattccaaagtgagaaggtgataggaaaataaataaatccacaagagtgagagggaaaggcagatatgcactcagaaatgcccatcggtcgtattttctggttttgtagaaagcagatttcttttgtgctttgtgagcagtgagcaggcgtcctctacttctgtgtcacgtaaggacttttccaggtcttaactactaatcggtgttttaatgccacattcctttcctgccttccaacacaagaactcaaactgaggtttaaatttactgcaaatttctttctttccatccactgaatgccgttaagcaatctccatgtgtaatcaaaatgctgggtagcagtagtgttggaagctttgttctttaaatgaaggtggcctrtcactctttgtcagtgctcttaaaaacgtaaaaataccttattgagatataattgatataccgtatacttcagtcatttaaaatgtacaattcagtggtttcttagtttaatcataggattctacaaccattgccacaatctaattttagaacattttcatcccccaaaagaaaaccacacccattagctg

SEQ ID NO: 319421 - DNA, 596 bp, Homo sapiens
aatagccgatttattccaaagtgagaaggtgataggaaaataaataaatccacaagagtgagagggaaaggcagatatgcactcagaaatgcccatcggtcgtattttctggttttgtagaaagcagatttcttttgtgctttgtgagcagtgagcaggcgtcctctacttctgtgtcacgtaaggacttttccaggtcttaactactaatcggtgttttaatgccacattcctttcctgccttccaacacaagaactcaaactgaggtttaaatttactgcaaatttctttctttccatccactgaatgccgttaagcaatctccatgtgtaatcaaaatgctgggtagcagtagtgttggaagctttgttctttaaatgaaggtggcctatcactctttgtcagtgctcttaaaaacgtaaaaataccttattgagatataattgatataccrtatacttcagtcatttaaaatgtacaattcagtggtttcttagtttaatcataggattctacaaccattgccacaatctaattttagaacattttcatcccccaaaagaaaaccacacccattagctgtcattgtcattcc

SEQ ID NO: 319422 - DNA, 543 bp, Homo sapiens
ggaatgtaatgactactgaatgaatgaaactatgtatgttctgttaaaacacaggctatggcttctcttgctgcttttaggtggccatgcctacataaaatccaccctggtgcagctgaaactctctaacaggcagggccattgtacttctcatgttggcttctcaagagcgggtctatgagcaccccattccctttcttatttggaaagaaaacaacactcaccacggcattcacaatgctggggacctgatgaatgggaatggagaggctgcactaatgtaagtggggtcaacatccctgctggagggcagatgcaattttggcaaactaatgacttttggaagccattttctagactgcatttwtctcttctttcttagaatgcttttctcaaggggaaaaagaaagcagaggtgtaaatggtatctggccgttcgaagagcccgtctgggagactctctgctgaccacagcactgtctctccccagggcccagtcccacagtgtcactgagtccagagtcgggactccaacaagccctc

SEQ ID NO: 319423 - DNA, 613 bp, Homo sapiens
ttatctaagatttaatgttatattatctacaattgtatatatatatatattgtaacactatgtaatggtgtgttactgcatatttctaatcaactctattcagtgatgtcacatttctagccttaaatcagtcatgtaggagtatttatacaatgayaattgacaaacatgaaagtcagttgttaaatatattcctgcacatcactggatatgactgaagatttctagaagtcctgttaaaaattacagttaactaactgaagaaatcacaatgaagaataataaacactattcagaaagtcctatgaagctgaggaaatgtcttgcggtttataaaagtcagttattcaattaacaaatgtcttattttactgattgtaaaacataaaaaattagtattgtttcactttaataaaaagcattgtgataaagaaagggtgaatgcctagaatgcaacttttaaaaaactctagcattttttcatatgtttaataaatctctacacagaattatatttgcttcccttcacagattttcacctactagttttccccttgctatgatgacactttcattcactttaatctctacctttgctccctttttctgaaaa

SEQ ID NO: 319424 - DNA, 613 bp, Homo sapiens
ttatctaagatttaatgttatattatctacaattgtatatatatatatattgtaacactatgtaatggtgtgttactgcatatttctaatcaactctattcagtgatgtcacatttctagccttaaatcagtcatgtaggagtatttatacaatgacaattgacaaacatgaaagtcasttgttaaatatattcctgcacatcactggatatgactgaagatttctagaagtcctgttaaaaattacagttaactaactgaagaaatcacaatgaagaataataaacactattcagaaagtcctatgaagctgaggaaatgtcttgcggtttataaaagtcagttattcaattaacaaatgtcttattttactgattgtaaaacataaaaaattagtattgtttcactttaataaaaagcattgtgataaagaaagggtgaatgcctagaatgcaacttttaaaaaactctagcattttttcatatgtttaataaatctctacacagaattatatttgcttcccttcacagattttcacctactagttttccccttgctatgatgacactttcattcactttaatctctacctttgctccctttttctgaaaa

SEQ ID NO: 319425 - DNA, 510 bp, Homo sapiens
atattatccatactataaaaaactctcttttgctaaagkaaagacttttgtaaagcaaagacaaagatggatagatgggccaaaaaagagttttgaaagaagaaatgagagtggaagatatttacaacagatttaaggttttttggagtattcaagatgtaacaaagtaaagtatatcaaccaaacataatcacagaagcagatctaccgcaacaaaaaagtcattaattaaatacaactaacaccacaactgaaaatgatatgcacgtttgaaaatgtcaagatgtaaaagagaagcaaagtttgttgttacaaagtttattaccctggtcatacagtgtgaacacaaaaagtagaggagaacccctacctcacactatttacaaaaacaaatttcattaagactgcagacctcagagttaaaagtgaaatgatgaagtttatggaaaataaagtaatagaacatatttctcatataaggtagtaaaagattttaaataacacacagaa

SEQ ID NO: 319426 - DNA, 642 bp, Homo sapiens
tggccattttctgctcttcattagaaaaccctgaaaagataattattctcaaaatccatattatccatactataaaaaactctcttttgctaaagtaaagacttttgtaaagcaaagacaaagatggatagatgggccaaaaaagagttttgaaagaagaaatgagagtggaagatatttacaacagatttaaggttttttggagtattcaagatgtaacaaagtaaagtatatcaaccaaacataatcacagaagcagatctaccgcaacaaaaaagtcattaattaaatacaactaacaccacaactgaaaatgatatgcacgtttgaaaatgtcaagatgtaaaakagaagcaaagtttgttgttacaaagtttattaccctggtcatacagtgtgaacacaaaaagtagaggagaacccctacctcacactatttacaaaaacaaatttcattaagactgcagacctcagagttaaaagtgaaatgatgaagtttatggaaaataaagtaatagaacatatttctcatataaggtagtaaaagattttaaataacacacagaatcatccaagaataaagaaaacaattgataataggaattttatcaaattaagaatctttgttaagaaacttgacat

SEQ ID NO: 319427 - DNA, 591 bp, Homo sapiens
tatctttcattatacatggtctttctccataaaaggactaccttgtctgataacattttcaccaattatagcactcctttgtacaaagccattgtttccagaaggcccctgttaaaatgcaaatacgccatctggcaggcttttacctcattagctctcaccatcacagcaggacatattatgtatcatattagatatggaagagacactgagctgatgaactctgactaagagaagatggttggaaaaatcccaagtagagagggtgctttgggatatcgcctaagggcaatagagcagaaagaggagagtaagatgcatggtgagggaactgcatttccaagtttggcatctcatccaggccctggctgtgatggattcacagaaacacagactgccagagctggaagagaattttgaaaacatgtaatcaaacacctttaccttacagatgaataacctgagcctgcaaatagctaaatggctccgctaagtgcccccagctagattcttatcattagttcttgaagcccagaggaccagcacttacytaatgcgttagcacttcacaatgtgtaaagctgcataatt

SEQ ID NO: 319428 - DNA, 553 bp, Homo sapiens
ctgtctcatcctctttctctctctctcctcatttctcagaaggtcagacagacaacatagttttggcttggtggcatggaacttaagcatgagtaatttcattttggtttggcctgttgggcataatggaggaactcagtccaaacgaatggcctcatataaaatttatttaacaaagtataacagtatttagaatgagtgaaatcaatgcccctggctgtaagacagcaggacacatttctgccctctgcctgtttattattatttcaggtaggacttatgattgacagttaggaggcagtctgttcaggcaaaaacacctaaccctttcaaccccactgccctccatatccaagggtactttccaaaggatcagctctgggaaaattctgaaatkaggaaaaataaggctctgacatgtgggcctcctttcacttcttccttgctgtccttaactcctttttgtctggtgtcaagaatgcaggtgaggtgtcagagccccagcatcacaaagtggtcgggtactatggtaataataatttaccaataacag

SEQ ID NO: 319429 - DNA, 553 bp, Homo sapiens
ctgtctcatcctctttctctctctctcctcatttctcagaaggtcagacagacaacatagttttggcttggtggcatggaacttaagcatgagtaatttcattttggtttggcctgttgggcataatggaggaactcagtccaaacgaatggcctcatataaaatttatttaacaaagtataacagtatttagaatgagtgaaatcaatgcccctggctgtaagacagcaggacacatttctgccctctgcctgtttattattatttcaggtaggacttatgattgacagttaggaggcagtctgttcaggcaaaaacacctaaccctttcaaccccactgccctccatatccaagggtactttccaaaggatcagctctgggaaaattctgaaatgaggaaaaataaggctctgacatgtgggcctcctttcacttcttccttgctgtccttaactcctttttgtctggtgtcaagaatgcaggtgaggtgtcagagccccagcatcacaaagtggtcgggtastatggtaataataatttaccaataacag

SEQ ID NO: 319430 - DNA, 604 bp, Homo sapiens
tcgaaagttatttctctggttgtgtcactgaacagtcgctgcctagaggaaatggagtaacctctactggaggtcattctgatgaagggttttggaaatcagaactttagccaaactactgaagtgaggattgcagatagaaatgaatgtgttctggtagtttggtttcactctttgaagtaagttgataacacatttctttgacaggaaacctacatgttcataaagtatgaaggcaggatttcttttcaattcaactgctttcagaggcaatggagatattgcaattgaactaaaatatgctgttaaagtcagtctaatgattcaatttgtacagcttttgataatagattttcaggtcaaatgaagatagaatgaaggaagcagtacacagaagaactgtctcaatttaagtttaatatgacagtgtacagatggaaaaactgaattatcattaaaaacatagaaaatatggggaacaaaatatatggatgcaatacatctgtatatgtgcrtgtataatataggcagaaagaaattatggcctttgttaaaagtatgattttcaaattacaaccacattggtttaggaaaaattaaaatt

SEQ ID NO: 319431 - DNA, 604 bp, Homo sapiens
tcgaaagttatttctctggttgtgtcactgaacagtcgctgcctagaggaaatggagtaacctctactggaggtcattctgatgaagggttttggaaatcagaactttagccaaactactgaagtgaggattgcagatagaaatgaatgtgttctggtagtttggtttcactctttgaagtaagttgataacacatttctttgacaggaaacctacatgttcataaagtatgaaggcaggatttcttttcaattcaactgctttcagaggcaatggagatattgcaattgaactaaaatatgctgttaaagtcagtctaatgattcaatttgtacagcttttgataatagattttcaggtcaaatgaagatagaatgaaggaagcagtacacagaagaactgtctcaatttaagtttaatatgacagtgtacagatggaaaaactgaattatcattaaaaacatagaaaatatggggaacaaaatatatggatgcaatacatctgtatatgtgcatgtataatataggcagaaagaaattatggcctttgtwaaaagtatgattttcaaattacaaccacattggtttaggaaaaattaaaatt

SEQ ID NO: 319432 - DNA, 485 bp, Homo sapiens
tgatggttaaacaaattgctacattcatagccagatacatatctcagcaataaaaaggaacaaattattgatagatgcaacaaagtcgatggatttatgttgagtgaggaaaaacacaattggagtcatctcacataccataagattctgtctatatggcattctcaatatggcacaactatacacatagagaacaaattagtggtttcctggagttaagatggtaggggaaaggaagtgggtgtgaatatgaaggtgcagcatgagggagatttggtgtaaaaaaatattcctgtatcttgattttattggtggttccatgaatttacacatgtgataaaataacagaatattcacatgcagtgtacyattgctgatttccagctgttgttcttgtattgttgttgtgtaataagtgacccatggaggaaactgggtgaagtaggggaaaggtactggggacttctcggtactatctttgcaac

SEQ ID NO: 319433 - DNA, 589 bp, Homo sapiens
  misc_feature (1)...(589): n = A,T,C or G
atgctagctgtgtagagtgaatctccaccccactgtttgatttctcgttcagttgaagcacaaccactactctatggtatcacagtgcatcccagaatctcttattataagactaatgcaactttctctgcatgctcaaacaagaaaattacagtttcctttacaraatgagtgtctcttttatagaataaaatctgctatatttgccacaaatcaaattcaagcatctttcagtatctcaatttaacattttgggcatttantaaatgcaggcatttagggtattccttcatacactgttgttccaatattttacctcaaaataacatgtgctttccttttaatataattattcatgatttctgaaataagaataaaaacactgtctttttctgctattttaaagccttgtgtatcatctatcattataataataggaatattttttcctgtgtattcagatgattttcaataggcaaaaggttttaaaatttaaaatcaaaaattgctcatttgttttactgtagtttatacaaagtttccatagaacagtataacttgtagtatcacatttcctgtgtattttaaa

SEQ ID NO: 319434 - DNA, 620 bp, Homo sapiens
cataaaacatccaacaaatttacatatccataaagtgtactggtgcctatattactgagctgattaattgcttactaaaactgaggaaagaagcgttacacatttatatgagttttattattattatttttctgaagggagaaaggggagaaagcccatctctctcctcacctaatttgtctacagttattcctaatttctctagaggaattttcagagaatctttaaattcccagacccctttatcaagctcaatctattatttgttattgaaggaaatatgcrttttatttcctgctcaaaaaagacactttcatacttttttttttctccaaaaggagatatcactagtctgttccctagagaataagatgttttaccctcatagtatgcagtgaatggattgtatctaataataacatcagctgggttttattgctcacaaaaacgacaggtccccctggaattaagttgacctgagaattcagaaatggcagagctttagggtcctttatttcactggattgagttttagatgtcaccctttctaccaggcataatatatttgaatttttatttgtgactcctttccaaacagacaatatattcagtgtctcatc

SEQ ID NO: 319435 - DNA, 568 bp, Homo sapiens
tgaatataaggaataaccagatttatgtgttgcgattctttagagacagaagataacactattaagaaaactttcaactgaacaatcccccccaaaatgtaatacttttgaatatttgatttgttcaaaattcagacttattctgtcatgaacatgatatataatgagaagaaacctcttttataataaaggactcttgtttgtctatggtgtctgatacggtttggctgtatccccacccagacctcatcttgaattgcagctcccataattcccacatgttgtgggagggagtcggtgggagataattaaatcatgggggcggtttcccccatactattctcatggtagtgaataagcctcatgacatctgatggttttataaggggaaactcctttcaattggctctcatkttcttctgtctgctgccaagtaagatgtgacctttcgccttccaccttgattgtgaggcatctccagccacctggaactgtgagtccattaaacctctttttctttataaattacccagtcttgggtatgtctttatcagcagcataaaaatgg

SEQ ID NO: 319436 - DNA, 610 bp, Homo sapiens
gaactaatgaaccagcaaaaaatcagcagaataaatgtgtgaaagtcactgtatacatatcttgagggactgagaatgtttaaagcatcatacagggaaaaacattccagaaaaycgacatggttggtgattgatgtaccatacagatcccctttcagtaatgaaggacttattcttccctggtagctgacaagactgttctccttgtcaaggattctgcatccaatgactgaccattgcaggcatgtaaataactaatcatgtgaccccaacataagacaggtagatctttttttatagggtcaactgatgcttcccatgaaagaagttgctgctcaacccactgcctggtctagtctccttctcatcctatttattcacccacctcttcccctccccttcattctcctctctttccttcatctgaaattgattttaagagacctcataataaatttcctgcatgctgatctgcttattgggaagcccagcctcatacttccaggtaactggggcctcaaaaagatgatgcttccagggcaaggattgcttgcccttttcatattttcctactacttggggtgaccctaattctgtgactgtatgttaa

SEQ ID NO: 319437 - DNA, 610 bp, Homo sapiens
gaactaatgaaccagcaaaaaatcagcagaataaatgtgtgaaagtcactgtatacatatcttgagggactgagaatgtttaaagcatcatacagggaaaaacattccagaaaatygacatggttggtgattgatgtaccatacagatcccctttcagtaatgaaggacttattcttccctggtagctgacaagactgttctccttgtcaaggattctgcatccaatgactgaccattgcaggcatgtaaataactaatcatgtgaccccaacataagacaggtagatctttttttatagggtcaactgatgcttcccatgaaagaagttgctgctcaacccactgcctggtctagtctccttctcatcctatttattcacccacctcttcccctccccttcattctcctctctttccttcatctgaaattgattttaagagacctcataataaatttcctgcatgctgatctgcttattgggaagcccagcctcatacttccaggtaactggggcctcaaaaagatgatgcttccagggcaaggattgcttgcccttttcatattttcctactacttggggtgaccctaattctgtgactgtatgttaa

SEQ ID NO: 319438 - DNA, 577 bp, Homo sapiens
ttttccactggctcacagaattcctcagaaggcataagcatcagtttcccacaggtaacatgcttgataatacactccttactggctgtctttcttctcctttcttacctccccacaaccttactgatatttcctaaaaaagctttctacctcttaatcagatcattattttagaaatttattgaataactttgtctacacattaccaatttcttcaaggggcccttcttatagcttagatgtttcctttaaaatattccctcttttcccaatgtacatcctatagtagtttttattgtcgttgttgttgttgttgtttttaatgagagtctggtgatggtaaacaatgcccttgtttgggcaggatttttgggttgcattaaattttaaagtttgtattgttaacatcatttttacatgaccaatcataattatactcattttgaggggtacatgtggtgctttgatatatgwatacaatgcagaatgactaaatcaaactagttaacatatctatcacctcaattatcattttttgcagtgagacatttgaaatttactctttattttgaaatat

SEQ ID NO: 319439 - DNA, 672 bp, Homo sapiens
atttatgcacagataaaatgattcttaaagttagaaatccctaggcttgcaaaagatcagtgctttcaactaatataagcttttcattttataaactggggaagtaaaaattaattattataagtaattcaaggaagtcaactagaaactaggtgtttgattgtcaagttaaccaagtctagttttcataagtgagccctaccattttcctgcaaatgtccagatagaggctgcctcacattgcaaaactacttgggtcttgcagaaaaactaacaattaataatttaataggtaaggcatggtggctcatacctgtaatcccagcactttaggaggccaaggcaggcaggtcaagaggttaggagtttgagaccagtctggccaacacagtgaaaccccgtctccactaaaaatacaaaaattaactaggtgtggtggtgtgcacttataatctcagctactggggaggctcaggtaggagaatcacatgaaccagggaggcagaggttgcagtgagctgggatcgcgccattacactccagcacaggtggcagtgtgagaatccatctcagtaataatrataatcataataaatttattgagcatggccaacatcagtaaatatgagtgtaccgaataaaagttttccattcattcatccacgtattcat

SEQ ID NO: 319440 - DNA, 585 bp, Homo sapiens
ctatgttatcaaagtttatcctcataaaatgtgcttgatgagtcaactgatgttgatgactctagttactaatatgtgtgaagtaggtaaagaagaaagtgatcacagagcagttattttgctttgaaaaaatgtgattaatttgaaaggagtcaatgtgttcaattatgtcagggatgtctctaggaagcctagataatcaaggctgctttttaattggctacaaaaagcaattgggatattttgtgtctagggaaagaaagtatcatgatcatacaaatgtgtgttgtaccatcatgcacatgctatttgacttgctaaggaattcaaaatatgaattttctactgtatagtgcatggaacaatatatattaaagtatactgtgaattactgtctcattggaggttttatcaaagaaacagttacccaaactaatgatcctttgaaaaacaaatgtgaagtggctctcctgtggtgagatcatcactaacattttttttgaaacaagtaaaaattayattttagttaaagacctatcaaaaaagaaagctgattattctcctagaaaatatggtaaatgaata

SEQ ID NO: 319441 - DNA, 619 bp, Homo sapiens
ataacaattcaagacattgattgaaaattttgggaggcttgccacatttcaagaaaagttcttcaataaaacttgcgacataggcaggaatttaaggaaaactaagtagtcacatctgtagtaacctcagcttctgctgcagaacattaaatgccattgttttcacagtcataaatgctgcaaaactaggtgctactgccactgctgctgccacctgctatgagaatggattttgcacagcatccaccatacttaatctgaagtttgggatagtgagtttgatggtcagagtctaggaaagactagaaatctgattttttttcttttaaattatcattataagatttgggggacttgtctccaagattactccagmtaattggcaagcttgcataggttacttgctaaggtcaatcaggataatatgtcttagttcaatttaataacatgtaacttaaggaattatacataagctttactgtaaagctgataacttatttgttggcatgagtgatcgtaggtaatgaaagagcataggtaatgagaaagaaacaactggatttggcaatactgaaaaaatttacaacagatcattctaagatagactagtttcctttcc

SEQ ID NO: 319442 - DNA, 527 bp, Homo sapiens
gggaaaagaaacagatgagcagtctactaaattcttattgtatctgtataagtgagagaattccaggtctcatgaaaataaatctaatttgaatcaccaaaacagagagtcatggcctggtttgtactgaattatgttataattctaattcccaaatgtgactatatttgccgataaggcctataaagaggtataaaggttagatgatgttatgaaggcgggccttaatccaataggactggtttccttacaagaaaaggaagagacacaagatctctctctctgcacctcccactttctgcatgtactgtgtttgtgcatgcacacacgtagaggaaagrccatgtgaggacacagcaagaaggcagccatctacaagccaggaagagaggtcttacagcaaaccaacctgggcatcatcttgatcttgggcatctagcctccaaagctgtgagaaaacaaacttctgctatttaagccacctgtctgtggaacttcattgtggcagccttatcaaattaatacat

SEQ ID NO: 319443 - DNA, 609 bp, Homo sapiens
aatctggcaaaccaccttaaattgttcttgagcttcaaggaagtttctttyaatgtgtgttattagaaagctggataattgagttcataacatccaagagcatgacgatcaaggagaacaaataatccaacacataagagtatacaagatgacagtccatatagggaaatccatctcccattcaaacttctgcatctcttaagtcttatgtgggacaacatctgtatttgtggtcagactaggtcatactacgtcatatctcagattcaatccaagtacaaattatttatcatgttgttaacattctctctgttgttttcaagactttcaagtaagcccaagtactaagtcccacctgtaacaatgtgaagggtgttttgaaaaatttatctatacgaagatagtcttacaatacccccaaatctacatttttcccactttgggcatggctttcaattctttactcttccaaggatgtgtgaaaagtttaaatgtgtgtttataaaatttgtatttgtgcaatacatattcagagattggcctgaacaaatttatctattctgaatgatatgtatatttcaaatctcatgacggattgttgctgagata

SEQ ID NO: 319444 - DNA, 609 bp, Homo sapiens
aatctggcaaaccaccttaaattgttcttgagcttcaaggaagtttcttttaatgtgtgttattagaaagctggataattgagttcataacatccaagagcatgacgatcaaggagaacaaataatccaacacataagagtatacaagatgacagtccatatagggaaatccatctcccattcaaacttctgcatctcttaagtcttatgtgggacaacatctgtatttgtggtcagactaggtcatactacgtcatatctcagattcaatccaagtacaaattatttatcatgttgttaacattctctctgttgtttkcaagactttcaagtaagcccaagtactaagtcccacctgtaacaatgtgaagggtgttttgaaaaatttatctatacgaagatagtcttacaatacccccaaatctacatttttcccactttgggcatggctttcaattctttactcttccaaggatgtgtgaaaagtttaaatgtgtgtttataaaatttgtatttgtgcaatacatattcagagattggcctgaacaaatttatctattctgaatgatatgtatatttcaaatctcatgacggattgttgctgagata

SEQ ID NO: 319445 - DNA, 501 bp, Homo sapiens
ataaaagcagtcaaacactgctaattaaaatttaatctatatggtctctctgagcaaaaaaaaaaaaaaagatagacatcaaatgccttaaagcatgattctaatttgacacagtaaatttatttataactatatattaataaaataatcacaagtgtagacaaaatttgttagcttttgtgmatttcagcatttttaatagaattcaaaatagaatattcttaagtgcccaatatggagaatggttaaacacccccaaattattaaatacaattgtatataatcattaaaacatttaatgatggtatataatttaatattaataaataaaaccagagtattaaaaatacacacacacacacatacacacacacacacacacacacacacacacacaccccaaataacagaaaaatgtatgctcagaatttaatcaaggaaacagaaggcactctatgaactacagatgtgagagatttcactttagggtttacattctcc

SEQ ID NO: 319446 - DNA, 566 bp, Homo sapiens
ttcatgcatgaattattaaatatgtacttaaaggggtagcagcccttttaatttggccaagttcattgttttaattggcaaaaatgacaaatgatctaaagtcygaagaatccagagccaaggggaacaaaataaaaggaagcaaagaatgcaaacttgacctacaactgagttatgttctgataagagtggaaaaaattttagtaattgttagagctaccaattagtgttcaactctatagaagaaataaaaaatttaaaaaagattttttcaacaattgagggctgtaaacatagagactttcatcttataaaatgctactcaaagaaagtaatgtttcaggcccttataggagactgggcatgcaattaaagcaggtgagaaacttagtggagcagtgcttgagcgtattaaaatggaaacacgcgtggtctccagatttaggtacttacagtttcatcttggtgacatttcttttattatagtttaactacatatcaatacctcacaaagcaagagagcggcttctgttccacatccggatactagtaagaatatccaatca

SEQ ID NO: 319447 - DNA, 566 bp, Homo sapiens
ttcatgcatgaattattaaatatgtacttaaaggggtagcagcccttttaatttggccaagttcattgttttaattggcaaaaatgacaaatgatctaaagtccgaagaatccagagccaaggggaacaaaataaaaggaagcaaagaatgcaaacttgacctacaactgagttatgttctgataagagtggaaaaaattttagtaattgttagagctaccaattagtgttcaactctatagaagaaataaaaaattwaaaaaagattttttcaacaattgagggctgtaaacatagagactttcatcttataaaatgctactcaaagaaagtaatgtttcaggcccttataggagactgggcatgcaattaaagcaggtgagaaacttagtggagcagtgcttgagcgtattaaaatggaaacacgcgtggtctccagatttaggtacttacagtttcatcttggtgacatttcttttattatagtttaactacatatcaatacctcacaaagcaagagagcggcttctgttccacatccggatactagtaagaatatccaatca

SEQ ID NO: 319448 - DNA, 566 bp, Homo sapiens
ttcatgcatgaattattaaatatgtacttaaaggggtagcagcccttttaatttggccaagttcattgttttaattggcaaaaatgacaaatgatctaaagtccgaagaatccagagccaaggggaacaaaataaaaggaagcaaagaatgcaaacttgacctacaactgagttatgttctgataagagtggaaaaaattttagtaattgttagagctaccaattagtgttcaactctatagaagaaataaaaaatttaaaaaagattttttcaacaattgagggctgtaaacatagagactttcatcttataaaatgctactcaaagaaagtaatgtttcaggcccttataggagactgggcatgcaattaaagcaggtgagaaacttagtggagcagtgcttgagcgtattaaartggaaacacgcgtggtctccagatttaggtacttacagtttcatcttggtgacatttcttttattatagtttaactacatatcaatacctcacaaagcaagagagcggcttctgttccacatccggatactagtaagaatatccaatca

SEQ ID NO: 319449 - DNA, 550 bp, Homo sapiens
ttttcattcaggtatgcgcggtgaggtcactaataaagggattattgccagttaaaagatagcttgttaagcacagttcccaagaagaaggggaacactacaccactcagggccatatgtgggagcaccaggaacagtccaaaggcacaaggaatgaggggaaagcaaggccagttcctttattgaggttttggtgggaaggaacgggtcaggcaagatgagcagtttggtgggaaggaatgggtaggcaagatgaacagtttacaattcgtgtaaataatttcagtagggactgggccataaaggtggtccctatttttctggaacctggcactgcaaggtaattcagaccgcaagagcctgataaaagcaggtggatggcagtatggaatagggatttgttggtctgcctattaaaagyagcctcacaggcaagggttttgctgtctctgagaattagctaaccttgagaggagcagtcccttcctgggtccacaaggccccaagatgtcaaagcatcataaagtatagaaaataaaaacatgattaa

SEQ ID NO: 319450 - DNA, 579 bp, Homo sapiens
tggtctgccacttcatgaacgtttcaccgaaaattttatctactgatactgaactggttatcgttaaagtgcctcttgttagtcccaagatagctatcctttctaatgttttctagagagattctcacacatttgacttggacatgaagctgttttaagtttgtatccaaatttttctctcatccttctccattttgttgaaaggctggttaaccattgttcatactkgattcaggtttttgttttaaatgtaaccaaccttatttatttcccaattcctaatttattcagtttgtatagattttggcatcaaaatttctgtaaataaagtgttttcagaggcttcaatcattttgaaataaaatctataattttttgtttcataatgacagatttttttttttaatcaagaaatcacacaattatattgtggcaactcaatgaatttctccagagaaaagactcactctaaaagaatttctgccatgatttcttttagatatatgccatagcaattcccttttttaatgtaaattaaatgatttgagtaagtgagctgttacacagcttagagaaaga

SEQ ID NO: 319451 - DNA, 540 bp, Homo sapiens
gtgtttgttagaatatcgcagagatgtttcatgatgaaggaatcaaaagtgtgtttgtttgtgtccttctgtatgtgagagaaaacttactgatttagcaaagtcaaaaattaagcagaatcttgaaacctagacatcaaaagtgaagtccagaagtaagcaaatttaaagtgacaaaggtatcaaactggagaagagatcctgaagttgagrtctggaagacaatctcaagagcatacaacatgagagtaattgcttatattgtgtatgttaatagtttttataagtttctatgatctcagagcagggatatctagtcaaatttttcagggacagaggctaatatgaaaggttatgaccaaagagcaaaaataatcacacacacacacatattggagaaaatattggtaaattgactagagtcagtctcttcttatctttacgtaagtatacagttttatgttgaatttcagttatatgctacttgttgatctctattattagtctataaactccgtgaggataatgtccattaggcat

SEQ ID NO: 319452 - DNA, 503 bp, Homo sapiens
tttggttccatataatttttagaattgttttctataattttgtgaagaatgatgatggtattttgatggggattgtgttgaatttgtagattgcttttggcagtatggccatttttacaatattgtttctacccattgatgagcatgggatgcgtttccatttgtttgtttcatctatgatttctttcagcagtgttttgtagttgtagttttagttatagaggtctttctggagctatacacctattactaatattttaaaatataaaatataactaaaattaatatctggagcaatttaaaataatttgaattttcccttcatcattcctacctctccttagactgttacacaactaggtactacagtatgccttagcaagtacgtatttgttatttgcttatgtaaaatcatatttctgctttcttagtaaataaaaagatttacacatgaggaagggaaaggtactgcyatttatgtaaatagttgttcagagggactg

SEQ ID NO: 319453 - DNA, 555 bp, Homo sapiens
agcgaagccctgaagttggttacttttcccttttttcctggtttttttttttttctttttgatacggtgtctcgctctgtcacccaggctggagtgcagtggcgcgatatcggctcaccgcaagctccgcctcccgggttcacgccattctcctgcctcagcctctcgagtagctgggactacaggcgcccgccaccacgcccggctaatgttttgtatttttagtagacatrgggtttcaccatggtctcgatctcctgacttcattatccgcccgcctcagccttccaaagtgctgggattataggcgtgagccaccgtgcctggcctcacttttccctttcaatgccctagctataaaccctgctgctcatattttccaaacatcagggatttctgcaatgcttctgccaccaacagcaaaacccaaagtgggtgagaagagtgaaactcagaaggctggagcaaatgcagacagcccagggagtgcagaggaagcccagagagacatagtccttggtgggatcaaaatggacacctttcctgagtgtcaat

SEQ ID NO: 319454 - DNA, 522 bp, Homo sapiens
tgtctagcatttttacaatctctgtcatttctggatctgtatctattgacttttttctcctgccgtgggtcataatatcctgctttgttgcatgcgtgaaaatttttccactggatgcaggatactgtgtataattttacattgtagaatgttggattgtgtttttttttcrgtagtatttgattatttcctggtacacagtaaagttatttgggttcaaattgctctttttgagacttgcttttaggttcttttaaggtgggttcagactgtttttttagtctagatctcattgagctccaaacgtaaggtatttctttctgagaactttaccggatgccccatatgataggaagcatttctacctggtcagggaaaggcaaattatttctagccttgtgtgaaccctggaaattattctgccttctcctttccagtagttcttttcctatcctcagctagtttcctttcacttatacacagataaatactaaggtaaggactttgggagactcttctatg

SEQ ID NO: 319455 - DNA, 521 bp, Homo sapiens
ttggctaaaacaaaggagctacaggccccatgcaaggccaaaatcgggcaggatagtcaaatcttaaatccccgaaatgatctcctttgactctwtatctcacatctaggtcacactgatgcaagaggtaggttcccatggtcctgggcaactctgcccctgtggctttgcagggtacagcctcccttccaactgctttcacaggctggtgttgagtgtctgtggcttttccaggtacacagtgcaagctgtcagtacatcttccattctgtggcctggaggacggtggccctcttttcacagctccactaggtggtgccccagtagggactctgtgtgggagctcagaccccacattacccttctgcactgccctagcagaggttcttcatgagagccccaccaaacttctgcctgggcatccaggcatttccctacatcttctgaaatctagatggaggttcccaaacctcaattcttgacttctgtgcacctgcaggctcaacaccacatggaagctg

SEQ ID NO: 319456 - DNA, 521 bp, Homo sapiens
ttggctaaaacaaaggagctacaggccccatgcaaggccaaaatcgggcaggatagtcaaatcttaaatccccgaaatgatctcctttgactctatatctcacatctaggtcacactgatgcaagaggtaggttcccatggtcctgggcaactctgcccctgtgrctttgcagggtacagcctcccttccaactgctttcacaggctggtgttgagtgtctgtggcttttccaggtacacagtgcaagctgtcagtacatcttccattctgtggcctggaggacggtggccctcttttcacagctccactaggtggtgccccagtagggactctgtgtgggagctcagaccccacattacccttctgcactgccctagcagaggttcttcatgagagccccaccaaacttctgcctgggcatccaggcatttccctacatcttctgaaatctagatggaggttcccaaacctcaattcttgacttctgtgcacctgcaggctcaacaccacatggaagctg

SEQ ID NO: 319457 - DNA, 505 bp, Homo sapiens
tgtagaggataggctataggagccaggagaacagcaggaggctactgcagataagaggcaatgttggttggactgaacactgtggtcacatttgacatgtattttggaattagaaactaaacaagaaaattrttagatgactataaggaattggggaaacaactagtttttacctgaacattggatggatactagtagtaccattaatcttgattttaaagagtttggaaagtattttattttagtacaaacaattcagtagattagggcatgaagaatttgaatggataatggaaatgtaggttaggcagttgcttaaaaatctggagtttagaagaaagctctcaatggcaaattaaatttgacagccatcagcatatttgtgatattgaaggtgatgggattgatgacatctagtttgagagtacaaagacaaaggagaaaattccatggacagactcctatggcagccaaactttgcaggactggtggcgaaaatgcaatc

SEQ ID NO: 319458 - DNA, 515 bp, Homo sapiens
accatatcaacattattatgggaataggtttttcatgctgggaaatccacaggatgggatactgtttatcagataaaatgataacaagatccaaatgtatctacttggataggtccccaaatatagagtcaagtgaaaaaaggcaagctgtgtaatgatactttcctgtgtcccttttaaataagatgtacaaatagtcaaaaatagacaaaataattaaatctcaattataaatataaaaatatatagaaaagacagggggaatgcacacagacttcaaaacagttatgcctccgaagagggaaggaggtaattttatggggcagagctgtgaaggggacttcaactggatctatgtttcatttatctaaaaatatctggagccaatrtattagaaggctagccttgttaattttattggtaggcaaaagaacatatgatatatttgtctctgtaactgtcattttgtgtgcaatagcttttaatgtttaaaaaggaaatcgccagtccaggtg

SEQ ID NO: 319459 - DNA, 596 bp, Homo sapiens
gatgacaatatgattctatacctagaaaaccctaagactttgacaaaatgctcctagaagtgataaacgacttgtattagtctgctctcacactgctatgagggaatacctgagatggggtcatatataaagaaaagagcttgagttttctcacagttctgtgtggctggggaggcctcaggagacttacaatcatggcggaaggcacctcttcacaggacagcaggagagagaatgagggccagcaggggaaatgctgacgcttataaaaccatcagatctagtgaaaactcactcactatgatgagaacaacatgggggaagccaccccatgattcacttacctcccactgggtccctcccaggacacgtgaggattatggggatcataattcaagttgagattatttcgggacacagacaaaccatatcatgactttagtaaagtttcaggatgcaaaattaatgtacrcaaatcagtagcatttctatacaccaataacagtcttactgagagcaaaaccaagaatacaatttcttttacaatagccacaaaaatgataaaatacctgggaacatagctaaccaacgaggtg

SEQ ID NO: 319460 - DNA, 507 bp, Homo sapiens
tgcaacaaaaacaaaaattgacaagtgaatcctaataaaactcttcagtttctgcacagcaagagaagctatcaggrgagtaaacagacaacctacagaatgggaggagatattcacaaactatgtctctgacaaaggcttaatatccagaatttgtaaggaacatgaacaattcaaaaagcaaaagccaaataaccccattaaagtgtggacaaagaacgtttaccaacatttctcaaaagaagacatacaagcagccaacaaacatatgaaacaatgatcatcctcactaatcaccagagaaatgcaaatccaaaccacagtgagatatcatgtcacatcagttagaattgcctttgttaaaaagtctaaaaacagatgctggtgaggttgcagagaaagggtaacacttatacactgccagtgggaatgtaaattagtccagacactgtagagagcagtttggagatttctcaaaggaatgagtttaactaccatttgatccag

SEQ ID NO: 319461 - DNA, 583 bp, Homo sapiens
tgtgtctccatcgagatctcatctacaattataatccccacatgtcagggtaggaacctggtgggaggtgattgaatgatgggggcagattgctcccatgctgttttcatgatagtgaattctcacaagatctgatggtttgaaagtgtggcacttcccccccttgctctctctctcctgcccctatgtaagatgtgccttgcttcccctttgccttctgccatgattataagtttcctgaggcctccccagctgtgtggaactgtgagtcaattaaaattcttttctttataaattacccagtctcaagtagtttttttaaagcactgtgaaaatggactaatgtagggaatttcctamaaattcagctgctttggagacagaatgcccatttccattagcattaaaaagcccaatagaacctttcatactctcccattgaaaccgtaaaagtcccccctttgagttgatatataagtataaacctttacttacttattgtacatgaacatatatgtaaatcttgttttttcttttgttactttgtttattgtcagttattttgcagaccccaaccaccaga

SEQ ID NO: 319462 - DNA, 507 bp, Homo sapiens
tgcaacaaaaacaaaaattgacaagtgaatcctaataaaactcttcagtttctgcacagcaagagaagctatcaggagagtaaacagacaacctacagaatgggaggagatattcacaaactatgtctctgacaaaggcttaatatccagaatttgtaaggaacatgaacaattcaaaaagcaaaagccaaataaccccattaaartgtggacaaagaacgtttaccaacatttctcaaaagaagacatacaagcagccaacaaacatatgaaacaatgatcatcctcactaatcaccagagaaatgcaaatccaaaccacagtgagatatcatgtcacatcagttagaattgcctttgttaaaaagtctaaaaacagatgctggtgaggttgcagagaaagggtaacacttatacactgccagtgggaatgtaaattagtccagacactgtagagagcagtttggagatttctcaaaggaatgagtttaactaccatttgatccag

SEQ ID NO: 319463 - DNA, 457 bp, Homo sapiens
cactctctgaccctctcccttttctcttgaagaccctcatgtaacaggtatcctgccccataccttgaggaaggaatgtgacacagagaggccaagaagaatttgaacaaacaggttttgctgggttcccctctcagtttattaccattagatcataccccttttgtctcattaaacttctacacatcattccacactatgtggaacctaagcataaaaatatatggtctactcctgtgccccataaaactttagttaaatgaatttgttatggttttctcttgctgatgtaacttctgttataagggcgtcmgccatgtaccttgcaatgggtgaggaaaagatactacctttttgcccctacagtataaaataagatccttgcccctattgatgataaagtttttgaagccaaaagggatacatgcccttcataaatggaaatagcactatatta

SEQ ID NO: 319464 - DNA, 507 bp, Homo sapiens
tgcaacaaaaacaaaaattgacaagtgaatcctaataaaactcttcagtttctgcacagcaagagaagctatcaggagagtaaacagacaacctacagaatgggaggagatattcacaaactatgtctctgacaaaggcttaatatccagaatttgtaaggaacatgaacaattcaaaaagcaaaagccaaataaccccattaaagtgtggacaaagaacgtttaccaacatttctcaaaagaagacatacaagcagccaacaaacatatgaaacaatgatcatcctcactaatcaccagagaaatgcaaatcmaaaccacagtgagatatcatgtcacatcagttagaattgcctttgttaaaaagtctaaaaacagatgctggtgaggttgcagagaaagggtaacacttatacactgccagtgggaatgtaaattagtccagacactgtagagagcagtttggagatttctcaaaggaatgagtttaactaccatttgatccag

SEQ ID NO: 319465 - DNA, 481 bp, Homo sapiens
ttgaacactagagatgaaaaaagagatacagaagaaatatttgaagtggtaatggttgagaattttctaaaattggtgacagacaccaagcaaagatccaagaagctcagcaaacgccaaagaagatgaataccgagaaaaaattacacctaagcttatatattcaaatttcagaaaacctaaaacaaaaggaaaatttttgaaataagtcaggggaaaaaaagcacttcacctacagaggaacaaggagaactacattggacctttccaaataggtaaatccacagagacaraaaacagattggtggtttccgggggctgagaagaagggagaatggaggagtaaatgcttaatgagtatgggatttccttctggggtgatgaaagcatttagaactagattgaggtggtggttgcacaacattttgaatgtattcaatgccactaaattgttcacttgaaattaagtgtatattatgtg

SEQ ID NO: 319466 - DNA, 596 bp, Homo sapiens
tactgttctggtacacatcaccaacagctctttgggttttactacaaactccttcttaagtgaagtttgtgtgttatagttattttaactgtaatccactgttgttatactagaaatctgttagcatggtgataagatgtgggcaaggagaagcattctgaaaacttacgactacatctccatttttaattgggagcgtgtttttaaactgtcacccgtataatgtttcttaactttttatatctccctttaggtaagatggaaaagctagagggggctggagttggataatttcccatttcttagataataaatgaattttatgagccatcttttcccttagaaagtaggcctttcttatggtaaatgctctgggcatatttcagaattattgattatgttcttccaaaacaagcttttgttgttgttgttggttttttttttttttttttctttttctttcagtctttactatgagaacctgtagtgtccgkggaggtaaaattcctgaatatgtgaatatcacataagactagtccctaggaattctaattctcaaggtagggtatactcaacctctagcaaagggtcaaatt

SEQ ID NO: 319467 - DNA, 581 bp, Homo sapiens
caggtttctagtcctggctcttgaatkttatgactctgagaagtttcacttatcctttcatacctcagtgttaggtataaaatgaagatagtgaaataagattaaattttagagaacactgatattgatcattattcctagaattaaaaacttccgtgttcaaataaatttagaaagatctctggacatattacagccctcttggaaattttccttgctcattaccatattaaaatatagcttaaaaggattttggtagagaaatatactgaacttggtataacccagtttctcagacacttgacaagagcgttccttattcttggaaaactcatcttgctaaaccctttcatgtaacttgatttggaaatgctgtattagatgtttcttatggtccctatcaactcaattattttgtgactctgcaaataagtagttttcctgaaggaacaatgtttggggatggtttatgaagagtgctatttcaaaacttcattgtatatgaaagaaataatttcttattagaccactagagggacatttttaaattatggataggtatatgagtaaaattataatag

SEQ ID NO: 319468 - DNA, 581 bp, Homo sapiens
caggtttctagtcctggctcttgaatgttatgactctgagaagtttcacttatcctttcatacctcagtgttaggtataaaatgaagrtagtgaaataagattaaattttagagaacactgatattgatcattattcctagaattaaaaacttccgtgttcaaataaatttagaaagatctctggacatattacagccctcttggaaattttccttgctcattaccatattaaaatatagcttaaaaggattttggtagagaaatatactgaacttggtataacccagtttctcagacacttgacaagagcgttccttattcttggaaaactcatcttgctaaaccctttcatgtaacttgatttggaaatgctgtattagatgtttcttatggtccctatcaactcaattattttgtgactctgcaaataagtagttttcctgaaggaacaatgtttggggatggtttatgaagagtgctatttcaaaacttcattgtatatgaaagaaataatttcttattagaccactagagggacatttttaaattatggataggtatatgagtaaaattataatag

SEQ ID NO: 319469 - DNA, 583 bp, Homo sapiens
ccacacagtaacatagtatatatgtacataaaacatatggaatgtacacgttactgctagagggtttaaatttattcgctgttatggcaccattgctttttctctaatttataccacatgttccttctttatttagcttttaattctgtagagagtttgggaatataaattgtgtgaaggatgtgaaatatatgcctcccaatcgggtgtttggcatccttactttgatatttgctagaataattttcatctgccattttttaaagtaatgatagaaatctttccttgggcttatgaatctagtgcatgtgtggaagaattcttatgcagtctcttactgcttctcttagaacaagaatacatccacgaggaagataggagttataactgccaagacaaacaccggtttcccacagcttgtgtgtctcttggagatacacagcctgggtgtagctgttattccttcctgacagtgtaggctacctgattattgtcagactttaggttgtctttatatrtgtaataattgcccttcttccccacgcttcctgataatcttggtacaatagggaaaaggaatgtg

SEQ ID NO: 319470 - DNA, 531 bp, Homo sapiens
ctgttcttgtcctagtgaataagtctcatgagatctgatggtttaaaacccctttcgcttggatctcattttctctcttgtctgctgccatgtaagacatgacttttgccttccaccrtgattgtgaggcctccccagccacttggaactgtgagtccattaaaccgctctttctttataaatttacccagtcttgggtacgtctttatcagcaccatgaaaacagactaatgcactggtctttaatgcttctagtagagtttgaatattccaaattaaaccaaagaagcaagtgcaattgctaagaccttcactctccaaaacctctcacaataatgttaatcaagattttcctttatttttcccaaaagggacagctggataagagaggcattttagggaacacattcattaagtatgttttaaagcttttggaagtgacccagaaccaagtgggtatggtcaaaaggaagtagtcacaaaggaaaaaagaatatctcagatttattgaggcactcactgaggacgtgg

SEQ ID NO: 319471 - DNA, 450 bp, Homo sapiens
ctttgtcttctgatatccaaaaagcaattaagagaaaccaatcagtaccattgataattacatatagtttgacattttgtagtggtgtgctagaactggcwgggcataagggctgattaatgcatattctggaatttaatgagctggatgttaaactattagtgactcaaaattggaggactgtttatatcaccatggaaattggcaatcagaagtcttcctctttctcttccttttttccagagagctgatttaccaaaacactattggactcagttttggcatcacaaatgttacataaaaattatttcatttcaaaaattattacaaaaatttatttttatatttatattttagaataatttaagtgggctgatttttcaagagtaggcaattgcttattagagaaaaatctcgacttaatgtgaaggagagatatttgtatgtttg

SEQ ID NO: 319472 - DNA, 522 bp, Homo sapiens
cagatcttcaaatgcagagcaacttattctagttccagtaatatttctattatgctacagctacacccagcccaatcctaatatgatatacaataaacttatttctggtacacatataatgcagtattcaaactacccactaataggtaattcatgatttgtaactgttattcattcatataaagtagttacattcatccactcaacaaacatgtacaaattccttgtaaggaatgaaacaaatccaggactgaggaagattgaaaaaacttagcaaagacaatagtatacatcgttttgacttaaaaagttattttttagcttgattaatctcaataacatagtggctgtactrttatttacctatttattatatttcaattctttgaagttattggcccaattcagtttccttgagtttctttgctaatgaattcatttaataggttaaaccatacgaaaaggccaactttaagaaagttcttgacctatgaaaaccgtaattttatacggtttaattta

SEQ ID NO: 319473 - DNA, 562 bp, Homo sapiens
tttataaataaatctcatatttaacattatttaatgcwctttgaacgaagatttctgagccttttggagatgactttacctatatttacatcacaggaacatgaataccataacagagagacacaagtgtgtcaatgtgttacacaagaagcaatattttaagagtatttcaaattacatcagtcaatggcagtgactcattatgtgattttttcccaaggtttttgtgtattttataatttctgtggaggaatttaaaaagaaacatgttaagaagaatctgactaggtacacaaggttgaaatcctggcatgtgctcttacaaactttttattctgatacacgccataggttagaagccagcataataaacactaagaggtaaatgttaaaggtgattgattcattcatatagccacaccaagcctgccattatctgcaactataacttataaggaaagcttgtttagaacagaaaagcaacttataggcacatattaaaggctccacataagagtgtaatacaaagataaaatcagaaaaggccagtttatcacaaagc

SEQ ID NO: 319474 - DNA, 612 bp, Homo sapiens
agtgccccatttaactgggatcctaggacttttatagacttgactctttcccatgattcttccctttgggtgagcttcctgcatgtatagtgctttccttacccttttccctttccagttgtaaaaagtraagtagaggttcctcttcaaaaactttcctttccatctaattaagaataaataataacttctcttagaagcaaaatttattcaaagacctgtgctaacattcttaaatatctgctagctgtaataaggaaatcaatgtactttatgttcttagctcccacaatttagcctaaatatttgtcctggcatgtttatactagtcctagcaagcaataggtcatagcctgttcctcttccttatttgaaggtgtttttacctttctcagcattccataagttacctcctccttcctttgttctcctctgcctttgcctcttttaaaaagttctaagttgctagccagtcgggacaaatatagaatgcgaggtcccgttccagccaatggaaactgcacacagtagtagggtggacacgtcagattataaatgaccctgtctcctttgttcggtgtactgtcatggcaaaactgctggtgagtgtat

SEQ ID NO: 319475 - DNA, 612 bp, Homo sapiens
agtgccccatttaactgggatcctaggacttttatagacttgactctttcccatgattcttccctttgggtgagcttcctgcatgtatagtgctttccttacccttttccctttccagttgtaaaaagtaaagtagaggttcctcttcaaaaactttcctttccatctaattaagaataaataataacttctcttagaagcaaaatttattcaaagacctgtgctaacattcttaaatatctgctagctgtaataargaaatcaatgtactttatgttcttagctcccacaatttagcctaaatatttgtcctggcatgtttatactagtcctagcaagcaataggtcatagcctgttcctcttccttatttgaaggtgtttttacctttctcagcattccataagttacctcctccttcctttgttctcctctgcctttgcctcttttaaaaagttctaagttgctagccagtcgggacaaatatagaatgcgaggtcccgttccagccaatggaaactgcacacagtagtagggtggacacgtcagattataaatgaccctgtctcctttgttcggtgtactgtcatggcaaaactgctggtgagtgtat

SEQ ID NO: 319476 - DNA, 608 bp, Homo sapiens
gatgtttatgctgggtggttgcctcttttatgtatcttgtatatatatttttatattcatctaggaatcttgatacttaggctccacaccatgtctaagaagaataaacacactctgctcaggaaatacattttgcttttcttccttccacccttactcaaataaatataactattctaatcaaagatactcacaggccttagcatagaataaaaataaatacctggaaaaccataaggcaaatagtcattttgcttcagggaaaaaagaactaatctttggctgaatttagaaacctgaagaagggaaaatatttattctggatccgactttattccaatttcaattatgcctattaagtagtccctctactgataatttattgaattggcatacacaaattgcctggmatatagtagtcattgttaaataataatttacctttacttctcctaattctccataacagacaatgtatccgtgttaacagagaaaccaaactctgcaaaatgttttgcagaagtttattctgagccaatatgaatgaccatggcctggggaacagttgcaagaggtcctgagaagtgtagttgggttacagtttggtt

SEQ ID NO: 319477 - DNA, 294 bp, Homo sapiens
atatgtgcatgttacaaaatttcaatcacatcattttaatagcttcatataattgcattatatgtttacatcataatttattaaatctagcctttatatttggacacttacgttggttctgatttcctactgtctaaacagcaatatactaaaaaactttgyaactatattttctgccatatttacgcttatctctttggaataaataccaaaatatgtgacaattatagggttaaataccatatataagtctaacaattttaatttgcattataaatttgcccaaaaaaggca

SEQ ID NO: 319478 - DNA, 635 bp, Homo sapiens
cagagtatgagtcagatttctgaaatttcaaatgagaaatgttagtctttctgtctgcacaccacacatataaagcatatggatgtcaccttaactgacgacacagaatatctgcactacagctctcctgagaggatccagccaagaatctactacagcccagcatttgcaaagagctcatttgacctatctcattttagagagtcaacctaaagaacataatagctgctcactcctctaggttcttctaattccatcattgcattagatcagcttgtgagataataaacttcattggtcttattatcttgacttttttatcctacctctcctcaaaattcttagactttgtagggttaaattatagttttatgaacctagttttcatataagttccatagaaaatattcactaaatcacatttccctaactcctactaatttgttggcaaagaaaccatgttgtacaggaatccctgtatacagatctataagaaatgctggtttcagaaaaaawtttaacttttgtatttattatctagtactacataaattatcacaaaatcagtgaattgaagtgacatacattttttatctttcagtgtctgtcgtcatacatccagctactgcttagat

SEQ ID NO: 319479 - DNA, 640 bp, Homo sapiens
tgcaatagaaaaggaaaacccattttctggggagaaattcaaccctgctgcagaaatctgcataagcaacaaggagccaaatcttaataatcaagacaatgaagcaaaggtctccaggacatgtcagaggtcttcacaacagcctctcaaatcacaggaccagaggcctaggagggaaaatggttttgtgggccaagcccagagccccctgctgtgtgaatcctaaggacatagtgacctgcatcctagctgctccagctgtagctaaaaggggccaaggtataggttgggccctggcttcaggggrtgcaagccccaagccttggcagcttccacatggtgttgactgggtgggtgcacagaagtcaagaattgaggtttgggaacctctgcctagatttcagagaatgtatggaaatgcctggctgtccaggcaaaagtttgctgcaagggtggagccgtcatggagaacctctgctgggacactgcagcagaagagaaatgtggggtgggaagccccacatggagcccccactggggattgcctagagaagctgtgagaaagggccaccatccttcagaccccggaatggtagatccatccagaatggtaggtccacagacagcttgcagtgtgtac

SEQ ID NO: 319480 - DNA, 568 bp, Homo sapiens
aaatataaatgatattcttcacaggaatagaaaaaatattctcaaatttacatggaaaaaaaaagactcaaaataaacaaagctatcctaagcaaaaagaacaaaactggaggaattatattacccgacttcaaattatactacagagctatagtaactaaaacagcatggtacaggcataaaaacattgttctctattctattccattttttcacatagacgaatagaacagagcttaaaatccagaaataaatccatacatctacartgaattcattttcaacaaaggtgccaagaacatacattagggaaaggacagttgcttcaataaatagtgttaggaaaattaaatattcacaaactgaagaataaaaccagacccttatctcttgccacatacataaatcaaataaaaatagactaaagattaaatctaaaactgcaaactatgaaactactacaagaaaacactggagaaactctccaggacattggactgggaaagatttattgagcaatactccacaagcccaggcaaacaaagcaaaaatgggatcacaccaagta

SEQ ID NO: 319481 - DNA, 568 bp, Homo sapiens
aaatataaatgatattcttcacaggaatagaaaaaatattctcaaatttacatggaaaaaaaaagactcaaaataaacaaagctatcctaagcaaaaagaacaaaactggaggaattatattacccgacttcaaattatactacagagctatagtaactaaaacagcatggtacaggcataaaaacattgttctctattctattccattttttcacatagacgaatagaacagagcttaaaatccagaaataaatccatacatctacaatgaattcattttcaacaaaggtgccaagaacatacattagggaaaggacagttgcttcaataaatagtgttaggaaaattaaatattcacaaactgaagaataaaaccagacccttatctcttgccacatacataaatcaaataaaaatagactaaagaktaaatctaaaactgcaaactatgaaactactacaagaaaacactggagaaactctccaggacattggactgggaaagatttattgagcaatactccacaagcccaggcaaacaaagcaaaaatgggatcacaccaagta

SEQ ID NO: 319482 - DNA, 552 bp, Homo sapiens
tgtcatttggctttttattgtctttcagatctaaattttactaatttcctttctgacttaatttttacctgtgatttagtagtattattttaattattggacatatggaatttcaaaattatccttttgtaatttatttatgatattatagtataacaattagataacatagtttacataataaacgttttytgcttttgctgagactttattatttggctgaatttataaactttccaagcacatttaaaaaaaaataacctttatttaatcagtgtaaagctttgtttatgtttcaaattgtctataatgtttacatttttgtctacttcattttttcagtgtctgtgataaaaacattaacatttccagctaaagttttaattttatctgctgcatcatcatgtaaattgttgctttgtatatcctgaaaatatgttattaggtgcatatgtgttcatgatttattacatattcctactctgtgaattattacttatatctcatagtgttcttgtttgtttttaagttctgttttgcctcatatgaaag

SEQ ID NO: 319483 - DNA, 568 bp, Homo sapiens
cactatattctgtaattcagcctatcmatttttttattatagtaatggtgttcttattaccaataaatccaaataattatgttccatatttgcttattcctgatttgttcatctgttatgctctctataatgtctctttctttctctgtataaatatttaataatacttttaataattattgttctgtttgcttcatttattctgctgccactgctatacattgttcagtttttagtatttctttccctttattgatctttctcaatatctcatcatttccccctatgaactaacatttccttgagactctctgttactttagtcaccaatgtgtacctagaagaaggttgacatctggactcctgcttgtgattttcaaattacctattagtgatgaggacagcctctggggttgcaatccaggcttaaccatttcctatttgctgacctctccttccttttgtagggacccttaccattagggaatcttccaagtggtgaccctgtgctgtgttgtctagtctgaaggcagtgatcctgtgctgtgttgcctagtccatggattgg

SEQ ID NO: 319484 - DNA, 571 bp, Homo sapiens
aaacattcatggagtcagattcatcacagttccagtagcagtggcaggtggccaagactagacctgtggtttgcctttggctatggctattatccagcgtgatctgtctattatctatctatattatctatctatctatctatctatctatctatctatctatctatctgtctatctatgtaaccaatttatttgattaagagacccagagtatttatcttttgctagctctgataaatcctgcttagaacactatatgctttaacgttttaatgtaatagctttagacattaaccagaatattcacttctgggcctgtcagctcgaagaaactttttatttgcaataaaagattaaaatgtaacaytattggtgttgtaagagaagaaagacaactggatttatgaatctattgctggcgaattactattttgagtaatatatgaaaaacagattggaaatgaggtttaggggcaaatgttgctttgaaagcaggtgtcatgtatcaccccctgcccctagtgagaacaattacttggtttccagtggagcttttgcttccaaagtgaaa

SEQ ID NO: 319485 - DNA, 626 bp, Homo sapiens
tttacatttccaccgacaatgtggaaggttcctttttctccacatccttaccaatacttgttatctttcatcttttttataataattatcctaacaggtgtgagatgatgtttcattgtggttttgatttgcatttccctgataattagcgatgttcagcattttttcmtatacccactggccttttgtatgtcttcttttgagaaatgtctattcagatcatgtgcccatttttaaactttgatctggttatttgttttattgtcaatttgttgaatcccttatatattttggatattaacccattatcaaacgtatgatttgcaattttttttttttttctgagacaggttctggcactgtcacccaggctggagtgctgtggcacgatcttggctcattgcaacctccacctcctgaactcaaacaatcctcctgcctccgccccccaagtacctgagactacaggtgtgtgccatcaagccctgttaatttttgtattttttgtagaaatggggttttgccatgtttcccaggctggtctcaaactcctgaactcaagcaatttacctgctttggcctcccaaagtgctggggttacagacatgagccactgcttccggcca

SEQ ID NO: 319486 - DNA, 469 bp, Homo sapiens
taaatttatttataggtatattttgatgctattataaatgggattattttcttaatttctttttaagatgcttcgtttttactgtacaggaatgctaccggttttgtatgttgattttgtgtcctacaactttactgaatttgtttattagttttatcaggtttttttggtggagggttttctatatataagggttttctatatataagatcatgttgccggcaaagaccatttaacttcttccttttttatttaaatgccttttatttatttttattacctaattgctctggctaaraaaaatgtgctcttgaagcataacatttagaatgtatctgtggtcacagagtgggatcttggcatgtctcgtcaataaatggtgttgagaggaaactggaattcaagaagtcctctgtaatttttgcagtcctatgcaattgcagagctagaattcgtaaaagctatagta

SEQ ID NO: 319487 - DNA, 562 bp, Homo sapiens
aattcttaaaggccctaggatctttgaaatggtaaatgagcattggctacttaaagtcacctgctacattagtccctaacaagagagatagcctgccctttgaagctgtgaagccaggcattgacttctcttctctagctagtaaagtcttagatggcatcattttccagtattaggctgttttgtctacattgaaaatctgcaggcaccttcatcaatgatcttagctagatcttctggataacatactgcagcttccccatcagcagttgccattcaccttgcatttttatgttatagaaatgccttctatccttaaaccttatgaaccaactgctaactttaaacttctcttcagcagtttcctcatctctctcagatttcacaaattgaagaaaaagccttgctctagattaattagcctttgctttaagggaatgttgtggctgatttgatctatccaaaccattaacactttctccaggccaatcatgttagcttgtgcaaawcccagccctttggaaggccaaggcaggagggtcacttgagcccaggaagttga

SEQ ID NO: 319488 - DNA, 607 bp, Homo sapiens
atcacatgttgttggaaaaatggtgcccacggacttgcttgtttcagggttgccacagaccttcagtttgtcaaaaacgtgtatctacaaggcatactaaagcgaagcacagtaaaatgaggtgtgactatgaattaaaataacttgtaactccaacacccagttaattgctaataatttgttgtatgtctctcataattatatttttaaacaacaaaaatgtgattatgccttttatcctcttctgtaactattaaaaaatgtagcagtttattttagggctgcacgatggtgtgcagtaaggagtaccacattttgttttttatattttgtagtttccaatactttgctgctgggcaatcagtttctttcctttcttcaccttctcctcactgtcctccaactcctcctccaacttattttccttctcttcctktttttacttataaagagatatgtactaaataaacagtcttgtaaacaaatctttgcactcatccatgattatttgcccagaaccaattactaggagtgaatatgtatggcttaaagggtctgtgaattttctggtttttgatacatagtaaaccacattattaccaattac

SEQ ID NO: 319489 - DNA, 511 bp, Homo sapiens
ctgcctttgtggctttgcagggtacagccyccctcccagcttccttcatgggctggtgttgagtgtctgtggcttttccaggggcacagtgcaacctgtcggtggatctaccattctgggatctggaggacagtggccctcttctcacagctccaccaggcagtgccccaatggggactctgtgcaggggctaccccacattccccttccacagtgccctagcagaggttctccatgagggctcctcctctgcagcacacctcttcctgaatatccaggcatttccatacatcctctgaaatctaggtggaggtttccaaaccttaattcttgacttctgcgcacctgcaggcacaacaccatgtggaagctgccaaggcttggggcttgcactctctgaaaccacagcctgagcttggccccttttagccatggctagagtggctgggatgcagggcaccaggtccctaggctgcacacagcaggggggcctggacccggcccaggaaac

SEQ ID NO: 319490 - DNA, 512 bp, Homo sapiens
atgtaaatacagaaccagcgtgaccaaattacagttccaatgttttgtaccaattattacctttaggttctaaaatattaaaaagtaggattactaagcaggacttcatgaaatcaaagcttgatagaggttgtatctgccttagttcctttctatagtttctctatcaaagtcttatttcctgtcagcagctcaattgcttattatttttgtatatttcaaagtatttctataatccttcaaacatggtgactgaatgaaaatagccatattctttgacaagagctagttcacaactaacacaatgacacacataccctaggagcagctcctgacatgcagtcaggaccaggggtgaaacatgaagaataccatcctgccatttcacatggactacaccagtgacagcrgtgggcagtctaggcacccccttggtgacagttgctatctgtacactgatgacttccaaatctagatctccagcccaaaactatttcctctgctccatactc

SEQ ID NO: 319491 - DNA, 527 bp, Homo sapiens
taagtgcttagaacagtgcctggcacatagtaaaaaaccatgtaaatgattgctgaataaatgaatcacacatagcagtccctgaaaagctactaaatttacacattcctcttcctcttcatctccaggcaactaaggatgctgccttagttcagactctatctcccctagtayaatggggtgattttcatttcctcagtgaggtcctgtcccctgtttttccctgctccagtctatactccctatggcaaccagagtgacatttactgaatgtagagctgatcatgtggctcccttgtttacaacattgagtgattcttcatcatgttagccgggctgacttggctcttcatggtcgggctcctgcttgcatctcttgctacctctaccctttctcatcactctggcttctaagcattacaaattcattctttttccctaagcctatcttcatttgctctccttcctgttgatggaatgcctccctctgtcttattcacctttagatccagcttaagcatcactca

SEQ ID NO: 319492 - DNA, 466 bp, Homo sapiens
gttagtgtgtatgcatgtgtgtgagtgtggagagggcagcaaatacagatgtgccattacatttatatttccctcatcttttccagtatactggattggaaacccattcaatctgatgtctgctgaggaatggagaaagaccactggtgattcctccatcctcactcctgtgtccctccttgcattgcaagtgctttacaagtcttcccgatagaccatgagcatcctgagggctggtatcaaatttaactcatctcctatcctcagtgcctcgtacaagatgctggatgtaggaggagttcagtwagtatatgctatataaatgacaaatgaatgagtgaatgaataagtaagggaatgacttgattcttcctctaccaccaattcagaagacttggctgaaagggtgggagagggagttaggattctgtaaagaagaccatgattgagttttgaggaaaaaaga

SEQ ID NO: 319493 - DNA, 645 bp, Homo sapiens
tccaggatggagccagttcagcaaattactaagtcattttatgtagtcattctatacagactgagcaccttatgtgtgccaagccacacgctgagcactggggatggggaaatgaggaaggcatgtgcaggccatgtagtaggggtgtcatgaaggcctgtgtaaacaaacaggggtagggaagagtctcaaaggtggagaaaagattcagggccttttaggaagggatgcatcattgtcatagaagggtctcactgtgaatcaaagaggtctgtctgaatctagctccataagaagaggggatggcaggatctgatggcatcagatcccaactaatcttcttgaaatgcagggttaagcactaaatttaagtgtacttgagaactaaaatccttagtcaggccacaggtgatgagggcraggcagggaggccatagtctgggacttatgagggtaacctgggtgctaaactcatctaagtcttaactaaactttggtttggaaataatacactttatacagacctcctcgttccattcctctgcaaagtcatgttcttggtgagtagattagtttgcagttgccagaccaccgtattccttatatctttatgagagttaacccactgctaagtatttctatggt

SEQ ID NO: 319494 - DNA, 513 bp, Homo sapiens
gaagtagtgtgcaggcggaacagggcctctgatcatgtaacctagaattggagaactgaagaatagggacaatctcttagccatctctatattcccattggctagcacagtgagagaacatcrtaggcaccctgaaaatataaataatgggagtgatgacttttatcatttagagagccagcagcactccatgagtccagctcccttctctccaaatagatgagaccttgagttaggagagattaatttcatttggccatcaggcaggagtgctcacttggcaatttttaaatgcaaatccaattgtggattgctcacaaagtaattctgcttattttctcctttttttttttgaaagaattgactaggatgcaaatgcaattacaagggataatgaccgccaccagttatattaaaacgtcagatataaagtacaagtaattacctgcccttcaagaaaatcttgatgtatggacccccaaagtcattatacagtccattcatcaacattta

SEQ ID NO: 319495 - DNA, 568 bp, Homo sapiens
taagtgaatgagcttagttttcaaggatcagaaaaaagacacatgcagctaggatgaattactgagtagaaaagtgataaagatggattcacaaaattaggcaatcatcagcccrtgtagtttgcagaacacagtaagaagtttgtattgtttcttaaatgtaatgaaacatcattgaagggctttaagtaacaaaatgacttgacataattttaggaagatcactatgactatcttggggagaatagattgtggattgtaaggattcaaaaatccaagcaaggacaagatctggatgtctcataatagtccaggagagacataatggtgtcttgacctagggtggtgatggggagaggttgacagaatcaggatatatttcagacttacatgtggataggatatgatgggaggagaaaaaaatcatggaaacattttagaatatgaacttaaataactgaatagggagtggcgccatcaatgacaatggagatgattttggtgggggaatcaaaaatttgtgttgaggcaggaaaagtttgagatgccaagtggaaacgccaagtga

SEQ ID NO: 319496 - DNA, 568 bp, Homo sapiens
aatgacttgacataattttaggaagatcactatgactatcttggggagaatagattgtggattgtaaggattcaaaaatccaagcaaggacaagatctggatgtctcataatagtccaggagagacataatggtgtcttgamctagggtggtgatggggagaggttgacagaatcaggatatatttcagacttacatgtggataggatatgatgggaggagaaaaaaatcatggaaacattttagaatatgaacttaaataactgaatagggagtggcgccatcaatgacaatggagatgattttggtgggggaatcaaaaatttgtgttgaggcaggaaaagtttgagatgccaagtggaaacgccaagtgacagctcagataaaagccaaggtcaagttattgacatgtagatgtatgtaaagccacgaaaatgataattatcttcaaatgcttgctgcaaaaggaattagatatatttgtagttgcttgtggcaatgatacccagacattggttgcttgataaagcattttgaaattttagatgtcctggtttcattccaagctt

SEQ ID NO: 319497 - DNA, 609 bp, Homo sapiens
aactgaatagggagtggcgccatcaatgacaatggagatgattttggtgggggaatcaaaaatttgtgttgaggcaggaaaagtttgagatgccaagtggaaacgccaagtgacagctcagataaaagccaaggtcaagttattgacatgtagatgtatgtaaagccacgaaaatgataaytatcttcaaatgcttgctgcaaaaggaattagatatatttgtagttgcttgtggcaatgatacccagacattggttgcttgataaagcattttgaaattttagatgtcctggtttcattccaagcttttatgactcagtagatttgggatttttattcatggttcagtaagtggtgtgtgtgtgtgtgtgtgtgagagagagagagagacagtgagagagagagacagtgagagagagagacagtgagagagagagagagagagaatcactgttttacagggaagattcaggataagtgaataaagttaatatcctctgaccctttggtgagaattgcaggagcaattttagaatccctgcattaatagcagagagcttgaactaaaatacactttggataccatttctttgtcttggttctccagct

SEQ ID NO: 319498 - DNA, 609 bp, Homo sapiens
aactgaatagggagtggcgccatcaatgacaatggagatgattttggtgggggaatcaaaaatttgtgttgaggcaggaaaagtttgagatgccaagtggaaacgccaagtgacagctcagataaaagccaaggtcaagttattgacatgtagatgtatgtaaagccacgaaaatgataattatcttcaaatgcttgctgcaaaaggaattagatatatttgtagttgcttgtggcaatgatacccagacattggttgcttgataaagcattttgaaattttagatgtcctggtttcattccaagcttttatgactcagtagatttgggatttttattcatggttcagtaagtggtgtgtgtgtgtgtgtgtgwgagagagagagagagacagtgagagagagagacagtgagagagagagacagtgagagagagagagagagagaatcactgttttacagggaagattcaggataagtgaataaagttaatatcctctgaccctttggtgagaattgcaggagcaattttagaatccctgcattaatagcagagagcttgaactaaaatacactttggataccatttctttgtcttggttctccagct

SEQ ID NO: 319499 - DNA, 565 bp, Homo sapiens
atggggtctctagtagctcagagcactaaccatctggacctgattataattgaccatacggattcatatctgactattcatcctataaatatatttctctacggcttttattttttacatagttaagcacataaaaagcaagaaacacaatgtagaataaaatgtataattcaaaccttaaattcccttcttatcatcagtataattttggttacttttacatccttgtgtcccagttccctcaaatgaaaaatgagaataccattaccaaccttacggggtagtgtgaggattaaytgagatgtataaactgaaatatacagttgttataaaaattgtgggaaatgcataggaatcatgtccagtaatagctccctaattctaactttgtgcttgtgccaatatcaggtgaatattccttgtaaaatctctgaatagaaaatattctaggcaataagagggcacagaaatttttatagagacaaaaatggtaagaactacttatgaaaaaccaaactcttagaagaaatctgtaaagatttgtaaaaaacttgtattctattct

SEQ ID NO: 319500 - DNA, 562 bp, Homo sapiens
gacaaaaattttcctttgatcctaaaatctcactgattgtatctttccttctctcccaaccaagtagacaagtttctgaaaataatmatctaatttcagtctctacttcatatttaccactaagcctactgtaatatgttttctgtcccattgctccatctgactccatgagaaagcaccctcagcaaagactccaattaactctgttgtctgttctaacaggcctgggtcttaagaggaccgttagtgacatctgacatgactgataagcacttctttgatgccttcttccttggcttccaggacatagtctcttttgcttttcctcttacctctctagcatccctgagtcttcactgcaagctctgcctcctctacaaaaattttagatgctaatatacccctctttatacatgctactcgttagtgaattcctttccattcttcaagatccaaccaaaatgccaccgccaaggtaaagcttgctcctgaagtacttcatttacaattatcccaccatattgcacttatgtgcatgtcagcctcttcctgtaaatggtga

SEQ ID NO: 319501 - DNA, 438 bp, Homo sapiens
actactaatagcctgctattgaccaaaagccttaccataacatgaacagtcaacccatattttgtatgttatatgtactatatacaatattcttaaagtaagctaaagacaatgttattttaaaaatyataagttagaaaaaatatatttactattcattaaagggagtagataatcataaaggacttcatcttcatggtcttcacattgagtaggctgaggagggtgacaaaaaatagggaatggtcttgctgtctcaagggtggaagaggccgaaaaagtagaggaggtggaagaggaggcaggagaggcaggcacagtttggtgtaatttttattttttaaaaaatctgcttataattgggcccacacagttcaaacctgtgttgtacaaagttacaatatccctacttctattttcacatctagaataatttag

SEQ ID NO: 319502 - DNA, 596 bp, Homo sapiens
gctaacctgccagaaggtctcaacagaagaatgaacagattagcaaaagaattaatcagcaaacttgaaaacaggccaccatcaattgctatcatttagtctgaatatcagaacaaaaataaaagaaaaatgaacagagtctcagagacctagaggacgacatcaagcataccaagatatgcataatgagaggagagagataaagggattagaagaatatttgaaggaaaatagccaaaatttcccaatttggtgaaaaacattaatctatacaataagaagctcaagaaactccacgcaagataaactcaaaagaattaacacttagacacatcatagtcaatatgttgaaaactaaagacaaagagagactattcaaagcaacaagaggaaacaagttatcacatataagggatcctcaataaaattagcagctaatttctcatcagaaaccatggaaccaagtaactaataggagaatatattcaaggtgctggaaaaaaaaaagtgtcaaccaaggattccaaaattatcrttcagaaatgaagaagaaattaaaacactcatatttaaaaaaaacagaaaaatgaaaacaa

SEQ ID NO: 319503 - DNA, 549 bp, Homo sapiens
tattacttttctattttcatttacgcacacaacaaacatatgactaggaacttatagtttacttaggaacataagccatgagctttggtggcaagaaagaagaactaagagagtgctaaagaaattcagacaagagtgtcatatctttatttctgtgtaggtgagaacattctcctattcctttccccaatcctacctcayatggcagtttctttgtaaagcccttgctatggaaacacaaatacgtgagaatgacccacatacattaacttttctcctatgttaagcattcctgcttacatttctaacttcaatttttcaaaacaaaaatgcatagataatctatgggggataaaccattgtagttactattcatctcatgtggtttgcacactcttaagtggtgcctctgggtacaccatgaaaagagctttaattaagagcaaacatacttgggttttacttatcttgggtccaataatcagactggagttcatgaagcggggaaaaagcagacacttttccaaagcttttgtctacttctgcagt

SEQ ID NO: 319504 - DNA, 556 bp, Homo sapiens
gtgtctatctagaactatcttttgaggkgcattattagtttgcttcaggtctcagtggaacataatttagtgattgatttgtgatgtctcctatgagtgtggaagggagctgctttacgggggctaatggcttcaaccttacccactgtttaagtcaactcctggaatattgtgttctatgctggatatcacctttatggattatgttgaagtgactgtttttactgtttttagaatttgatgaaagttatgtaccttctcccagaaagatgcacttgtgcatacatacgtaaattttgcatgcagttgcaacggggttatggaatctagattaggagttcttgggttgaatgacatgagaaaatatacctgaaataataataacaggagcttcatttattgagcagttctatatgctagtgctctgctaggtaattttatatataatatctcctttgaaatgccacaacaactttgcaaaatggctagtatcacttccattttgctattaaagtaactgacggtgagagtccacaatttgctcaaagtcacgtag

SEQ ID NO: 319505 - DNA, 469 bp, Homo sapiens
agtatttatttattcttcatgtttgaaggatattcttgcctaatatactattccagggtaaatgttttttccttcagcacctaagtatgtcatgtcactctcacctggcctgtaaggtttccactgaaaagtcggctgccggatgtattggagctccattgtatgttattggttatttgctgcttttaggatcctttctttatccttgacctttgggagtttgattattaaatgctttgaggtaattttccttgggttaaatctgcttggtgttctacaaccttctcatacttggatattgatgtctttctttaggattgggaagttctctgttattatccctttgaataaactttstaatcctgtctctttctctacctccttttaaggccaataacccttagatttacctttttgaggatgttttctagatctgtagacatgctccattgttttttattcttttttt

SEQ ID NO: 319506 - DNA, 458 bp, Homo sapiens
attacaacccatctaaagctaaaaatagaggacagatcagttttggtaagcatgtgtagctctgaagttcaagaataacctgtaaacccataggaaatgtgtcctttcttacatgcagaacagattttcctaaagtaacatttaatgcaactttcgacagttctaagtacacttcataagtgttcccatatttagaagtatctcatgagataatagctttacttgggtatacatgaaggtccaagacatgtaattacagataycttttaaaaaggcattcatataattcacaactgacattgctccaaggaggagaagctgctattcagatatcatttaattcaatgggctttctgctgatacggagttcttaactggaaaaatagatccttagaaaacttcaaagagaaaattgaaaagtaaataataactggttgattgttctcagtgtaaagtac

SEQ ID NO: 319507 - DNA, 579 bp, Homo sapiens
tcctggggcacatggtaaactggtaagaggggcaggatgaatctggaggcacaaatggagattacctattacaaatatacaggtatataacttcagaraaactttcagcataacttttgggagtagaaagcaacatatgcacttctaccaccagagactaaaatttaattttttttccatatactgtaagtactctaagatgtttagaagtaaacatggagaaggtaactattgagtttgatttacttttgagtttgcttgctagcaggacacaaaggtcaacaatatacattcagcccttaagagtaactagcaaaatcaaaatgtatctaattcgattacaatatatcaaggtacatgaagaaagctctctaaaaattttaatacaagacaaaataccaaaagaaagaaagtcatgaagggctgtataaactaatgaaattatgttttaagactccgggaggtgcaacgagtgtcctcatttttaccttcatctttgtgcactattctctaatttgcaaccactaaacagaattttctacatcctaacctttttgctttgaatgttttgtttctttc

SEQ ID NO: 319508 - DNA, 579 bp, Homo sapiens
tcctggggcacatggtaaactggtaagaggggcaggatgaatctggaggcacaaatggagattacctattacaaatatacaggtatataacttcagagaaactttcagcataacttttgggagtagaaagcaacatatgcacttctaccaccagagactaaaatttaattttttttccatatmctgtaagtactctaagatgtttagaagtaaacatggagaaggtaactattgagtttgatttacttttgagtttgcttgctagcaggacacaaaggtcaacaatatacattcagcccttaagagtaactagcaaaatcaaaatgtatctaattcgattacaatatatcaaggtacatgaagaaagctctctaaaaattttaatacaagacaaaataccaaaagaaagaaagtcatgaagggctgtataaactaatgaaattatgttttaagactccgggaggtgcaacgagtgtcctcatttttaccttcatctttgtgcactattctctaatttgcaaccactaaacagaattttctacatcctaacctttttgctttgaatgttttgtttctttc

SEQ ID NO: 319509 - DNA, 579 bp, Homo sapiens
tcctggggcacatggtaaactggtaagaggggcaggatgaatctggaggcacaaatggagattacctattacaaatatacaggtatataacttcagagaaactttcagcataacttttgggagtagaaagcaacatatgcacttctaccaccagagactaaaatttaattttttttccatatactgtaagtactctaagatgtttagaagtaaacatggagaaggtaactattgagtttgatttacttttgagtttgcttgctagcaggacacaaaggtcaacaatatacattcagcccttaagagtaactagcaaaatcaaaatgtatctaattcgattacaatatatcaaggtrcatgaagaaagctctctaaaaattttaatacaagacaaaataccaaaagaaagaaagtcatgaagggctgtataaactaatgaaattatgttttaagactccgggaggtgcaacgagtgtcctcatttttaccttcatctttgtgcactattctctaatttgcaaccactaaacagaattttctacatcctaacctttttgctttgaatgttttgtttctttc

SEQ ID NO: 319510 - DNA, 518 bp, Homo sapiens
tcataaaaactctcttatttctctataaacattttgaatttttaaattacccctttaagaaatgatcagtatataacttgtaaatacttgttggaaatcacattaaaattaacatgtgtaatgattgatttgatgtctactacagcctccagctccttcaattttcagaatcaaccatrtacatttggaggtgcccactttactggccctgtcttgaaaccttacaagaaaaatggaagatatggagttataacatttagagtctgtgggggaggaagataagtcaactgcaatcttcaaatagaaagtgtcaaagcagtcatgcaactaattaattgtacctttaagtacagaatacataaagttacaaatgatgaagaacacgagaaaggcaaaaaaaaaaatggatggattctgcatacactcatctaatattgccatacttatctcacggaaagtgtggtgagtatcgcagtatcagataagtgcatgcagaaaaatgtgctagcatgtcactt

SEQ ID NO: 319511 - DNA, 591 bp, Homo sapiens
tactaccaataaatgccagatctttccaattttcaccattctttttttgaaayggggttttactgtcacacaggctggagtgcagtggcatgatctctgctcaatgaaacctccacctcccaggctcaagtgatcctcccatctcagcctcctgagtggctgataccacaggtgcatgccatgatacccagttcatttttttttcttttttgcatttttggtagagacagagtttcatcatgttgcccaagctggtcttgaactcctgtgctcaagcaatccacccacctcagcctcctaaagtgctgagattacaggcatgagccactgtgcccagcctttcaccattcttatttccaatgttacaccaagccacagtcatctctcacatagatcaaagccatgactcctaactggacttttttcttgtacttttactaacttacactctatccttcacagagcagtttgagtgatttacaaatggaaaatagatcacatcacactactgtttaaacaatctgatgacttgtatcaaactcagaaaaaaatccaaactttaaaaccagggttatgagattctgtatggtc

SEQ ID NO: 319512 - DNA, 516 bp, Homo sapiens
aacttctgaatctctcagtctatactcattgttttgttgttgttgctgctgctgctgcttgtttcttttcatggggtcttgggaatgatattatcttctctagccaaaaataatctatacttctgctagtctgtgacasctttgcaattatattgctgttggattttttctcttattgcctcatgcatatatatcttggctctccttttcttcattcaaaagctaagctgtaaactacttgggcataaaaacatgccatgttttttgccctctaaattttctatcagcacatgagtttacagaagatcgggagaaaattctgctgaatctcccattgtttgaagattttaagtgttgtagccaacaataactcaccgattcattctggcttgtaaacattccatttcgccaccaaatgccaaatatttattgagaacttattatttgtagatgaataaatttctggacatttgtataactatataatctaccagtggaaagagttccttataccaa

SEQ ID NO: 319513 - DNA, 586 bp, Homo sapiens
cacactttttttctctccagaaaaacttcattctcctgtcatcctcacagagtaaaagcaatgcaaaaattaacttctgaatctctcagtctatactcattgttttgttgttgttgctgctgctgctgcttgtttcttttcatggggtcttgggaatgatattatcttctctagccaaaaataatctatacttctgctagtctgtgacagctttgcaattatattgctgttggattttttctcttattgcctcatgcayatatatcttggctctccttttcttcattcaaaagctaagctgtaaactacttgggcataaaaacatgccatgttttttgccctctaaattttctatcagcacatgagtttacagaagatcgggagaaaattctgctgaatctcccattgtttgaagattttaagtgttgtagccaacaataactcaccgattcattctggcttgtaaacattccatttcgccaccaaatgccaaatatttattgagaacttattatttgtagatgaataaatttctggacatttgtataactatataatctaccagtggaaagagttccttatacca

SEQ ID NO: 319514 - DNA, 586 bp, Homo sapiens
cacactttttttctctccagaaaaacttcattctcctgtcatcctcacagagtaaaagcaatgcaaaaattaacttctgaatctctcagtctatactcattgttttgttgttgttgctgctgctgctgcttgtttcttttcatggggtcttgggaatgatattatcttctctagccaaaaataatctatacttctgctagtctgtgacagctttgcaattatattgctgttggattttttctcttattgcctcatgcatatatatcttggctctccttttcttcattcaaaagctaagctgtaaactacttgggcataaaaacatgccatgttttttgccctctaaattttctatcagcacatgagtttacagaagatcgggagaaaattctgctgaatctcccattgtttgaagattttaagtgttgtagccaacaataactcacygattcattctggcttgtaaacattccatttcgccaccaaatgccaaatatttattgagaacttattatttgtagatgaataaatttctggacatttgtataactatataatctaccagtggaaagagttccttatacca

SEQ ID NO: 319515 - DNA, 586 bp, Homo sapiens
cacactttttttctctccagaaaaacttcattctcctgtcatcctcacagagtaaaagcaatgcaaaaattaacttctgaatctctcagtctatactcattgttttgttgttgttgctgctgctgctgcttgtttcttttcatggggtcttgggaatgatattatcttctctagccaaaaataatctatacttctgctagtctgtgacagctttgcaattatattgctgttggattttttctcttattgcctcatgcatatatatcttggctctccttttcttcattcaaaagctaagctgtaaactacttgggcataaaaacatgccatgttttttgccctctaaattttctatcagcacatgagtttacagaagatcgggagaaaattctgctgaatctcccattgtttgaagattttaagtgttgtagccaacaataactcaccgattcattctggcttgtaaacattccatttygccaccaaatgccaaatatttattgagaacttattatttgtagatgaataaatttctggacatttgtataactatataatctaccagtggaaagagttccttatacca

SEQ ID NO: 319516 - DNA, 586 bp, Homo sapiens
cacactttttttctctccagaaaaacttcattctcctgtcatcctcacagagtaaaagcaatgcaaaaattaacttctgaatctctcagtctatactcattgttttgttgttgttgctgctgctgctgcttgtttcttttcatggggtcttgggaatgatattatcttctctagccaaaaataatctatacttctgctagtctgtgacagctttgcaattatattgctgttggattttttctcttattgcctcatgcatatatatcttggctctccttttcttcattcaaaagctaagctgtaaactacttgggcataaaaacatgccatgttttttgccctctaaattttctatcagcacatgagtttacagaagatcgggagaaaattctgctgaatctcccattgtttgaagattttaagtgttgtagccaacaataactcaccgattcattctggcttgtaaacattccatttcgccaccaaatgccaaatatttattgagaacttattatttgtagatgaataaatttctggayatttgtataactatataatctaccagtggaaagagttccttatacca

SEQ ID NO: 319517 - DNA, 580 bp, Homo sapiens
attgtcaacaaggctggagatagctgccttatactcttatagaataggagtccatcaatttatcatggccaacatctcaatttcaaaagccatactgaaaaaagtatataattaaaatggcaaatgattattactaatttttgtttccctttatcagaaacttatttgttccctcctaatgtccaagttctgtgatctttaagataccaatattaaaaaaatgattccagtagtagacaagagcctaaaagaaaacasgtgttcagtaatcttcagtaattctagttgtgggtcacttcacttctaagacctatacaggactacaaagcagctctctttgccctgaccatgtcaaatcctgaatgtgtattacgtttcagctgctaaacatgatgtttattacctcaaataatatttgatgcataaatgatttctttgccactcaaataacaatagaaatgagaaagaaactgagaataccataaaaggaatatagatattaagacagtctaccatatatgctaattcatttctactttactcatgtttatatgacctggaaaacacaagtacctatgac

SEQ ID NO: 319518 - DNA, 584 bp, Homo sapiens
tgtttgtgtctttgtgtgtgggactgtgagccaggtgtgattatgtttcattttctagatttgattaaactgatacatatatctgcaacttgttgaggatcacaaaagtaagaagtatcaggactaaattagaaccagaactatttagtcctagaatctaagttattacctgatgtattcatctgttttcacactgatataaagaaatacctaaaacggggtaatttataaagaaaarcagtttaattgacacacagtttcacatggctggggaggcatcagaaaattacaatcatggcggaaggcaaaacagaagcaggcacattcttcacaaggtggcaggagggagaagtgtgaagagcgaagaaggaagagccacttataaaaccatcagatctcataagaactcatttgctattatgaaaacagcatgggggaaccgtccccatgatccattcacctcccacagggttcctccctcgacatgtagggattatagggattacaatttgagatgaaatttaggtggagatacatatccaaaccatatcacctgctactctataaccaccaataataaagag

SEQ ID NO: 319519 - DNA, 584 bp, Homo sapiens
tgtttgtgtctttgtgtgtgggactgtgagccaggtgtgattatgtttcattttctagatttgattaaactgatacatatatctgcaacttgttgaggatcacaaaagtaagaagtatcaggactaaattagaaccagaactatttagtcctagaatctaagttattacctgatgtattcatctgttttcacactgatataaagaaatacctaaaacggggtaatttataaagaaaagcagtttaattgacacacagtttcacrtggctggggaggcatcagaaaattacaatcatggcggaaggcaaaacagaagcaggcacattcttcacaaggtggcaggagggagaagtgtgaagagcgaagaaggaagagccacttataaaaccatcagatctcataagaactcatttgctattatgaaaacagcatgggggaaccgtccccatgatccattcacctcccacagggttcctccctcgacatgtagggattatagggattacaatttgagatgaaatttaggtggagatacatatccaaaccatatcacctgctactctataaccaccaataataaagag

SEQ ID NO: 319520 - DNA, 593 bp, Homo sapiens
cacctgctactctataaccaccaataataaagagttgtgattgwtaaaaagcatcatttacatttatatgtgtgtgtgtgtctgcccgtatatacataattgccatgcattcatatgtataaatctcttcacttggaataatgaacagaataaaccaatgtgacaaaagttgtaatttctaggtagtaaaaattagtttattatcaattttatgttatcctttatatttttgggatttttttttcaaataatctataacaaacatactgcttttacttccacacaacatgtttgaaaaatctgatgtttataatatgaatataaatgttcaaagtgaaatggccaaactatctaatatttcaactattcactctgccactttatatgacccctttccttgtttaatgttatgtctttggcaccaatcaccattcgttcaatatgttatgcacgtcctttacttagtctttctctgccaccagaatactaacttcctgagtatcaaaattttttgtatgtttggtgtactgctctacttggaacagcacctggtgcatcctagcaaatcaataaatatttctttgataaagaaa

SEQ ID NO: 319521 - DNA, 593 bp, Homo sapiens
cacctgctactctataaccaccaataataaagagttgtgattgttaaaaagcatcatttacatttatatgtgtgtgtgtgtctgcccgtatatacataattgccatgcattcatatgtataaatctcttcacttggaataatgaacagaataaaccaatgtgacaaaagttgtaatttctaggtagtaaaaattagtttattatcaattttatgttatcctttatatttttgggatttttttttcaaataatctataacaaacatactgcttttacttccacacaacatgtttgaaaaatctgatgtttataatatgaatataaatgttcaaagtgaaatggccaaactatctaatatttcaactattcactctgccactttatatgacccctttccttgtttaatgttatgtctttggcaccaatcaccattcgttcaatatgttatgcaygtcctttacttagtctttctctgccaccagaatactaacttcctgagtatcaaaattttttgtatgtttggtgtactgctctacttggaacagcacctggtgcatcctagcaaatcaataaatatttctttgataaagaaa

SEQ ID NO: 319522 - DNA, 576 bp, Homo sapiens
ataattgccatgcattcatatgtataaatctcttcacttggaataatgaacagaataaaccaatgtgacaaaagttgtaatttctaggtagtaaaaattagtttattatcaattttatgttatcctttatatttttgggatttttttttcaaataatctataacaaacatactgcttttacttccacacaacatgtttgaaaaatctgatgtttataatatgaatataaatgttcaaagtgaaatggccaaactatctaatatttcaactattcactctgccactttatatgacccctttccttgtttaatgttatgtctttggcaccaatcaccattcgttcaatatgttatgcacgtcctttacttagtctttctctgccaccagaatactaacttcctgagtatcaaaattttttgtatgtttggtgtactgctctacttggaacagcacctggtgcatcctagcaaatcaataaatatttctttgataaagaaaataattgagatagtayaaaaagcactgttacttaattattcaggcatgaattaataggaaaatttatccagtgaagat

SEQ ID NO: 319523 - DNA, 508 bp, Homo sapiens
cccatataaaaccatcagatctcattaaaacttactatcaggagaatagcatggggaaaaccacacccatgattccattacctctcactgggtccctctcacaacatgtggagattatgggaactacaattcaagaytagatatgggtgagaacacagccaactcatatcagctatcaattgattcttaaggtttttagtcattcctagtacatatgctgttctaaatagggtaatttaattaacatccaagaacaaggtttaatcctcacatcaagagtagtctgactatgaagaggaaaagaatgttcacctgcttgatttcatttcctttttgtatactcagcagggttcaggaaattgaaccactgatggtaacaaattgaacatctttgagtatccgaggataactcccacatgatgattcagtgttacaccaaactgggaagattccaatttagaaagtaacagtaaacaatagagtattcaatagtgtttgaagaaaaaaa

SEQ ID NO: 319524 - DNA, 532 bp, Homo sapiens
ggacacaggccaaatccagaagattttagcatcaaaataaataatgctaataatggaacacaacccagtgaataagtaggaatatatcatatgactccatatttatagaaataagtatataaatggaggatgtgtgggctcctccttacrttacaatgctaaatggtgatgaaagatcacattttggcatccatcatagtgcttgttagttaatgtggaagtttcaatggaggctaaggctggagggaggaagtttaatgaggaacagaattttcataattcatattatctctcgacaaaagactagtcaattaccaaatgaaaagatggtggtttgtgataaaacatttcagatactaacatgaccaggtaatgtatattcgcatcaccatgttgcaatgggttgacgtcctgagcccactgatccaacgtactgagaagaatacaacattatttctgtagtatttgtgccaagaatgtaggagaaaacatcatattaacttaggttaagctttatcctatagaatgtaag

SEQ ID NO: 319525 - DNA, 346 bp, Homo sapiens
cattaaaatatattttaaccagaatctagtaatactttagtagatgaaccctttaaaatawctagcgttttattaggcaaaaaagaaatattttatatttaaaatttcattattcttcctaaagtgactgtaagtcctttatggataacaaaaatgttgtgtatgcttactgtcttggctttagattagctccacacaaaatagttggtatcaaatacacaacaaatgaattaatacaactttattagaaatcttttatctttataataccccttaaatatctaataatagctaaaatgtactaagcatttaaatataacaggcaataatctaagtatgttgcaag

SEQ ID NO: 319526 - DNA, 346 bp, Homo sapiens
cattaaaatatattttaaccagaatctagtaatactttagtagatgaaccctttaaaataactagcgttttattaggcaaaaaagaaatattttatatttaaaatttcattattcttcctaaagtgactgtaagtcctttatggataacaaaawtgttgtgtatgcttactgtcttggctttagattagctccacacaaaatagttggtatcaaatacacaacaaatgaattaatacaactttattagaaatcttttatctttataataccccttaaatatctaataatagctaaaatgtactaagcatttaaatataacaggcaataatctaagtatgttgcaag

SEQ ID NO: 319527 - DNA, 591 bp, Homo sapiens
aatgtggaaacaaaacagtatagcaagaaacttaggaacatttactgagagtgtccggggtcaaatgccagctccactactgtctctctgatcttggactgacttaatctctcagtgtctcaatttcttcatcaatacaatggggatattaatcataggtacctaccttataagaawtttgtaaagctctaggctgagtgactataactaagtaactaactgaatgaatgaaagaatgaataaataaatgaataattcccagatatgacacatatttagcacaatataaatatatatatatgccgttttagtcaatgtgatctgctcattttcaaataataaagatctcttttcaaatggatgattatagataccattctttagagactttatgaactatataacatttgaaaagaattttttgattcctatgaaaagtcttacattataatcatgaatatgtattaagtaccacatgtttgctaattttgtctaaaagttgaatatctcaagttacattttatggtgcttcattattcattgtgcagtttttgaaaaggtattattttctttttgaataaaagattctaa

SEQ ID NO: 319528 - DNA, 725 bp, Homo sapiens
gttctctcttttattaagtgtcttcgaactgttagagtttttagaaagtgattttgtggctagaagaaaatagtgtgtgaagctcttggagtattaatagaaatgccttttaagctccttttagtgaagctttacaaaactatacactcaaattatgcctcaaatatttcttttgtattggatagatattaagctctaagtaattgaaaacagatttttccccctcctccttttagagggaaaattgttcctggtttactcttcagtgttaatttattctattttattggtccaagtacctgtgcccttcttytcttctcctccatctgaccccctcccaaaaaacttgatgtggctagacaatttcatcatcacttcttaaaacaacatcttcaatatccaccagtgtatttggtaagataaggaagttggcatttatggaaaaatcttatatgcatagaacactagagcatcagagtaccatcccagtttatctgagagatgaagccattcataatcattaataaggatatgaacttcataatgtaagcacaagaatgctcacagctacatagtttaaatagaaaaaaggaaataaatgtatatttataagacactggctgaataaattatattacataaatatatagtgaaccattacacagttactgaagttgatgatattgaacaagcaagacttgtgggaagtacaataaaggcaacat

SEQ ID NO: 319529 - DNA, 395 bp, Homo sapiens
ctcccaaaaaacttgatgtggctagacaatttcatcatcacttcttaaaacaacrtcttcaatatccaccagtgtatttggtaagataaggaagttggcatttatggaaaaatcttatatgcatagaacactagagcatcagagtaccatcccagtttatctgagagatgaagccattcataatcattaataaggatatgaacttcataatgtaagcacaagaatgctcacagctacatagtttaaatagaaaaaaggaaataaatgtatatttataagacactggctgaataaattatattacataaatatatagtgaaccattacacagttactgaagttgatgatattgaacaagcaagacttgtgggaagtacaataaaggcaacattatt

SEQ ID NO: 319530 - DNA, 725 bp, Homo sapiens
gttctctcttttattaagtgtcttcgaactgttagagtttttagaaagtgattttgtggctagaagaaaatagtgtgtgaagctcttggagtattaatagaaatgccttttaagctccttttagtgaagctttacaaaactatacactcaaattatgcctcaaatatttcttttgtattggatagatattaagctctaagtaattgaaaacagatttttccccctcctccttttagagggaaaattgttcctggtttactcttcagtgttaatttattctattttattggtccaagtacctgtgcccttcttctcttctcctccatctgaccccctcccaaaaaacttgatgtggctagacaatttcatcatcacttcttaaaacaacatcttcaatatccaccartgtatttggtaagataaggaagttggcatttatggaaaaatcttatatgcatagaacactagagcatcagagtaccatcccagtttatctgagagatgaagccattcataatcattaataaggatatgaacttcataatgtaagcacaagaatgctcacagctacatagtttaaatagaaaaaaggaaataaatgtatatttataagacactggctgaataaattatattacataaatatatagtgaaccattacacagttactgaagttgatgatattgaacaagcaagacttgtgggaagtacaataaaggcaacat

SEQ ID NO: 319531 - DNA, 395 bp, Homo sapiens
ctcccaaaaaacttgatgtggctagacaatttcatcatcacttcttaaaacaacatcttcaatatccaccagtgtatttggtaagataaggaagttrgcatttatggaaaaatcttatatgcatagaacactagagcatcagagtaccatcccagtttatctgagagatgaagccattcataatcattaataaggatatgaacttcataatgtaagcacaagaatgctcacagctacatagtttaaatagaaaaaaggaaataaatgtatatttataagacactggctgaataaattatattacataaatatatagtgaaccattacacagttactgaagttgatgatattgaacaagcaagacttgtgggaagtacaataaaggcaacattatt

SEQ ID NO: 319532 - DNA, 492 bp, Homo sapiens
catgaaggcagagccctcatgaccctcttaaagttcctatttcttaatactgttaatattggttattaaatttcaacatggcttttccagggaatttaaatagtagcacaaacattgatttctgatcctttaagagtcaagggaaggggtagggcatattttacttcactattacttttatrtgatagcatacactttctagttttggcaatggtttgataccaaccctttctctgtgggaagtgttttcactgttttttaagaaacccctctcttctgcaatctctgtggatctcttatttgcagatggtaatacattcttgttcgttgtttagaactttttcttttggctcctggctacttgtggtccatctttgagagaccctatctctatttaagacactcatgatagctcttttatgtgtagccaacatctaacccaatggaaacactcatacattctctgtcctgagaaactcaggatcacaggct

SEQ ID NO: 319533 - DNA, 575 bp, Homo sapiens
taaggtacaaaagtacagtaaaagtgataatgagaaaagaaactctaagtactrctataaaatgacctttatcttgaatttttgtaggaattggcattacgtttttgagagagaatgaaagagagagaataacgggattaattgaaaagattatgtggcttgtaaccactctgtaaactttgagattattaaattatttggccttggttcaagccatacctctgttattcactagctgagtaaccttgtataacataatgactgtccttcatccttaaaataggaataatggtacttgggtaaatggatggttctgtaatttaaaagcacgtgaaaatgctttgtaaattctataactacataactaaatccagtatccatatctcttgagaatcataataggcagtgatactagttctgctgttaatatgcagaaaggcaaaggttggactaaatgcttttgaaagcatcttctaattctaaaaagccatggctgattgaagcaactggatacacgtgtcctttcaagattattccaggcctctttgctcctagctgtctttggcactgatcat

SEQ ID NO: 319534 - DNA, 572 bp, Homo sapiens
tttcaactggtattataatgttttatttttagcytgctttcctcttatacaaatgaaaattatctggcattaaaaagaaataaatcaaaacactggaataacagaatttcaagactgctctgagaaagttgtttgtttcataaaaatgggaatgaagttctctatataaaaaggaaacatctttgaaagaatgtcacaatattttgtataatttttgtcttaattttatttaattgacacataataattgtaaatattattagggtgcacaatgatgtttcaagacatataatgtacagtgatcagatcagggtgattggcgtattcatcttctcaaacgtttatcatttctttgtgttgggaacattcagtatcctccttctagatatttaaaactgcaaaatataaaaatgcccactgtagtgatcctgcagtggtatagaacacaagaactgattctacctaactagctgtaattttgtatcctttaacaaatctctccatatattcttgagaagagatgaagacacagtaagaattttttttgtccaatctcttgtggagtgtgacac

SEQ ID NO: 319535 - DNA, 572 bp, Homo sapiens
tttcaactggtattataatgttttatttttagcttgctttcctcttatacaaatgaaaattatctggcattaaaaagaaataaatcaaaacactggaataacagaatttcaagactgctctgagaaagttgtttgtttcataaaaatgggaatgaagttctctatataaaaaggaaacatctttgaaagaatgtcacaatattttgtataatttttgtcttaattttatttaattgacacataataattgtaaatattattagggtgcacaatgatgtttcaagacatataatgtacagtgatcagatcagggtgattgrcgtattcatcttctcaaacgtttatcatttctttgtgttgggaacattcagtatcctccttctagatatttaaaactgcaaaatataaaaatgcccactgtagtgatcctgcagtggtatagaacacaagaactgattctacctaactagctgtaattttgtatcctttaacaaatctctccatatattcttgagaagagatgaagacacagtaagaattttttttgtccaatctcttgtggagtgtgacac

SEQ ID NO: 319536 - DNA, 562 bp, Homo sapiens
tgtacacctcttcagcttggaatttcactcctatttaccacagatactctgttacctggcaaaactcaaactggctcgaaatctggtgagataaaattctgcccaacctcacctttttttcgctgtctcatagccccatgttactttccttcatctatcattctttttctgtgatttttgcaaggcacccttttgcactaaagtctttaaactgtaggtcacctctctyaggggcattttcattccaaaacaggaccacggggaaggatggggctttcaatgataaagtacctttgccagaatctttcttaaagaatgctaccctccatttaagaggcttcagttgcctttcaaatacacacacaaagtccattaaatatgaacttttcagcatgactttaaagaccctaatgatctgtccttgtgcaccatttcaagtttcctcactacattctatgtactacagcactcaacatctggacttcgttctgtctctgtgggaggcccatatctgggagtggcagggagctcaggcttcagaaacagatggagttcaattata

SEQ ID NO: 319537 - DNA, 579 bp, Homo sapiens
gccatgctttttgtctttttttccgaatgcttttaaatgccttacattgcatgcatttattgacagtttttttccatttgtatgtgaactacatgaaggagggattgtgaytgtattgctcatcctcttgatacgataggatgagcacagtgtctatcacatagtaagtgctcattaatgcaaatattttaatgaaagaaagaatgaattagaacatgaaactacattaagtaactcagtcttcataaaactctatttaggtcacacagtgtgataagttttaccttctattttgctagactccatattgatctaagaattctgggcttacatagtttatgaggccagtttaatgttctattcacaaagtctaatcactttggaaaactactgcttcctgagacaaatttactccttatctggttcacagaaaacctctacctcctttctttatatttgattccatttaaagaggaaaaaatattctagtgagtaagagtattgaaaagattagaattaatgcatgcaacgttcccgaaatattgttgatactcaataaaacctaacagtgctagtagc

SEQ ID NO: 319538 - DNA, 526 bp, Homo sapiens
accctctataaatgtcatgcataactgattataaagaacaaatcattgtgacccagaacttataaaacaagacctaacactggcaaaattacatatgcaactttgagaaaataatttactttctcttactatcattttctttatgaattgaatgtgcaggttatatcagtagttttcaaatttagagagcatgagtgtgtgtattacaaattcagattctcggacccttccctgagagaagtagttttcctgagaaagactgaggaatctgccttgtaatacatactacaggtggccttggatctcactctgaaatttcataaggtgtsctctagctccacaatttctaaaagcttttttttcattctctaagcattgtgtttccagtggtatttttacattttaagccctaatggcacaatcactgaagtggatcaaactgagaatgcttttaggcaccatgtttcatcactcagaactgttgctaaaagactattgtcacagtccatttgtggtgctataacag

SEQ ID NO: 319539 - DNA, 578 bp, Homo sapiens
gagtaagttatgaaaatctaatatcaacatggtgactgtagttaatattactgtactatatacttgaaatttgctaagagggtggatattaaatattctcattgcaaattatgtgaggtgacagatattttaattgcttgattgtggtaataattttacaaagtatgtgtatgtcaaaacatataaaacaccctaaatatatatacaatccttatttgccaattatacctcaataaaactagaaaacaaaaaaataaaaaaaataaagtgataaaagtgtgaaatggtgaaaccaaccagttagtggatattattcagataaacagcaaaagcctttttccatggaatggatcatctttaatctaatttatttggagtgagtaygggaactactggcattttataaatatattagttacaaagttgtcttagtctatttgtgcagctatagcaaaataccacaaattgggtagtgtataagttatagaaatttatttctcaagattctgaaggctgagaagtaagatcaaggtgccagtaggctcagtgtctaataaggtctggtctgcttccaagat

SEQ ID NO: 319540 - DNA, 539 bp, Homo sapiens
gccagtaggctcagtgtctaataaggtctggtctgcttccaagatggcatcttgaattctacatcctttggaagggacaaatggtatggccttgcataggaaaagggcagatgagcaaaacaaaaagcggtcaaactagttctctttagccccttcagaaggcactcatcctatatgaatctaccctcatgggttaatcacctcctaaaggtcacatctcttaatatcattacatttttgttaagtttcaacaygaattttggaggcgacacaaacatgagaccatagcacatgcatttagcctactatatagcagtccctataggaggtaatattcatacagagttgctaatcctcatatttctgccaacaagataggtaccttagctccaccactcccggttgtgtcaccctgaactctgatttaacttctctgcccttcaatttcctcatctgttttgatggttaatattatgtgtcaacttgactgggttaaaggatgcaaagtattgttcctgggtgtgtctctgagggtgttg

SEQ ID NO: 319541 - DNA, 539 bp, Homo sapiens
gccagtaggctcagtgtctaataaggtctggtctgcttccaagatggcatcttgaattctacatcctttggaagggacaaatggtatggccttgcataggaaaagggcagatgagcaaaacaaaaagcggtcaaactagttctctttagccccttcagaaggcactcatcctatatgaatctaccctcatgggttaatcacctcctaaaggtcacatctcttaatatcattacatttttgttaagtttcaacacgaattttggaggcgacacaaacatgagaccatagcacatgcatttagcctactatatagcagtccctataggrggtaatattcatacagagttgctaatcctcatatttctgccaacaagataggtaccttagctccaccactcccggttgtgtcaccctgaactctgatttaacttctctgcccttcaatttcctcatctgttttgatggttaatattatgtgtcaacttgactgggttaaaggatgcaaagtattgttcctgggtgtgtctctgagggtgttg

SEQ ID NO: 319542 - DNA, 602 bp, Homo sapiens
attccaaacttcaagtcatatacttcagcaaaccctatgttgttaactcagtatattaatatttcctcatcyctttgtgaacataaaacaggaaaatggatgtgatggaacttcgccaatgacaaagtatgacgtaaatgctatgagtagcttcttagttctgggaaggcaaccccctttcatatctcagtgtgcatatgctagttagatttcctttaggaacatactgttatttttatatgctaatcaactcttgcctttttttctttactttatgaaccattgcttcttcatcagcaacatttcctgggtcgacagcacatgtttttaattgttgtttaaaataagcaccctctacatcaacaagaagttagaaagggtgtgaaactttaaaattgtgcatacatccaattacccactattcaaattgttatataaacaatatatgtacctggaatattatttatatataaagccagaattggaacatgaataaaaggataacagttattagaaattccctgttctttttcacccatttacttttatatagtaaaaatcattgtcaccctctgatcctttattcttagcctcattctgtg

SEQ ID NO: 319543 - DNA, 550 bp, Homo sapiens
acacaactttaggagttatttttaggaaatgcctttggtcagcctagtaactgtctaagagtacgatgataagaaatgtaccacaaccaatacaatgcatttgcaaaatacttccagtaacgtaactttcaggcaatccagttttaccctcaaggaacctctctcctcagcaggccaacygcatcttggttatagtgaggaggtgaatatgggagattcatgctttggtgaacctgtatcctgcagctgctgcaggcttcctacatagctgttgcactgaaaccagtcggaatttaaagtaattgctacttgcagtgcagtttaagaggaaagaataaccaaacggacagccaggatggttgtactaatacgctacaggttaagaatattatttcacgcttctgtaacttttgatgaactgcagagtcaggaggaaacatggaggtcattctgccagatgttttcatttcagatatacggtgaatgaagtcacagaagggacagggaactacccatgatcaagttcagaaataataaaaatctgccctga

SEQ ID NO: 319544 - DNA, 641 bp, Homo sapiens
cgattccctaaaatcctaaatgcttgatgttacctaaagtcttttkccagaatttcatcactaataatttatattacatgtcaagtatttccttctatagaggattcatagtaagagatcattgtatttttatatggataataaggaaaatacatttttaaaatattatctgctgcatcaatttgcattatttcatttttggttcagcgggtaactgcaaaaattcctttgctcttatttttatcagtgactttaaaaatatcactatcagctaagagagtgtgaaacatttattgaggacaattacaatcattccataatgttttcctcttttaaaagtagagacttaacatctcttttcaaattcagcattagctaagttagatttattgtgcagttaaatttgccaattttcttgcctttccttttgctcctcaaaatgatcttgtgcacttatttacataatattccctttgctgtgtccactggagaaaagtcctgagattaaaagcttctgcttgccctaattctctctacataactttcttttgtctcattttttttctttctgatatcttggcatgtaaatgttgaatcatatgctaaaataaaaatttcgcaaaaactattttaaaatccaa

SEQ ID NO: 319545 - DNA, 593 bp, Homo sapiens
caatttaagatgctgttttagtgattccagtaagaaatgtgttgcgtaagtagaattcacatatgcygggatgagaccaacaggtggcattttttctacttcctatctagtttgaaacagatacatcttatgggaggtaaacttgcccctgctggcacatggctgaaagccacagatggagtcctgacatggggcacagaatgtgtgtatatgtctaaatatcctctactggaagaaaatcatagccaaaaagatattattaaatattcaggagtgtcaattacataaaagaaaatatgattttatgaatattatccaggacaacatctatttaactgtgatgctttagtatttgtatttatttcttttatttaagctctttctacacattttatcacccttcattgtcttattgtcctgtttttatttcttgtataattaataatttagaggtataatgtcactacttaaaaatttagttgatttttataaacactataaacttaagattattttataatgctgctttaagactttgctgtccaattttatcgtgtttttcttctaaaattatttaagggtaaatattcttt

SEQ ID NO: 319546 - DNA, 496 bp, Homo sapiens
tgatgctctgattagccagatctaaacggtgtgtcagtaatgacagcagaattgagtgaaataaatagcaccrgaagcacacgggcacacacagaagcagagaaagagaatctgggggtcgttactagactgataggatcaatagtcaatactaaaatgatggagagtggatgctgggctgtgaaaatagcagacaccaccaaaatgtcttacaaggaaaaccatatattgaattaagctcagtgtttgtccaccaattcatgcttggaaatgcaatacatcttctttatatattaaacccatcttttattcataaagatatctttactgggtatttttttgatcacaggcaaactaacacactttaagaagattgtccaaaactcacagtccagagatgatgtagtatgaagttcaaggtacaagtaggaaaaagaaataatctggaaagttttacagaaagatgatattaagccaagaaaaaattattatctat

SEQ ID NO: 319547 - DNA, 573 bp, Homo sapiens
ttaaaagcaagattatttaattaaagttctttagctaaaaaggagacaagaaaggaaaatcttcaaacattgatgtggtttcttgtgttaattctctcactgtatattagtccttggttattggactagatgccagaaagcacttcaacaccaccttgaaatctgctgcactagaacattcaccctatgtcctgagatctgacctccagagttacgcaggtgaaaagctaacctctgacctacagtatgactttagaaaacagcattaactcctgcctccatcctcaaaggagggatgaggacctcctcatggtttttccatttgggggaaatatccattttaatggattgctttgaattacagatgtgtttgtaggattttataaactatgggcttcagcatttagtcaaaagaaggtcaggcacctcatggctaccaaacagaaagtgaataaaaatcctagaaacattattgtagatktttttagatttctctaaagaatcatatttcactctagtgagagtgtagccatgaaatactgtagcataaaaatgaaatatgtctttattttc

SEQ ID NO: 319548 - DNA, 567 bp, Homo sapiens
atgatttctgtggggtgctctgtcgtaaatcctgtgaaggcatgcaaaacatccatgctcagttttctttagcagaaatttattgtttgaggcwtgatggttttcacagcttgtcctgtaacaacaatgacagctcaatagtgtaatccttccagacttccacgatattttctctctctcaattctatttcagggcattgactattctttccataaaattacatgtgtaatgagctttaaaggtccttatgatcccctgatccagaggctgaaataaaaacattgtgtatgggggcaaatagaccacttggatgctttcggtgatgaactcatgggggctctggctggtcagggcattgtccaatataaaaaaaaaaaaaaaaatctctttaaaaggcaatcccttactgaaaaggtacttcctgattttaagaaaaaagcattgatggaaccaatccaaaaaaagggttcttattgtccaggccttcttgtcatacaacgaaaagactggcagctggtgcttattattttcccttcagacactggagttagcagctttatatttat

SEQ ID NO: 319549 - DNA, 590 bp, Homo sapiens
ggagttctggcctgggtatcgataatgggcttcttttaccaaatattgatggaactcttaccatattttacattctaaaatttagaatctataagctaagttaagcttaatattataaagatggccaataaattcctgtccttaagaggatcacagcaatgattataacagacattaaataaaccttttaacctaacttttacttatcacatgtttatggttaacccctcagacttcttgaagatcaggttttggatgaatcttgaaacatagcaaaagcactcatttattttatttactcattcaacaaattttacaaggcactgtggaaggtacaagggttgtggtaaaaaacatcagaaatgttatttgctctcccaagacgtcacattcttatggtgaaactgttggggaaacatacattaacagtggagtgtaataaggacactgacggggtgtacaccaggtaayacagtcatgtgggaaagaagaacccttgcctaagatgaggaaatggttttttgggaaaaggttgtggttgatgttgtgaaattgttgagtttttgcttgtttggcttcatttcgaaact

SEQ ID NO: 319550 - DNA, 467 bp, Homo sapiens
atgtcaaacttatttgataaaatgctttcacctccttttacaaagctaagccattactcttaaattttcagaaatatattcactctttgttcttcaaattggcaaagtctattgagattcagacaaagtaaaggttaaggcccatctaaaatgaaacagtttgccttggtgtgccctagtgactgtcggttgtggaataaagtgtgatgcatgggatcattatggcyagccatgggtcaagtcatcggagaaggctgctagcactggtgggtagtccagcgagactcatggaagcctctgaaagggaggaaatttatacagtgggaagaacaaggaaaggtaaaataaacagggcattgatcaaagcaatcaggtgatgatttttttaaatgaggcaaaattgtttttagcctctccggatatgtttcttgtcatggtcagaaaacctttcagggcatggctaacat

SEQ ID NO: 319551 - DNA, 467 bp, Homo sapiens
atgtcaaacttatttgataaaatgctttcacctccttttacaaagctaagccattactcttaaattttcagaaatatattcactctttgttcttcaaattggcaaagtctattgagattcagacaaagtaaaggttaaggcccatctaaaatgaaacagtttgccttggtgtgccctagtgactgtcggttgtggaataaagtgtgatgcatgggatcattatggccagccatgggtcaagtcatcggagaaggctgctagcactggtgggtagtccagcgagactcatggaagcctctgaaagggaggaaatttatacartgggaagaacaaggaaaggtaaaataaacagggcattgatcaaagcaatcaggtgatgatttttttaaatgaggcaaaattgtttttagcctctccggatatgtttcttgtcatggtcagaaaacctttcagggcatggctaacat

SEQ ID NO: 319552 - DNA, 528 bp, Homo sapiens
tgcatggtgcctaatccttacttccttggcagtggggacatttatattggggttgagagtcagtgtttgagtgagtaaaggaagagggtctggaatcacataccttggttaagatcaggatcttttcttgccctagtttctggttgttttcattgttcccttctaaagtgttattctccttttccaacaatctcaggcccccttaaggactgttccatgcggtgatatctctttcttgagattctgttygcttattgtctcttctcatgtactactttggcagtagtcaagtgatctaatacttgtagcataggataaatcacaaaacttctttaaaatttcaatgtcttcacttgtaaaaagtagtaattgtacttcacaggcatgctgtgaagattagataatatttatgtgaaagtggtgtgtaaactgcagacatgtaatataaaaatattatcattctggtgtctgttgggaaaagaagtcttatatgcccagtctttcaaccctggctcagccacagaatag

SEQ ID NO: 319553 - DNA, 538 bp, Homo sapiens
ctggaacacttccttatcaagagataaagagcccaaaaagcctgtgccagaattatccctttgtgtggggtatcttgscctgtttcagactcagggagtgttcctttgttctgcttaagtttgtacatcaaaaaaaaaaaaaaaaaagcactttaaaattttaaatcccttcatggccatcagacagggccctaactgtcagcatgaaagaccctatggggttagggtgaggtccttttactgtggtggcaaaccggttgccctgttccagatgccagggtaacgtgttagccatgagggaccaacaccatactattggagttggtcttgctttgtatattctctatgtaagtaagagtaattttctttatgtaagttatgtttcccttggcaactctgataccaagaggcaatggtcagaagtgcttggagtcttcatctggcactgataaatggtgcatagtgttctgctcattagtatccttctactagtgattaaatattatttacttttataactttttttttttatggagtc

SEQ ID NO: 319554 - DNA, 625 bp, Homo sapiens
attaatatttattgatattaatgatctagattttgatgattccttcaattctatattccttttaggtaaaatatgcatctaatcaataatcatcagacaattttgatctgcattgttcacattttgggatggataatttttttgctgggggttgttctatgagttgtaggatgtttagcagcatttctagcttctactttctagatactggcagcatctgcctttcctgtggtaacaaccaaaaataaccacagatattttcaaatattccctgcagagcaaaaatcctccaarctgtgaaccatttatttaaataatgtggaataaaaaaaaagacacacctattttaaatttaccctgtaaaagtagaagtttagaaaaagggggcagaaaaataaaatagcttaattgtgtacgttgtcacagggatggtggcgttagttgctttcacatacattatttcatgtaacctgttaagccactatatcagctgtttttattatctcaagtttatattacaaaaatctcatagggtaggagtaataagtatattgcctgtagaataagtattcaggctcttgagattaaggtgacctggtctaacttatatagttagtaagtggga

SEQ ID NO: 319555 - DNA, 625 bp, Homo sapiens
attaatatttattgatattaatgatctagattttgatgattccttcaattctatattccttttaggtaaaatatgcatctaatcaataatcatcagacaattttgatctgcattgttcacattttgggatggataatttttttgctgggggttgttctatgagttgtaggatgtttagcagcatttctagcttctactttctagatactggcagcatctgcctttcctgtggtaacaaccaaaaataaccacagatattttcaaatattccctgcagagcaaaaatcctccaaactgtgaaccatttatttaaataatgtggaataaaaaaaaagacacacctattttaaatttaccctgtaaaagtagaagtttagaaaaagggggcagaaaaataaaatagcttaattgtgtacgttgtcacagggatggtggcgttagttgctttcacatacattatttcatgtaacctgttaarccactatatcagctgtttttattatctcaagtttatattacaaaaatctcatagggtaggagtaataagtatattgcctgtagaataagtattcaggctcttgagattaaggtgacctggtctaacttatatagttagtaagtggga

SEQ ID NO: 319556 - DNA, 625 bp, Homo sapiens
attaatatttattgatattaatgatctagattttgatgattccttcaattctatattccttttaggtaaaatatgcatctaatcaataatcatcagacaattttgatctgcattgttcacattttgggatggataatttttttgctgggggttgttctatgagttgtaggatgtttagcagcatttctagcttctactttctagatactggcagcatctgcctttcctgtggtaacaaccaaaaataaccacagatattttcaaatattccctgcagagcaaaaatcctccaaactgtgaaccatttatttaaataatgtggaataaaaaaaaagacacacctattttaaatttaccctgtaaaagtagaagtttagaaaaagggggcagaaaaataaaatagcttaattgtgtacgttgtcacagggatggtggcgttagttgctttcacatacattatttcatgtaacctgttaagccactatatcagctgtttttattatctcaagtttatattacaaaaawctcatagggtaggagtaataagtatattgcctgtagaataagtattcaggctcttgagattaaggtgacctggtctaacttatatagttagtaagtggga

SEQ ID NO: 319557 - DNA, 625 bp, Homo sapiens
attaatatttattgatattaatgatctagattttgatgattccttcaattctatattccttttaggtaaaatatgcatctaatcaataatcatcagacaattttgatctgcattgttcacattttgggatggataatttttttgctgggggttgttctatgagttgtaggatgtttagcagcatttctagcttctactttctagatactggcagcatctgcctttcctgtggtaacaaccaaaaataaccacagatattttcaaatattccctgcagagcaaaaatcctccaaactgtgaaccatttatttaaataatgtggaataaaaaaaaagacacacctattttaaatttaccctgtaaaagtagaagtttagaaaaagggggcagaaaaataaaatagcttaattgtgtacgttgtcacagggatggtggcgttagttgctttcacatacattatttcatgtaacctgttaagccactatatcagctgtttttattatctcaagtttatattacaaaaatctcatagggtrggagtaataagtatattgcctgtagaataagtattcaggctcttgagattaaggtgacctggtctaacttatatagttagtaagtggga

SEQ ID NO: 319558 - DNA, 509 bp, Homo sapiens
tgaataagaaaattcagaaattagaaaaggcagtggggtgccacwggaccattctacttgtgattagtaaaagtgtgttttgccatgcctggcagctcatgcctgtaatcccagcactttgggaggctgaggctggtagattgcttgagtccagaagttcaagaccagcatggacaacatggtgaaacctagtctctacaaaacatacaaaaattagctgggtggggtggtgcatgcttgtagtcccagctacttgggaggttgaggcaggaggattgcttgaactcaggaggcagaggctgcagtgagccgaaattacaccattgcactccagcctgggtgacagagtgaaactctgtctcaaaaaaaataaataaagtgtgtttgtaatgataatcagataagtctccttagggtctggaaatctcacagtaaaatcaaatgaaagaagtgtctctagacctcatgaatacccccaaataaatgatataagaaaggttaaatggtca

SEQ ID NO: 319559 - DNA, 585 bp, Homo sapiens
ggcttgtatagattgccattatttttctgtatacaggttgtaccaaattacacttcccytagtgaattatgagaaggcctgtttccctacagtgtggcaatccacagtatacaatcaagctttttgacctctgccaatctgagaggtaactatgaaaactctgtgccattttagtttacattccttttatgaagtgtgaggttgaaaagattttgtgtgtttaagcaagagtcatatttcctctactgtgaactgttggttcatatcttttgcttatttgcttcctgaactcttggcttatttcttacagggtttagaaccattgtctgtgatatgattagcaaatgctccccagagttctgagactgtcttatggatttattgtgtttttccaatataaatttcagaaaactttttagtggaatttatctatgttttttcttacttttcttcacctctggacatcgtgttatactatggaaaatattttaaaagttgaccaatctttttagtgtttatatttcatgtttaagtctggagtcacttagatgtgaactatggattaaacttcattcttttccaggt

SEQ ID NO: 319560 - DNA, 585 bp, Homo sapiens
ggcttgtatagattgccattatttttctgtatacaggttgtaccaaattacacttcccttagtgaattatgagaaggcctgtttccctacagtgtggcaatccacagtatacaatcaagctttttgacctctgccaatctgagaggtaactatgaaaactctgtgccattttagtttacattccttttatgaagtgtgaggttgaaaagattttgtgtgtttaagcaagagtcatatttcctctactgtgaactgttggttcatatcttttgcttatttgcttcctgaactcttggcttatttcttacagggtttagaaccattgtctgygatatgattagcaaatgctccccagagttctgagactgtcttatggatttattgtgtttttccaatataaatttcagaaaactttttagtggaatttatctatgttttttcttacttttcttcacctctggacatcgtgttatactatggaaaatattttaaaagttgaccaatctttttagtgtttatatttcatgtttaagtctggagtcacttagatgtgaactatggattaaacttcattcttttccaggt

SEQ ID NO: 319561 - DNA, 456 bp, Homo sapiens
ttagggcaaagttctgtactttcctaaaatttcaaatttgggcaaaccaacatgggctatcttatttttccgcttggagaaaataagagatcttctcatttaatcatctactcatattttaaagtcttggaaacttagaacaccctaaatttgtctatattagatcagagtcatgattttctcagcccaatattgtgtctgcaataaaagaaacaagtgaagcattttgcctacctgcatatcagcctcaaggtttaggtatgttcacaaaatatcygtgtgcctagcacagtgcttagaacaaaacagaaaaacaaacacttaaaaaatatttgttagaatgaaataaaattcttatttccaagaatagtatatgcatgtattttcccaaaattgttctaaatttcattctgttttctgtctgaatctactatgaaattatgctgtctcatgtat

SEQ ID NO: 319562 - DNA, 583 bp, Homo sapiens
ttcacataagaaaatattacataacattgacatttaaaatattgccacacttctaacactggttaatctaccttctatttaggtaaatggtattacaatcatgacaaaaagtctctcatctttaaaatgcattatttccctctcattaaagcatccttcttgtcatggacaaaagaaaccatagcctgaattttgtaataataattttcttgtcttatgatttttagaatatgttgtctacttttgctaatttttcaaaattttataaatgggctcattctytatgcatttacttgtgcattactttttgttcaatgttatgatttaattttatgctgtttcagttatgagtctaaagtataggttcatgaatacagacttcattctaggtgcttgagcctaacactgatttattgattgattcattcattcattcatcaaaaagttactgagtatcaatctgagctatgaataactttatacaaataatattaaaaacttaagagtgacagataaattcccagtataatgttttggtgactacatcatagtcaccaaacctgaaataatgaaaaatagaaaa

SEQ ID NO: 319563 - DNA, 583 bp, Homo sapiens
ttcacataagaaaatattacataacattgacatttaaaatattgccacacttctaacactggttaatctaccttctatttaggtaaatggtattacaatcatgacaaaaagtctctcatctttaaaatgcattatttccctctcattaaagcatccttcttgtcatggacaaaagaaaccatagcctgaattttgtaataataattttcttgtcttatgatttttagaatatgttgtctacttttgctaatttttcaaaattttataaatgggctcattctttatgcatttacttgtgcattactttttgttcaatgttatgatttaattttatgctgtttcagttatgagtctaaagtataggttcatgaatacagacttcattctaggtgcttgagcctaacactgatttattgattgattcattcattcattcatcaaaaagttactgagtatcaatctgagctatgaataactttatacaaataatattaaaaacttaagagtgacagataaattcccagtataatgttttggtgactacatyatagtcaccaaacctgaaataatgaaaaatagaaaa

SEQ ID NO: 319564 - DNA, 583 bp, Homo sapiens
ttcacataagaaaatattacataacattgacatttaaaatattgccacacttctaacactggttaatctaccttctatttaggtaaatggtattacaatcatgacaaaaagtctctcatctttaaaatgcattatttccctctcattaaagcatccttcttgtcatggacaaaagaaaccatagcctgaattttgtaataataattttcttgtcttatgatttttagaatatgttgtctacttttgctaatttttcaaaattttataaatgggctcattctttatgcatttacttgtgcattactttttgttcaatgttatgatttaattttatgctgtttcagttatgagtctaaagtataggttcatgaatacagacttcattctaggtgcttgagcctaacactgatttattgattgattcattcattcattcatcaaaaagttactgagtatcaatctgagctatgaataactttatacaaataatattaaaaacttaagagtgacagataaattcccagtataatgttttggtgactacatcatagtcaccaaamctgaaataatgaaaaatagaaaa

SEQ ID NO: 319565 - DNA, 543 bp, Homo sapiens
accactttgcctggaaatattgaaaagcaggaacccagtggtatggttgacttctctagagctactgacaataaaatgggctgcaacaaccaccacacacacacacamaaaaaaatcccagtgggattcttgttaatagggacatttaggaaagggtgggatgctcactcacccaggttattgcagaaaacatcctgctttgactgagaaattgtggaggatgcctaaggtcacttctgacatctatggaactgtaaagtctgtttcccgtggggtatagttttgtcatattgtgactatgtatttgtgtatgtattgtgtatgtatatttgtcttcctattagccaatgctctgtcaacccacggttgttttgagaatcaaagagataacatgcaggaggatgaaatgggaacagattaacacaagatgctcacactgcctagtaatcatagctttctccctatttctgtccctgtcatcgggcacagctattctattaaatagctgctctcaatacacaatggaagtgcttattttaatgt

SEQ ID NO: 319566 - DNA, 473 bp, Homo sapiens
aatgccttggaaagattagttcaagaacaagaaaaagctttaaaacatatacttaatttatcctcaacaatatttagataagaaatctataaaacaagaagagtcactatgaataagtaagtatcaagaagcatgaaacacctataagaaatttaaaataaatatttttaattaaaaacatgatttatgagataaaawcctgtacatcacttaaaaattaagacaaaaagaaaaaaaggatatttgagaggaaagacacaagacagaggatcaatttgaaggtcaaatatcaaaatatgaggagttccccgagatcaagtttggaaatataaataattgaaaagtaaatcaaaatatccttttcttttttcagaaaaaaaggatgtgcttcagctaaatgagacagcaattcaataaagaaggcatggaattcaaatatcactagtttcaaactacaaagtaatttggtaaaa

SEQ ID NO: 319567 - DNA, 586 bp, Homo sapiens
aggaaatatcagatgaaagaaataagcttgaacaatgataactgtaaacttctaagtaaatctaagtaaatattggctgcatactataatarcaatttttaatttatgagtttagaattcaatttcttttaaaaaatcaactgtctctaagtgaagggtaaaggaatcagatttaaagccttttgagagtcatttattgtaaaggggatagataatgatatttataaacttcattaaattacatatgcacgtaatgctgctagacttacccctttatagatgggaaaatgtgcataacttctaaatgagtggagaaatagaggggaatacaaggaaaacaaatcacactaaacaactcaaataaatatgagagagaagcaggacaaatacaaataagaaattaatttgttagataaataaataaaaaatgtttatcgtcagaacaatgtaacatcaactagtttgtacagttcagggacaaaagtagacagattggattagaaaaattatccaagtacatgctatttaaaatgtcacacctgaaataaaggctgaacataaaagactaaaaaaaaattcaacaatt

SEQ ID NO: 319568 - DNA, 571 bp, Homo sapiens
tgtatattatatattttcttactgttgtggtttttaaaaaaattttcttgaaaatgttttccaaagagcagatgaaagcttctaatatgaaagatagggatcaaaacatataaatgttaaagtgacttgagagaacagaaatcaatgtaggcagatgaaaatttaaaaaaaaggtcattaatattctcacagcaatgagaagatagtgtattcatgtaaaaaagaatatgatgccagagaaaataaatattcagagaacaaacaataactcataatttataaacataataggtgaaaacagttattaaaaatagaagtattagaaaataaatttgagaaaatatcccagaatcaatagagaaatgggaaataggagtgaaaaaattaagaaaattagtgtatcaatacaggtggttcaagatctatacgataggaattccagaaagaggggacagaaagaacaagaggatacaaaataaagaacaaaataattcaagaatatttcccrgaactgagtgacttaaaagacacactgaggacataccaatctcaatggatgaaaacaggtgca

SEQ ID NO: 319569 - DNA, 582 bp, Homo sapiens
tgtaaatggactgtttcttgcaggggggtgttgaaccaagttgagtccagtagatttgaatatgataaatcttcaaaattaatttgaaatacactccacaaacgctatgaattaaaagaaaatcattacattaaaatttcaataatatggattttaaggagtttctggtttcaaaatggcagtatagaagcaagctgacttcactcttgcttcacagaaaacaaaaaataaatatacagcaccaagatcatcacaagcaatatcttagaacttgaatatgagaaggagacagctctcatagccacatagargtgaaaaaattctgagcagataataagagaattgaacttccatatccatgatgcccctccccacaaccttctgatattctgggcgtcaagcactctgaaaatgtcttcctgactcatggtttctacactggaacacatgatctgaaggtagacaaccaacttctccaacatcttaggtttcctggaaggagacttgtctctgcctcaacccacaggaagcatcacaagcacccaaagggaaaaatatccctgaggacagccagaaacaaag

SEQ ID NO: 319570 - DNA, 542 bp, Homo sapiens
aaggcctaaagaaacaacggacaggaggtacctagcatctgattggagagagtcctgtagagaagactatcctggtaggagcagtgacatttgctggaaaaactcagctagcctgatgcaaacttccaggtagaaagccaggggacatatcctaccttctgcttctctccctctgatgactttccagggcttcttattagccaaactctgtcagaagccagaaagtaaggtgacattcctccatgtagtccataaagctcagacctctgaagcaraatattaaagagagatggctggagaatgaatctgaaagggcaaaaagtatatactggcccaattagaccgtctctttttacctcgtcctcgtatcaagtatttaactctgatactgtattagtctgttttcacattgctataaagaaataccagagactgcgtaatatataaagaaaatgtttcattggcttatgtttccacaggctgtacagaaaacacgatgttgtcttcttcttggcttttgaggaggcctcaggaaaattaca

SEQ ID NO: 319571 - DNA, 521 bp, Homo sapiens
caaatatttaccaataatttttgaaatgctcatacatatcaagtaattcatctattctatcttgttctcctctaaagactattctgcatcgcttttttcctgctatacagactggctactatttgggctttgggcacgtatctcatgctgtgttttgccttcactgctttctcaaatcgattcccattcccatcattcctggatgtcatgctttcctttttcttggttaatwtatttgtttacctgaagataacctccgtggcttcctaaaaagtgtgtatgggaggtttacatttttgttcctgcattatgaaaatgtcttataattgttgttaacttggcagaatatacaattcaaatctgaaaatagtttgttcttaaaactgtgaaggccttgataacctgttttctattatcccacattgctgctgaaaagtctaaaacaattacacttcttgttcctttgcaggtaacctttatttttctctctgaaagtttttagaatgtcctcgtaaaccctg

SEQ ID NO: 319572 - DNA, 437 bp, Homo sapiens
gattcagccatgttgttgcatgcattaataattygttcctttttattactgagtagcattccaatatatagatatatgagagtttgtatactcaccaatctaagctgtttccacttatgaataaagctatgataagtattcacaaactggactttatatgaacataagttttcatttatcactttaccaaggagtagcattgatagatcacaaagcaagtgtttaactttggaagaaactggaaaacattacccaaaatttctgtttcattttacaatcccccaccgctgtatgataattttaaatcttctgtatcctcactggcatttcataataccaatattttaaaaacttcagccatttcaataggggcttagtaatatctcattgtggcttattgtgcatttctttaataacaaatgatgtggggcattgca

SEQ ID NO: 319573 - DNA, 596 bp, Homo sapiens
tgaacataagttttcatttatcactttaccaaggagtagcattgatagatcacaaagcaagtgtttaactttggaagaaactggaaaacattacccaaaatttctgtttcattttacaatcccccaccgctgtatgataattttaaatcttctgtatcctcactggcatttcataataccaatattttaaaaacttcagccatttcaataggggcttagtaatatctcattgtggcttaytgtgcatttctttaataacaaatgatgtggggcattgcatcatctgttcatttttcatcagtaacattttctttggtgaagtggccaaatcttttaacagatttaaaaattcaattgttagtgtacttactgttgagtttggagcattcttttgtattctgatagaagtcctttaccagatatatgattggcaaataatttctcccgatctgtggcttttcttttctttccctcaatagtgttcttcataaaccagaagttctttgataaagtactatttttcaatttttttattttatggatattgctttttgcctaactcaaagtaacaaaaaatctcttctatgttttcttac

SEQ ID NO: 319574 - DNA, 412 bp, Homo sapiens
ttctatattcctttactttcttaataaacttgctttcactttatggacttgccccacattctttctcatgcaaggtccaagaaccctctcttggggtctggatggggacccctttctcgtaacactttggctaacatctccctgagctggctccactctaaccactgcagcctgtagtaaacactgttctactttctwcttctaagatatcagcttttttagattccacatatgagtgagatgatgtggtatttttgtctttttgtgcttgacttattttacttcacataatgtcctccagattcttccatgtttttgcaaatgacaggatttccttatttttttatggatgaatagtattccattatgtatgtctatcatattttctttatccattcatctgctgatagac

SEQ ID NO: 319575 - DNA, 559 bp, Homo sapiens
catattttctttatccattcatctgctgatagacacataggaggattacacatcttggctattgtgaatactgcagcaatgaatatggtatttcggatacctctttgacatactgatttcattttctttggctatgtatccaatagtggcattgctggatgatatggtaattttgtttctawtctgaggaaactccataccattttctttaatggctatatgaatttgcagacttatcagcagagtgaaagtgttccccttccttcacattctcaccaacacttatgtctggtctttttgataatagccatactaacaggagtgaggtgagatctcattgtggttttgatttgcatttccctgatgattactaatgttaagcattttttcagatacttcttggccatttgtctgtcttcttttgagaaatgtgtattcagatttttgtccattttttatttttttaattgttatgaagttgtttgagttccttaaatagtttgaatattaaccccttatcagatgtatagtttgcaaatattttctcccatttggtaga

SEQ ID NO: 319576 - DNA, 570 bp, Homo sapiens
tcaaggtaccagctgggactgtcagtctgactgaagctagaggatttgtctacaagctggcgcattcacatgaggaggcctgggtttcttgacggctgctggaaatagacctctgttcctgaacacatgggtctttccatagagctgctggagtggcttcccccagagagaatgaccccagcagcagaaagaacaaggtggaagttacactgtcattttacaatctacatttcacagttgttctccatcatatctaccgtgttcttcttgttggaaggtagtcactaaatattgcccgcagagagaattaaggcttcaccagagggaggagtttcaaataatttctgggcatatactaaaccatcacgagttatttttatcatttcacagactgaccaaactaatttacttaggcatkatttctagtcattttttgtactataatatgtcagagcatctttctgattggaaattaccacatcttctccaaagatatttattgtatctggcaaaaatctttcagtgcttaaaaggaagaggggttcacactgcatagcatcttatcagcaa

SEQ ID NO: 319577 - DNA, 547 bp, Homo sapiens
gttatttaaagaaaattccattaaaaaaaattccaactaagttgggagccattacttacaaatttgtttctctacaaagggtggttttccaaacacrtatgagttcccggtttctgtcacaggttagacttgatataagctcttttggattacattccacacagtgcagaggttgggataagttgtttcatgtaaaatacagatatggagggaaaagggaggtgttgactattttgccaatttctcctcagacctcatgatctccaagtccagtagactgtctagatcataaattgggaaacgacaaccagtgcatcacctctagtccaccgcctgtttttgtaaataatgtttttattggaatacaaccacccttgttgaagaattgtctatggtcgcttctgtgctcctaaagcagagttgagtacccatagcagcaaaattctggcctgcaaagccaaaaatatgtactatctggtcctttctaagcctattttttctgttgctataaaggaatacctgatgctgagtaatatataaggaaaag

SEQ ID NO: 319578 - DNA, 543 bp, Homo sapiens
tattgtatctggcaaaaatctttcagtgcttaaaaggaagaggggttcacactgcatagcatcttatcagcaaagaaacacatttcaactataagtgaaatatttgtcatttgttcaaacacctgaatcctgcagtacagagattaacagattataaagtaagtcatcattgtctggctagccttattaatgtgatgggaggaaaggtaggaggtagtttttaaaatcaggacacttttctgagaaccacaaagtattctaggaacacaaagttgagtgtcttcagaggccaagcaggtagtatacatgggtgaagactacagggagtggcgaggcctrcaacattcaaatgccagttaaaaataacagcaccaataccaagccaaccaaacaaatcaccttccagtgtccagtttggctttcacctgccagcttgctcttcctgctgatgtctaagctctaacttgcttttctttgggaaaaataaagatgtaaggaatgagcaagttaagggaatccttgtggttcctttctttttgttct

SEQ ID NO: 319579 - DNA, 547 bp, Homo sapiens
gttatttaaagaaaattccattaaaaaaaattccaactaagttgggagccattacttacaaatttgtttctctacaaagggtggttttccaaacacatatgagttcccggtttctgtcacaggttagacttgatataagctcttttggattacattccacacagtgcagaggttgggataagttgtttcatgtaaaatacagatatggagggaaaagggaggtgttgactattttgccaatttctcctcagacctcatgatctccaagtccagtagactgtctagatcataaattgggaaacgacaaccagtgcatcacctctagtccacygcctgtttttgtaaataatgtttttattggaatacaaccacccttgttgaagaattgtctatggtcgcttctgtgctcctaaagcagagttgagtacccatagcagcaaaattctggcctgcaaagccaaaaatatgtactatctggtcctttctaagcctattttttctgttgctataaaggaatacctgatgctgagtaatatataaggaaaag

SEQ ID NO: 319580 - DNA, 554 bp, Homo sapiens
cttgatacttttaatggcttttccctattcagargctgcattttttgttttgtgggttttctgctttggttttttgtttgattgttttcgtttttgtttttgacagagtcatgctctgtttctcaggctggagtgcagtggtacagctagctgcagccttcaactcacagactcaagtgaccctcctgactcaacctccagaggaactggtactacaggtgcacagccaccacgcctggctaatttttgtattttttgtggagatgggggtctcctcctattgtccaggctggtctcaaactcttgggagcaagcaatctattcacctcagcctcctaaagcgctgggattacaggcatgagccaccatgcctatgcagtcttgaggaaaacgtccttccatcccttaccaaaagatcttggatatattgatttcttttcttttgtgtatatatccagcagaggaattgctggatcatatggtagttttatttttatttttttgaggaagcttcaaactgttctccatagtggttgtacttatttatattgcca

SEQ ID NO: 319581 - DNA, 525 bp, Homo sapiens
aatgcctagggtcaagagttcacgtcacctaggctcttttgatctaaccccccctaactaattctctccagccctgagaggacaggcaaccgcaggctgctggcgggccttttccagccgccaccgcaagtgagagaaggagggagggagggagggaggcagcgggtccaggttgcaggaagggagagcgggtgcacccgcccgcgggcggctggggccagagctagccgggtccgcgcgctgcgggggcaggaccggggcggggcggggcggggcgaggcggggcggggccggtacccgtgaccctaagggcgagacccgccagcctgcctggcctctgccgctcctccgccccacggctcaggtaaggcaggcacccccagagckcaggtcgggctgccgggtcccaggctggtggtcttcgtctgcccctggctggtgcagccgcacgccttcccgccttcagagcacggcgcaggaggggacggcccgcgcttggatacagctgggccgggaaagagggtg

SEQ ID NO: 319582 - DNA, 529 bp, Homo sapiens
ctctagcaaggtcaggaacttagccctagggggtggaggggggtctttcttggtttcttggtcaagctatctcaagttctagggctaggagtcatccttcacatctgctattcctatattctttagagttctcttcttactagtcaatctctcatattcaaattctttatgatagttaacaattctttatacyaaattttctgtttaagttactgcatcattttttttcctgattaaaccctgattaatacactatgacaaatcacttatgatgcagaatgtttccttaaatatgtctccaaagctatgaaatttacataacttcagagatatatttaaactattagagaacatctacagcaaaaaaataaccaaaaagggaggtatgactacaaggaagatttccaacaagggatgcctttgcaactctaatatactgccttgggcaagatacagaatagctactgtttccagatattaaagaaatataagaaactgaaggtttacaaaattgcttaattcaacttcc

SEQ ID NO: 319583 - DNA, 515 bp, Homo sapiens
ctaatcataagaaaagatagcttaaagcaattaacatcttgataagaaatgaaggaaagatcagtttccaaagttgcgtagtttccaaaaagtcagcacacagaaatataagaaacagccaagataatctctgcagatccctagaaccatattgacaggattttcacttgtacacactgctttccctgtcagttcagcataacccacagcatacctaatcaactacatgtaaaaccagagctttctctatgaccccatgcacaaccctgcccatgttctttctatctgtccagggggacaacaaggacacatcatcacagcatggtgtttaggggcagactctggcatcagactgtcctgtagttaaatccttgttttacctttgatagctgtgtggccttggacaagttactttacatctctgtgcctcaatatcttcatctgtacaatggggataataataatccctacatcatrgagttacttgaggattaaattgagtagatataacaagt

SEQ ID NO: 319584 - DNA, 470 bp, Homo sapiens
taataggggccctaataagaatggggmagagatgtttctattacggtaaaggccaagtttaaggatgcccaaatagacagcatgtggagttccaggtagagatcagagcagagacacaaagccttaagcattagcagcacataggtgaggattaaatgccgattaaaaaaaaaaaaaaaagccactccaagtgaatttggagtgagctgtttcaggagacgagcataaacccctgttagcagtttctgcacaagaaagaaggaagattctgaaactgctgtaaatcagtatgttgctaaaatacagccctcttgtaaacccattaggattgtcaaatttataggcatctacagttttttgttttgttcttaaatagagcaaataatcactttgtgatgtaccggttatgagatctgatcttgcaatatcaggctgtcttaaagcatgacatgtagtgtgaaggatgcagc

SEQ ID NO: 319585 - DNA, 470 bp, Homo sapiens
taataggggccctaataagaatggggaagagatgtttctattacggtaaaggccaagtttaaggatgcccaaatagacagcatgtggagttccaggtagagatcagagcagagacacaaagccttaagcattagcagcacataggtgaggattaaatgccgattaaaaaaaaaaaaaaaagccactccaagtgaatttggagtgagctgtttcaggagacgagcataaacccctgttagcagtttctgcacaagaaagaaggaagattctgaaactgctgtaaatcagtatgttgctaaaatacagccctcttgtaaacccattaggattgtcaaatttataggcatctacagttttttgttttgttcttaaatagagcaaataatcactttgtgatgtaccrgttatgagatctgatcttgcaatatcaggctgtcttaaagcatgacatgtagtgtgaaggatgcagc

SEQ ID NO: 319586 - DNA, 614 bp, Homo sapiens
agtacacactagtacagtaattcatgaaggatttataataaataatagttaatgtttattcagccctcgctgccattaagagatggtgttttgaggagttcaaacttgatttatgtaatatagaataaaaagagtggaacaagaattcaaacctaggcaagctgactcccagggctcatgtacataactcctctggacaytgtcgcctacttaagagatcaaattttgacaattgtgtaaatatttcatagctaaactgcaaagttcatatacaacagcatgtgcatacacatgcaaacatacgcacatgcacaatattgcatgaatcaaaatcacaaattgcagtggaactgtgataactagggcaaaggagacagaaacaaagattcaaaaaatggtcagtaaactaaaaatatatgtcgagtaataacatcagtaattattataataagaaagaggtctggaaaaggtgacataggaaaaatcccaccctatactttaatgtatcctattttttctttcctaaaaccaatcaacccaagagggttccatctgtaatctaccacaacaaaataacatggcttcgagaaaatgacatactagagagactatta

SEQ ID NO: 319587 - DNA, 614 bp, Homo sapiens
agtacacactagtacagtaattcatgaaggatttataataaataatagttaatgtttattcagccctcgctgccattaagagatggtgttttgaggagttcaaacttgatttatgtaatatagaataaaaagagtggaacaagaattcaaacctaggcaagctgactcccagggctcatgtacataactcctctggacattgtcgcctacttaagagatcaaattttgacaattgtgtaaatatttcatagctaaactgcaaagttcatatacaacagcatgtgcatacacatgcaaacatacgcacatgcacaatattgcatgaatcaaaatcacaaattgcagtggaactgtgataactagggcaaaggagacagaaacaaagattsaaaaaatggtcagtaaactaaaaatatatgtcgagtaataacatcagtaattattataataagaaagaggtctggaaaaggtgacataggaaaaatcccaccctatactttaatgtatcctattttttctttcctaaaaccaatcaacccaagagggttccatctgtaatctaccacaacaaaataacatggcttcgagaaaatgacatactagagagactatta

SEQ ID NO: 319588 - DNA, 634 bp, Homo sapiens
aaatcacaaattgcagtggaactgtgataactagggcaaaggagacagaaacaaagattcaaaaaatggtcagtaaactaaaaatatatgtcgagtaataacatcagtaattattataataagaaagaggtctggaaaaggtgacataggaaaaatcccaccctatactttaatgtatcctattttttctttcctaaaaccaatcaacccaagagggttccatctgtaatctaccacaacaaaataacatggcttcgagaaaatgacatactagagagactattacctgcaggatgcggcataccccaaacctacttttaacatacctataatgaaaatcgtatactggttatgctcacaagactgtcaacacaacataactttgacctgatatctacaaagcggtgaccttgaggagaaaaccaagcaatattgtttctgagaatggtatagttggtcactagtgtaatttttaatgttattttatatgtatgggaatagtasatgttgtctaccataaaagaaggtgaccaagtaaaacctgtggactggcaaattacttctccatgtagtaaacttgtataatattttggtgtggcaaagtaggaatttaccacacaattctagtctattg

SEQ ID NO: 319589 - DNA, 599 bp, Homo sapiens
tactgtaagttatgaatgatagaatgaagaattataaatgacaagaatttcatttatcggaatattgtttacttagcaggatttatgtacagattttgagatttgaaaaaccttctgataatagagtctaatatttattgaatgcttactaattaatgatttccaaggattatttactcacatcaaccttattagattgatattattatttatcctcattttattgataaaaatccaacacagagttgtaaaataaccttcccaaggacatagattggtagagttggcatttgaatccaggctcactgactggagggcctgacccaccsgtacatgctgtctccttactcattacggctgggtgcaatagataattgatcccctttcctggatgacaaaataagctcattgggtcacaaaaccagcaaatgtataagatttgtgatttaaacttaggcgttacagacatatcttggagatatggtgggttctgttgtaggtttgattccaagcgtctctaataaagtgaatattgcagtaaagcaagtcacacaatttattttggattcccagtgcatatcaaagcctattaagtatac

SEQ ID NO: 319590 - DNA, 592 bp, Homo sapiens
gctgctaattgattagggtggtggtttgctggagtttgggggtggttctggcaatttcttaaaatatgacaataatgaagtttgctgcattgattgactcttccttttgtgaaagcttttttttttttaragtagtctcactatgttgcccaggctggtctcaaactcctggcctcaggtgatcctcacacctcttagcctctcaagtagctgggattacaggcatatgtcactgtgctcagaccttttgtgaaagattactctgtagcatgtaatgctgtctgatagccttttacccacagcagaactttttccaaaattggagtcaatccttttaaaccctgctactttaccaactaagtttatgtaatattctgaatgttttgttttcatttcagctatgttcatagcatcttcaccaggagtagattccatctcaagaaaccactttctttgctcattcataagaagcagcttctcatccatttacattttatcaagagcttgtagcaattcagtccctcttcagactacttttaattctagttctcttgctatttccaccacgtctgcagttacttcctccactgga

SEQ ID NO: 319591 - DNA, 626 bp, Homo sapiens
gatgttttatcatacgtgagtctttagaactatatcctgtgaaactgctctgggccctgcrattatagcaatagacaaatgagacagaagtctctgccctcagaaaatttataatctactgaaagtgaagttgatgtcagtttaatttgaataagaataaagcaaaagtgttatggtgaaaaagtttgacatatggattatccagaagtatgagagccaaaataaaaataatagtagtaagttattagtattgctctctgctccacactgtgtgcatgatctcatttcattctcacaacaaccctgtaaggtatctttattgttcacatattatagatgaggaaactgaggctcagagggacaaaatggctcaaatttaagtctagcctgattcaagtttacactcttaatccactccctctcttttggtatacagagcttaaaaataatgaaaagaggaatttattcaaccaatatttattttgtccctatcttcaaagcactgttcttcaggcattgtagggaatagatgagtgattaagaaatgattcccatatttcagaaggaatgtagaaggaagaagcatcaaaattagttgaatcgtggctcacgcctgtaatcccagc

SEQ ID NO: 319592 - DNA, 489 bp, Homo sapiens
ttacacatattcttcagccataataatttccagtctattgaactcacataactgtttatgaaatattattttcagcttccacaagcatgacagaaagaaaagaaactaagaatgagcattccattattattaatctgagttgcattcattcttgtgataaaaacccaaatcaaacatcatacattaaaaaagatgaaaaacrtcaactacaggttcagtcccatgacccagatatttaatccccaactatttggcctcattaaagaaactcatatttccactgatgttagtcttttgccagaatattttcacctcaattctataccttcaagtctaacttcgatgtcagtttaccattatgcaggtagcagcccactttctgttactctctttctcagcatcctttttatttcattttgtatcttctctaccctctactccagtgtaagttcaaaggggacagttacagttatgataaacctattttat

SEQ ID NO: 319593 - DNA, 489 bp, Homo sapiens
ttacacatattcttcagccataataatttccagtctattgaactcacataactgtttatgaaatattattttcagcttccacaagcatgacagaaagaaaagaaactaagaatgagcattccattattattaatctgagttgcattcattcttgtgataaaaacccaaatcaaacatcatacattaaaaaagatgaaaaacgtcaactacaggttcagtcccatgacccagatatttaatccccaactatttggcctcattaaagaractcatatttccactgatgttagtcttttgccagaatattttcacctcaattctataccttcaagtctaacttcgatgtcagtttaccattatgcaggtagcagcccactttctgttactctctttctcagcatcctttttatttcattttgtatcttctctaccctctactccagtgtaagttcaaaggggacagttacagttatgataaacctattttat

SEQ ID NO: 319594 - DNA, 608 bp, Homo sapiens
aaacaatttatattaaactgataaaaacagatgctacatttgatcttagccagaaggccgagaagtgattaaacaatttataaattaactatggactgggcrcagtggctcactcctgcaatcccagcattttgggaggcagaggtgggcagatcacctgaggtctggagtttgagaccagcctgaccaacatggtgaaacaccatctctactaaaaatacaaaaaattagccggcatggtgtcgcgcacctttagtcccagctactcgggaggctgagacaggagaattgcttgaacctgggaggcaggcgttgcagtgagctgagatctcgccactgcactccagcctgagcaatagagcaagattctgtctcaaaacaaacaaacaaacaaacaaacaaaaactatagattgcctaattattttgccactatttatttgtcttattttctcagttaggcctaaagctccttgaaaacaaagaattactgtgtctgcatgttatgtaagttttgtagcatggaatgcaaaacagaatactttattcattcagcaagtattcattgaacatctactatgtaccaggcactcttcttgatacaagatc

SEQ ID NO: 319595 - DNA, 608 bp, Homo sapiens
aaacaatttatattaaactgataaaaacagatgctacatttgatcttagccagaaggccgagaagtgattaaacaatttataaattaactatggactgggcacagtggctcactcctgcaatcccagcattttgggaggcagaggtgggcagatcacctgaggtctggagtttgagaccagcctgaccaacatggtgaaacaccatctctactaaaaatacaaaaaattagccggcatggtgtcgcgcacctttagtcccagctactcgggaggctgagacaggagaattgcttgaacctgggaggcaggcgttgcagtgagctgagatctcgccactgcactccagcctgagcaatagagcaagattctgtctcaaaacaaacaaacaaacaaacaaacaaaaactatagattgcctaattattttrccactatttatttgtcttattttctcagttaggcctaaagctccttgaaaacaaagaattactgtgtctgcatgttatgtaagttttgtagcatggaatgcaaaacagaatactttattcattcagcaagtattcattgaacatctactatgtaccaggcactcttcttgatacaagatc

SEQ ID NO: 319596 - DNA, 609 bp, Homo sapiens
tttgttttgttttgttgtttgttttaacatcaagttggcaaaaaccatggtgtgacatatgtgctctagttgacctatatcccaaagtgccagtgggaggaaccgytttagatggtgaggctaaccctgtctgtggtatgcaggaagtcatattaggactaaatcttaatggatgaataagattttgccataaggaacagcaggtccaaaagcccaaaatatgaagatggggaagaagtaggaggttaatgagaagttgatatgactggagatggaatataaagtgagacacagtggaaggttaactatgacttgtacccctgtaagaaaataagaggaagtctttgaacctggacttcaacttcttattttattttggtaagaacacttaacatgacatctgccctcttaacaaatttttaagtgtatagtacgttattgctgactctaggtacagtgttgtacagcagatctctatagcttactaattttactgggctgaaactttatgcccattgattaataacttaagcccctagcaagcacaattccactcttcgattctatgaatttgactatttcagcatattgcatattggtgtaatcagg

SEQ ID NO: 319597 - DNA, 609 bp, Homo sapiens
tttgttttgttttgttgtttgttttaacatcaagttggcaaaaaccatggtgtgacatatgtgctctagttgacctatatcccaaagtgccagtgggaggaaccgttttagatggtgaggctaaccctgtctgtggtatgcaggaagtcatattaggactaaatcttaatggatgaataagattttgccataaggaacagcaggtccaaaagcccaraatatgaagatggggaagaagtaggaggttaatgagaagttgatatgactggagatggaatataaagtgagacacagtggaaggttaactatgacttgtacccctgtaagaaaataagaggaagtctttgaacctggacttcaacttcttattttattttggtaagaacacttaacatgacatctgccctcttaacaaatttttaagtgtatagtacgttattgctgactctaggtacagtgttgtacagcagatctctatagcttactaattttactgggctgaaactttatgcccattgattaataacttaagcccctagcaagcacaattccactcttcgattctatgaatttgactatttcagcatattgcatattggtgtaatcagg

SEQ ID NO: 319598 - DNA, 561 bp, Homo sapiens
atgggctgggaataggaattagattggtgagagtggaagaagcaaagttattctacattaaggagactgcctgtgcttggaggaaagggaggagctgtttgttgccttaacctaggtgtgaaaaaggatcaaagagaggtaaggccagaggggaagacgggcctaggcgtggagaagttgagatgacaagtgaaggaatttatattgaattctcgagaactatagaggagatttaagttggggatgggatcagctttgtgtttttgaaattcactgtgaggacattgtgcaaaagttaattwcacaaagaagttattgattcgtatgaatgtgagatactccatgtaaagattttcctgaacattttctacgctaaccatagagccagactgaataaatagcatctcttattttcccatgaatcttgccccccacattgcaactaatcaactattagcagggaaaactccagactgaaaaaaatcaagggcacttttcagttctcaacaaatcctcttgttatccataaggtggtcaagtgagtagattaatgggttaata

SEQ ID NO: 319599 - DNA, 561 bp, Homo sapiens
atgggctgggaataggaattagattggtgagagtggaagaagcaaagttattctacattaaggagactgcctgtgcttggaggaaagggaggagctgtttgttgccttaacctaggtgtgaaaaaggatcaaagagaggtaaggccagaggggaagacgggcctaggcgtggagaagttgagatgacaagtgaaggaatttatattgaattctcgagaactatagaggagatttaagttggggatgggatcagctttgtgtttttgaaattcactgtgaggacattgtgcaaaagttaatttcacaaagaagttattgattygtatgaatgtgagatactccatgtaaagattttcctgaacattttctacgctaaccatagagccagactgaataaatagcatctcttattttcccatgaatcttgccccccacattgcaactaatcaactattagcagggaaaactccagactgaaaaaaatcaagggcacttttcagttctcaacaaatcctcttgttatccataaggtggtcaagtgagtagattaatgggttaata

SEQ ID NO: 319600 - DNA, 587 bp, Homo sapiens
tggtgtaagttctgcacgtctcagaatgcccaagtattcaataggggtttgaagatgtgcctcagtctttccttgaccatgtgcagtgggatggcagggcacaggggagctagagaataagtgtctccctgccttgggcttctcactgcatgcctagattatacatgctgcctttgagttcgaagtctgactcccatagccctctagtttccccagaattttgtgaagtctaccagtgaggagcttctccaaatccygtggcagcaaattctttacttgggttttctggcattgattgcttgttttcttaaaagcatagagaaaggtgtggtgaatatcctgtcagatagattcccttagtattgctatgttctgctcttccgcctgtctaatactcagaaggaaacacaataaaatgaagaagagcaatgtgtggagacaaagaatggagatcttagtcaagtgccagccctgatatttaccaactctgtgatactgggcaaatgacttatattctttgagcttcaatttcctcacctgtgaaatggggatttaaacactactctgtgattgtgtttttgtctgga

SEQ ID NO: 319601 - DNA, 587 bp, Homo sapiens
tggtgtaagttctgcacgtctcagaatgcccaagtattcaataggggtttgaagatgtgcctcagtctttccttgaccatgtgcagtgggatggcagggcacaggggagctagagaataagtgtctccctgccttgggcttctcactgcatgcctagattatacatgctgcctttgagttcgaagtctgactcccatagccctctagtttccccagaattttgtgaagtctaccagtgaggagcttctccaaatcctgtggcagcaaattctttacttgggttttctggcattgattgcttgttttcttaaaagcatagagaaaggtgtggtgaatatcctgtcagatagattcccttagtattgctatgttctgctcttccgcctgtctaatactcagaaggaaacacaataaaatgaagaagagcaatgtgtggagacaaagaatggagatcttagtcaagtgccagccctgatatttaccaacwctgtgatactgggcaaatgacttatattctttgagcttcaatttcctcacctgtgaaatggggatttaaacactactctgtgattgtgtttttgtctgga

SEQ ID NO: 319602 - DNA, 579 bp, Homo sapiens
ttacatgttttctgttttgtaatttaattttcatcatcttgttttacaaaataatgaggaatttacttctttcacacatgagatagtaggggaattagcccttagtgtcatatttttaaaattgggtgtttgttttttcttgagatgggatctcactctgtcacccagtctggagtgcagtggcatgagctcagcttgctgcagccttgactgttagagctcaagcgattcttccaccttagcctcctgagtagctgggatcacagatgtgcgccaccatgcccagctaattttttaaaattatttgtagagatgaggtctcactacattgcccaggctggtcttgaatttctggattcaagtgatcctcttgcctctgcctgccaaagtgctgggattataaacatgaaccaccatgcttkgccagcatcgatattttaaaaaatcatttagttaaaattttgtttgtaatgtaggaaggttaattttagtatttctgaggcaggaagataaataagatatttttaaaaagtatttcaatagactatttttgaaagcagttttaggtttaaagcaaaa

SEQ ID NO: 319603 - DNA, 579 bp, Homo sapiens
ttacatgttttctgttttgtaatttaattttcatcatcttgttttacaaaataatgaggaatttacttctttcacacatgagatagtaggggaattagcccttagtgtcatatttttaaaattgggtgtttgttttttcttgagatgggatctcactctgtcacccagtctggagtgcagtggcatgagctcagcttgctgcagccttgactgttagagctcaagcgattcttccaccttagcctcctgagtagctgggatcacagatgtgcgccaccatgcccagctaattttttaaaattatttgtagagatgaggtctcactacattgcccaggctggtcttgaatttctggattcaagtgatcctcttgcctctgcctgccaaagtgctgggattataaacatgaaccaccatgcttggccagcatcgatattttaaaaaatcatttagttaaaattttgtttktaatgtaggaaggttaattttagtatttctgaggcaggaagataaataagatatttttaaaaagtatttcaatagactatttttgaaagcagttttaggtttaaagcaaaa

SEQ ID NO: 319604 - DNA, 466 bp, Homo sapiens
tagtattttgttgaggatttttgcatcaatattcatcagagattttggcctgtagtttcatttttttgaggtatctttgtctggttttggtatcaggataatactggccatgtagaatgagtttgaaagtatcccctcctcctttatttttcrgaatagtttgagtaggattcgtattagttcttctttaaatgtttggtagaattcatcagtgatgccatcaggtcctgggcttttctttactggaagattttttattacagctttgatctcattacttgtttttgatatgttcagcatttgggtttcttcctggttcaatcttggtaggttgtatgtatctaggaatttgtccatttcttctaggttttccaatttattgacatagagttgctcatagtagccactaacgatcctttgaattttggcactatcagttgtaatgtctccttttttatttctgctt

SEQ ID NO: 319605 - DNA, 523 bp, Homo sapiens
tagtttctgttttcaatttatttgattttcactctaatgtttattatttattttcttctgcttgctttaggtttacattgtacttctttcactaatcttttaagttggaagtttaaattgattttagatctatcttattctctaataatatgcattcagtgctataaatttttctcaaggcactgtttttgctgcgtcccacaaattttgataagatgtatttttattttcgtttagtttaaaatattttaatatcctttgaaacttcttctttgacccatgtattacttaaaagtgtttgttattgtttctctgccacttggctaatatcaagtatagagttgtttaacctacagctatctttttataattgatttttcgcttaattccggtatggtctgagaacataacttgaattatttctattttttwaaaaagtttaagatgtgctttattgtccacaacacagtcaatcagtgtatgtccacgtgagcttgagaaaaatgtgtattctgcagttgtt

SEQ ID NO: 319606 - DNA, 604 bp, Homo sapiens
gtttatatactcattttttaggtatttagttagtgtgactcagttctcacaaggttgacaaatcctagactcacktgtgaaatctaaatcagtcctctaaacctaaaaagctaaagattacatgctagcacccctgccccaactctactgctttgaggcatggctttaatggcccattggcctttcttgatgatgacacattattttgcctaactatatacatacacctgagataaaataaggtcttattctaagtccttattaatagtatattactagccttcaaaataccattaaaataacagaaaagatgaacaatatgtaattaaaaatcagcaaaaccttgatttagcaatcccacttccaaaaatatatcctttaaataatctacatgaaaaaagctttaggttcatagatgtgttatttttaaaagtgaaacataaaaaccaagccatatatcaagacatagagaaacaatttataccagcaatgatagacacaccacatagagcataatgcagccattaataataagttacatattaataccatgaaaatatgtttatatgaaaaaatacatttgatatgtacatataaacggcat

SEQ ID NO: 319607 - DNA, 591 bp, Homo sapiens
caacagaataagacagaacaaacactctttagcagaagaatcacaatcctttaagttatcgtgccttagtatcttgcaactgaaaaatagcctgggagcttttcctaaattattcaaaacacttgctcataaaggctgaacttatggatttgaaaagttcatcttcctctttgcgcttcttcatccactgaaatcaacaggagattcgatagtctttaatagtaaaatctcttacttattatacagttgcaagtgatcaataacacataactatggaatattttagtgctgtcccctagtgttccaactcacaagcaacagagaacccacagtgctttgcctgggtttccaggcttgaaatgtttctattggtaacacataatttaaaygaatggagcaagtaagaacacggatgctttgtgtactgcctccctcaccgaagtgtccccacagggctttgctgttttattgttggtattgttgtgattatatcctttggcttttatttcttatgttattagaaggggaaaaaaatcctttgcctctgtcattctttcagtttcagaatttaggagtgctgtcaagttcaac

SEQ ID NO: 319608 - DNA, 560 bp, Homo sapiens
cataatttaaatgaatggagcaagtaagaacacggatgctttgtgtactgcctccctcaccgaagtgtccccacagggctttgctgttttattgttggtattgttgtgattatatcctttggcttttatttcttatgttattagaaggggaaaaaaatcctttgcctctgtcattcttycagtttcagaatttaggagtgctgtcaagttcaacttaaagttaaaaaaaaagtataaaatagaccaaaagtatcagaaaccaattcacaaataattcaatgcttttataaaatacaatgccatacactcagtgaaatatcaataaatacgaattaatcatgttctgtctcttatgagttcatttgtattattcatactatattaaatatataggttatctcctactgaataaagacaccaaggaatactaatttaataaacaatacctaaatacagaattcatttcatattcttttccaccaatgagaaagaagtagatgtactatttatattgttaagaaaatatcaacttaattacaataagaaaatagaaataataa

SEQ ID NO: 319609 - DNA, 560 bp, Homo sapiens
cataatttaaatgaatggagcaagtaagaacacggatgctttgtgtactgcctccctcaccgaagtgtccccacagggctttgctgttttattgttggtattgttgtgattatatcctttggcttttatttcttatgttattagaaggggaaaaaaatcctttgcctctgtcattctttcagtttcagaatttaggagtgctgtcaagttcaacttaaagttaaaaaaaaagtataaaatagaccaaaagtatcagaaaccaattcacaaataattcaatgcttttataaaatacaatgccatacactcagtgaaatatcaataaatacgaattaatcatgttctgtctcttatgagttcatttgtattattcatactatattaaatatataggttatctcctactgaataaagacaccaaggaatactaatttaataaacaatacctaaatacagamttcatttcatattcttttccaccaatgagaaagaagtagatgtactatttatattgttaagaaaatatcaacttaattacaataagaaaatagaaataataa

SEQ ID NO: 319610 - DNA, 622 bp, Homo sapiens
atattctgggactttaatttttataaattaggaaaaaaaatattgatatatcttctgaaggatacacctcagggagaaaaaaatgatttatagatcaacaaatgaagctgacagcaacatcaagaaaacccttcctctcaagactgacaataggaaaagcttcacaaaccaaagataagagttattactgcttcctgaaaactactgcattccagaacttggaaccgtgttatgtggtaaaattcactgtctttctgagaagtctctctttgaatacggtatcatcctggatattttcttctcacaggttctctgtggctcctcaaactatgatattgtttacatattttgagaattaytgggaaagaacttattgcattttaatacatttgttatgtgccttatgcaaaatgtatacattttatatatgcacgttttattgtatacctaatgtcttacccaaatacaacatttcttgtatttttttagtgatgaaaacagtttatctacaaacttaggtagttgtaatccattttcattcatacacagataattaatctgtctgagcatctactatgctaccatgtaccatccaccatgccagatgatgacgatgtatagt

SEQ ID NO: 319611 - DNA, 448 bp, Homo sapiens
ctcatactgccatacattatactagaactgaacaatgaatggtggatggtgggagccaggtttctcagcattgttttgggaatayacagataagcaaggggagaaggctagaatgatccatatggtaatggattacattagtaagaactcatgtttaatttaaaagagatacaggtgattacatatagaaatatttatgaatatgtatatatacatgggttaggacacacatctatttttttgctctgtcagtttctctaaactgaccctaaaagaagcaacactctagtagcaactagcatatatagtacacagatcatagtttctaataccattctccagtgaaaggaagtagggctccttggagcaatggctaattctaggactatagcaggaaatacacaagatgagcctggagcatcttgtagtgttagaatgtaaggaaatg

SEQ ID NO: 319612 - DNA, 448 bp, Homo sapiens
ctcatactgccatacattatactagaactgaacaatgaatggtggatggtgggagccaggtttctcagcattgttttgggaatatacagataagcaaggggagaaggctagaatgatccatatggtaatggattacattagtaagaactcatgtttaatttaaaagagatacaggtgattacatatagaaatatttatgaatatgtatatatacatgggttaggacacacatctatttttttgctctgtcagtttctctaaactgaccctaaaagaagcaacactctagtagcaactagcatatatagtacmcagatcatagtttctaataccattctccagtgaaaggaagtagggctccttggagcaatggctaattctaggactatagcaggaaatacacaagatgagcctggagcatcttgtagtgttagaatgtaaggaaatg

SEQ ID NO: 319613 - DNA, 540 bp, Homo sapiens
tctttcacttctctgctaatcgtactatttgagtcattttgagatgggtttatcttgactctttttgttctttagcattggtcatgtgcttccatttctttgcatgaatcatacataatagacttggagaaggctgatttttattccagtcaacaattaayatggctggactcaaactccatctgtgtcccctgaagtcaacagtttccctaggatcctgtagtttccagctgctgctttttaactagttcccctgtgaagttaagctgagtggtcagcctacattcaggccaatattagctgctattttggacacacccactacatgaccccttctcttccaagcttcctggctgctccccaaaccctaaactctggccttttatgcttcagagcagtaaggctgcgatgttctgctgctctgagctgctgtgcagactggagattgtcctcaggcaggaagctgtacattctccaatctcaccagctgcaatttttgttttgtgagggctcctttcagcaaatggaagggctgggatc

SEQ ID NO: 319614 - DNA, 490 bp, Homo sapiens
gtcattaaaaaaacagaatagaaacacattttaaagaggtaacatttataatcattttaatcagaaccaacaagtttgctcaataacagagcatccaaatccactggagtgaatttggaccccaataaataataacctctttaagtaggtggaatagggtcatcttttgggtactacaagaagcaggatcttaacaaattgtgagaggctacatgtttttaaaaaggaaaaacaggcctcgcatggtggctcaygcctgtaatcccagcactttgggaggccaaggcgggcagatcacaaggtcaagagatcgagaccatcctggctaacacagtgaaaccccgtctctactaaaaatacaaaaaattagccggttgtggtggcatgcgcttgtagtcccagctactcgggaggctgaggcaggagaatcacttgaacctgggaggcacagactgcagtgagccgagatcatgtcattgcactccagcct

SEQ ID NO: 319615 - DNA, 489 bp, Homo sapiens
aactaacactgcaataaatgtaggactgcagatatcttatcaagatctttattttaatattttacatatatacgcacaagtgggattgctaggtcctatggtaattctgtttttaacttttggaagaaccttcatattctttttgattgcactattttacaaggattcccttttctccacatccttaccaatgsttattatctttttttttttataatggtcatactaacaggtgtgagatgatatcttgtgtggtttttgttttcatttccctgattattggtgatgttgagcaccttttcatgtatttactggccatacactgagggaaaggagagtcttttcaataaatggtgctgggaaaacaagttatctacgtgcaaaattataaaattggacacctatttttataccatacacaaaaataaagacaaaatgaattaaaggcttaaatgtaaaaactgaaattataaaactaccggaagaaca

SEQ ID NO: 319616 - DNA, 490 bp, Homo sapiens
gtcattaaaaaaacagaatagaaacacattttaaagaggtaacatttataatcattttaatcagaaccaacaagtttgctcaataacagagcatccaaatccactggagtgaatttggaccccaataaataataacctctttaagtaggtggaatagggtcatcttttgggtactacaagaagcaggatcttaacaaattgtgagaggctacatgtttttaaaaaggaaaaacaggcctcgcatggtggctcacgcctgtaatcccagcactttgggaggccaaggcgggcagatcacaaggtcaagagatcgagaccatcctggctaacacagtgaaaccccgtctctactaaaaatacaaaaaattagccggttgtggtggcatgcrcttgtagtcccagctactcgggaggctgaggcaggagaatcacttgaacctgggaggcacagactgcagtgagccgagatcatgtcattgcactccagcct

SEQ ID NO: 319617 - DNA, 490 bp, Homo sapiens
gtcattaaaaaaacagaatagaaacacattttaaagaggtaacatttataatcattttaatcagaaccaacaagtttgctcaataacagagcatccaaatccactggagtgaatttggaccccaataaataataacctctttaagtaggtggaatagggtcatcttttgggtactacaagaagcaggatcttaacaaattgtgagaggctacatgtttttaaaaaggaaaaacaggcctcgcatggtggctcacgcctgtaatcccagcactttgggaggccaaggcgggcagatcacaaggtcaagagatcgagaccatcctggctaacacagtgaaaccccgtctctactaaaaatacaaaaaattagccggttgtggtggcatgcgcttgtagtcccagctactcgggaggstgaggcaggagaatcacttgaacctgggaggcacagactgcagtgagccgagatcatgtcattgcactccagcct

SEQ ID NO: 319618 - DNA, 523 bp, Homo sapiens
tgaagagcttgagatctggaaatgttacttaaaatcctcataggttaacaaagggcagaagagaaattaaacctaggtctgaatgactacaaagaccattctgtcctgcacttaaacgtgtagaactacagctgtgatgtgaaatgaggtgggctacagacatggcttttcaggtacagagaataaaacaatctaggaagtccacatctaccaattgtggctgtagctcagtacacagttttccaaaacatggtttcattcttgacaaaatgaaaaaaaaaatcttgtttggaataggaagtcaayttgattggatgcattttggggccacgagatcaaacagaagacctggataatctttttgttatattaatatttcacccagtgttttaccactgcctatgggcaaagaattgaatttgacctgccttggaattagattttctttttaaattttccattaggaaaatattgctgactcttgtcctagattttcagtctattaaaaaatattctcatccat

SEQ ID NO: 319619 - DNA, 509 bp, Homo sapiens
gcatgttttcaagatgaacaataactcaagtaagaggacttgatagtgctgtatgtcacacataggttaccataattgtacctgttatttgggtacaattaactgtgctagttaatttgctttatccagaggaaattcaaacttcttatatctttaggacaggaaatagttttgcaacttggagcaaggtgcccatctaagtcagacttaagcctaccccaaagactgggagatgtaggtactatcctccttgatgtttacatttcaaagaaatggctaccagggacttgagaaagatatttctagattacatagctgacaaaatgccaatttagtcttcaaaagaatttatatacctttcaaagagaggagaaagaacttgcaataataagttttctaaagtaaatgctcaaagtaaacggagagaaagaggtattttttcttattttcaawatgagtaagagtctgattttaaatgtgcatttgtctttacagtatttactgtctag

SEQ ID NO: 319620 - DNA, 591 bp, Homo sapiens
ttgaacatacctcattacactctcctcccttttggaaatcgggcccacttgaccagcattaatatcaacacagaccttaagactgatagactgtctgagtctggcaagaaacatttacagtctattctcctgaagcctgctacctggaggcttcatctgcaataaaaccttggtccacacagcacattatcttaaccctgacatttctttctgttgattttaaatctttagacaatacttaactcttttaaccaattgtcaatcagaaaatatttgaatctacctctgacctggaagccaccccaccaccacctttccggaccaaaccaatgtacctcctacatgtattgattgaagtcttatgttttcctaaaatgtataaagccaaggtgtagcctgaccaccttgcgtccatgttctcaggatcgcctgagggckgtgtcatgggccattggtcactcatatttggctcagagtaaatctcttcaaatattttacagactgtactagttagttttcatactgctatgaagacatacctgacactgggtagtttataaaggaaagaggtttaattgactcaccattccg

SEQ ID NO: 319621 - DNA, 591 bp, Homo sapiens
ttgaacatacctcattacactctcctcccttttggaaatcgggcccacttgaccagcattaatatcaacacagaccttaagactgatagactgtctgagtctggcaagaaacatttacagtctattctcctgaagcctgctacctggaggcttcatctgcaataaaaccttggtccacacagcacattatcttaaccctgacatttctttctgttgattttaaatctttagacaatacttaactcttttaaccaattgtcaatcagaaaatatttgaatctacctctgacctggaagccaccccaccaccacctttccggaccaaaccaatgtacctcctacatgtattgattgaagtcttatgttttcctaaaatgtataaagccaaggtgtagcctgaccaccttgcgtccatgttctcaggatcgcctgagggcggtgtcatgggccattggtcactcatatttggctcagagtaaatctcttcaaatattttacagactgtactagttagttttcatactgctatgaagacatacctgasactgggtagtttataaaggaaagaggtttaattgactcaccattccg

SEQ ID NO: 319622 - DNA, 448 bp, Homo sapiens
aggttattaggaaagctcatttttagcagcttgtgaagtctcatgtcctgtgaagagaaaacagagggaggaagggagaaaaacaacaacaacaaaaagaacaatcctagaaaattaatatagccacattgctctgaagtccatatatcaataggcaggtatgaaagcggcttatgtatataaataagttgttattttcttctgaagtttaagttgtctagcttcagtttgctaggatttaagaaagcatggcttagtttccagtgatttcaaactaggaaaaatggggaaaaaaggtaaagaaagaaaaaaaaattgaaagcattattttggagacttatagccaggaaaaattagaattcagtccaaastgtagaaaataataaaatttgaaaaacattaggcaaaactagaatgtaacaacaagtatgctgtagtttttgaaaca

SEQ ID NO: 319623 - DNA, 631 bp, Homo sapiens
tatactattgctttctggtttatttgctgtaattctttttaaaagtcttttttttttaattaactgtttggcaccctaaaatactatttgtccaagaaatatgatgtaaatgcttgatcattttactcaatttaccagtttttacaataaagtattggttcatagcatcttccaaaggtgattgagagtttttgtatgtgagtatccttaagaactaatgagttttagtatatttgatgtgtcttaatgtattatcattattattctttttttgttgctagtattttcccagtgtactccccttcaaattggatctgggatccaattaacatgaacccagttatttcyaatagcttccttgtctttcagtaagacagaatatttcagatatattttatgcatttcctggcccaaaattggtatctgccatttcttcaaggatccctatactctttaagccctatagtcttaatacaaaccacacatgcaagcctgtttgaaatatcagtaatgatgtactacaacttgctaatatttaatactatcctattggctgtctgcttttaactatatacaggatgttcatcattctaacaaatgtcatttctgaagatatttctgtaaaacaaaa

SEQ ID NO: 319624 - DNA, 608 bp, Homo sapiens
tcttccaaaggtgattgagagtttttgtatgtgagtatccttaagaactaatgagttttagtatatttgatgtgtcttaatgtattatcattattattctttttttgttgctagtattttcccagtgtactccccttcaaattggatctgggatccaattaacatgaacccagttatttctaatagcttccttgtctttcagtaagacagaatatttcagatatattttatgcatttcctggcccaaaattggtatctgccatttcttcaaggatccctatactctttaakccctatagtcttaatacaaaccacacatgcaagcctgtttgaaatatcagtaatgatgtactacaacttgctaatatttaatactatcctattggctgtctgcttttaactatatacaggatgttcatcattctaacaaatgtcatttctgaagatatttctgtaaaacaaaattaatgtctcagcaaataatctacttgcttcaagtaacattctgtacaacacaatttcaacatgcaaaaatgatatttatttttctctgaaaactaacttggtatttttcttcttctggctacctatttgtataccattgttcg

SEQ ID NO: 319625 - DNA, 631 bp, Homo sapiens
ataaataaacaatgactctgtttctcacccacttgtctctacattcttatttctcagtttrttttctttcatacttttatgttgtctcagaaaaaactaaacggtctgttttttttttaattttctgaagcatctttaatctcttgccgcctgtgttcttgccatttgattttaaacaagtacaaagctcttctatcttgagaaaacctttacttttctaccactaccatgtttattactttcttttcatagttaatcttctggagaatgtttctcttccattttatcgaagctcaaactgaattttcacttgtacatcaggatgtgaaatgcaacagcacctacaaagtaaaattgtgggtatggctggtgtgttaatttaatgcagaagaatgtcagtagagtacttctattgttactcattaaaaacagttcttggccagtactcaaaaacacttatttaattattgcatgtatctccagtgatcactttttcctcgtttaccctttagcaatttgtgaaagcattttttttccattttcaagtgttgttaataacactcttgttagtaacactgttaatctttcaccctatggtcctgtagattttctttgcaaaataaaggcctgg

SEQ ID NO: 319626 - DNA, 592 bp, Homo sapiens
cccagaggagtgtatatcactgtttcctccccaaattcaggagtaaaagcattgcattggagggagctaatagcatagtttgggtaaaactttccagggtatagtatactttgttactttttagtcttgtatttttatcttgataaaaatattcartatttacagcagtcagagaaaaacacagaacttcactcaagttttacatatattattattattattattataagacatatgcatatgcaggtgccatcatgatatattgttgcattttcaatagtagtttttcttcctttgggacattaattggtgatggggcatgccacactgccacactgtaacccaggaaacttccaatcattccacttcatcatcaacaccaagctataccactgttgcaatattatagttgtatggtcttgagcaagttagtttacctctgtgagcctgtttccttatctttaaaaggagaattacagtaaaaaataaagcttaatgtgtgttaagccttactctgaataatttatattgcaatacctaatctgtagccttcctggaaagcaggtactattactatcaccatattgtagaa

SEQ ID NO: 319627 - DNA, 577 bp, Homo sapiens
cttcttgtccaaccccctccctccccatccaccaaatgccctcattaaattaataaataagtckgagtcgaaaacacaattcttccctaaatcaagaatcaaaggctagcttagattacagaccaaagcttggatgaaaacaataatttcgaaactggtctccttgttttcactcttgtttaactcaaaataatttcacacagcactccttatgatatggtttagctgtgtccccacccaaatctcatcttgaattgtagttcccataatcctcatgtgtcatgggagggatccagtgggaggtaattaagtcacatgggaagtttttcctgtgctgttcttgtgacagtaaataagtctcacaagaactgatgattttataaagggaagttcccctgcacatgctctcttacctgctgccatgtaagatgtgcctttgcttctcctttgccttctgccaggattgtgaggcctccccagcaatgtgtaactgtgagcccattaaacctctttcctttataaactacccagtctcaggtatgtctttatgagcagcatgagaacagattaatacagt

SEQ ID NO: 319628 - DNA, 577 bp, Homo sapiens
cttcttgtccaaccccctccctccccatccaccaaatgccctcattaaattaataaataagtcggagtcgaaaacacaattcttccctaaatcaagaatcaaaggctagcttagattacagaccaaagcttggatgaaaacaataatttcgaaactggtctccttgttttcactcttgtttaactcaaaataatttcacacagcactccttatgatatggtttagctgtgtccccacccaaatctcatcttgaattgtagttcccataatcctcatgtgtcatgggagggatccagtgggaggtaattaagtcacatgggaagtttttcctgtgctgttcttgtgacagtaaataagtctcacaagaactgatgattttataaagggaagttcccctgcacatgctctcttacctgctgccatgtaagatgtgcctttgcttctcctttgccttctgccaggattgtgaggcctccccagcaatgtgtaactgtgagcccattaaacctctttcctttataaactacccagtctcaggtatgtcttyatgagcagcatgagaacagattaatacagt

SEQ ID NO: 319629 - DNA, 440 bp, Homo sapiens
taagttatagagattttgatacagttattctcaagatcatcctcttcttattttagtatcccccagcagtccaacatttggttgacgttggtgcagtagagttcttatctaagcttcggtctaatgtggagccaaatctgcaggctgaaattgatggcattctggatggactttttcttcttccttcggaagttcctgcactatcttctgcckcataccaaaccaatcaaactggtaactctttggaatctgttaaatacaaatatattaattctaatggtaaattttaaggaaagggagattagatttttttaaaaaggatttctcccacctcccccaaacttatttttcttgtgttaacttacatgattttgacctttttcccctcctctactgttagtcaaaggatggtacatttgcattaattgctttttgggtca

SEQ ID NO: 319630 - DNA, 627 bp, Homo sapiens
agtgatgtttatatttatggctgcttcttgatttatcaactttaaagcttttccatcacttctagttatcatggttggaaatgtcagtttcttagaatcctcttgttaatcctgtcattctcccattatggttatttcatctttcattaagcagacaatcaatgctcctatttgtatgattatttaatttgatcatcttcaggatctagtcaagttggacatttgtggtttgtatttctagttagcaagtttttattgaaaggagtctgtataagagaagggagaaagcggggcagaggggtgcgtgtgtttgtgtgtgtgtgtgtgtgtaatctgaaaggggatagtagaaacctaaaattatatttcttaaatgctaccagaagaatttatgttatacaaatcattttttaataaagctgaattctgaaataggaaaagatatatttcctgatgaaataatttcatatrctgttaggtcattacctaacaaggtcattacctaagaaggtcatcacctaacaagaaatacagtttgacaattctcataatgacctctcagcatgtgcagttgaccagagatgtcttttgctattaattacaatatattggttatttcagagatga

SEQ ID NO: 319631 - DNA, 647 bp, Homo sapiens
gaattaatgtgttctaaggtcyttgcattgtctgggatgtggtaaaaatactagttcacagtcaaggaagtaaattataatctctatattataaaagaataatcatctgtataaaatatatagaaataatgtatatagaagaatacttagctgggcacagtgactcatgcctgtaatcccaacacttttgggaggctgaggtgggagaattgcttgaagccaggagttcaagactagcctgggcaacaaagcaagatcccaatcgctacaaataaataaataaataaaatacttaatgtatatgtaactacaagttaacagctggaaaacatggactaattttaaaaattaatcaagaaaagccagagaggaaaaagaaagaaaaaaaccacattggacaaatagaaaatagcaagctaataatctgtatccaaaaatattagtaattatagtaaatgtaaaatgcattaaaatattccattaaaactgtaaataatgtcagattggacaaaaaaactcaactatatacttcttaaaaaaaaaaagtacatttaaggacacagaacagctaaaactacaaggatggaaaaatacatatcatgctaaccactaaccaaataaaagctggggaagctacagtcataaga

SEQ ID NO: 319632 - DNA, 530 bp, Homo sapiens
acttactacttagctaaatgccctggtgagattctttaacattaagtctcagttcccacttctgtaatgatcccaatgctacaatctccttgaaacctatgaaattctaaacaaagaagtacgatgttatctcacaggaataacaacataatacacagttagcaaattcagggaagcagcaataagaagttttgagagaagagatttttcctaactgcaggaaaagaaaatcatccttatgtaattggcatgattaaaaatagccataaaccaaaaagtaaagaaacagagaacatgtaaaaattaacttataataaaagacatttcacatcagtgatgaatagaatgaaccataatatttccaaataaataagaattacagcaatgcctttgcctgatttcaaatttaatttttttaaacaacacttraaacacaggaaaagtgttttcaatctggaactagagaaagtcctacttgaagagcatgataaaaaattgcccaactgccataacagaaaagttctatatgt

SEQ ID NO: 319633 - DNA, 631 bp, Homo sapiens
ccttcttcatttggttttaggagtacagagattagtattaattctttaaatgtttggtggaattcagcagtgaagccatcaatcaggtcttgggcttttttttggtgaaagactttgcattactgatttaatctccttattattggtctgttcagattttctgtttcttcatgattccatcttggtagctctatgtgtctagaattttttccacttggttgtccaatttgttgacatgaaattgttcataatagtctcttacgattccttgtgtttctgtggtatctgttgtaatgtcttcccttttcgtttctcattttgtcttctttttttattagtctagctaaaggtttgtcaattttgttcatcttttcaaaatctcaattcttgattctgttactgttttctattgtttttccagtttctatttcatttgtatctgcccttatcttcattgttttctttttactaagttttggcttcatttrtgcttctttttctagttccttgaggttgtttacttgatatctttctttttgacatagatgtttattgttatgtatgtccttcttagacctgcttttgctgtatcccataagttttggttggtttggtgtccatttttgtttgt

SEQ ID NO: 319634 - DNA, 576 bp, Homo sapiens
tctttctatgactgaataatattctatttatagatatgccatgcttttgtttatccattcattcattggtggacatttgatctgtttctaccttttggctattatgaatagtgttgctgtaaacactcatatacaratttttgtgtggacatgtgtttcagttctcttgagtatataattaggagtggaattgttggttcatatggtaactgtaatggtaactctatgtttgacttttcaaggaaatgccaagctgttttccacagcagctataccattttacattcccaccagcaatgtatgagtgtttcattttcttcatatcctcaccaacacctgttattatagcatcctaatgggtgtagactggtatcattttggtttttatttgcatttccccaatgaaaaataattttgagcatcttctcatgttcttatggctatttgtgtatcttcttcggagaaatacctattcaacatctttgaggatttagtatcagtgtgcatcagggatattggcctgaaattttccttttttgttttgttttgttttttgctttaaatatgtcccagaga

SEQ ID NO: 319635 - DNA, 576 bp, Homo sapiens
tctttctatgactgaataatattctatttatagatatgccatgcttttgtttatccattcattcattggtggacatttgatctgtttctaccttttggctattatgaatagtgttgctgtaaacactcatatacagatttttgtgtggacatgtgtttcagttctcttgagtatataattaggagtggaattgttggttcatatggtaactgtaatggtaactctatgtttgacttttcaaggaaatgccaagctgttttccacagcagctataccattttacattcccaccagcaatgtatgagtgtttcattttcttcatatcctcaccaacacctgttattatagcatcctaatgggtgtagactggtatcattttggtttttatttgcatttccccaatgaaaaataattttgagcatcttctcatgttcttatggctatttgtgtatcttcttyggagaaatacctattcaacatctttgaggatttagtatcagtgtgcatcagggatattggcctgaaattttccttttttgttttgttttgttttttgctttaaatatgtcccagaga

SEQ ID NO: 319636 - DNA, 266 bp, Homo sapiens
ctttacctaggttttttggcagttttaattatgaaggcatgttgaattttattaaatgcttttttaacatcaattaaaatgatattaaaatgatygtatggtttttgccctacattctgttggtaggatgtatcacattgattgatttgcatatgttgaaccacccttacatccttgggataagttgtacttggtcatgatgaatatctttttaatgtgttgttgaatttgctttgctagtattttattgaggatttttgcatcaa

SEQ ID NO: 319637 - DNA, 266 bp, Homo sapiens
ctttacctaggttttttggcagttttaattatgaaggcatgttgaattttattaaatgcttttttaacatcaattaaaatgatattaaaatgatcgtatggtttttgccctacattctgttggtaggatgtatcacattgattgatttgcatatgttgaaccacccttacatccttgggataagttgtacttgrtcatgatgaatatctttttaatgtgttgttgaatttgctttgctagtattttattgaggatttttgcatcaa

SEQ ID NO: 319638 - DNA, 654 bp, Homo sapiens
tctaggaatttatccatttttttctgggttttccaattgattggcatatagttgctcacagtagccactaatgatcctttgaatttctgcagtatcagttgtaatgttcccttttacatctctgattttatttgcatcttcttgctttttttcttgatctggctaaatgtttgtcaattttgtttatctttaaaaaaacaactttttatttcattgatcttttgtattattttctttattttaatttcatttatttctgctctgatcttgtgtgtgtgtgtgagacagggtcttgctctgtcacgcaggctgatgtgcagtggcacaatcatggctcactgaagccttgaactctggggcacaagtgatcctctcacccctgccttctcagtagctgatactacagatgtgtgctaccccacccagctcmatttttttttcttttttttttttttagagacagagtctcatgttgtccaggctggtcttgaactcctggcctcaagcagtcctcctgccttggcctcctaaaggctaggattacagatacttggtctgccctcatcttttttatttcttttcttctgctaattttggatttaattttctcttgcttatctagttctttaagatgcatcattaggttgtttactt

SEQ ID NO: 319639 - DNA, 568 bp, Homo sapiens
tcttgtctgctccttacagtgcaggtggctggcaaagaagggatggtggagccaccattttgaaaatgtctagtccttagttcctggggcattcacctgtgcaagctcccagcttgcaggctgctgtttgttagaaaatgatttggggctgcttttcattaaaaagaaaagccttaccgaggacttccatgcccttgctatctgcttaartaattacttcttaactcctatatgacagtgagccataattgctctactgcactccaggctgggcaacagagcaagaccttgtctcaaaataaataaatgaataaatgaatagtaaataaatgaatgacaaaaaaaaaagattttctacctttctcagtgcctctttcaatgatatgaagtaaaaaccaggtagtgtgattgctcacctgatttgtggttcttatgaaggtgctttttttgtgtggatggttgttatgtttagtgttcctgtagggaggaagatcaatataagcttctatttagccatcatgctgtgtctctctctctgcttctcatgtagttagggacattcatgacc

SEQ ID NO: 319640 - DNA, 570 bp, Homo sapiens
ccttacagtgcaggtggctggcaaagaagggatggtggagccaccattttgaaaatgtctagtccttagttcctggggcattcacctgtgcaagctcccagcttgcaggctgctgtttgttagaaaatgatttggggctgcttttcattaaaaagaaaagccttaccgaggacttccatgcccttgctatctgcttaaataattacttcttaactcckatatgacagtgagccataattgctctactgcactccaggctgggcaacagagcaagaccttgtctcaaaataaataaatgaataaatgaatagtaaataaatgaatgacaaaaaaaaaagattttctacctttctcagtgcctctttcaatgatatgaagtaaaaaccaggtagtgtgattgctcacctgatttgtggttcttatgaaggtgctttttttgtgtggatggttgttatgtttagtgttcctgtagggaggaagatcaatataagcttctatttagccatcatgctgtgtctctctctctgcttctcatgtagttagggacattcatgaccctgaggcaaacag

SEQ ID NO: 319641 - DNA, 570 bp, Homo sapiens
ccttacagtgcaggtggctggcaaagaagggatggtggagccaccattttgaaaatgtctagtccttagttcctggggcattcacctgtgcaagctcccagcttgcaggctgctgtttgttagaaaatgatttggggctgcttttcattaaaaagaaaagccttaccgaggacttccatgcccttgctatctgcttaaataattacttcttaactcctatatgacagtgagccataattgctctactgcactccaggctgggcaacagagcaagaccttgtctcaaaataaayaaatgaataaatgaatagtaaataaatgaatgacaaaaaaaaaagattttctacctttctcagtgcctctttcaatgatatgaagtaaaaaccaggtagtgtgattgctcacctgatttgtggttcttatgaaggtgctttttttgtgtggatggttgttatgtttagtgttcctgtagggaggaagatcaatataagcttctatttagccatcatgctgtgtctctctctctgcttctcatgtagttagggacattcatgaccctgaggcaaacag

SEQ ID NO: 319642 - DNA, 598 bp, Homo sapiens
ggaagccaggcaacaccttcctgaattacctaccatttggctatrttatcaatgactaaatattaaatagggtgggtcaaggtccttacctagtgaagttatttttcttttgcacttaggttcataagcagtcctagcttccatgatggacactgatagaaaatctacttttaagactgctcaaaaagaaagctttgctggcggcttaggtacacttttgaaagggacgtgacatcagcagtgcttatgagtttcttatgaaaatttaatggaacttgtgatataaaatgaaatactggatcaacttatgacaggctgcctttaatgacagttcaagatacaaataactcatttcagagaccatttacctaaggcttttaaattaaattttctaagtaccttgcatattcaactctacatttaaagcaaacagaattccactttagggaactgaagctatttatggtcattaaaaaatagattcagataggcctttcaataaaagggtcagtgtatcaaaaatctgaaggatattactgtaaataaaaatctttattaagaactaaagagtgcaattgattttaaaggttgctattct

SEQ ID NO: 319643 - DNA, 598 bp, Homo sapiens
ggaagccaggcaacaccttcctgaattacctaccatttggctatgttatcaatgactaaatattaaatagggtgggtcaaggtccttacctagtgaagttatttttcttttgcacttaggttcataagcagtcctagcttccatgatggacactgatagaaaatctacttttaagactgctcaaaaagaaagctttgctggcrgcttaggtacacttttgaaagggacgtgacatcagcagtgcttatgagtttcttatgaaaatttaatggaacttgtgatataaaatgaaatactggatcaacttatgacaggctgcctttaatgacagttcaagatacaaataactcatttcagagaccatttacctaaggcttttaaattaaattttctaagtaccttgcatattcaactctacatttaaagcaaacagaattccactttagggaactgaagctatttatggtcattaaaaaatagattcagataggcctttcaataaaagggtcagtgtatcaaaaatctgaaggatattactgtaaataaaaatctttattaagaactaaagagtgcaattgattttaaaggttgctattct

SEQ ID NO: 319644 - DNA, 598 bp, Homo sapiens
ggaagccaggcaacaccttcctgaattacctaccatttggctatgttatcaatgactaaatattaaatagggtgggtcaaggtccttacctagtgaagttatttttcttttgcacttaggttcataagcagtcctagcttccatgatggacactgatagaaaatctacttttaagactgctcaaaaagaaagctttgctggcggcttaggtacacttttgaaagggacgtgacatcagcagtgcttatgagtttcttatgaaaatttaatggaacttgtgatataaaatgaaataytggatcaacttatgacaggctgcctttaatgacagttcaagatacaaataactcatttcagagaccatttacctaaggcttttaaattaaattttctaagtaccttgcatattcaactctacatttaaagcaaacagaattccactttagggaactgaagctatttatggtcattaaaaaatagattcagataggcctttcaataaaagggtcagtgtatcaaaaatctgaaggatattactgtaaataaaaatctttattaagaactaaagagtgcaattgattttaaaggttgctattct

SEQ ID NO: 319645 - DNA, 598 bp, Homo sapiens
ggaagccaggcaacaccttcctgaattacctaccatttggctatgttatcaatgactaaatattaaatagggtgggtcaaggtccttacctagtgaagttatttttcttttgcacttaggttcataagcagtcctagcttccatgatggacactgatagaaaatctacttttaagactgctcaaaaagaaagctttgctggcggcttaggtacacttttgaaagggacgtgacatcagcagtgcttatgagtttcttatgaaaatttaatggaacttgtgatataaaatgaaatactggatcaacttatgacaggctgcctttaatgacagttcaagatacaaataactcatttcagagaccatttacctaaggcttttaaattaaattttctaagtaccttgcatattcaactctacatttaaagcaaacagaattccactttagggaactgaagctatttatggtcatwaaaaaatagattcagataggcctttcaataaaagggtcagtgtatcaaaaatctgaaggatattactgtaaataaaaatctttattaagaactaaagagtgcaattgattttaaaggttgctattct

SEQ ID NO: 319646 - DNA, 367 bp, Homo sapiens
atgatgattctatgtgtatgtgtatacataaacagatcatttttcttcccttaaatacaaattaatcattaatttaaaaatggttcaagtatctaaacacactgctttatattctagagtaaytgtgcctgaacaactatgggttgcaaaggaaagaataacatcttaacgcctctctttttaacccctctgcccgcagatcccatgcttattcagctatagaaactcataggttactttaatgttactactgaacctggatatagaaaagaattctcctggaaccttcaactgcattgcctagaatttggactgtcatctgaaaaaggcacaggatggcaaatatccaaggaaaagctgcaatggc

SEQ ID NO: 319647 - DNA, 367 bp, Homo sapiens
atgatgattctatgtgtatgtgtatacataaacagatcatttttcttcccttaaatacaaattaatcattaatttaaaaatggttcaagtatctaaacacactgctttatattctagagtaactgtgcctgaacaactatrggttgcaaaggaaagaataacatcttaacgcctctctttttaacccctctgcccgcagatcccatgcttattcagctatagaaactcataggttactttaatgttactactgaacctggatatagaaaagaattctcctggaaccttcaactgcattgcctagaatttggactgtcatctgaaaaaggcacaggatggcaaatatccaaggaaaagctgcaatggc

SEQ ID NO: 319648 - DNA, 367 bp, Homo sapiens
atgatgattctatgtgtatgtgtatacataaacagatcatttttcttcccttaaatacaaattaatcattaatttaaaaatggttcaagtatctaaacacactgctttatattctagagtaactgtgcctgaacaactatgggttgcaaaggaaagaataacatcttaacgcctctctttttaacccctctgcccgcagatcccatgcttattcagctatagaaactcataggttactttaatgttactactgaacctggatatagaaaagaattctcctggaaccttcaactgcattgcctagaatttggactgtcatctgaaaaaggcacaggatrgcaaatatccaaggaaaagctgcaatggc

SEQ ID NO: 319649 - DNA, 451 bp, Homo sapiens
ttattcagctatagaaactcataggttactttaatgttactactgaacctggatatagaaaagaattctcctggaaccttcaactgcattgcctagaatttggactgtcatctgaaaaaggcacaggatggcaaatatccaaggaaaagctgcaatggcacctgttgcatgtccaagtttcagacacaaaaacaaacgtgctgagttttgtttttggctagaataaggtctctggatttgagacatctgtaaagtacacagmtcaggaaaactgccttctatagcaagtatgtgcaaggtatgctcttagaagcagtaactgaggggacaatgtccattcaggccagccagagaatatgtcatccacctcagagaaaggtatagggctggaggtccctgagtaggtagggggagggcagtaggaaggattctatagagtccaacaaagcat

SEQ ID NO: 319650 - DNA, 518 bp, Homo sapiens
agcattaatgtgtcttgttttttctttatgaacatttccttatttgaatcattaaaggcagatttaagaggggttttccctactcattcttaaagcagaacacaattttaaggtgtctgtatagaaataaattatactttgatgcttctttaatagccaaaggtaaaaaattgacaatttccttagaattagaaagggatgtactcacacttaccagtatttgtaaaaaacaaatatttyttaaacaaattgactagtcagtgacacacaagcatatgccattgtgtctgaagtttactttaggggctcctgtgtgacatgaaagtgttactatcagcttcacatttctgcctgctagcagctccaatttgtgcaaatttaaaggtttaaatttgttgtatatataaaggatattttaaaaaatatcctgcagcttattataattcaaaattataatgagtgaattatgcacactgaattacattaaaaataatctcacttaaaccatagaaacaaat

SEQ ID NO: 319651 - DNA, 528 bp, Homo sapiens
agtcagtgacacacaagcatatgccattgtgtctgaagtttactttaggggctcctgtgtgacatgaaagtgttactatcagcttcacatttctgcctgctagcagctccaatttgtgcaaatttaaaggtttaaatttgttgtatatataaaggatattttaaaaaatatcctgcagcttattataattcaaaattataatgagtgaattatgcacactgaattacattaaaaataatctcacttaaaccatagaaacaaatgatatataattgttttacacagttttgcttaattttgtcataaatcarttggagaccattctcttacattttgtttcttgcctcatataggtcagacataacattggtgcttttcaatgcttctaattttcaaagtggttaaaatttattttccattttagcaatttttaggtactcagcctatttgtaacaaccaaagggagaaataaaatgtgtcttatgaagagacatgcattactgggcaaaatatacggcgattagaaaa

SEQ ID NO: 319652 - DNA, 528 bp, Homo sapiens
agtcagtgacacacaagcatatgccattgtgtctgaagtttactttaggggctcctgtgtgacatgaaagtgttactatcagcttcacatttctgcctgctagcagctccaatttgtgcaaatttaaaggtttaaatttgttgtatatataaaggatattttaaaaaatatcctgcagcttattataattcaaaattataatgagtgaattatgcacactgaattacattaaaaataatctcacttaaaccatagaaacaaatgatatataattgttttacacagttttgcttaattttgtcataaatcagttggagaccattctcttacattttgtttcttgcctcatataggwcagacataacattggtgcttttcaatgcttctaattttcaaagtggttaaaatttattttccattttagcaatttttaggtactcagcctatttgtaacaaccaaagggagaaataaaatgtgtcttatgaagagacatgcattactgggcaaaatatacggcgattagaaaa

SEQ ID NO: 319653 - DNA, 528 bp, Homo sapiens
agtcagtgacacacaagcatatgccattgtgtctgaagtttactttaggggctcctgtgtgacatgaaagtgttactatcagcttcacatttctgcctgctagcagctccaatttgtgcaaatttaaaggtttaaatttgttgtatatataaaggatattttaaaaaatatcctgcagcttattataattcaaaattataatgagtgaattatgcacactgaattacattaaaaataatctcacttaaaccatagaaacaaatgatatataattgttttacacagttttgcttaattttgtcataaatcagttggagaccattctcttacattttgtttcttgcctcatataggtcagacataacattggtgcttttcaatgcttctaattttcaaagtggttaaaatttattttccattttagcaatttttaggtactcagcctatttrtaacaaccaaagggagaaataaaatgtgtcttatgaagagacatgcattactgggcaaaatatacggcgattagaaaa

SEQ ID NO: 319654 - DNA, 291 bp, Homo sapiens
atcacttaaaacttgaatgacacagcagcttagacattgcatcaaactgcaktttcatacaatgctgtacatggtcagtggcagatcatattcacttaacctccaaatactgtcaggtatctttgttttatcatgaatttcatagagcagcaaaggttttaattcggggcgactgatggaacaaataaaaaatctcaaaaggcatctgagaaagaaacttgaagaaactcagttaagagactcaactaaagtagatttaatggttctcattaacttggatctaattcactg

SEQ ID NO: 319655 - DNA, 416 bp, Homo sapiens
acaacatttctagggtgggagagtgctgaatacagtgagaaattattcatatttctasggtgagatgcagaatgatatgagaaattctacataggtagcatccttctttgttttaagaggtcctacatctcaagatgcacagggtcataaactgagttttctcatgatttctgaatattctggctcccatatgtgtgttttttcatcattagtagatagacatcggtttgttgttgtttcagctttttaatgacaggaaatcactctccacagaaggttaaaggtagcccactgtgtctgtagagttctcttggaatcacttaggagaactggaaactaagaggcagaaacagaatagagggagagaaaggtctggtgagataagcatcttgaaaaagtaatagataggaagagag

SEQ ID NO: 319656 - DNA, 416 bp, Homo sapiens
acaacatttctagggtgggagagtgctgaatacagtgagaaattattcatatttctacggtgagatgcagaatgatatgagaaattctacataggtagcatccttctttgttttaagaggtcctacatctcaagatgcayagggtcataaactgagttttctcatgatttctgaatattctggctcccatatgtgtgttttttcatcattagtagatagacatcggtttgttgttgtttcagctttttaatgacaggaaatcactctccacagaaggttaaaggtagcccactgtgtctgtagagttctcttggaatcacttaggagaactggaaactaagaggcagaaacagaatagagggagagaaaggtctggtgagataagcatcttgaaaaagtaatagataggaagagag

SEQ ID NO: 319657 - DNA, 416 bp, Homo sapiens
acaacatttctagggtgggagagtgctgaatacagtgagaaattattcatatttctacggtgagatgcagaatgatatgagaaattctacataggtagcatccttctttgttttaagaggtcctacatctcaagatgcacagggtcataaactgagttttctcatgatttctgaatattctggctcccatatgygtgttttttcatcattagtagatagacatcggtttgttgttgtttcagctttttaatgacaggaaatcactctccacagaaggttaaaggtagcccactgtgtctgtagagttctcttggaatcacttaggagaactggaaactaagaggcagaaacagaatagagggagagaaaggtctggtgagataagcatcttgaaaaagtaatagataggaagagag

SEQ ID NO: 319658 - DNA, 416 bp, Homo sapiens
acaacatttctagggtgggagagtgctgaatacagtgagaaattattcatatttctacggtgagatgcagaatgatatgagaaattctacataggtagcatccttctttgttttaagaggtcctacatctcaagatgcacagggtcataaactgagttttctcatgatttctgaatattctggctcccatatgtgtgttttttcatcattagtagatagacatcggtttgttgttgtttcagctttttaatgacaggaaatcactctccayagaaggttaaaggtagcccactgtgtctgtagagttctcttggaatcacttaggagaactggaaactaagaggcagaaacagaatagagggagagaaaggtctggtgagataagcatcttgaaaaagtaatagataggaagagag

SEQ ID NO: 319659 - DNA, 547 bp, Homo sapiens
aggacttcttaaagttatttcccaaatgcaarctattgagtagagtcccttcaacacaccaggtaggataatttgcctatttagaaaaatgacaagtattagcaaagtcaaacttcctcatgttatccagtatactagatgggggtcaatgagttttgcagttgaaatgatcttaactatgtaataattttgaaaataattcatataggataaacataaagttcttagagctaaagcttaagcagttggttaataatttattctctcccctatatatatattaaaatatattgatgcataagagtgttccaaaattgtaagaatgggaacaaagcatacaattataactaaagaggatcattcttacaatgtaaagaagcaattataagctgcatgttgaaatatttcaacctccaaaggaactgaaattgtcaataaaatctttctatacctggaaactcacagatgtgtacaaatcaaataatgcgatgaaataacttcaaaacacctgtcttgctacaaacacattacagaaattcattcttat

SEQ ID NO: 319660 - DNA, 562 bp, Homo sapiens
agactctatcgaaaaccaaatctcctagatagtttaacaaaatataaatagggagaaaaataggtattattcagaggaaaattgaaattcaacttgtactatactgcatcgaggtggcagctgcggaacagcttaatcctcacgacaagcccagaactctacaataacggctggcactgtctgatgaaatttccaaggacccagatgccacagctgggaacattatccttgtgtttcagatcaaattgatacagcaaatggcatttcattcttaactctttggtatctacaatgaactttcctcaaagaattgaaatattctaytataaaggataagttgccaagggtaatggggagggatgaatgaaaagaataatacttttattagaaaaagaaagtgaagaagaaattgtaactatggctcaaagaaggaaaaatagaaaataagagtgattttttaaaatgataaactacagagggatagaggagttgtaacaacatcaggttgatggatgccctaaaaattacaggatgccctaaaaattcctctaaaggtttatgt

SEQ ID NO: 319661 - DNA, 581 bp, Homo sapiens
acattatccttgtgtttcagatcaaattgatacagcaaatggcatttcattcttaactctttggtatctacaatgaactttcctcaaagaattgaaatattctactatawaggataagttgccaagggtaatggggagggatgaatgaaaagaataatacttttattagaaaaagaaagtgaagaagaaattgtaactatggctcaaagaaggaaaaatagaaaataagagtgattttttaaaatgataaactacagagggatagaggagttgtaacaacatcaggttgatggatgccctaaaaattacaggatgccctaaaaattcctctaaaggtttatgtttctatgaatttattcatttcctctaggttttccagtttgttagtttatagctgttcataaatgtctctgatgatcttttttatttctgtggttatcagttgtaagtctcctttttcatttctaattttgtttatttggattttctcattttttagtctagctagcaatttatgtattttgtttatcatttcaaaaaaccacatttttgttttgttgattctttgtatttttttccat

SEQ ID NO: 319662 - DNA, 483 bp, Homo sapiens
ctcctttttcatttctaattttgtttatttggattttctcattttttagtctagctagcaatttatgtattttgtttatcatttcaaaaaaccacatttttgttttgttgattctttgtatttttttccatctctactttgtttagttctgcttttmtctttattatttatttatttgtatgaattttgggtttgttttgtttttgcttttatagttcattgaagtacattgctagattgtttctttgaaatctactgtttcgatgttggcatttattgtattgttccagacttccctgttagcactgcttttgttgtatcttataagcttttgtaatgttgtgtttttattttcatttatttttaataaatttttaaatttcctccctaatccagtggttaggagcatgttttcatgtatttgtagtttctgaagttcctcttttttattgacttatagtttgattccattgtggtttgaga

SEQ ID NO: 319663 - DNA, 348 bp, Homo sapiens
tgaaggataattttgctggatattgtatccttggctggcatttatttttccttcttcaggcttatgaagtgtctgctggraactccactgttagtttgataggggttcccttgtaagtgactagacactttctcttgctgtttttagaactctctgtcttttgagagttttactataatatactatggataagacctttttgaattgtatccatttgaagttctctgagtttcttgtatctgctattattttgtgaaataggttttttaccctttttgttttatctttaacttctgggacaccaaaacattgaatatttggtaatttatgatgtcctatatgtcatat

SEQ ID NO: 319664 - DNA, 547 bp, Homo sapiens
aggacttcttaaagttatttcccaaatgcaaactattgagtagagtcccttcaacacaccaggtaggataatttgcctatttagaaaaatgacaagtattagcaaagtcaaacttcctcatgttatccagtatactagatgggggtcaatgagttttgcagttgaaatgatcttaactatgtaataattttgaaaataattcatataggataaacataaagttcttagagctaaagcttaagcagttggttaataatttattctctcccctatatatatattaaaatatattgatgcataagagtgttccaaaattgtaagaatgggaacaaagcatacaattataactaaagaggatcattcttacaatgtaaagaagcaattataagctgcatgttgaawtatttcaacctccaaaggaactgaaattgtcaataaaatctttctatacctggaaactcacagatgtgtacaaatcaaataatgcgatgaaataacttcaaaacacctgtcttgctacaaacacattacagaaattcattcttat

SEQ ID NO: 319665 - DNA, 301 bp, Homo sapiens
gctgttgtattttatgtaatttagtaacctgcacactgcaatgcagacatggaagccatagagccatgtgatccttatatactgtgaatcctacagctcatctgttatggggagaaggaggatctttttctgttttcttrtgatagtgttatttttctactttctcctgtgaccttttttttctctttacagagagtttcagaatttctccccagcaatcctctgaggggctctcttaaccctctcacctactctgcgcctcagtaaatttctgttttacagccatgttacatatatgacc

SEQ ID NO: 319666 - DNA, 301 bp, Homo sapiens
gctgttgtattttatgtaatttagtaacctgcacactgcaatgcagacatggaagccatagagccatgtgatccttatatactgtgaatcctacagctcatctgttatggggagaaggaggatctttttctgttttcttgtgatagtgttattttyctactttctcctgtgaccttttttttctctttacagagagtttcagaatttctccccagcaatcctctgaggggctctcttaaccctctcacctactctgcgcctcagtaaatttctgttttacagccatgttacatatatgacc

SEQ ID NO: 319667 - DNA, 547 bp, Homo sapiens
aggacttcttaaagttatttcccaaatgcaaactattgagtagagtcccttcaacacaccaggtaggataatttgcctatttagaaaaatgacaagtattagcaaagtcaaacttcctcatgttatccagtatactagatgggggtcaatgagttttgcagttgaaatgatcttaactatgtaataattttgaaaataattcatataggataaacataaagttcttagagctaaagcttaagcagttggttaataatttattctctcccctatatatatattaaaatatattgatgcataagagtgttccaaaattgtaagaatgggaacaaagcatacaattataactaaagaggatcattcttacaatgtaaagaagcaattataagctgcatgttgaaatatttcaacctccaaaggaactgaaattgtcaayaaaatctttctatacctggaaactcacagatgtgtacaaatcaaataatgcgatgaaataacttcaaaacacctgtcttgctacaaacacattacagaaattcattcttat

SEQ ID NO: 319668 - DNA, 547 bp, Homo sapiens
aggacttcttaaagttatttcccaaatgcaaactattgagtagagtcccttcaacacaccaggtaggataatttgcctatttagaaaaatgacaagtattagcaaagtcaaacttcctcatgttatccagtatactagatgggggtcaatgagttttgcagttgaaatgatcttaactatgtaataattttgaaaataattcatataggataaacataaagttcttagagctaaagcttaagcagttggttaataatttattctctcccctatatatatattaaaatatattgatgcataagagtgttccaaaattgtaagaatgggaacaaagcatacaattataactaaagaggatcattcttacaatgtaaagaagcaattataagctgcatgttgaaatatttcaacctccaaaggaactgaaattgtcaataaaatctttctatacctggaaactcacagatrtgtacaaatcaaataatgcgatgaaataacttcaaaacacctgtcttgctacaaacacattacagaaattcattcttat

SEQ ID NO: 319669 - DNA, 474 bp, Homo sapiens
cttcactcttaaataccaatcagtgtatgagaaaaaaaatttcacaactttcttgcatttctttgcttttatgtttgtaacttccatgtttaatacagttctgattttcagtaactacagaataaacatttgctaagctgacttgaactaaagatatctttgccaaagatatgctatttaaggtagatatgcttaattaaaagaatagataatttcaaaatgaaatggatattattttcctgctagtcactatactatactatgaagaaaaattgcttaagataaaaattaagaatcccaaattgtgctgacatagaaaatacaatttasaataaaatgctatctataaaatgttaaagtgatgattcccacataagaataagagtttggcaccgttttactaaaataattgctcagcctctgccggtacacttttctatttatgatgacaggtgtcaattcccattcatttct

SEQ ID NO: 319670 - DNA, 474 bp, Homo sapiens
cttcactcttaaataccaatcagtgtatgagaaaaaaaatttcacaactttcttgcatttctttgcttttatgtttgtaacttccatgtttaatacagttctgattttcagtaactacagaataaacatttgctaagctgacttgaactaaagatatctttgccaaagatatgctatttaaggtagatatgcttaattaaaagaatagataatttcaaaatgaaatggatattattttcctgctagtcactatactatactatgaagaaaaattgcttaagataaaaattaagaatcccaaattgtgctgacatagaaaatacaatttacaataaaatgctatstataaaatgttaaagtgatgattcccacataagaataagagtttggcaccgttttactaaaataattgctcagcctctgccggtacacttttctatttatgatgacaggtgtcaattcccattcatttct

SEQ ID NO: 319671 - DNA, 474 bp, Homo sapiens
cttcactcttaaataccaatcagtgtatgagaaaaaaaatttcacaactttcttgcatttctttgcttttatgtttgtaacttccatgtttaatacagttctgattttcagtaactacagaataaacatttgctaagctgacttgaactaaagatatctttgccaaagatatgctatttaaggtagatatgcttaattaaaagaatagataatttcaaaatgaaatggatattattttcctgctagtcactatactatactatgaagaaaaattgcttaagataaaaattaagaatcccaaattgtgctgacatagaaaatacaatttacaataaaatgctatctataaaatgttaaagtgatgattcccacataagaataagagtttggcaccrttttactaaaataattgctcagcctctgccggtacacttttctatttatgatgacaggtgtcaattcccattcatttct

SEQ ID NO: 319672 - DNA, 480 bp, Homo sapiens
ttctcatacatgtactttggggatttttctaaaagttgataccattttatcattcagtgcaattgtatttcttgtaaacacagtcaacaaaaaagctctacactaaaaaaaaaatgtctaacaaaaagcataagattattgaacatcatgagagtttgcagattttatgagcagtagttaaggacaagtccawctggttacattttgatgagttactcacggtttgtgtgggagctccagcctgctcaatcttacctgctgataataccaattgaatggctagatccttatatagaatggtttctgttaagaaagactaggaaggaagttcaaatccagagagatggccaaattatctctgataaaatgggacaagttcgcttagtgagaaaaatcatggattttaaaattcaactgtgattctgactttagttgtaggaatatatgcacgacaagaaatgaagggctgatttacatgcc

SEQ ID NO: 319673 - DNA, 360 bp, Homo sapiens
attgcctaacctctccatatctccatttcctcaaaaaaaaaaaaaatggggatagyaagtgtgatggttaattttaggtgtcagtttgactggattaaggaatatctagagaacaggcaaagcattatttctgggtatgtccctgaaagtatttccagaggagaatgttccagtgaatctgtggactgagtgggggaagatctaccctcaatgtgagtggtaaccatcaaatcgactgagggcccagatagaacaaaaacagcagggggaaaactggtgttttctttctttctttcctttttctttttttccccctctctctcctggatctggaacactcttcatctcttacctttggac

SEQ ID NO: 319674 - DNA, 612 bp, Homo sapiens
gtcttataccagcaagactcctctgccctcctgccagtggttctcaggcctttggcttcagactgggacttataccattggctcccgtggttctcaggcctttggacttggactgaattacaccactgactttcctggttctccagcttgaagaaggcagatggtgggactttttgactcccgtaatcatatgagtgaatttccataatctttctttctcactctttctccctctttctttgaagaactctaatacaaatgaaacagttccctaaatagttaataatgaaattattaataatgacccagccatttcacttctcaatatttatccaagagacatgaaaatrttatctcaattcaaacactatacaggactattcatagcagctttatttgtaatagtcaaaactagaaacaatccaaatattcatcaacaggtaattgtgcatataacatgtgatatatccatataatagaatactgctcagcagtaaaaaggaataaactattgatatatgcaacaacatggatggacctcatagtacatattctataactatttgcataaaattctagaaaatgccagtgaatctaaaattacagaaagta

SEQ ID NO: 319675 - DNA, 612 bp, Homo sapiens
gtcttataccagcaagactcctctgccctcctgccagtggttctcaggcctttggcttcagactgggacttataccattggctcccgtggttctcaggcctttggacttggactgaattacaccactgactttcctggttctccagcttgaagaaggcagatggtgggactttttgactcccgtaatcatatgagtgaatttccataatctttctttctcactctttctccctctttctttgaagaactctaatacaaatgaaacagttccctaaatagttaataatgaaattattaataatgacccagccatttcacttctcaatatttatccaagagacatgaaaatgttatctcaattcaaacactatacaggactattcatarcagctttatttgtaatagtcaaaactagaaacaatccaaatattcatcaacaggtaattgtgcatataacatgtgatatatccatataatagaatactgctcagcagtaaaaaggaataaactattgatatatgcaacaacatggatggacctcatagtacatattctataactatttgcataaaattctagaaaatgccagtgaatctaaaattacagaaagta

SEQ ID NO: 319676 - DNA, 529 bp, Homo sapiens
ctggcattatcattttggtgagcctttagsaagaaggaataggcaaaatggacctgaggcagcagtggcagggaagagccagaagaatggccctgaactatggggtgataaaagtgtcaacccccaacttgacacctttgcttctgctcttaaagacctagaaattggagcccaagaggagtcaaattctgggtggaggggagtcaccaagagcacacacatcatcacctgaaatgagtgtatagccaatcctgtggtcccactcaggcctaagcctgaagattagaggaagaacaactaggattactaccttcccttgtttattgttcttagttaaatggagtttattctatgctgagagcatgatatgctataaggccttgttaagaggttaagagtagattaaatctatgtggattagttatggagaaacagaataaggtatttacccctttctttaaattatttaaattatgggatagcttaaacaagaagaagggacagacagttaccaggtagggaaagtctc

SEQ ID NO: 319677 - DNA, 600 bp, Homo sapiens
gcaattacatgggatgcttcagctctgaaaggctgaaaacgaaagaaaaagagatcaaaaacaagaggtaaaaacattatttatagtacctgtattatcatatatttatgagctaamcaatcgattatagtgctcaagtccaatatgatttccccttttaaaaaaaaaacacactctcaaaaagagcctttcatttgtgtaaagattcaaataggtaaaagacacataaacatgataaccaaaagtccatcacagtatatgatgaaatatccaattaagccagcaataactatggaccaaagcaagcactttatttctactttaaggcctatgttttgtccatcgtactgtcctttaactaaatgctactgacaatgactctaccatcctgtcacaatgtggctattgttttctcccccatacaaaaatcttctaaatgatttgggccccccaaaaaatagtataagttcaaaagtgttcctggataaataaatcctttcatgtggaaatatctgcgattccttttatgcagaaaacaaaacaaaaggcaaaggaaataatttcctctgcctcaaatggatgttctttgtatatctccac

SEQ ID NO: 319678 - DNA, 600 bp, Homo sapiens
gcaattacatgggatgcttcagctctgaaaggctgaaaacgaaagaaaaagagatcaaaaacaagaggtaaaaacattatttatagtacctgtattatcatatatttatgagctaaccaatcrattatagtgctcaagtccaatatgatttccccttttaaaaaaaaaacacactctcaaaaagagcctttcatttgtgtaaagattcaaataggtaaaagacacataaacatgataaccaaaagtccatcacagtatatgatgaaatatccaattaagccagcaataactatggaccaaagcaagcactttatttctactttaaggcctatgttttgtccatcgtactgtcctttaactaaatgctactgacaatgactctaccatcctgtcacaatgtggctattgttttctcccccatacaaaaatcttctaaatgatttgggccccccaaaaaatagtataagttcaaaagtgttcctggataaataaatcctttcatgtggaaatatctgcgattccttttatgcagaaaacaaaacaaaaggcaaaggaaataatttcctctgcctcaaatggatgttctttgtatatctccac

SEQ ID NO: 319679 - DNA, 603 bp, Homo sapiens
gccttgggataatttttaacttgtcaaggaaacagacaactgacttttgtggttgggtcaggataaaaggataaagataaaagggaataatttgtatttccccacctctccagagtgctgtataatttactttcacatggcccaattgtaaactcaccacctctctaaaggcttaataaaaattagggctttacttgtattctatcatctaaaaatattctgacttgacgagcatactaaatatctagctagaatatgtgctatgtgttgttggggctcagaagataataccctacaatatggcatgttggcatgctgagtgctttgaacaaagaagattgaaaagcctcagaaatgagcctcagaactaaggtcgctctctctgaccttctcctgccctttcttctctttccttttgctagtgcagagaggagctttctcaagttcccttatctgactgaaggaagttcttccaaaaggaatgcaattgtcttgaaccccttccctaggaatctcatcaaacaacyagaaaagattatttaccagaaaggacattaaaagtcatcactacatccaggctgggcaccgtggggctcacgcctg

SEQ ID NO: 319680 - DNA, 603 bp, Homo sapiens
gccttgggataatttttaacttgtcaaggaaacagacaactgacttttgtggttgggtcaggataaaaggataaagataaaagggaataatttgtatttccccacctctccagagtgctgtataatttactttcacatggcccaattgtaaactcaccacctctctaaaggcttaataaaaattagggctttacttgtattctatcatctaaaaatattctgacttgacgagcatactaaatatctagctagaatatgtgctatgtgttgttggggctcagaagataataccctacaatatggcatgttggcatgctgagtgctttgaacaaagaagattgaaaagcctcagaaatgagcctcagaactaaggtcgctctctctgaccttctcctgccctttcttctctttccttttgctagtgcagagaggagctttctcaagttcccttatctgactgaaggaagttcttccaaaaggaatgcaattgtcttgaaccccttccctaggaatctcatcaaacaaccagaaaagattatttaccagaaaggacattaaaagtcatcactacatccaggctgggcacmgtggggctcacgcctg

SEQ ID NO: 319681 - DNA, 511 bp, Homo sapiens
gctgtggcatggatgaaacttgagaacattatactaagtaaatgagacaggcacagaagacaaatactgtatgattctacttctgtgaggtgcctaaaatagtcaaatttatagagaaataaagtagtttaggagaagaaaactttccctctatcctgttaggttctctatctggggcacactcatcaaattgagaaaagacagattaacagtagaaaaggcatgcaaattttaatatttttacatgtacaggtacttcacagaaaagaagtgaaaacccaaagaagtggttaaactctagcctgggtgacagagtgagactccgtctcaaaaaaaaaaaaaaaaaaaaaggagtggttagactcaagggtttatgtrccattttaacaaagggcgataggttgtggagaagtaactagaaagtgaaaagaacattgggtttctaacaatggtaaattgttggaaggtactaggaaatgtatggtagatacagaatgtttagtaaggtttg

SEQ ID NO: 319682 - DNA, 511 bp, Homo sapiens
gctgtggcatggatgaaacttgagaacattatactaagtaaatgagacaggcacagaagacaaatactgtatgattctacttctgtgaggtgcctaaaatagtcaaatttatagagaaataaagtagtttaggagaagaaaactttccctctatcctgttaggttctctatctggggcacactcatcaaattgagaaaagacagattaacagtagaaaaggcatgcaaattttaatatttttacatgtacaggtacttcacagaaaagaagtgaaaacccaaagaagtggttaaactctagcctgggtgacagagtgagactccgtctcaaaaaaaaaaaaaaaaaaaaaggagtggttagactcaagggtttatgtaccattttaacaaagggcgataggttgtggagaagtaactagaaagtgaaaagaacattgggtttctaacratggtaaattgttggaaggtactaggaaatgtatggtagatacagaatgtttagtaaggtttg

SEQ ID NO: 319683 - DNA, 618 bp, Homo sapiens
aactattattaatatctatatacacgaatctttgtacctggaattaaaaacattttaacagatttaaatttaactttctttcaaagaaaggtgtttgtttttctttttaccaggagcagatgaatattcctagagagtttatttcttttttataaagaacaaatgttttttctccctccacatatgatttaaaatatctatgttcttctgtattaacactaatatggtctgccagagcttgaatttatgagcttcccaaacagttgtgtgcctrcatattcctccttgtacttcttagtttttatttcacattttgtcaaatgaaagtgtatatctctgttttatggattcaatttttaagcgataatttttgcccacttaataattggtatcttaaatgtggcttggtctaaaattaatattgttacccctggtgtttactgtttttatttcggcttgagtttgatatcttttctacaaggcttttatttttaacccattgtaatcattctgttattgtttcttttgtaagcagtgtatcataaccttataatttaattgagaaatctatattattcacattcatgatctgaaggatttgatatgttattttataat

SEQ ID NO: 319684 - DNA, 577 bp, Homo sapiens
ttttctgaaccctctgtcattgagactgtctttttgttatcttcacatgtgaatgacaacttggcagagctacatccttgtattatttgccttttctccctaaaaattcattgtgtgcttactacatattgcaaagaaaaaaatttyaggccagcctaatattgttccttgatggagaggccagtttctttgctttttctgcctagagccttatggactttattttagcctgttaatggggcactttcatagaatatgtagattttgctctgttgatggatatttacttggaaaatagttgagttggccttttaaactaagttataatgtctttaactagctttgacaagttttattcaattctgtcactcaccatggcctctgttacgtgtttctagttacatctttgggaataattgtaattcttaacatagtttcttcattctctgggttccacatccgtcaaattttcattattttttaaatcacttatcatttttggttgagtttcagatcatcttcctttaataaagtttgtggttgaatctacagttttctatatttccagttcactttc

SEQ ID NO: 319685 - DNA, 427 bp, Homo sapiens
gtcactcaccatggcctctgttacgtgtttctagttacatctttgggaataattgtaattcttaacatagtttcttcattctctgggttccacatcygtcaaattttcattattttttaaatcacttatcatttttggttgagtttcagatcatcttcctttaataaagtttgtggttgaatctacagttttctatatttccagttcactttccatttgatgccaggtgaaccctcttctgaaacaacagcatggatattcctgccctggtttagttcccagtcacaccgaatatgtatatctatctcatgaagatagtttcttccctttccatatcagacttaatttgacaagaccatacaccatgtgtcactagagatattttggcttccacttccactgacagtccttctgcctggggatggtg

SEQ ID NO: 319686 - DNA, 577 bp, Homo sapiens
ttttctgaaccctctgtcattgagactgtctttttgttatcttcacatgtgaatgacaacttggcagagctacatccttgtattatttgccttttctccctaaaaattcattgtgtgcttactacatattgcaaagaaaaaaattttaggccagcctaatattgttccttgatggagaggccagtttctttgctttttctgcctagagccttatggactttattttagcctgttaatggggcactttcatagaatatgtagattttgctctgttgatggatatttacttggaaaatagttgagttggccttttaaactaagttataatgtctttaactagctttgacaagttttattcaattctgtcactcaccatggcctctgttacgtgtttctagttacatctttgggaataattgtaattcttaacatagtttcttcattctctgggttccacatccgtcaaattttcattattttttaaatcrcttatcatttttggttgagtttcagatcatcttcctttaataaagtttgtggttgaatctacagttttctatatttccagttcactttc

SEQ ID NO: 319687 - DNA, 427 bp, Homo sapiens
gtcactcaccatggcctctgttacgtgtttctagttacatctttgggaataattgtaattcttaacatagtttcttcattctctgggttccacatccgtcaaattttcattattttttaaatcacttatcatttttggttgagtttcagatcatcttcctttaataaagtttgtggtygaatctacagttttctatatttccagttcactttccatttgatgccaggtgaaccctcttctgaaacaacagcatggatattcctgccctggtttagttcccagtcacaccgaatatgtatatctatctcatgaagatagtttcttccctttccatatcagacttaatttgacaagaccatacaccatgtgtcactagagatattttggcttccacttccactgacagtccttctgcctggggatggtg

SEQ ID NO: 319688 - DNA, 427 bp, Homo sapiens
gtcactcaccatggcctctgttacgtgtttctagttacatctttgggaataattgtaattcttaacatagtttcttcattctctgggttccacatccgtcaaattttcattattttttaaatcacttatcatttttggttgagtttcagatcatcttcctttaataaagtttgtggttgaatctacagttttctatatttccagttcactttccatttgatgccaggtgaaccctcttctgaaacaacagcatggatattcctgccctggtttagttcccagtcacacygaatatgtatatctatctcatgaagatagtttcttccctttccatatcagacttaatttgacaagaccatacaccatgtgtcactagagatattttggcttccacttccactgacagtccttctgcctggggatggtg

SEQ ID NO: 319689 - DNA, 427 bp, Homo sapiens
gtcactcaccatggcctctgttacgtgtttctagttacatctttgggaataattgtaattcttaacatagtttcttcattctctgggttccacatccgtcaaattttcattattttttaaatcacttatcatttttggttgagtttcagatcatcttcctttaataaagtttgtggttgaatctacagttttctatatttccagttcactttccatttgatgccaggtgaaccctcttctgaaacaacagcatggatattcctgccctggtttagttcccagtcacaccgaatatgtatatctatctcatgaagatrgtttcttccctttccatatcagacttaatttgacaagaccatacaccatgtgtcactagagatattttggcttccacttccactgacagtccttctgcctggggatggtg

SEQ ID NO: 319690 - DNA, 346 bp, Homo sapiens
gctcttaagagagtttgtctatcttagcctatttgggggaatctttgaaattgcttcttcactgaagaggctattggattgagtcattattggaataagcgcactgttggaaattctaattaatcagtggacaaaagatggatcctttaaattagaaagcttcctgaattaaaaaaaaaagaagaagaagaagaagaattttagagatmacttattctaaacaactgatgggaagattaaattagaagaaagacacgtaatagtacaatggctagcctttgaaattctcttgactaaattaaagagcaaaaatctgacctaaaacaaagttaaaatcctttgtatt

SEQ ID NO: 319691 - DNA, 346 bp, Homo sapiens
gctcttaagagagtttgtctatcttagcctatttgggggaatctttgaaattgcttcttcactgaagaggctattggattgagtcattattggaataagcgcactgttggaaattctaattaatcagtggacaaaagatggatcctttaaattagaaagcttcctgaattaaaaaaaaaagaagaagaagaagaagaattttagagatcacttattctaaacaaytgatgggaagattaaattagaagaaagacacgtaatagtacaatggctagcctttgaaattctcttgactaaattaaagagcaaaaatctgacctaaaacaaagttaaaatcctttgtatt

SEQ ID NO: 319692 - DNA, 599 bp, Homo sapiens
cagattagaatatagagtttataggagaaaaggaaagtgtgtcagaaggaattatggttgggaaagcaaagaccttgtattgtaaaagtaaaaaaaattatatatctctgaaggtgcttgtaaaccatttacaataataggaaaaaggaacagaaaaagaaaaaacagggttatttgataaagagaaggggattgaaccaacgactctgtcaaatctaattatgaatgyatccttccctttaagaagggcttggtagatcaaaggtaaattcaaattatatatttatttgctactactgtgaagtttcttgagccatttaataatctcattcagtcacccacgaaactcttattctcctgcaaatgattatccatgttatgagttggtttttaagtctcctaacaaagattgcttacaaaaacatgtctttaaccctgtagcccttgtcccaggttctgacagtctgtctctatttgtgttactggattgatggtccaggaaagagtgcaggaatgtgcatgtatcttgttttccgaaggaaaataaccatgataagttttaaaaattattttgatacttccctttctaccaaattagt

SEQ ID NO: 319693 - DNA, 599 bp, Homo sapiens
cagattagaatatagagtttataggagaaaaggaaagtgtgtcagaaggaattatggttgggaaagcaaagaccttgtattgtaaaagtaaaaaaaattatatatctctgaaggtgcttgtaaaccatttacaataataggaaaaaggaacagaaaaagaaaaaacagggttatttgataaagagaaggggattgaaccaacgactctgtcaaatctaattatgaatgtatccttccctttaagaagggcttggtagatcaaaggtaaattcaaattatatatttatttgctactactgtgaagtttcttgagccatttaataatctcattcagtcacccaygaaactcttattctcctgcaaatgattatccatgttatgagttggtttttaagtctcctaacaaagattgcttacaaaaacatgtctttaaccctgtagcccttgtcccaggttctgacagtctgtctctatttgtgttactggattgatggtccaggaaagagtgcaggaatgtgcatgtatcttgttttccgaaggaaaataaccatgataagttttaaaaattattttgatacttccctttctaccaaattagt

SEQ ID NO: 319694 - DNA, 599 bp, Homo sapiens
cagattagaatatagagtttataggagaaaaggaaagtgtgtcagaaggaattatggttgggaaagcaaagaccttgtattgtaaaagtaaaaaaaattatatatctctgaaggtgcttgtaaaccatttacaataataggaaaaaggaacagaaaaagaaaaaacagggttatttgataaagagaaggggattgaaccaacgactctgtcaaatctaattatgaatgtatccttccctttaagaagggcttggtagatcaaaggtaaattcaaattatatatttatttgctactactgtgaagtttcttgagccatttaataatctcattcagtcacccacgaaactcttattctcctgcaaatgattatccatgttatgagttggtttttaagtctcctaacaaagattgcttacaaaaacatgtctttaaccctgtagcccttgtcccaggttctgacagtctgtctctatttgygttactggattgatggtccaggaaagagtgcaggaatgtgcatgtatcttgttttccgaaggaaaataaccatgataagttttaaaaattattttgatacttccctttctaccaaattagt

SEQ ID NO: 319695 - DNA, 599 bp, Homo sapiens
cagattagaatatagagtttataggagaaaaggaaagtgtgtcagaaggaattatggttgggaaagcaaagaccttgtattgtaaaagtaaaaaaaattatatatctctgaaggtgcttgtaaaccatttacaataataggaaaaaggaacagaaaaagaaaaaacagggttatttgataaagagaaggggattgaaccaacgactctgtcaaatctaattatgaatgtatccttccctttaagaagggcttggtagatcaaaggtaaattcaaattatatatttatttgctactactgtgaagtttcttgagccatttaataatctcattcagtcacccacgaaactcttattctcctgcaaatgattatccatgttatgagttggtttttaagtctcctaacaaagattgcttacaaaaacatgtctttaaccctgtagcccttgtcccaggttctgacagtctgtctctatttgtgttactggattgatggtccaggaaagagtgcaggaatgtgcatgtatcttgttttcckaaggaaaataaccatgataagttttaaaaattattttgatacttccctttctaccaaattagt

SEQ ID NO: 319696 - DNA, 620 bp, Homo sapiens
ttgaaactggacccctacctttcactacttacaaaaatcaactcaaaatggaataaagacttaaacatgagactaaaagtattaaaaccctagtagaaaacctaggaaataccattctggagataggccttggcaaaaatttcatgacagtctccacagaaattgcaataaaaataaaaatagacacgtgggacctaattaaactamagagtttctgcacagcaaaagaaactaccaacagggtaaacagacaacctacagaatggaagaaaatattcataaactgtgcatccaacaaagttctaatatccagaatctgtagggaacagaaaacctaataccatgtattttcacttataaatgggagctaaacattgagtatacatggactgaaaggtggggacaatacacaccaaggcctatttgagtgggaagagtgggaagagagtgaaggtcaaaaaactgcctatcaagtactgtgctcgctacctggataatgaaatcatttgtacaccaatcctagtgacacataatttacccatgtaaaaaacctgcacatgtaccctctgaacctaaagtaaacattgaaagacaaaaatatcctaaattaagtatagtag

SEQ ID NO: 319697 - DNA, 621 bp, Homo sapiens
  misc_feature (1)...(621): n = A,T,C or G
tctagtctccctgcttggccaaatgcccatagcaccttaaaatcatcatgaaaactgaaaacacttccacaagatttccagataccgtgtagggacagtaatgcccctgttgaacactactgctcagttgctcaatctaacacatttttatgggtagtggtgaagccaaagagttgtgataggtacacaaatcttcatagatcatacagctgggttatctacagagatgatgtttgaacctccaccgcctaacttttaatactaacttctaccaaccctctattccactgaactttaaaaattcttgagaaatctgattttgatttctaggttaatcagaaatttgaggatttttgtgtatatgcccacataaatgaatgacacaagatacatgaaaactattaataactgaaaaccaatagttaatttttaaactscctttaatatagtaatgcaaattcctttccanaaattctaaagtaggttcagacttttgctgagagtttaaaggtctgaaaacatctcaccctgcttcagcttaggggaatcaaaggaatacttcaaagacctcaagtttgaaaaatatcagaaagtcctacttatagtacagttcaaagcaat

SEQ ID NO: 319698 - DNA, 647 bp, Homo sapiens
gctgtgaaggtagatttcagaggtatcatgaaggcctctgacttccctatatccttaccctcatttttcctttcctaccaactaagagatgcttctcctaccagctcatgggtgtgactgttctatttggaattgtttatatgactcaagttttcaaagtggaaactgaagcctattatttggttgcacattagtgtgaatttgccattactttcaggagaggatgtgttgataagaaggtgaaggattctggttactttgaggaaggaagtgcaactgttgaaggaagccaggagtacccaagccatctagaatagattctgctgatcaccatataacttactggtttagagagctgttactggaattatgattctcctcttttatctcaggaagtgacaagtatgtcatctaattgactaattatgttgatgcttagactttcagtgtgtgctggtccaggctagaggaatttacttagaatatcagattcaacaaggtttttttcttttcataacccagagtgagagttragtactctctcaccctgtggaaaaagaatggtaatacatttttttcttactttacaatagccttatatttttattaattatatatttctctaaaggttagtgttgaaagtgtag

SEQ ID NO: 319699 - DNA, 567 bp, Homo sapiens
tattaatgctttctatgaccttttatagatgaagacaaggcaaaaacatttttcccaaaaaatcaatttaaattattactataaaatttctgaatgatctgctgtgcaataggggcatatattttcctaaaattaagacttaaataataggtttatattgactatcgattagtagcaaaactttagagatgtccatgaatcctgatattctggaagttgctagaaatatagaggaaattaaaattaacagtcttgtaccagattcttattgcctatacttcatatttctctgtatttgtagcttgtagtctctgcagagtcttttcaatttgaatggtaaagaataatggctgccaaacatrgctaaccattaaaatcatggttgttaggaaacaagatctccagccccataattgattcaatgatctgggggcagatggtgagggtgggggaaaggggcatgcagaaatcagcattttaaaacctccccatgtggttctgataataaaccagatttggcttaagtatcgaagtggtcatatttcttattacagcaattagaaggaa

SEQ ID NO: 319700 - DNA, 567 bp, Homo sapiens
gggcagatggtgagggtgggggaaaggggcatgcagaaatcagcattttaaaacctccccatgtggttctgataataaaccagatttggcttaagtatcgaagtggtcatatttcttattacagcaattagaaggaaaagaaaaacctcatggttttaaaagggcagaatttcaagcaatcacagtgtcagtgcacgtaatagaagacatttacttcaataagtttgctgcttattgcaatatccctstcagaaacaatgtgactttgttctcgcgtcacaaagcctggcatacttaatgagagggtgtaatgagaaggcagtcatagccccttgggaagaggactagaggaaggccatcctttctgattctgatagattgtggacagaaagaaggagaagggagagtcagtcaacagtatgtctaattcccttcctcccgttaagctctgatgtggaagagagttacttgggtttaagtgaataattgtgggaagcagcccagatttattggccggcttccctggacttacaaggaaacaattgcagatacttagaggaaaagtaa

SEQ ID NO: 319701 - DNA, 619 bp, Homo sapiens
tgtcacacggtaagtggcagtaattagaattcaaaattcagtttgacaccagaaagcaaatatacattatatgatagaaagttaaagatttgctaactgcctggtgtggtggctcacacctataatcctagcactttgggaggccaaggcaggcagactgcttgaggccaggagttcaagactggcctgagcaacatagggaaaccccatctctattaatttttttttttttttttgctaagagcttagtggaaaattaacttacttcaaataaaaatctgtgataatatcactaagaaattttccttcatttaggcagtgtaggtcctctttagtaacagatatctcccttagctggagrtggtaaatatactatcaaatatttttataggattaatggaaatggcctggctctctcattgatttctcattatcaaaacagtggattctcatttgtttcaaagtggtattttagattcaaagtacacatttcaaatttttgttttgcttatgccttcctttgatgcttccttcacaggcaacacatctgctactggcttattcaaagagaattttcccagaaaaattaaaaatattcttcattatactaatgttagta

SEQ ID NO: 319702 - DNA, 622 bp, Homo sapiens
tcccttgcccaggtatttctggaagtgtccaacaggggaagaataaatctgctatgttatctgcttccaacttctccctctgagggttgccttcctgcaggaaaactgccaatcacagccataccctcccataacttccatgaaatgcctgggcccatgttaaggtgccgcctccatgttcccaaagaagacagtcttggaatagtagtctatgccaattgttatctgaggwtgaaaaaatgaccccctcacatactctgtgcagtcctctgtcattgtccttgaagcagcccagctcattccacaagcatcatggcatttctcatgaaagcagctccttcagctttttcccctccatcattctatcgaggctcaaaaatccaaataggctgtagccattttgctctctccattgttatttgccacacaccacctccaggtacttctgcaatgaaaaattctgccttaacctagaacaaaatatcttattcataacaaggtatgctgacagatgttcttataggtcaccagaccactagctcagcaaacagtaagaggcttattctcaatgtgatctcagcttggatccactttaaatggccatggactgaaatcattctta

SEQ ID NO: 319703 - DNA, 622 bp, Homo sapiens
tcccttgcccaggtatttctggaagtgtccaacaggggaagaataaatctgctatgttatctgcttccaacttctccctctgagggttgccttcctgcaggaaaactgccaatcacagccataccctcccataacttccatgaaatgcctgggcccatgttaaggtgccgcctccatgttcccaaagaagacagtcttggaatagtagtctatgccaattgttatctgaggatgaaaaaatgaccccctcacatactctgtgcagtcctctstcattgtccttgaagcagcccagctcattccacaagcatcatggcatttctcatgaaagcagctccttcagctttttcccctccatcattctatcgaggctcaaaaatccaaataggctgtagccattttgctctctccattgttatttgccacacaccacctccaggtacttctgcaatgaaaaattctgccttaacctagaacaaaatatcttattcataacaaggtatgctgacagatgttcttataggtcaccagaccactagctcagcaaacagtaagaggcttattctcaatgtgatctcagcttggatccactttaaatggccatggactgaaatcattctta

SEQ ID NO: 319704 - DNA, 577 bp, Homo sapiens
tgagttagagtgtaattattcatatatgcatgtrgagaaaccaccaccatgtaaatgcctaaaatataaatttgtcaaaaaatactgactgtttcctacatataagtggacatacatgtgtgtgtagatagtagatatacacaggcatatgtgtacacattcatgcaaacgcaataagaatttttttctaacacttacttgattttattcaaacttgcgcacacgttttggaaacagagtttaggttctagttctgtcttagcctatttgtgttactataaaggaataacctgaggctgagtaacttataaagaaaagaggtttatttggctcatggttctgcaggctgtaaaagaagtatggtactagtatctgctcccagtaaggactttaggtgtcttccactcaaggtgggaaacaaagggcatgtgcagaaatcacatggtgagagaagcagcaagggaggagggcagggagatgctaggttttttaaacaaccagttctcataggagctaatagtgcaagaactcactcattaccatgaggatgggaccaaaccattcatgagagatctat

SEQ ID NO: 319705 - DNA, 590 bp, Homo sapiens
ttgtattgctgtcatacaatccatccataaatttcatagtgactaaataaacatggatgtgtccttctgaattgttcaataagcagataatactctttaaaattattagtatgcttgctttcttttcttgtattcaaagctcattatttattggtcattttagagtccttaacatgtagagtatttaaataaaacctaaaatataatgattctgtatgatttcacctcagtgaggcaaatctacatatttcttctagtatattggttctcaacttggggtgattttaccccacagtggacatctggccatatctggggacatttttgtttgttaaaattggagaatgctactggcatctggtgsgtgctactagcatttggtcagggacgctactaaacatcctgcattgtgcaaaacagccccctatgacaaggaagtataaatgaaacttctctacttccgaaggctgactccattccttaaagttagtgtttctaggagggctaccctcaaactgtgcacttgaatacattctctttaaatcagattatgatccttttgattatttaacatatttgcttttgtatct

SEQ ID NO: 319706 - DNA, 596 bp, Homo sapiens
tagcctggttttgtttatgcttacataacttggtatacttttttgctaatgacaatattggttttaaaactcaaagcagtcaatcagaaataatagcctgtttctgaaacaaaatatgcatctttaaaaaccccaaatgtataataatamattgtctatcatgcctacagaaaaatattccatttttgataaatagtcatgagaatgtaagattgtacttttgggggatttatgacaagtttttaccatgtgaatgggctgctgaatgtctagaaattacattttcatataaattgcatttttcaaaaaatatcacatgatttatcccatttaaacaaattgagaaaacactaggatattcaacatatgcattaggtttattccctccagtcactaactttgtagaatttccttccacagttagtattttcccaaggataaactatttttgaatataacaaaaaacatataatatgccataacactttcatagtccatggctatgaaaagtgaagagaacgttctaaatgtttcagtaggttggacaatattttattgatatttataacaatgttttactggtaaattttaaaata

SEQ ID NO: 319707 - DNA, 596 bp, Homo sapiens
tagcctggttttgtttatgcttacataacttggtatacttttttgctaatgacaatattggttttaaaactcaaagcagtcaatcagaaataatagcctgtttctgaaacaaaatatgcatctttaaaaaccccaaatgtataataatacrttgtctatcatgcctacagaaaaatattccatttttgataaatagtcatgagaatgtaagattgtacttttgggggatttatgacaagtttttaccatgtgaatgggctgctgaatgtctagaaattacattttcatataaattgcatttttcaaaaaatatcacatgatttatcccatttaaacaaattgagaaaacactaggatattcaacatatgcattaggtttattccctccagtcactaactttgtagaatttccttccacagttagtattttcccaaggataaactatttttgaatataacaaaaaacatataatatgccataacactttcatagtccatggctatgaaaagtgaagagaacgttctaaatgtttcagtaggttggacaatattttattgatatttataacaatgttttactggtaaattttaaaata

SEQ ID NO: 319708 - DNA, 605 bp, Homo sapiens
ggctatcaattcagttcctggatgggcaacaagcactttcaacttaaaatatatttttgtaattcctagattttttcctaaagcttgacattcttagaatatctctattttaataaaatatttgagtcttaatgaagcagttagaatgacctcttcttaagctcagacaaaatattcataccatattgtcaactgacctagttatcatcttcttatccttcaaagactaatttcctgacartttggattaaatttctattgcataattaccaagaacctcaggaatctctataccctttgccatcttaatcagacctttaattttgcttaatcacttactggtccacaaggatttgagatatgggatgtctgccctatattcctataacttttgtaatttctttccttattacaccaatgaatgatttgttgtatttagaacatttatgtctctgtatttttatgatgctatagaacttttgagtttctcgatatataatatgggtatcaatgacaaacatcagagacactgaaaacacagaggatagctggtctgagtctcctgcaccaagccatagctgaaattattcattcatgaatctctt

SEQ ID NO: 319709 - DNA, 605 bp, Homo sapiens
ggctatcaattcagttcctggatgggcaacaagcactttcaacttaaaatatatttttgtaattcctagattttttcctaaagcttgacattcttagaatatctctattttaataaaatatttgagtcttaatgaagcagttagaatgacctcttcttaagctcagacaaaatattcataccatattgtcaactgacctagttatcatcttcttatccttcaaagactaatttcctgacagtttggattaaatttctattgcataattaccaagaacctcaggaatctctataccctttgccatcttaatcagacctttaattttgcttaatcacttactggtccacaaggatttgagatatgggatgtctgccctatattcctataacttttgtaatttctttccttattacaccaatgartgatttgttgtatttagaacatttatgtctctgtatttttatgatgctatagaacttttgagtttctcgatatataatatgggtatcaatgacaaacatcagagacactgaaaacacagaggatagctggtctgagtctcctgcaccaagccatagctgaaattattcattcatgaatctctt

SEQ ID NO: 319710 - DNA, 538 bp, Homo sapiens
attgcctcttcagggaaactctccctgaatgcttctcttcaactaggctgagtaaccaattacaagcactaacgttttctggaataggtcttttatcactcaaaattgtaatgtgtaatgttttgtgactacttaatatctgaccctccatactrgcatgtaagctccaagagggcacaaagcaagtctgtttttgtttgtaattttcccccatcacctagcaaatgtcctggaaaatgaaatactcttgtttgttgaatgaattaataaatgtctgtggattagtcttttctaaaccacaggctagtaaaatcactgtttcttgtattcaacatttaacaagccaataactagaacactatagcctcaacaattcattttcatcattcaactaaggagaaataagacttttcaagctattgaccattgtgtttgagtttcttcacattattattttttactttgccataattgaggattaaaattaagaaagaaacataatatttcaagacaccttggagaggcaggtaagttaaag

SEQ ID NO: 319711 - DNA, 538 bp, Homo sapiens
attgcctcttcagggaaactctccctgaatgcttctcttcaactaggctgagtaaccaattacaagcactaacgttttctggaataggtcttttatcactcaaaattgtaatgtgtaatgttttgtgactacttaatatctgaccctccatactagcatgtaagctccaagagggcacaaagcaagtctgtttttgtttgtaattttcccccatcacctagcaaatgtcctggaaaatgaaatactcttgtttgttgaatgaattaataaatgtctgtggattagtcttttctaaamcacaggctagtaaaatcactgtttcttgtattcaacatttaacaagccaataactagaacactatagcctcaacaattcattttcatcattcaactaaggagaaataagacttttcaagctattgaccattgtgtttgagtttcttcacattattattttttactttgccataattgaggattaaaattaagaaagaaacataatatttcaagacaccttggagaggcaggtaagttaaag

SEQ ID NO: 319712 - DNA, 538 bp, Homo sapiens
attgcctcttcagggaaactctccctgaatgcttctcttcaactaggctgagtaaccaattacaagcactaacgttttctggaataggtcttttatcactcaaaattgtaatgtgtaatgttttgtgactacttaatatctgaccctccatactagcatgtaagctccaagagggcacaaagcaagtctgtttttgtttgtaattttcccccatcacctagcaaatgtcctggaaaatgaaatactcttgtttgttgaatgaattaataaatgtctgtggattagtcttttctaaaccacaggctagtaaaatcactgtttcttgtattcaacatttaacaagccaatawctagaacactatagcctcaacaattcattttcatcattcaactaaggagaaataagacttttcaagctattgaccattgtgtttgagtttcttcacattattattttttactttgccataattgaggattaaaattaagaaagaaacataatatttcaagacaccttggagaggcaggtaagttaaag

SEQ ID NO: 319713 - DNA, 538 bp, Homo sapiens
attgcctcttcagggaaactctccctgaatgcttctcttcaactaggctgagtaaccaattacaagcactaacgttttctggaataggtcttttatcactcaaaattgtaatgtgtaatgttttgtgactacttaatatctgaccctccatactagcatgtaagctccaagagggcacaaagcaagtctgtttttgtttgtaattttcccccatcacctagcaaatgtcctggaaaatgaaatactcttgtttgttgaatgaattaataaatgtctgtggattagtcttttctaaaccacaggctagtaaaatcactgtttcttgtattcaacatttaacaagccaataactagaacactatagcctcaacaattcattttcatcattcaactaaggagaaataagacttttcaagctattgaccattgtgtttgagtttcttcacattattatttttyactttgccataattgaggattaaaattaagaaagaaacataatatttcaagacaccttggagaggcaggtaagttaaag

SEQ ID NO: 319714 - DNA, 565 bp, Homo sapiens
atttaatattttcagaatgcagcttactgtgggtgactgaaacagcagaaagaaaaaccatgcataagagggggctactgtaatcataattatttgatggctaaaactacaggtgcaaccccttaagaaagtattgatacactctaatttgaagcaaactattcttcaaattgtctaatagttcgttgtaacacaacatgctcatcagagcactaaaagccacaactgccaatactataaactgattttaagtctttccacaaacatttcatgaaccaacattaggattaaataaactaattaaagataagtctcctgacttcacttcaaagtagcagaattgagagggatggtcctgtgargcaccagcttactgagaaaaacggcagctgaagataggcataatgaaaggcctagccctcttcacagactgatgctgctggtgctgcattatatccatcatgtacctatgatgacttcagattcaaccctatccctgtcctcaggacaggaaaaatgatccagagagtcttgagcatcacattcactgaaaggtggacccatc

SEQ ID NO: 319715 - DNA, 565 bp, Homo sapiens
atttaatattttcagaatgcagcttactgtgggtgactgaaacagcagaaagaaaaaccatgcataagagggggctactgtaatcataattatttgatggctaaaactacaggtgcaaccccttaagaaagtattgatacactctaatttgaagcaaactattcttcaaattgtctaatagttcgttgtaacacaacatgctcatcagagcactaaaagccacaactgccaatactataaactgattttaagtctttccacaaacatttcatgaaccaacattaggattaaataaactaattaaagataagtctcctgacttcacttcaaagtagcagaattgagagggatggtcctgtgaggcaccagcttactgagaaaaacggcagctgaagataggcataatgaaaggcytagccctcttcacagactgatgctgctggtgctgcattatatccatcatgtacctatgatgacttcagattcaaccctatccctgtcctcaggacaggaaaaatgatccagagagtcttgagcatcacattcactgaaaggtggacccatc

SEQ ID NO: 319716 - DNA, 565 bp, Homo sapiens
atttaatattttcagaatgcagcttactgtgggtgactgaaacagcagaaagaaaaaccatgcataagagggggctactgtaatcataattatttgatggctaaaactacaggtgcaaccccttaagaaagtattgatacactctaatttgaagcaaactattcttcaaattgtctaatagttcgttgtaacacaacatgctcatcagagcactaaaagccacaactgccaatactataaactgattttaagtctttccacaaacatttcatgaaccaacattaggattaaataaactaattaaagataagtctcctgacttcacttcaaagtagcagaattgagagggatggtcctgtgaggcaccagcttactgagaaaaacggcagctgaagataggcataatgaaaggcctagccctcttcacagactgatgctgctggtgctgcattatatccatcatgtacctatgatgacttcagattcaaccctatccytgtcctcaggacaggaaaaatgatccagagagtcttgagcatcacattcactgaaaggtggacccatc

SEQ ID NO: 319717 - DNA, 596 bp, Homo sapiens
aaagcatcaaagggaagcacatgccttgactagaatctgctaataatgggtgtctggggtgctgatgatcagagactgaggaagggtagagcttcctactggctgaggaggtctagctgtggaaaagagaaggaaaactgaaacttgcatcttcattagactcaatattagggacaaataacaaaagaaaactagaaaaacacactaaagtgatgataaagaattaaattgcctgggagaagtttcagctaagggaaaatctattttcagccgttctgtctctatgtcaaagattacttgcataaaaagcatctgtacagaactatggaaagtaggtattaaggaatacatgacaatggaacaatcagacaactacttcagctcagatgcttagggcttgaataacagtgaaaagatcccagtaaactgaaaggccaggtacataaaagttcttatgatctgctgccaagatcagctgcaatccaacccaccctctgcccatacaaagatattttgtagcagaatgaaagtctgaacasaggtttgaatgccaacaaaagggcagaaagatgtatgtttatcctggaaaaaaagct

SEQ ID NO: 319718 - DNA, 451 bp, Homo sapiens
ttctgctgtctcaaccctaaatacaaaccaggaatcaaggatggccagacaaatgaggaatgtttaagagaaagggcaagattaatgattaacaataatagtctgataggaaatagttaatctagtaaacagaaaagtactttaaaattttctctaattagtatcattagagggatgttagagagatctttcatttattaaatcataaaagtatgctcttaaaaaacacataaaaatgtaaccaatgggaaaaaagtaaacaatctcttagaataaaaggagaaaaaaaagcaagaaaaggaaaatgagaataaagacaaggattaattcaaagtttgccacataaataatggaagttcttgaaagagaaaacagagcaagcaattatcaaataaataatgaaagaggtaaccytgagctgaagtatgagtgtttatgttgaaaaggccca

SEQ ID NO: 319719 - DNA, 521 bp, Homo sapiens
atcaatgcccagttttattacatgtcaattatatgtatagattatctgattgcttttttcttcagatagatttgaatttgtttttgctgtagcaaaattttaatttatatatgctacaaaatgattcctttttttggatttgggagttttaatmgtttattcttatacatgactcatttatgtacaggagcacgattagccttgtatgtttaggtctctgaaatcttacaataatggcaataatttttatgtgttgttacaacaataaccatttaaagtaaaaactcgaacttaaaaaaatttatacagatgtgcttttttcctgagaaaataataacttcatttttcttaaacatatctattacgactttaggaaaaaacagggtcaactatgtgccccatagcagagttcttttttttttttttcctttttctgaaggattcaggatttttgtgctattagaagaggaaaatatcatattttgttttaatttttaattgagaaatataagtctctcaac

SEQ ID NO: 319720 - DNA, 521 bp, Homo sapiens
atcaatgcccagttttattacatgtcaattatatgtatagattatctgattgcttttttcttcagatagatttgaatttgtttttgctgtagcaaaattttaatttatatatgctacaaaatgattcctttttttggatttgggagttttaatagtttattcttatacatgactcatttatgtacaggagcacgattagccttgtatgtttaggtctctgaaatcttacaataatggcaataatttttatgtgttgttacaacaataaccatttaaagtaaaaactcgaacttaaaaaaatttatacagatgtrcttttttcctgagaaaataataacttcatttttcttaaacatatctattacgactttaggaaaaaacagggtcaactatgtgccccatagcagagttcttttttttttttttcctttttctgaaggattcaggatttttgtgctattagaagaggaaaatatcatattttgttttaatttttaattgagaaatataagtctctcaac

SEQ ID NO: 319721 - DNA, 521 bp, Homo sapiens
atcaatgcccagttttattacatgtcaattatatgtatagattatctgattgcttttttcttcagatagatttgaatttgtttttgctgtagcaaaattttaatttatatatgctacaaaatgattcctttttttggatttgggagttttaatagtttattcttatacatgactcatttatgtacaggagcacgattagccttgtatgtttaggtctctgaaatcttacaataatggcaataatttttatgtgttgttacaacaataaccatttaaagtaaaaactcgaacttaaaaaaatttatacagatgtgcttttttcctgagaaaatawtaacttcatttttcttaaacatatctattacgactttaggaaaaaacagggtcaactatgtgccccatagcagagttcttttttttttttttcctttttctgaaggattcaggatttttgtgctattagaagaggaaaatatcatattttgttttaatttttaattgagaaatataagtctctcaac

SEQ ID NO: 319722 - DNA, 533 bp, Homo sapiens
ttttaattctgttccattgctctgtgtctgtttttgtatcagtaccaagatgttttgattactgtggctttatagtgtagtttgaagttggatagtgtgaggcctctgccttttttttttttcttttttttttttttttgcttarattattttggctattcaggcttttttgtttccagatgaaattgggaataatttttttctaattctgtgataaatgccattggtggtttgataggaatagcattgaatctgtaaattgctttgggcagtgttcccattttagcaacaatgattcttccaatccatgcgcgtggaatgtttttccatttgtttgtgtcatctctagtttctttcagcagtgttttatggctctccttggagagatttttgacctccttggttagctgtattcctagatatttaatattctttgtggctattttgagttgaattatgttcttgatttcactttcagcctgaatgttgttggtgtgtatagaaatgctaatgatttttgtacattgattttg

SEQ ID NO: 319723 - DNA, 533 bp, Homo sapiens
ttttaattctgttccattgctctgtgtctgtttttgtatcagtaccaagatgttttgattactgtggctttatagtgtagtttgaagttggatagtgtgaggcctctgccttttttttttttcttttttttttttttttgcttagattattttggctattcaggcttttttgtttccagatgaaattgggaataatttttttctaattctgtgataaatgccattggtggtttgataggaatagcattgaatctgtaaattgctttgggcagtgttcccattttagcaacaatgattcttccaatccatgcgcgtggaatgtttttccatttgtttgtgtcatctctagtttctttcagcagtgttttatggctctccttggagagatttttgacctccttggttagctgtattcctagatatttaatattctttgkggctattttgagttgaattatgttcttgatttcactttcagcctgaatgttgttggtgtgtatagaaatgctaatgatttttgtacattgattttg

SEQ ID NO: 319724 - DNA, 562 bp, Homo sapiens
cccggagctcagttcttgattcgtattgggtctgttggccgaaatagggctgaagcctctttggagcgagctcagaatcttaaccccatggtggatgtgaagttgsacactgaggatatagagaagaaaccagagtcatttttcactcaatttgatgctgtgtgttgacttgctgctccagggctgtcatagttaaggttgaccagatctgtcacaaaaatagcatcaagttctttgcaggagatgtttttagctaccatggatacacatttgccaatctaggagaacatgagtttgtagaggagaaaactaaagttgctaaagttagccaaggagtagaagatgggcctgataccaagagagtaaaacttgattcttctgagacaacgatggtcaagaagaaggtggtcttctgccccgttaaagaagcgctggaggtggactggagcagtaagaaagcaaaggctgctctgaagcgcacgacctccgaccactttctccttcaagtgctcctaaagttccgcacagataaaggaagagatcccagttctgatacacacgg

SEQ ID NO: 319725 - DNA, 562 bp, Homo sapiens
cccggagctcagttcttgattcgtattgggtctgttggccgaaatagggctgaagcctctttggagcgagctcagaatcttaaccccatggtggatgtgaagttggacactgaggatatagagaagaaaccagagtcatttttcactcaatttgatgctgtgtgttgacttgctgctccagggctgtcatagttaaggttgaccagatctgtcacaaaaatagcatcaagttmtttgcaggagatgtttttagctaccatggatacacatttgccaatctaggagaacatgagtttgtagaggagaaaactaaagttgctaaagttagccaaggagtagaagatgggcctgataccaagagagtaaaacttgattcttctgagacaacgatggtcaagaagaaggtggtcttctgccccgttaaagaagcgctggaggtggactggagcagtaagaaagcaaaggctgctctgaagcgcacgacctccgaccactttctccttcaagtgctcctaaagttccgcacagataaaggaagagatcccagttctgatacacacgg

SEQ ID NO: 319726 - DNA, 526 bp, Homo sapiens
gggaggatgcaaaagtgggaggcaawgtctgcagtgagatcgcaccactgcactccagcctaggtaagggaggctggaggctctcaaaaaaaaaaaaaaatccatttccccagattagactatgtgatgacattaagtgtccacctgagcctcagtatcatctataaacacattctggtttataaatagatgaaagtataatacgaataactgagaaaacctagcaaatattaattcccaccttcccaggccccaattccttgctatacattacacatgtccaacaagttattatctgtataggggaaacattgccatatttactcctctaattttgtgttttgctaatgaacattaagctaacattaacctgaagttcaaaaatttacagtaacagctaccactgaaaaccttccacatatttttaagattccacatgaaacgagatcaaagtatatttaccctttagtctcgttgagtcaaggcatcaaaaaagtttgtagcatctcaaatacatggtatggcc

SEQ ID NO: 319727 - DNA, 526 bp, Homo sapiens
gggaggatgcaaaagtgggaggcaatgtctgcagtgagatcgcaccactgcactccagcctaggtaagggaggctggaggctctcaaaaaaaaaaaaaaatccatttccccagattagactatgtgatgacattaagtgtccacctgagcctcagtatcatctataaacacattctggtttataaatagatgaaagtataatacraataactgagaaaacctagcaaatattaattcccaccttcccaggccccaattccttgctatacattacacatgtccaacaagttattatctgtataggggaaacattgccatatttactcctctaattttgtgttttgctaatgaacattaagctaacattaacctgaagttcaaaaatttacagtaacagctaccactgaaaaccttccacatatttttaagattccacatgaaacgagatcaaagtatatttaccctttagtctcgttgagtcaaggcatcaaaaaagtttgtagcatctcaaatacatggtatggcc

SEQ ID NO: 319728 - DNA, 526 bp, Homo sapiens
gggaggatgcaaaagtgggaggcaatgtctgcagtgagatcgcaccactgcactccagcctaggtaagggaggctggaggctctcaaaaaaaaaaaaaaatccatttccccagattagactatgtgatgacattaagtgtccacctgagcctcagtatcatctataaacacattctggtttataaatagatgaaagtataatacgaataactgagaaaacctagcaaatattaattcccaccttcccaggccccaattccttgctatacattacacatgtccaacaagttattatctgtataggggaaacattgccatatttactcctctaattttgtgttttgctaatgaacattaagctaacattaacctgaagttcaaaaayttacagtaacagctaccactgaaaaccttccacatatttttaagattccacatgaaacgagatcaaagtatatttaccctttagtctcgttgagtcaaggcatcaaaaaagtttgtagcatctcaaatacatggtatggcc

SEQ ID NO: 319729 - DNA, 540 bp, Homo sapiens
cctgctaaggaagaatggtcgctcaracatccaaggaaggaactggccaacataagactttctggtggaaactacgaatggttttggaatccatcatcatagcgagtcagtcaagacttccctttatctgttatcagtaagccaaacaagagaagtacagaaacatacctgaataagcacaccaggctggttgtcagaataggtagtgaaggtctgtgtctgcttggtaggaatggtggtattacgcttgatgaggacagtcatgactccaccagcagtttcaataccaagggaaagaggagtgacatccaagagcagcaaatcttgaacattctcagacttgtctccagacaagatggctgcctggacagctagcaaacaaaaagttaacgttaaaagaagttaaaagaaaacccagtacatagctcctgttttaactatcactcgctcagacatccaaggaaggtgttgccatcattagccaagcttttggtggaaactacgaatgtttaacaatcactcatcacagcgagtcacctt

SEQ ID NO: 319730 - DNA, 600 bp, Homo sapiens
gctccaacctgccgttaaaaacaatctcatttaaatttacgatggatcaaattaatcttaaaataatccgaacttgcatcacaaatggtacatacctttttgtctaagccgtaagcaatagcagcagcagttggctcattaataattctaagtacattgagaccagcaatagttccagcatctttggtagcctgacgctgagagtcattaaagtaagctggcactgtgaccacagcattggtaacagtctaggaataaggaaaagaccacagattggtaactattatacttacatatatgcaaactccagcaaatggattaatgctggtgaaagaacagctggagcaccccccccaccaaaatgtaaattactgtgtaattgtcaagattcactggtttctggtgttgacagacccatctacctagagagcctagggcactgttgggcacgtggtcttaaccctgagctgagccccatctgttcycctccctcgccaggtgccagtgcccccgggagtcatcgggcttttaactactccggaatgcaccccatactgaaaaaccaacctcaccttcccaaggtaggcttctgcaatttcc

SEQ ID NO: 319731 - DNA, 576 bp, Homo sapiens
gcagggaactgggtgaaagaaaacgctggctccacttccccgcgcgccaggcaaaccgatgcagcaaccctcccccgccacgcggccgccgggcgtctcccagcctcccctggggccactgcggcccactccctacatttccgtcctgccggctgcaaccaaataccgctgccatcccaccgaaaactgaggccctttaagccggtagaaggagccgcacactcgcctcgacgagattctcagaacccccaagcctcagcaagcccaacaggcctgtgtggaggctgcacgctcccagacccacaacccaactcttgagcagaggttttacctgggrtgtaggcctggctccaataacgaaggaagccacaaaaaacccaagagctgcaggcgagttcaatgagaccggtttccgcccgccaccctgcctcttataccctatcttagaaccttccagaaggggcccgcccctgctgcctgccattacggcttccccggccaatagacgcccggctgcccttacaagacccaatcacaagcccggctccactcctcgggcctcgcccccttccgcac

SEQ ID NO: 319732 - DNA, 544 bp, Homo sapiens
ttgtcaaatatctcttctaacamtgacaatttcttcctgactgtatctttgtccttgacttagtggaacatcactttgttctcgctgactttctagaatgaggtgttggaacttctttaataaataaagaaatatccttttcctctctttgttgtttcccttaaaacttctaattgctgtggatatatgtgtttaagttaaagtatagaaactgaaatctttgtgagataaaaactttaataacttgggacttgcagtccctttcctacaataaaaaagatagattaggatcttaacagttagaaagaaccgtacaggatatctagcccaatctccaactactggagaaatctgtaatagacaagcccttatgttgtgtcttccagcctctgggatttctagtgaaaacgtactcaatgttttgtggacttatcctgttctattgatgtacaacacagtgcctgtcttcaaatgttgctccagaatctgcttccctggaatcacccattgattctggttctatcatcggttagcatggcagaat

SEQ ID NO: 319733 - DNA, 544 bp, Homo sapiens
ttgtcaaatatctcttctaacactgacaatttcttcctgactgtatctttgtccttgacttagtggaacatcactttgttctcgctgactttctagaatgaggtgttggaacttctttaataaataaagaaatatccttttcctctctttgttgtttcccttaaaacttctaattgctstggatatatgtgtttaagttaaagtatagaaactgaaatctttgtgagataaaaactttaataacttgggacttgcagtccctttcctacaataaaaaagatagattaggatcttaacagttagaaagaaccgtacaggatatctagcccaatctccaactactggagaaatctgtaatagacaagcccttatgttgtgtcttccagcctctgggatttctagtgaaaacgtactcaatgttttgtggacttatcctgttctattgatgtacaacacagtgcctgtcttcaaatgttgctccagaatctgcttccctggaatcacccattgattctggttctatcatcggttagcatggcagaat

SEQ ID NO: 319734 - DNA, 544 bp, Homo sapiens
ttgtcaaatatctcttctaacactgacaatttcttcctgactgtatctttgtccttgacttagtggaacatcactttgttctcgctgactttctagaatgaggtgttggaacttctttaataaataaagaaatatccttttcctctctttgttgtttcccttaaaacttctaattgctgtggatatatgtgtttaagttaaagtatagaaactgaaatctttgtgagataaaaactttaataacttgggacttgcagtccctttcctacaataaaaaagatagattaggatcttaacagttagaaagaaccgtacaggatatctagcccaatctccaactactggagaaatctgtaatagacaagcccttatgttgtgtcttccagcctctgggatttctagtgaaaacgtactcaatgttttgtggacttatcctgttctattgatgtacracacagtgcctgtcttcaaatgttgctccagaatctgcttccctggaatcacccattgattctggttctatcatcggttagcatggcagaat

SEQ ID NO: 319735 - DNA, 505 bp, Homo sapiens
cttgctctgtgccttcacatctctctctaattatcaaatacattgatgaaagccagccctctatcttttsaattggtgtcatggactccagctcagcatttcttagtgctaacatcagctaaaaccgggctgtatggtatattgtccatttcttacattctcacatcatgtgagcagaaatattatcaggaatccctctctgagaatctatgaaatgaagtccatcagaaacacagcattcgaacaagtgcagaacaaattatttatgacatgtgggattagatctaaaatgacttccctaccttggctattttgtgatatttttgcttcttcaaaattagacctctgaatgtcttttaaagatatatcataataaacatagttttgtcagatctttaccacaagtgaaactgagttgaagcaaaagcctgggttattcagacaaaatactttttcagcctgtggaagctttgatcagtattgaaagccaaaaccaaaaagcact

SEQ ID NO: 319736 - DNA, 505 bp, Homo sapiens
cttgctctgtgccttcacatctctctctaattatcaaatacattgatgaaagccagccctctatcttttcaattggtgtcatggactccagctcagcatttcttagtgctaacatcagctaaaaccgggctgtatggtatattgtccatttcttacattctcacatcatgtgagcagaaatattatcaggaatccctctctgagaatctatgaaatgmagtccatcagaaacacagcattcgaacaagtgcagaacaaattatttatgacatgtgggattagatctaaaatgacttccctaccttggctattttgtgatatttttgcttcttcaaaattagacctctgaatgtcttttaaagatatatcataataaacatagttttgtcagatctttaccacaagtgaaactgagttgaagcaaaagcctgggttattcagacaaaatactttttcagcctgtggaagctttgatcagtattgaaagccaaaaccaaaaagcact

SEQ ID NO: 319737 - DNA, 505 bp, Homo sapiens
cttgctctgtgccttcacatctctctctaattatcaaatacattgatgaaagccagccctctatcttttcaattggtgtcatggactccagctcagcatttcttagtgctaacatcagctaaaaccgggctgtatggtatattgtccatttcttacattctcacatcatgtgagcagaaatattatcaggaatccctctctgagaatctatgaaatgaagtccatcagaaacacagcattcgaacaagtgcagaacaaattatttatgacaygtgggattagatctaaaatgacttccctaccttggctattttgtgatatttttgcttcttcaaaattagacctctgaatgtcttttaaagatatatcataataaacatagttttgtcagatctttaccacaagtgaaactgagttgaagcaaaagcctgggttattcagacaaaatactttttcagcctgtggaagctttgatcagtattgaaagccaaaaccaaaaagcact

SEQ ID NO: 319738 - DNA, 613 bp, Homo sapiens
ttacatctgacaaattcacagaagtgctctttgtcctttaagctattccagaagctaaaatgacttagaaatgagctatttgtataggacagcaggtagtcaaggcaccagacagaggggatcattatccaggtcatggccatttgctggtcacgtcaaatcttttggtttccaagagaatcgccctgaatcacattaaaacttggaggatttgtaaagataataggcccaagcacccttcctcttctcctgacagctctgttgtaactgagttccgaatgccaggcattgtccatgccatgaaatctagacatcaggcagtcagggatcaagggatggcaaacrgtataaaaatatctgttgcaacccaccacaaaatgactgcttcaggagtttgctgacagctaactgtgctgagctgaagtaattaactcatgtgtttgttgtcacagacaatctgggcattgctgcttgactgcttctaagaaggggtttatttggattaagtttagcaactgcagagcaaatttccttcacttgctgttccacagtgtttgaggcattgttttttgtcgtgtttttcagtaactttctcacacttacacatctgagg

SEQ ID NO: 319739 - DNA, 589 bp, Homo sapiens
ccagaaacctctttgcagcttagaaatccaggagagatgccaagcccgggttggggtcaggccctaccctgaggacagaaggctgcccagggcctttcccagctcggtgggagatcctggggagacagggggcatggcagacatgaccccttccactgcagggggctatagggatgtttggggggtgtccctaagaaatgccatcctgccctggaacccaacaaatgacatcctgcaagattgccacctgtagctcatgcagaaaccagtgtcccagccaggagcaatggctcacgcctgtaatcacagcactttgggaggccaagacgggcggatcacctgaggtcaatagttyaagaccagcctggccaacatggtgaaaccccgtctctactaaaatatacaaaaattagctggggaaggttgtgggcacctgtaatcctagctattcagaaggctaaggcagggagaaatgcttgggcctgggaggcagagcttgcagtgaaccgagattgggccactgcactccagcctgggcgacagagcaagactccatctcaaaaagaaaagaaaagaaaagaaaagaaaa

SEQ ID NO: 319740 - DNA, 596 bp, Homo sapiens
tcttcccctgtccaaagccaggctgctctgctccacgcgcccacttgaaagccactcaggcacgctccccttctatctcccctttgccctctctgacctgcctcaacatcaataccgccgcctacgtgggtctgctgataggaggctctggagagagtgcgctgggaattgttactctgtatagttccacgtggcctttttgggggtgggggcagcaaggcctaagccttggcagaaagcatcaagactgaaggagccccaggggatggggccttctaaagggcttgaggttgaaggacctactcagcctccagcatcggcctgcttctcctgccttgggaaaggatcatctcaggcgcaggactgggggacaggagtggtggtggatgatggccacaaaggcagctgcagattacaagttcccaaggaaagatcctgtggctggactggggcgccggcccctgagacatcmtggatactcagaatcaagtccccaaaacaagcactttgtcttttccaagcgggcatgcttttcccaggggattccagatcctggagacacacagttctctgctggcctctcatccacgagggtc

SEQ ID NO: 319741 - DNA, 463 bp, Homo sapiens
gatacataaaattgtatcacttctttccttgaaaacaattgacaacaaaaatcatggaaaaataaagaagtaaaaamtcaaatgatgaaacaaataaacaaaagaaatcatcaagtcctcaatgaattagagtaaaatttggaccaaaccagataaaatcctcaaagaggttatttgccttttcagtcatcaggcatctaacttgcagagccgttcagaagttggtgatcttctaaactggcgatctatccactgaaccataactacatggactttagacaagttatagacgtgaggcagaactcacatgatgccaagaaatgtcagggaaaggtaataatcaaattagacagacatgtcatcatgagagaaagcagattttcatcatggctgaggatttagctctatagttgctgatcttggttagctgaagagtggtgggagaaaaatcaccatatagaga

SEQ ID NO: 319742 - DNA, 445 bp, Homo sapiens
aaaacaataaaaaatgggcagatgtaataatgtacactttataaagaaaataatgtgcaacgtatgagcagacatgttagaaggttcaaattctaaatagaagaataaaagaataaaaagttgcggtacagatttttattatagtaacagagatctgaaagtttrtaattcattgaggtatttggtgagaaaaaaatgaaagaaaagaatcatttgaagtgcaatttggcagtattttacttatcctacacatacatttataaacatgataaaaacacactaaaatatgtaaaatctttgccatttcagcattactaattaatagctaaatcctgaaatgcacctaagggttgttttagtcatattttattttaaaaaaattatgatagctacaattgcaatattagctattaaaacaaatatagatcctgtccttacacactga

SEQ ID NO: 319743 - DNA, 630 bp, Homo sapiens
aagctccctcagaacagaaatctttaaagggtaaaaggggtaagtacccattaacctactcatcttttcatataatgactgaaaatagtaaaactttttggatcaagaattccatttcccaaatgcagactcctgccacgaggtcattaaggaaagctttgattgtgagcattgacctcaaatatttaaacaactaaattcaccatgatgtgtatccaggacccattcccctttargttcaactgccatatatttctttctgattactacacactccaatgttaactaacatcttaaacttgattacttcttgctaagcaaagcttccacaattacctcaacaagctatatcattcaggaaaacaacttaaaattactacactagtttagtttaaaaaatattatgagcaagtcaggtaatagagactactgtaatggccaaaggaaaatgaatacagagaatgtgtgaaaaacaaaacaagttaagaaattcatagtttatgcattactttgcaaagagctcgaaattttagacttgaaaaaaataaactgaaccttgttatttacaaatttaggtgagaaaacttacaaggatacatttttttttaccagattgctaatgcccctggt

SEQ ID NO: 319744 - DNA, 538 bp, Homo sapiens
cctggttcatcataatttgttctaataggtccactgtgttatgaatggtgaggatcacaagtgggacatccttgtgattgggccaatcaaagagattgtacattatgttttgtttttagtccacagaaggttgaactgctcacaagccgtacaatagtctccagagacagtttccaagttatgttacagtagctttattatggattgcatgtgttggcytttgtacattgtaatgggaagcttctccagagcaagcttcctgaactttggcactattaacatttggggatggataattatttgttgctggcaatactgtcctgcacactgtagcatattcagcattgtcctcggcctctgcctactaggtaccagtagcaacctctatcaccatttcatacatcattctgacaaccaaaaatgtctccagacattgccaaatatctcctggggataaaagtgatcccagttgcgaactactgttgtagaattttattgataaatatattctgatgtctatattttactttttcattaa

SEQ ID NO: 319745 - DNA, 525 bp, Homo sapiens
gaggagagttaaaggagctataaagcaaactgtgatggaagtcagcagagtagatggaagtcagcagaatagatggaagacaagaactaatatttcatggacaccaaaaatrattcttatcaagaaataccaggaagtaggaagtggccaactgtgtggactgttgttggagtacaactaagaggaagatagaaatccaaccattgtacttgtcacctttcagatcattgataagaggagcatgaattagtggagtggaaaaatggatctctgtatgttgaagagaaaaaaagaatttgaggatgttgaaatagagaataaagacaaaacttttaaaaatctttgttcttaggaagaacagaggcataaagcaatagcttaattgtgatatgtgggttcagcgctaccatgccagagaacacgttatgtgctcacaacagcattttcttttcctgagcatagaaagagtgagtttctcggctttccttgcagttaagtttctattatggggttacatctggacaa

SEQ ID NO: 319746 - DNA, 572 bp, Homo sapiens
aagttgtcaaatagaggcttttaaagtttggaatttttcaaggaaaatgttaactgcagttaaagggccaaagtggtcttaacctcatctcagaatctagaattgtcactggaagttctaaatacccaggacttgtgtgctaaatttagacttcccagcactgtgactggcattttggaacatttggtccataacgataaaccaccacacttgctgaatacaggattagagggggactctcagacataaccaattaataaatcagcctccctagcagcctggggagcagaggcaagggtgcaaggccaataattttgccacatttcaaatagcaaatgcactcatccctacccagaactcccaccctcaaccccacctcacacacccagcacatccttcttgcttctcaagattatacccattccaagaatcagctcaatttctaccttcctgagactttcttccccaacscccataaccacatcaatatctaccttctctaaattcctctatatcctttattctcaatcctgctctcttgctaacccatgttgctatcttccctgtaataa

SEQ ID NO: 319747 - DNA, 605 bp, Homo sapiens
taaaatgtagaagaggctttggaattgagcaatgggcataagatgaaagaattttgaggcccgtgatagaaaacagctaggtttccttgaagaaaytgtaggtagaaatttgggtactaaggactctgccaccaagggttcagaaggaaatgaggaacatggtagagaaaacctgtatcatcttagagaatacctaaatcatcacaaatggaatgttggtagaaatatgaatgttaaaggtgctgctggagggctcagaaggaaatgaagaacatcttgttggaaattggaaagaaggagattctcatttcacagtgacaaagcttagctgaattgtaccctatcgttatgtgagaagcagaacttgttaagtaatgaattttgatatttagttgaggggatttccaaaaatgtattgaaagtatgacctagtttcttcttgtttcctatagtgaagtgtgagagaaaagagaaaaattgagggaagaactgtttagaaaaagaaactaggacttgactattggggaaattcttagcctgtacagtttgcaagacaattatgagattcactatcaggaaagtatgctctggaggaaaagccaatg

SEQ ID NO: 319748 - DNA, 539 bp, Homo sapiens
tggtgatgcgtgaggccgggattgctgcccactggctgcacagggtgaggcacatgagagatacccagtgaccccttgttcagggcttactgaaggcatatgatccccacctgaagccactatgtcaacttccagctcaggcctgaggcttagccacacagagactctcctaatgcatctccgacttctcataagccctcacagatgtagcaatgatgaaatcttaacacatttgttccctagcactgaaatgtgtttatgcttctgaatttaaggtttgtaatgggctttgctcacgggaatgattattttagtgctgacttttaaaaaggcaattgataacaagtttacacagccaaaagagctctggcaattatctgcaaattcrgactccatgaagagccaaactagatcatttaagaccccctgaatccattccggggccaagattatccaaattgacaagctaaaaatgagataatttatgctgaaatggggcttatgaaatcaagatgctactctggatggctgctgctggg

SEQ ID NO: 319749 - DNA, 552 bp, Homo sapiens
ggaaattagagaaaaacatgcatcctttcaaacacttaaaggaacagcaaaaaaatatttaaagtggctacaccttttctggttaaaatatagccagcatgacttgcttttaaaagaatgaaatatttgtgtatgttttggatgaaggtttaggattatgatccagaayattgtcaattatttagtaaccaaaattagaacaaatcagacaggactccagaagttacattttagaggagttagcagctgcctttccatcaatgctttatatttttctttattattatactttaagttctagggtacacgtgcacaacgtgcaggtttgatacataggtatacatgtgccatggtggtttgctgcacccatcaactcatcatttacattaggtatttttcctaatgctgtccctcccccagcgccacacccccccgacaggccccagtctgtgatgttccccacactgtccaagtgatctcattgtccaattcccaacgatgagtgaaaaaatgtggtgtttggttttctgtccttgtgatagtttgctgaga

SEQ ID NO: 319750 - DNA, 597 bp, Homo sapiens
cctacatatttaacaactgtctcctcattaggcaccatacatgactaccctggttatccttcataagaggaattggggcccttattagaaagtctatcaaaagtggcaagactaattaaccctagacccaaggccaatggcaagtgtagcttataattgtcagatgtatcaagtattggtgatgaattatgtatcctaggaggacctaaactatattattaaatgattaatttgaaaataactgatggttattcactcctcaagcatttgcaagagctatgtgccaagtaccacacaatatatttatcctgaaattataaaaatattgtcctgccttcagggagctcccaatttagttgaagaatcaggttaaaattcaactgaacctagaaaatatatcatacaggtatgcacatacttccatgggagactttttaggagcagaatggctaaatgattagatggaccaacttatttactttggggggctattagcgagttcctgggttttgtttaaacaatgatggaagcagtatacyattctcacttgttttagtttcaaccttttcagaattttctcagcaagagatacaagag

SEQ ID NO: 319751 - DNA, 582 bp, Homo sapiens
actcagtgaaattttgataatttgattaattagtcataaagccaggcagactctatgacaaatctggattctagaatgtgcttaaagaagtttaattgtagtgcttcctgagtttctgtacccactaaaatcttagctataaggacatacccattataagytacacccagccccaattgcttagtacagttaaaggtactttgaattttttatttgaaattgttactcattacagaaaaaagtccttaactttcgagtaacagtttgcaattttcagggacagaaattctgtggtttttatccaacaagtgccacatatctgtgtcactatcattataagcccagtttgaatgagggagaagatttttttggtggtcagtcaggcagcccagtccttgcagaaggttctcaacgtgctgaacaaggccttctggaaaaggctccctcgggcacttatgtgtataagagtcagaaacagtcaattgtcctaaaataaaatgccagattctgttctttctgaaggccatgagagttcatcctgaaactaccttctaatcaggtgttctttccttggcttttttc

SEQ ID NO: 319752 - DNA, 560 bp, Homo sapiens
ccctgcttgatatccaaacctatgcaggttgtttcttctcccaaacagaatcccttccccacaaccatcaccaccctgccccacccaatcatagcttctcactcttggatatctcttccctccaggaagccctccctgacccctcaacaccgggtaggctccttgcttggatgcctggaggaccctgccctcgtgcccaggttagcatttatcatttttcacatgttaggtgtaactgcctgtgagtctcatcccatggtcctgcacttactaattaggagaacctcagaaccacctagacagtcttcaatattgtctctcaaacccaccctagagactgtaattcaaaagatgctaacagtgaccyagaacactggatctttaaaaagctcccaggggattctgatgtgcacccaattcagtgcttacctgactataaagtaccctggattatacacttttaaaggctggggttgtgcatttgcccacaggtgtatacccacagctgaatacataatttagcccagagtaagagtctgttagtatgtgttagttgactt

SEQ ID NO: 319753 - DNA, 558 bp, Homo sapiens
aaactacagaatttttccaaagttattaaaaccatctcaaattattgtaaactttatagtaaaaagtccttgtaaatcagtatatttatcacttggtaaatttagtgaactggtcatttgatgaaatttgcaaatctataaatgttaaaatgttgtcaatagggaaaatgacttatataatagaataatatttaagtgtaacctaagaaaaatttatagaaaactyaaaaaatgtagttatgttcaaaaaaactatgcatttattcaacaatatcactgtatatctcttatgagccaagccctattctaggcacttaggcaacatcagtgaacaaaataaagatttttgcctccatagaataataagcatatcagtgctattgcatgtcaaaagacaaagagtgcaacaggaaaacagaaatgtatagcaggatgagggaatcagaaatgcaggaggagaaatggcaattagatggaaaattcaggaggactatattgactgaaggtattcaacaaaaacattgaaatttttcattgacaatattcagggaaaaaaat

SEQ ID NO: 319754 - DNA, 479 bp, Homo sapiens
atggtggaagggtgttgtaggcaactcaagactgtcctatcctattcagtgcatgtttctttgatataatgttaaaaccaggtactgtgattgctcacttgcgatatttggttcttatgaaggtgcttttttgtgtggatagttgttcaatttgatgtttctgcgggggagataatcactgaaaggttctatatggccatcttgctctgcttctgatctctgagacagatactcttttaaagcacctataggacatttgtgaaaattgactatatgttgggttataaagcaagttccaataaatttcagaggatttaaatcatatagaatctgtgttctgaccacagtgaaattaagattaaaattaataacaaaaatgtaactagaaaaagtcatgattgtaccaagaaagttcactttcactacrtggaactaagaaatagatttgttgataatccatgagtaaaatgaagtcataa

SEQ ID NO: 319755 - DNA, 540 bp, Homo sapiens
tacctcacacactttttttgtggttagacacttaacatctactcctggtaattctcaagaatacaacacattgttattaactatagtcaccatgctgtacagtagatctcttgaacttattcctcctgactgaaattttgtttcctttgactaaacatatccccaatctcccccacacactttaatatttaattctctataattcaacacattttaattactcttttcatctaattattactttttaaagatgagcccagaatatcacaaactcttaaaaacaaatgcttggatggagtgaacatcacaggcatcccaggaatcgtagagtggtgcaatgaactatgtatcacctatgccctgtagctttctgaaaatctacccccatacataacatctcacagtcatgaagacaaagttgacctttcctaagtggttgatccatcacaccaagttaaaaataaatttgtagttttagaaatgaaaaccaatgatcaaggagcaattttatttacagwataaatttcccctttggaggtg

SEQ ID NO: 319756 - DNA, 601 bp, Homo sapiens
gaaaaatataactggctattatgagaactaatgacaaatctagaagaggtttgagataagagcagatcaaaatcattggcttacctttgttcattgatgtactattattacctgaaatggcacttagaaaatacgtggtatttattaaataaataaatgagaattctggattacttgtgggctttttttcattgttgagcctgcactggtttyccagatgtatattggctcatattttcctttttgtaaattttgtattcacattctttgccattttactgattagtggtttattaacctgtaaaacattatacacctataaaatagtaaaactgtgccaaaaatgttgcaaatatttctttaaacatattgtttatcatattagtctttaagttatagaattactggtccatgtaaaaaactatttactttaaatccacaaagaccttctctattcagagatcagatattcatctaagttttcttaattttaaacatatcatttaaaaacaatatattaattcacttggcatttattttgatgtatgctttgtttgactttaggatctaaattgattcttaactggtaaatcagctaatg

SEQ ID NO: 319757 - DNA, 625 bp, Homo sapiens
tttctctctgtgaagcctagtttactttggttctcaactttcttttgcatagaatctaaaacgacataactttttttggtaaatattattttggtctgtgtagaaaaacaagcccaaaagatattcagtggctttttaggaatatgtgttcatatgyattctttggacggggttatcatgaaaaaactggtgacttctgagtggaaaaaaataaaaacaaatccaaattgtgcaaataaaatgaaaaagtaattttctttcttttcagtagtttctttccaaaataagactgtttgttgtttggtttagtggagtggactttgacatagaaacatttaagtcatctttgaactcaagttgattatgaatatttgctttttttaaggcaaaatttctgaaagttctaacttacagatatatatgaaaacaaacagaatcaaatctactaaaatttgttttgcccagtcagagtgagcagatgttagagcatgaggactgaataagtcttcttacattgaatttgggtcacttcatttccttagttctcaaggcagtggggtcatctttaataaaatttgcactactaatgccatgtcatcaaggaatgaatttaaaatgctcattt

SEQ ID NO: 319758 - DNA, 593 bp, Homo sapiens
ttttataatttcttatgcctgtctttactgcaatctctgaacataaattgtgaagatttcattttaatatggacaattatcaattccctaataatactcttataatttcttacacctgtcttactttaatctcttaatcctgctatcttcgtaagctgaggatgtacatcacctcaggaccactattgtacaaattgattgtaaaacatgtgtttgaacaatatgaaatcagtgcatcttgaaaaagaacagaataacagtgattttagggaacaaggggagacaaccataaggtttgactgcctgtggggtcaggcagaatagagccacatttttcttcttgcagagagcctataaacagacatgcaagtaggagagatatcactacatttttctcctagaaaggaatattaaacattaagaccctaggaaaagaatggcattcctggggggcagtctataaacggccgctctgggagtgtctgtcttatgtggttgaaataaggactgaaatacgccctggtctcctgcagtaccctcagrcttattagggtggggaaaaaaatcccaccttggtgaatttgaggtcagac

SEQ ID NO: 319759 - DNA, 580 bp, Homo sapiens
tgctagcagcgaggatgtcaagccagtggatcttagcttgttggtcttcgtgggggtgggatccactgagcaagrccacttggctccctggcttcagccccctttttaggggagtgaatggttctttctcgctggcattccaggtgccactggggcatgaaataaaactcctgcagctggctcagtgtctgccccaacagctgcccagttttgtgcttgaaatccagggccctggtggtgtaggcacccaagggaatctcctggtctgcgggttgtgaagaccgtgggacaagcctagtatgtgggccagacagcaccacccctcacagcttcccttagctatgggagggtgtattctgaccccttgtgcttcctgggtgaggtgacaccctaccctgcttctgcccaccctccttgtgctgcatccactgtctcaccagtcccagtgagatgaaccaggtatctgagttggaaatgcagaaatcaccagccttctgcattggtgtcactgggagctgcagatcagagctgttcctatttgaccatcttgcctgggaatctcctggaaagaggttcaatt

SEQ ID NO: 319760 - DNA, 611 bp, Homo sapiens
taaaccttaaggttaaaaaatgatctcttttgactccatgtctcatatccacatcatgctgatggaacaggtgggtttctttggccttgggcagctctgccttgtggcttcgcagagtagagcccccatcctggctgcttttacasgctgacattgagtacctacagcttttccagatgcatggtgcaagctgtcagtggttctaccattctggggtctggaggatggtggccctcttctcacagctctactaagcagtgccccagtggggactctgtgtgagggctccaaccccacattttctttccccactgccctagcagaagttctccatgagagttccacccctccagcaaacttctgcctgggtatccaggtgtttccatatatcctctgaaatctaggtggaggttcctaaacctcaattcttgacttctgtgcacccacaggcccaacaccacctggaagcagccaaggcttggggcttgtatcctctaaggcaactgcttgagctgtatgttgacccctttcagccatggctagagctagagcagctgggatgcagggcatcatgtccagaggctgcatagagaaggggggcactgggccca

SEQ ID NO: 319761 - DNA, 583 bp, Homo sapiens
ctcattgctttgtttacactgtgagcctaaaaccgcctagtcaagcctcagcaatggtgatgcccctccccccaccaagctcgagcatcccaggtygatctcagactgctactgtgctggcagcaagaatttcaagccagtggatcttagtttgctgggctccacgggggtgggacctgccgacagaccacttggctcactggcttcagcacccctttccaggagagtgaatggttctgtctcactggtgttccaggtgccactggggtatggaaaaaaaaaaactgtggctagttcagtgtctgaccaaacagccgcccagttttgtgcttgaaacccaggtccctggtggggtaggtaccagagggaatttcctggttttgggttgcaaaggccatgggacgagtgcagtatctgggctggagtgtgcatggtttctcaggctcagccccttatggcttcccttgggtaggggagaaaattccctgaccccttgcacttccctggggaggtcatgcccctccgtgggcctcacccactgtccaacaagtcccaatgagatgaactggacacctcagttaga

SEQ ID NO: 319762 - DNA, 583 bp, Homo sapiens
ctcattgctttgtttacactgtgagcctaaaaccgcctagtcaagcctcagcaatggtgatgcccctccccccaccaagctcgagcatcccaggttgatctcagactgctactgtgctggcagcaagaatttcaagccagtggatcttagtttgctgggctccacgggggtgggacctgccgacagaccacttggctcactggcttcagcacccctttccaggagagtgaatggttctgtctcactggtgttccaggtgccactggggtatggaaaaaaaaaaactgtggctagttcagtgtctgaccaaacagccgcccagttttgtgcttgaaacccaggtccctggtggggtaggtaccagagggaatttcctggttttgggttgcaaaggccatgggacgagtgcagtatctgggctggagtgtgcatggtttctcaggctcagccccttatggyttcccttgggtaggggagaaaattccctgaccccttgcacttccctggggaggtcatgcccctccgtgggcctcacccactgtccaacaagtcccaatgagatgaactggacacctcagttaga

SEQ ID NO: 319763 - DNA, 505 bp, Homo sapiens
agatatgcaatcaggtggttgtactctatggtgagctaaagaagtaacacttggttatacattgtacctggtactgactgcagtaaacaagcccctggctaaactcaggaatttagacattcagtctttgcacatcaacagggtcctcctataaattagaagtgatgcaaataaaacaataagagaggctatcataactcccatagaatgagagtattgaatgttaaataataaagggtgctacgattggatgcttaggttcaaacactctgactctggtgtgatattgcaagtcctttaacctctctgtgccttagtttcttcatgtaaaacaaggataagaactgcaatagaatcatatggttattgtgaggattaaattatacactgtataaaaacaacattcaaaatgcctggcatgtagtgcaagccttgaataaacrttagttattattactgtattcttgagaatgtgtattatgcattgctctttgtcttaattggg

SEQ ID NO: 319764 - DNA, 542 bp, Homo sapiens
agcctaaaggatgtgattgagtgaatgaggaaaccaattctgttgcttgaactcagggagctagcaggaatattatacagggttttttttttttttttttggaaatctatgtgtactattagggaaaaagtgtctccttgcagtcataaggaattataatgtttcttaccgkggataatggtctactatcacttaccatcacactattaaaatggagtgacaagaagaatcctagaaagaaaaaccgaggaaacagataaacacctaacaattgtctgcctcccttgtgccaggtactgtgctaagtaagcacctttatcttctctttctgtatatcttcagcatagaagtatattatctttctcatacatggttgatacattagcactactggatctattttttccaggtcagttcagaaaatatttgtatgggctataaattattatcctatgtagtagaggcttctactaaccaaattttatacatgaaggtaatggagcaaagaaagattgagtaaattcctggaaattccatagcta

SEQ ID NO: 319765 - DNA, 521 bp, Homo sapiens
aatctgaaatcttatcttacatagatctattgtgaccaaacaggtctatataagagaagagaagtcatgataaaaagtcaaatggtgcagggagttgaccaagatggctgaatagaagcagctgtggtctatagcactcatggagaggaataaaaggggtgagtgaatacagcaccttcaactgaaatatctagattctcacactgggactcattaggccaacaacttgagccatggagaatgaagaaaagcagaggaggacaatggcccatctgggagcaacatggagccaagggaaccctaacccccagtgaagggaagcagtgagtgaccccaccggggaaaccatgcttctcccatggatctttgaaaaccatggatcaggagatcctcttgtaaacccatgccaccagcaccttgggtctgacacacagagctgcatggagtcttggcagagcagctgctcyggcacacacagagccccaggatcttcacataccctggatctgggattcccaaca

SEQ ID NO: 319766 - DNA, 577 bp, Homo sapiens
agtcattttgccacatcatggccagactgcttctctaagtgggaaccccatccattcctccttacccaatacaagtcctccttacttacccctccctgctggaggttcagccacctcagtgagttttctacaaatggagctctgatctctccctgggatggaccccctgtggggagggtcaggtcatcatctctgctgtttggttgattcagttgttacagtttggcagctttggagagtccaaagagttcaracaaaaaagcattcccccagtacagcacagctgctttgccagattgtggccaggcttctttaagcaggacctcaatccacttctccttattggcaagatctcccagctggggcctcgagcttcctctgcccatgttctacagccaacacagttctaatttccctctgggatggaatgctgggggcaagggggcaggggtgaaaattgggcaggccaacaccttgactgtttgggtttctcagttagtctagcctgtgagccctggagagctcagcacagcacacctgctctaccaaaaagcagccaaactgcttatttaagtgg

SEQ ID NO: 319767 - DNA, 577 bp, Homo sapiens
agtcattttgccacatcatggccagactgcttctctaagtgggaaccccatccattcctccttacccaatacaagtcctccttacttacccctccctgctggaggttcagccacctcagtgagttttctacaaatggagctctgatctctccctgggatggaccccctgtggggagggtcaggtcatcatctctgctgtttggttgattcagttgttacagtttggcagctttggagagtccaaagagttcagacaaaaaagcattcccccagtacagcacagctgctttgccagattgtggccaggcttctttaagcaggacctcaatccacttctccttattggcaagatctcccagctggggcctcgagcttcctctgcccatgttctacagccaacacagttctaatttcccyctgggatggaatgctgggggcaagggggcaggggtgaaaattgggcaggccaacaccttgactgtttgggtttctcagttagtctagcctgtgagccctggagagctcagcacagcacacctgctctaccaaaaagcagccaaactgcttatttaagtgg

SEQ ID NO: 319768 - DNA, 638 bp, Homo sapiens
  misc_feature (1)...(638): n = A,T,C or G
nnnnnnnnnnnnnnnnnnnnnnnnnnnnnnnnnnnnnnnnnnnnnnctaaaaaaattggaaaagaacttgcatagtattttgaaaatccacatttccatagggaggaaaagaattaaaattctgagctcagttatctatttgcctctcagagtagcatgtttaccattatgccaaattatatagcataaaaagtgacaggttttgttattcttacagcccagaacttctagtcttgtcagaaaatatagatagatagatagatagatagatagatagatagatagatagatagatagatagagagatagatgtgctcttgtcccctcccacctccagratccttgctgctagtccagccctaatgtgtaccacaattctaacaaggattcttgagaaaatatctgaattcactggtgcactacaggatggagtgtgctataatgttacatcagaagccagaacaatcggaagttgaacttttgagcagctagttgtacaactggaaaacctatttttttctactctgatttgattgttttcagtttgttaattcatctgattgcaagcagctaagtttcacaccttcccataaagcaaaaagcaagtattttcttgcccctcaaatacttcagatttc

SEQ ID NO: 319769 - DNA, 465 bp, Homo sapiens
tgatatgccaaccaagtttctcttttccacttggattgctcatatacttcattcaacagtctctagaatcatcttgatcatcatttgaatcaacagtctcctcatttatcgctcctgggtgaggaaatactcttcttagcagtagattcattttgttttgttcaacatctaggcgatgccataatcttgtttgatgtgtagaattaagtagccgagcaacaggtttccttctttctgatgatccaatgggtccatttgaggtttctcaagttattacatgttgcttcgtatttccttaaaagcaccatgtatcccacactttaatcatagtacaaagattgacaatctccttggaaattctttaattacatggaaagttttatgatatatcagtgctctgaaaagttttcaggcagaaattctgttatttctgataattaaacrtattgttatgtaagagatgac

SEQ ID NO: 319770 - DNA, 603 bp, Homo sapiens
aagcaccatgtatcccacactttaatcatagtacaaagattgacaatctccttggaaattctttaattacatggaaagttttatgatatatcagtgctctgaaaagttttcaggcagaaattctgttatttctgataattaaacatattgttatgtaagagatgacaaatagatggaagtaaatgtgggtttttttctgtttttgtttgtttgtttgttgttgtgtgcttgtttctggataactttactcgagcaagagtacatacagatgtagaatcatctaaatgtttggagacagtttttatggtttttataactttttccaaactttccatttccccccaaacacaaataaattccaaattattagcctctgttgtaagaaaactgtcagtttttgctttttttcctttgtatgagaggctctttccttctgcatgtataccctttcaaagaaattatcactgtctatattgtatttggctacaagtgtaatgctctgcatggcagcataaataggtggagttgatcagccattatttttattgtgkcagattttttcatgtttaccctactcctttttgaggaatatggtacctttgt

SEQ ID NO: 319771 - DNA, 562 bp, Homo sapiens
taccacagtttctttaatgagtcactccttgaaggactgggttgtttccagttcttggctggtgctaataattttgccacaaacatttgtttacagatgtttttataagcataaatctcaatttctctagggtaaataccaaggaatgcagttgctaggtcttacggtatttgcaagttcagtttttttaaaaactgtcaarccattttccagagtgactgtactattttacattatgtctcccctccaatttacatgctgtttatttatttttcttgttttagtgcactgactagaacttccagcactatactgaataggagtgctgagagcagaaatccttatcttgctcttggtctagaggtaaataattcagtttttcaccattaaatatcatgttagctatagagttttgtagattttaaaaaatcaagtttaggaaattgccctgtatttctgtttttataacagttaaaaaattataaattggtgttaaactttgttaaattcatcttatgaattaattgatgtgatttttcttcttcagtctgctaatatggtg

SEQ ID NO: 319772 - DNA, 495 bp, Homo sapiens
gtcttacggtatttgcaagttcagtttttttaaaaactgtcaaaccattttccagagtgactgtactattttacattatgtctcccctccaatttacatgctgtttatttatttttcttgttttagtgcactgactagaacttccagcactatactgaataggagtgctgagagcagaaatccttatcttgctcttgrtctagaggtaaataattcagtttttcaccattaaatatcatgttagctatagagttttgtagattttaaaaaatcaagtttaggaaattgccctgtatttctgtttttataacagttaaaaaattataaattggtgttaaactttgttaaattcatcttatgaattaattgatgtgatttttcttcttcagtctgctaatatggtggattatattgattgattctcaaccacttaaccagccttgcatttctgaaataaacttcatttgaatatggtgtttaatcattttatatatt

SEQ ID NO: 319773 - DNA, 495 bp, Homo sapiens
gtcttacggtatttgcaagttcagtttttttaaaaactgtcaaaccattttccagagtgactgtactattttacattatgtctcccctccaatttacatgctgtttatttatttttcttgttttagtgcactgactagaacttccagcactatactgaataggagtgctgagagcagaaatccttatcttgctcttggtctagaggtaaataattcagtttttcaccattaaatatcatgttagctatagagttttgtagattttaaaaaatcaagtttaggaaattgccctgtatttctgttwttataacagttaaaaaattataaattggtgttaaactttgttaaattcatcttatgaattaattgatgtgatttttcttcttcagtctgctaatatggtggattatattgattgattctcaaccacttaaccagccttgcatttctgaaataaacttcatttgaatatggtgtttaatcattttatatatt

SEQ ID NO: 319774 - DNA, 569 bp, Homo sapiens
gaacagtgaacaagctacaaaaataaagaaaaatggtatctaaggaatatatagaagctcaaattgaagaataagaaatgagaatgataagcatgcatgggggaaaagaagaaattatctaaatcataagaagcaaaatgtatggcaaaaacagattattgatgactttaaatgaagggaatggagaacaagatgaaagagacagataggagatgtgaagaaaataaaacattgagtcagaaagagaggaaatctaagaatgattttaaaataacagctggcaattttagcttactcaaaggttaaagtgccagaaagtaaagaaatgtggaaagaaacacgtagttggctcgtaatgggctcttaaaaaacamgttagattttggttgctgctgagacagaaagagataggggaatgaaaataagaagagaatttgtagatgaaagagaatggatcaatgaatttcttttctatttcatattcttcccatcacaagatataaagggatagtcagagaattaccgggatgattgacatgtcagaaaataagaactctgagaaaagatta

SEQ ID NO: 319775 - DNA, 445 bp, Homo sapiens
tgaacagactgcagatccagggaagagttgacgttgcagtcttgatcatgaagacagtctgaaggcagaatttcttcttctcgaggaatctcagtctttcttctcctaaggccttcaactgataagatgrggccattccatattgtggagagtaatctgctttattcaaagtctgctgatttaaatagtaatcacagcaacaacattcctttacaataacgtctagcctagtgtttcaccaaacaatagggtaccgtagcttagctaagttgacatataaaattaacctcacacacattatacttgaaagaagacctaggcttacgttgttcctcttctacaaaattggctcaccatttatgattagttataaacacctagcaacaacttctgtaattgttggcaatgtggcacctaaataactaaatgaaaaatatagttccaa

SEQ ID NO: 319776 - DNA, 604 bp, Homo sapiens
ctaaatcattctatgaaaccagtattaccctaatactgaaaccagaaaaaaacataacaaaaacagaaaatttcaggccaatatctctgatgcgcatagatgcaaaaatcttcaacaaaatactagctaactgaatccaacagcttatcaaaaagataatccacaatgaccaagtgggtttcataccatggatgcagagagggtttaacatccacaagtcaataaatgtgacatacaacataaacagatttaaaaacaaaaatcacatgatcatcacaataaatgcagaaaaatcaggtggaaaaatccagcatccctttatgattaaaatcctcatcagaatcagcatagaagggacataccttagggtaataaaagccatctaygacaaactcacatccaacattatactgaatggggaaaaattgaaagcattccccctgataagtggtacaagacaaggatgcccactttcaccacctctattccacataatactagaagttctagccagagcagacaacagagagaaataaaaggcatccaaactggtaagcaggaagtcaaactgtcactgtttgctgatggcatgattgtataccta

SEQ ID NO: 319777 - DNA, 605 bp, Homo sapiens
ctctgcaacagatggtgctgggataactggcaagccacatgtagaagaatgaaactggatcctcatctctcaccttatacaaaaatcaattcaagatggatcaaagacttaagtctaagacctgaaacagtaaaaattctcgaagataacattggaaaaacctttctagacactggcttaggcaaaaacttccatgaccaagtacccaaaagtaaatrcaacagaaatgaagataaatagatggaacttaattaaactaaaaagcttctgcacagcaaaagaaataatcagcagagtaaacaggcaagtcacagagtgagagaaaatctacacaaactatacatccaacagaggactaatacccagaatctacaagaaactcaaacaaattagcaagataaaaacaaccaatcccatcaaaaagtaggccaaggcaatgaagagacagttctcaaaagaagatataaaaatggccaacaaatgaaaaaatgctcaacatcactaattaccagggaaatgcagagcaaaaccacaatgcaataccaccttactcttgcaagaatggccataatcaaaaattcaaaaaataatagatgttggcaaaa

SEQ ID NO: 319778 - DNA, 605 bp, Homo sapiens
ctctgcaacagatggtgctgggataactggcaagccacatgtagaagaatgaaactggatcctcatctctcaccttatacaaaaatcaattcaagatggatcaaagacttaagtctaagacctgaaacagtaaaaattctcgaagataacattggaaaaacctttctagacactggcttaggcaaaaacttccatgaccaagtacccaaaagtaaatacaacagaaatgaagataaatagatggaacttaattaaactaaaaagcttctgcacagcaaaagaaataatcagcagagtaaacaggcaagtcacagagtgagagaaaatctwcacaaactatacatccaacagaggactaatacccagaatctacaagaaactcaaacaaattagcaagataaaaacaaccaatcccatcaaaaagtaggccaaggcaatgaagagacagttctcaaaagaagatataaaaatggccaacaaatgaaaaaatgctcaacatcactaattaccagggaaatgcagagcaaaaccacaatgcaataccaccttactcttgcaagaatggccataatcaaaaattcaaaaaataatagatgttggcaaaa

SEQ ID NO: 319779 - DNA, 581 bp, Homo sapiens
taaatacttctggaggaaggagcaagggagaataagagagagaagtaagagaggaaggaactaaaaccaatttctcacaatttttattcttgtatcttttttatgacataataaataagactatgtattagtctgttttcacattgctataaagaatggcctgacactggttgatctataaaggacagaggtccawttggctcacagttcagcatggctggggaggccccaggaaacttacaatcatgacagaaggcaaaggagaagcaacacactttcttcaaaggtgacaggaatgagaatgaacacaggaagaacttaccaaacacttataaaaccatcatatctcatgagaactcactcatatcaagagaaaagcatgagggaactatccccatgattcaaccacctccacctggtctctcccttgacatgtggggattatgggaattatggggattacaattcaagatgatatttgggtggggatgcaaagcctaaccatatcattctgcctctggcccctcccaaatcccatgtccctttcacatttaaaaaccaatcattccttcaattccctg

SEQ ID NO: 319780 - DNA, 608 bp, Homo sapiens
tatggaaccataaaaaaggatgaatttatgtcctttgtaggaacatggatgaagctggaaaccatcattctgagtaaactgtcgcaagaacagaaaacaaaacacckcatgttctcactcataggtgggaaatgaacaatgagaacacctggacacagggtgaggaacacaacaccggggcctgtcatgaggtggggttgggggagggatagcattaggagaaatacctaacgtaaatgacgagttaatgggtgcagcacaccaacatggcacatgtatgcatatgtaaaaaacctgcacatttgtacatgtaccctagaacttaaagcataataaaaaagaaaaaaaaactaaatgcttttaagagcactcacatcatttcttgaacactttgctgcttagaaatttctcccactcataccctaaataatctctttcaagttcaaagttccacagatctctagggcagggacaaaatgcctcctgtctctactaaagcatagcaagagtaacctttattccagttcccaacaagttcctcatcttcatctgagaccacctcaacctggatttcattgctcatatcaccatcagcattttggccaaag

SEQ ID NO: 319781 - DNA, 451 bp, Homo sapiens
acatggcggaaactgcccccatgattcaaccacctccacctggtctctcccttgagatgtggggattatagggattatraggattataattcaagatgatatttgggtgggcacacaaaacctaaccatatcagaccataatcagagtgaactgaaacacttttgcaaagatgggatttcaattttaagatgtattatccaagctgtggccaagctttcttctaacacttaaacttgagaatatttacaattatgtttattacaatgtaattacaatgggaaaaatttgaaaacaattcatttacccaaaagtaaggaatcagctatatgaattataatctcttttatgaaaaaatatacaattatttaaatcatgttctataaaaatatttagagacaaaggtaattgtctacaatacagcattaatgaaaaatggaatataaaaattgg

SEQ ID NO: 319782 - DNA, 482 bp, Homo sapiens
tctaaaaataataataataatggattagtttaaaagaaactatggtaatagtaatacaattgaataatattcataaattgaaaggatatcaattagtattcatttaaatagaatgaacttcataacatattactgagtgaaaaagtaagttgcaaaatgacattatcaagaatttctgtttcttgaataataaagtagacatactttccccgttccttttacaaagtacaactaagaaccttgtacatgacaaatgaaagaaatgtaagaactctgaaagatgaraagaagtcaggctggttggggacatcaggaccccaaaaatgatccagactttgacaattgatcattcagcaataaggaatccaccccaatcaaggagtcaccagagaccaccgggtagctacaattcctactcctgttcatcaggcagaagaggactaccatctattgggtatgaacagaggccaagtggggacctg

SEQ ID NO: 319783 - DNA, 586 bp, Homo sapiens
ttcaatttgcatgacttgtgttgctttcaacttaaacagctcatatataaccattgctattacctggggtacaattacaagtgtcaaagctgcagctggcttcctcctcttcctttcattttgggaaaaaaaatcactgagtaatccagtggcttctgccaagacctatggaacaagaattatgtgttacatgcaaattcaagcatgccttacaattttgtaaaatgaaaacttagaatactactagttagtaagtttattccactrtctatatatgtaatgatgctttgattagaatatataatgatttaatcagtaatcatgcatacctactggtgcaagacttcaaaaggaagccttttcagtaagcccatgtggaaacttaaggatgtgatgtcaattattttaaaacactatgtagtggcaagtttctattattaggcattttaaaatattcaacttttaataagtcatacatgctagtgctaatctttataatatcttatatatttagaaactttaagatttaaaaagttccaagttatttacatgtgttatattgcttgagccacaaaacaacccaagt

SEQ ID NO: 319784 - DNA, 590 bp, Homo sapiens
ctcactcgtgaaactccactaaaatgatagtaaagtattacaacaaaaatacaaaaatgcrcaaggaccaaaagaatggaagaggaatctatagcaaaagccagaaaaagataaacaagtggtgaatgccttaatagacccaagaaagtagatagatccaagaaggaaaccatggcccccagagggctcaggactttgtggcatccagatacctctggatgagaaggtagaggtataactaaaagcagaaatatttgctgaaaatataagaaacaattaaatcaccagatactcttcacaactctcttccacataagactgaggggttttcctctggaaagttttatctggctgaggcacaccaggcagggggcatgctagttgttggcagtgagaattacactatccagataagagtccagtttctctgaggaaattgcctgcccataagaaaaagcctaaaaatacttacattggaggttctccattaaaatgttccagctaggtcacctgacaatggaacccagatcaacaagccctatccacttacaaaaagctttcagtcagcacttcaatacttcacacaacag

SEQ ID NO: 319785 - DNA, 205 bp, Homo sapiens
aaacaaaatacacaaagcattagtaaagacaaaagttcaagaatggtaaatcactcytactttcaggactgaatgccctttcaaatagttaactgcaaaaagcataaaactatgaaacacataaaaatggtatgtaacaaatagtaaagcataatggaagtttaactgttaaaagaataaaatctgctaaatgaataataggagt

SEQ ID NO: 319786 - DNA, 539 bp, Homo sapiens
atattttgcaaaagtttgttcctttcttttccagtctaacaaaaatgaaactcaacttataacccactgtggaaactcacttaacttccccttcctctcttaacttctattccctataacaggttgattacgccattaaccttaattcttcaccttccctattatgtaattttgtagttcctcacggtaaagcagagtatatttccatgcccagtgtgacttactttggccaagagaatgagatagaagttatggtaagcctagaactcaagaagacatgcatatttccaatttctctcttgtatctcttctatcatcatgagaacatgctaggcccagctgctggacmtggcaggaggataataagagatacatggaccacagctacctccagccaaatgcagtcacaaaaatgacctgagccaagaccaacaaaactgtctggctgagttcagcctagataagttgacttgaagattcatgaaaaataataacatataaactactgagttttagcatagctcattatacagcaatat

SEQ ID NO: 319787 - DNA, 576 bp, Homo sapiens
atatattcttaattcataaggctatatcctcagtctttgctaaaatcttctacagttcaatttgtaggtagatggactaccttgggagaagtcaagtaaatatactttacaatagacttatagcggtaatgcacccagaaagactggccaatcactgagaatgggattgccaaaaagtgaaaagatgaaaactgaaggaaaaaagtgaaaaaaatatgaaaggcagaaaaaaaaataaaactgaaaacttatagtgaccaagaaaaaaacacagaagactcaaattactaaaatcagaaatgaaataggggacatcattactaattttatagaaacaaagactgtaatgaaatagtataaaattatatgccaataaattagataatagaggaaatgaataarttcctagaaatatacaagctactaaacaccctaaggaagaaagagaaagacctgaataggcctataacaaataaagaaatttaattagtaattttttaaaaaacttctcacaaagacaagcttaaccctgatgactttactgatgaattctaccagacatttaaagaagaatta

SEQ ID NO: 319788 - DNA, 438 bp, Homo sapiens
ttcaaattaacaatctaagatcacgactgaattagagaggcaagaacaaatcaacccaaagctaacagaagacaagaaataatcaaamtcagagctgaactgaagggcattgagacatgaaaaactattcaaaagatcaatgaatccagacattgcttttttgaaaaaaataataagataaaaaacccttcgaaaaatcaatgaatccaggaggtgaatttttgaaaagatcaacaaaatagatagaacactagccagactaataaaaaaagaagaataaaatagatgcaataaaaaatgataaaggagatatcaccactgatcccacagaaatacaaattagcatcagaaaatactataaacacctctatgcaaataaactagaaaatctagaagaaatggacaaattcatgggcacataggctaaaccagaaagaa

SEQ ID NO: 319789 - DNA, 565 bp, Homo sapiens
taaaaaaagtataaaaacaaaacccagagctaacatcatactaagtggtaaaagacaatgttttcaccctatgttcagcaagacaaggatgtctgttcttaccacttctagtcaccattctacaagaggttctaatcagggcaattcagcaagacaaataaataaaatacatccatatttgaaatgaagaagtagcatagcttctatacatcatatacaatgaagacatgatcttatgtatgaatcctaatgaatttatcaaaaaaatagaactaattaacaagttcagcaaggttggagggtacrggattaatatacagaaatcaactggatttcttttttttttaattatacattaagttatagggtacatgtgcgcaacatgcaggtttgttacatatgcatacaagtgacatgttggtgtgctgcacatatcaactcgtcatttacattaggtatatcccccaatgctatccctcccccatcccccaaacccatgacaggccccagtgtgtgatgctccacttcctgcagccaagtgttctcactgttcaattcccacctg

SEQ ID NO: 319790 - DNA, 640 bp, Homo sapiens
tagttctccacctgagcttgtacaagattgttccttccttttggcacctcaacaccctgacaagaggcaacagcatrgggaatggagattgtgaaagtgtaacctacaccccagacacactcctggtttccaaacagaaatgcaatccttgctgggtttgtagggaagtaggaaaaaagtaggaagccctgaaatgaaatatggctgaggttataaagacaacatgaaaagttaagaactgaaaataagactatatttctaaagtgactgaaaaattaagaaatcaacaccaaatgtcattaaaggagtcagcttcccagcaggaacgaaattctgatacaatccagtaatggaaaaataacgtcatgcatgtttatatctgacaagtcaaaactgctcaatcaaaatggttacactcagtgtaatctcagtgattgctccaaaaaaaaggaagatattttgcccttatttctgagagttttaaaaagcagtttccctgcatataaattactgttctcctccttgaggcttcaggacatgcacccatcattcccagccaaaatatagatgacctgtgtctcataaaatatgaatacttaggcaatttgcaaatgacttcctgttaccaatttttgcaaca

SEQ ID NO: 319791 - DNA, 443 bp, Homo sapiens
ggaagtgtaagaggaatccctgtccaatcccttcttcagctagaacaggttgttccattttctctatctaggtgcttcccattaaaggagctcacttcttcccaaagcaaaacacaccacagctaaaataactttagaatgtttttaaatatctaacaaattccaaatgraggacatttccatcaacactcctcccatacccctcaattgcccaaggacaattcaccattttaattacaactgggcagaggtagagttgagaaagatactaccacattcaaagcacacacataatatgtaccacgtcactgaataagctcaaattcccaaaccattttactgaaaagcccacttcacagaaagtaatcataaatcaactttttatccttctctgttccttaaaacatacccagtgggaccacttattctcctgcactaaagac

SEQ ID NO: 319792 - DNA, 529 bp, Homo sapiens
aagtggttcctacagcttagcaaagtcatttagtggctatttctatcaatcaggccttcctccaaaggcaagaggacaagtaaatttatcattttcctgcctstcatgttaaagtagagaaacatgacaccttggcaaggtgctgattgccattttctcatgtgaagtagcagagaacagctgggaaaccagcaaactctcagagctgttactctaatcaggggagaaaattttcacagagaagttccccacaccccattcttttattttactttaagttctgggatacatctgcagaacgtgcaggtttgttacataggtatacatgtgccattgtagtttgctgcacctatcaacccatcatctaggctttaagccccgcatgttttagacatttgtcctaatgctctccctccctttgcccctcaccctgccatgaggccccagtgtgtgatgttcccctccctatgtccatgtgttctcattgttcaactcctacttatgagaacatgcggtgtttggttttctg

SEQ ID NO: 319793 - DNA, 576 bp, Homo sapiens
cccgttcgcacccacttgctcttctatgctttgccctacaagttggggtgaagggaggaagaaaatgggtaggtttccccctgtaatgtccccacagcatggtggggtcctcctgcttctctgggggttgcctctgtgttatagacatcccatgccagctcttttagggttcggggaggtactggagcctcccactgcacagcttctaacctggaagatctgctgtggataccacttctcttgctctccctcagacacctccctgcgaggggcagcccctgggacactcaggcaggaaggctcaagtgtcttgggaagactgagctccctcattccttcctgcccctttgtcctgccccacagcactggaagccatcagcctccagtccccaactcagtacagttgaacttcgggcaacttcaaaattgacagcaattctggggtctcccaccaggaatgtggtaaaggacaggaaaggcctsactacccaaagggtagggcttctccaatatccaaagtctggcagtggcagaggtgggacataagggtaaactctgtaaaccagcagctggtcc

SEQ ID NO: 319794 - DNA, 569 bp, Homo sapiens
tttttaagtgtacacttctaatataggtatttttcttttaacataaaaacatgtgtcactgtattactatataataaacattataaaccatatgcacgaaatagatgtttttaatgagagaaaatagttaaatgtcactatttgcctataacacataatttttttctcagaagtagattttattgtggaaggaaaaggaggggatgagcccttgatacatgaatgaaggatgtcctaaaagcccagcaaaggctcctcaaggagataatactgtaaacagtggaatgatgtcctgttggtcaaggtaacgtatttcaaaaagatggraatttcaagagtgtcaaattccccaaggtaatcttgtatcatggtgccaccttattggtccacatcaaagagctatgcttgacttgagaacatcacattcattttgcttttgataattcttccattatatttgcatgtgtttcctacagattacatataaaaatcttgtgatcaaggccagttgtggtggctcattcctataatcccagtgctttaagaggccaaggtgagagaatctcttg

SEQ ID NO: 319795 - DNA, 552 bp, Homo sapiens
caaagctttctctatatctgttgagatgatcatgtgctttttgtttttagttctgtgtatgtgatgaatcacacttaatgatttgcatatggtgaaccaaccttacatcctagggataaagcctacttgattgtgatagcttcactttttgatgtgctgttggattaagtttgctaggattktcttaagaatgtttgaaaatatgttcatcagggatattggcctgaagttttctttttttgttgtgtctccaccaagttttggcatcaggatgatgctggcccaatagaatgagttacggaggagtccctccttctcattttttcgtaatagtttccataggattgataccagctcttctttatatatctcatagaattcagatgtaaatctgtctgacccagggctttttctggttggtaggctatttattactgattccattttgaaacttgttattggtctgtttggggtttctatttcttcctggttcaatcttggtggggtagtatgtttccaggaatttatccatttcttctaggttttctagtt

SEQ ID NO: 319796 - DNA, 505 bp, Homo sapiens
ctctttagtgtttcatagttattaacattcaaatatagtcacaatttctaagccaaatactaatttttatgatctgatattttagatgaactgcattactcctgcctctgtgggaagagataacagatcagtgtttcaccaggtttttgtagctgctttgctcagaggtcaaattcttgctcctctctaaaagtatcagtaattgtgcaatagattgcaaagactttcatccaacaagcttgtgtgaaatactattacatgctagacactggatgcaaaacaatgagaaaaacaaagtcyttgacctccaaataccctagaagaaatggtcaaaaacacagattgcactatagaaatatacataccatattagagatatgaacaagacccatgcgaatctacaggagctggtggtcagagtgactatttcaatgtggtttaccagttatagataatattttggggcccaagaaatatttttgtgctgttgctcagtgttctgctg

SEQ ID NO: 319797 - DNA, 570 bp, Homo sapiens
ctcctatgctcactctttcaaaaaaaaattaatgcaatgccttttactctggcttcttcctctcttgagatgtctctggaacaatagagaggtgctggatatgctaagtttttcctttgaactaaggcaaaaggagtacctaagccccagaatacctctaggctctaagcactgtatcaactttgaaactaactatgagattatagttctatatttttagaaacacatctttaactgaaaaattgtggataagccattgcaccaactttttwaaagccatggccccaaaacaggcacataaagaacttcaccctctctgggcctcagaataatttctgtaccttggttttctcaacagtcagagtaatccataagaagacacacctcatattgccattgtaaggctcccatttctacatggtttagagaactccttaaaaccacaaatcaatcatgacactcaaaaggatttaacttccaatcagtagaagtaaattgcagaaaaaatattcaaaatcaaaatattgccacttagaaattgcagatcgctattctacaagctgaaaaaaa

SEQ ID NO: 319798 - DNA, 570 bp, Homo sapiens
ctcctatgctcactctttcaaaaaaaaattaatgcaatgccttttactctggcttcttcctctcttgagatgtctctggaacaatagagaggtgctggatatgctaagtttttcctttgaactaaggcaaaaggagtacctaagccccagaatacctctaggctctaagcactgtatcaactttgaaactaactatgagattatagttctatatttttagaaacacatctttaactgaaaaattgtggataagccattgcaccaactttttaaaagccatggccccaaaacaggcacataaagaacttcaccctctctgggcctcagaataatttctgyaccttggttttctcaacagtcagagtaatccataagaagacacacctcatattgccattgtaaggctcccatttctacatggtttagagaactccttaaaaccacaaatcaatcatgacactcaaaaggatttaacttccaatcagtagaagtaaattgcagaaaaaatattcaaaatcaaaatattgccacttagaaattgcagatcgctattctacaagctgaaaaaaa

SEQ ID NO: 319799 - DNA, 430 bp, Homo sapiens
tgactctaaaaaggtagagttgtagatagttccagcggtgggtttcatagagttaaaagaggaatagttttcttttcatgatctttaatcatatatacatgtggacaagggttaattaataggttccaagtggttgaacacacaatagggagaataacaagtgaaaaaaagttgcctgaggatgtgtgagattgcagcattggctttgggtaaactaaccttggatagagggagggatttgttttattatggatagaggtatgaaagttgatgggtggaaggtgagaagggaaactggaggaattttataggaatcagggtgatcaattgagagagggagaaatggcacttgtgggattagaatttaaggtagtgatgatttgaagtagctactakatgagtgggaggagtgtcggtagaaagctgtaat

SEQ ID NO: 319800 - DNA, 577 bp, Homo sapiens
tgtgctttaaaattcattttttattgtggtaaaatatgcttaacccaaaggttaccattttaaccagttgaataaagcacatttgcattattatgcaaccatcaccactatccctcaccagaacttaataatatgctttttaaaaacccttggttaatttgaggcagggaattataamcatattttgtgaaacattgatatattgtgagtttagagttttgctcagcatgatatgaaaagcaagatatgtgaaacatgattcctgggttcctgcagtttactctttgacagaggaacgaagaatagtacatatgggataattagggagtaaacctagacagaagggatacatatatacataacaaaatatacagatagatgggtgctagaagtcagacaatcacataaatatgtttgaaaaataataaatgccatggaggggtgggtcttgttgcagagaagtatagaatattgctaagtataaagacaacggtggaatggttcaggcgaaggaatttgtatgacccgataagaaacctaaatctgtttcttcaaagattgcatattaactgataca

SEQ ID NO: 319801 - DNA, 450 bp, Homo sapiens
ggtgctagaagtcagacaatcacataaatatgtttgaaaaataataaatgccatggaggggtgggtcttgttgcagagaagtatagaatattgctaagtataaagacaacggtggaatggttcaggcgaaggaattwgtatgacccgataagaaacctaaatctgtttcttcaaagattgcatattaactgatacaagtcaaagtttacacttacattaaaggtatttctcacttgaagttaagagataaattaaacttcataagtattttagcaaggagccaaatagataagtaatcacaatagtatttgtggtttgagtcacattgtcacagcaaaaattcatagattgtttcaagtgaagattaaccagattagagttattaacttgctcttccttgcagctaaaacattaaacagaatttcttctttaatggtccaaagtacctgc

SEQ ID NO: 319802 - DNA, 523 bp, Homo sapiens
ataaccttgacacattttgaaatttttttgttgttgggagaatcaaatacaagagaagccttatatcctgtacataatgaagttccaaattcaatgtaggtcaaaggcacaaatgacgcaattgctctgtttttaaccattgtkttttttgcttcagagaactgcattcattcacctcaatatatgctcaagattgtgctgtatgcaatcatgaaaatgtaaaatactctacagatgcaacacatatcccagcataatagtcaaagcctggcaggaaattgatgccaccctcgaacagattaactaaatgttactcaaggaaggaactcagtgaagggattattttcataggtgttggcagtgtttgaatcaaatgcttgttaaacattcagagaccagccacaccaagaaccgaacaggaagccagaaggcatgtgtgtagagcccagctttctggaacacagggcaagtcagagaaagatgggttgggacaaggggccacactgagtaacctgcacaccct

SEQ ID NO: 319803 - DNA, 536 bp, Homo sapiens
acttcaccttcatgcaatcagggagctaaattaccttcaatatgagcatcttcacctttgaaaactcttcatgcttcaaagacttggtttttgtaagtataaggttattcaataccaattctagtgaatgagatgggtgaccaaattcacagaaacacttttggtcagaaacaaggtatgatcatgaagtaataagattgattttcctctgtagctctggctgtaaakggaatcccaaaagaatagtttttaaaaacatttaaacatcttaaggtttagaacggcattactgagatgaatgaacagcctctcccacctcccccaaggtgacttcttccaaataagatagagtatacttggatacacatttcaatgtgtttgcttaaaaatcaattgcattaggggctttgcccagcatgcatactacagagtattagctccattgacagggggcaaaaaataatatttctgtgggcatagtagtttgggaaataatgagttaagtaaattctctttcctggcattcttttcctggt

SEQ ID NO: 319804 - DNA, 602 bp, Homo sapiens
actctgactttttgagtgtcagagttcttgtgctgttttttccycatttttgttggctgatgttccttcaggctttgaggctgttatcttttggatgggtgcttttttcttttatcctatttgatgcccttgggggtttgattgtggtataaggtaggttcagtcaactggcttcaaataaatagtagagtagctctgttggcaccaagagtcctagaatcctttggttccaaagatccccttgtttaagatttcacaggaaataatcacatctttaagtcattatcttgtagctgtcactcaattgtcccataggatttttataaactcctttgagatttcaatgaatattaatccattctcactttttaataccacaatccattagttacaaaacattttccaacaaattattttacatttttcccctgcttcatcaaagcactgtgtgcttaatatgtctttagatatgcttgaaggctataaaaggccaccataattgcctagattttcatctaaactcttggctaggaaatatctcaaattctccatgcccttcaaacatttacagattttccatctcagaattctttacaagatga

SEQ ID NO: 319805 - DNA, 616 bp, Homo sapiens
tttgttcatgacctgaatcttctaggcaaacaaagtgtatattgagattattagtgaggttaaatggagaaaaatctgtgataagaaacggagattttgccttagatattccaaatctactccctcatctaaaatatattctgtcgtgttgtgttgttttatatataaataatacatacaaagcatcaaagtcatgaagtcaagacttgaataatttggctaaaaagagtgtgcctatatcatcttggcatgtacatgcaatatttatgtmaatcaaaatattctaactgctcaatagtacatttttgaaacaatattaacattttcaatataataggtcaaacactaactttttataaattagttttattttacctctaaatggagtgctctaaaaataagacagagaaactgtccaaaccaaatttaaatatagtgtctaattaagggtagaaatttgagtgcctttatttaaaattcatatagatttatgcatgatttgccaaatatgtgctcaccttcaaaatattctgatgtatatatgtgtagtataatgtaaataattgttagtatttttttacttgaatttgatatttcaatcaaatacccatataca

SEQ ID NO: 319806 - DNA, 616 bp, Homo sapiens
tttgttcatgacctgaatcttctaggcaaacaaagtgtatattgagattattagtgaggttaaatggagaaaaatctgtgataagaaacggagattttgccttagatattccaaatctactccctcatctaaaatatattctgtcgtgttgtgttgttttatatataaataatacatacaaagcatcaaagtcatgaagtcaagacttgaataatttggctaaaaagagtgtgcctatatcatcttggcatgtacatgcaatatttatgtaaatcaaaatattctaactgctcaatagtacatttttgaaacaatattaacattttcaatataataggtcaaacactaactttttataaattagttttattttacctctaaatggagtgctctaaaaataagacagagaractgtccaaaccaaatttaaatatagtgtctaattaagggtagaaatttgagtgcctttatttaaaattcatatagatttatgcatgatttgccaaatatgtgctcaccttcaaaatattctgatgtatatatgtgtagtataatgtaaataattgttagtatttttttacttgaatttgatatttcaatcaaatacccatataca

SEQ ID NO: 319807 - DNA, 294 bp, Homo sapiens
cacaaatttctaaaacaatctgcataggatcataatggcattgttgtgagaaccagtggtctaaagtatcttgcttatctgtgtgacccaaattcactgaaaaactgcctagaccatgtttttgattgagctgtgaagttcttgcaatgaatgtaatcaagaktttgaaaataatctcccatatgtgctttacagttcatgataatttgtgtctcaagaaagggcataaaagcaaagttaaatttttgtgtttaagtatccttattagctcttatacaagtgagccaaaagtaa

SEQ ID NO: 319808 - DNA, 519 bp, Homo sapiens
ttgattgagctgtgaagttcttgcaatgaatgtaatcaagattttgaaaataatctcccatatgtgctttacagttcatgataatttgtgtctcaagaaagggcataaaagcaaagttaaatttttgtgtttaagtatccttattagctcttatacaagtgagccaaaagtaaagcattaattaaaaacagcttctagtgaggcagttccttttatatctgaaccttactttgaaatacatttactaccctttttatcacctgaaggtactattccaatccacttgcttgcaawgttcaattgcatttcatggcacttttaagcttaattaaatttttgcaacagagtaggtctgttctttaaggcaaagcattgctttcaatccatctgattttcatatggaaaggagctagcaagatttttttcttctcatttttggaaagcaaatactctgccaataaataagtaaataaatgctagttttctatggctatgtttaaggggaaaaatagtttgtgg

SEQ ID NO: 319809 - DNA, 577 bp, Homo sapiens
ttaaattctagtcaattttgtgaactgtggactttggcagtggacaatcagctgtataaaatggcttcatctttttcaaactgatcaagattagtggattcaatgagataaataccaaaagggttgacacaggcagaaccagcctggacaacagacttcctcacttctgtgagcctaatgctctcaagcgcagctctaaccctgggtcaaactacttatacttcctccaaagacttaaagttaaaaagtagaaatctgtttgattttccttgaaatatttttatacagtatttctattatctgatcatagggacgattgatgactattttaaaagtatagataaaggtatggrtatggatacagagctataagctttcccagtgctttttacacttcaagtactccaatacctaattcatttggaatacaaatttaagttaatttttttcattatttcaatcccagtgaaaaatttcctttcaaactaccaatattaaatgtacaactaaatagcaaagtgtacttaatgtggactttacactcaaaacaatcaggaattttttaaatgctgtttgg

SEQ ID NO: 319810 - DNA, 620 bp, Homo sapiens
atgtatttaaaatgttaccattattggtttacaaacctagcaggtcttatgctcatttataaaggcatatgtagggtaagacatcagmaataatggagggctaggtagctctaagtgtctgccctccacagaaatatcaaaatataaatcaaaatctgtcagcatcaccttcataagtactctggaacatagtcaaatgtttatagagtacaacttttaacataaataaaggaagtttaaaactaaagccttttgctattttaatatgttcttaaccccatcaaccaccctgtttcaccattagtcgtggaaatgataacgtatgttcccccgtgtggtctctagttatggaggaagccaagcagaccttattttcaaataaatgttgttctctatttttacctgtctggatgctatgagaaactaccagaaggactgaaacaaggcagtcgactcggttccacctaacttaaactcattctgggtagaaaacgcaaaagaaatttcttaaagacattgtaaaccaaacaaacagcgagttatcacctggggccaaatattacagttgaggcaaaaaacagattgctgaaaggcttataggaaaatctggggtttgagaa

SEQ ID NO: 319811 - DNA, 620 bp, Homo sapiens
atgtatttaaaatgttaccattattggtttacaaacctagcaggtcttatgctcatttataaaggcatatgtagggtaagacatcagcaataatggagggctaggtagctctaagtgtctgccctccacagaaatatcaaaatataaatcaaaatctgtcagcatcaccttcataagtactctggaacatagtcaaatgtttatagagtacaacttttaacataaataaaggaagtttaaaactaaagccttttgctattttaatatgttcttaaccccatcaaccaccctgtttcaccattagtcgtggaaatgataacgtatgttcccccgtgtggtctctagttatggaggaagccaagcagaccttattttcaaataaatgttgttctctatttttacctgtctggatgctatgagaaactaccagaaggactgaaacaaggcastcgactcggttccacctaacttaaactcattctgggtagaaaacgcaaaagaaatttcttaaagacattgtaaaccaaacaaacagcgagttatcacctggggccaaatattacagttgaggcaaaaaacagattgctgaaaggcttataggaaaatctggggtttgagaa

SEQ ID NO: 319812 - DNA, 614 bp, Homo sapiens
acctgtctggatgctatgagaaactaccagaaggactgaaacaaggcagtcgactcggttccacctaacttaaactcattctgggtagaaaacgcaaaagaaatttcttaaagacaytgtaaaccaaacaaacagcgagttatcacctggggccaaatattacagttgaggcaaaaaacagattgctgaaaggcttataggaaaatctggggtttgagaaattagggttcaattatacccatgtatgctggggaatttagaaagccccatgcatgaccagagcaggaggcatgctcagaaaattcctaaaaattccctaagttttaacctctggctgatctctagactcagcaccatcagcaagtgagggctaaggcagagttataaacagcctggttaagtattaaaaaggtgccccaaaagaaaaccaattaccaagaattaagtatttttctcattttactctttctgtttttcttctttccttcactgcttcctttcccaattttttttccttgcattcaaggaaaagtccttcaaaacacaagctgaccataagctaaggaaacagagacttcagagaccacacatgcaaatacatattttacaaaaat

SEQ ID NO: 319813 - DNA, 542 bp, Homo sapiens
actgaaacaaggcagtcgactcggttccacctaacttaaactcattctgggtagaaaacgcaaaagaaatttcttaaagacattgtaaaccaaacaaacagcgagttatcacctggggccaaatattacagttgaggcaaaaaacagattgctgaaaggcttataggaaaatctggggtttgagaaattagggttcaattatacccatgtatgctggggaatttagaaagccccatgcatgaccagagcaggaggcatgctcagaaaattcctaaaaaytccctaagttttaacctctggctgatctctagactcagcaccatcagcaagtgagggctaaggcagagttataaacagcctggttaagtattaaaaaggtgccccaaaagaaaaccaattaccaagaattaagtatttttctcattttactctttctgtttttcttctttccttcactgcttcctttcccaattttttttccttgcattcaaggaaaagtccttcaaaacacaagctgaccataagctaaggaaacagagact

SEQ ID NO: 319814 - DNA, 596 bp, Homo sapiens
tgtgtatttccctatgtattgtttatatttttattttctgtatattaggttttgacatcttaaaagcctttctggctggaaagtctgctcctccgagggctagtcgatccttagagatagcaaggggcttctctgggagcatgccttcaacatgcaacctaaccaatccagacgcatacctcctttatctgttccatacacctcaaggggcaatattcctctaccttaaccatcccagggctaggttccaggcaactagggaccattcttacagcttagagctcactggaattcttttaaattagccaatcctaagatgtttatcctgtcctgccttgctgttccctctaaaactacaataaagactgtgtccgattccttcccctcatgcgtatcccttctgcytccagactgacccaggtattttcacatgtggccctaggtggtatgccatgcctcttgttgctaggacctgtgagtataataaactttgttctcctcagcctatccggcatcttctctcatggtcccacctgactaaccatcacataaaagaacacagaacgcactgtatattttcttttccctgtcattat

SEQ ID NO: 319815 - DNA, 533 bp, Homo sapiens
tttaacacatttaaacatttatctgaggaacttccttggggaaaaaaaaaacatatttcctcctatcaaagttagaacagtattttctccattattggacttttatttttcctcattgaaatttaaattatctctaagttaatttcttacatttttcaaaagtgagttgttttctattttgagaaaattgctagctacatgatttggaagaaaacattactcatttaagtaggattttagggttatatggtgtatcattagtttcgacattattagagccaatatctggcaaaattgcacagtaggaaaagtgtgttcttctcacataaacttgctcctagtctctcatttcagtgcccatatgtatggctgttacttcaaagatacagtcatattcattttgtgacctaccttgrtattattttcctattacttttaaattatgctatttgctccttttatgtagcattataatttgccttcattacctgtggaaaaagtcatggcatatttaaacagtttattcctcctat

SEQ ID NO: 319816 - DNA, 622 bp, Homo sapiens
ttgatctgagtggtaaagtaagtgtgtatatatatcaaaattaatagagttgtacaattatgatttgtacacttcctatgtgtattttatacatcaataaaattttaaaaataaataagagtaaccaaagaggaaaaacaaatcaattagaaaaacaatagatttctcaactgcagcaacaggggytagcatccaaaaataatatttcattgtgctgggggaaaatatcttagtctagagttctatatcctattaaattatcattcaaaaaatgtgggcaaaataaacacatttttagacaaacactaagaaaattcccactcccacagattttcactctagatacttaaacaaacagcaaattgaacttagtagaaaggcatggaaatcaagaaatgacaagtgaaaaatgtcttgcagacaccactgatctgcagtcagtgggatcacgaaattagaagaccatgaaactggggatcaccagtttggctaaggtttccttgtctggatttttagatacaaattatctgtgcctttgccttcttacctataaaatagagatgatactagtaccttatgcatataataatggtgaggattgtgtgtgtgtgtgtgtgtgtgt

SEQ ID NO: 319817 - DNA, 556 bp, Homo sapiens
aaaagttgtatgtaatctcttacataaagatgtaaagttatatgtatagcttataagtaaataacttgagaagttrcttaagtatgaaaaatagttgttagcatcgagttccactttctaaacctgaatctgtttgctttagagatttcaaccaaagcatcccacctaaaacattctgaatcacaattagttaccaggccttcaaagaaatttggtattaataataaagtactacagcctacacttgattagctttatttataactttgagtaaatgtaagaacatccccataatagaagtactctttctgatttgtgtcaatatgctgcatggggtgggagaaaagggggtagaggtatacctaatgtgctcataaaaacagcacatgtgtggcacatagcttgccacatatacaaatattagtatattgtgggcttattttttacaaatacattgacaatcaatgctttagattagtagtctcaaaaatatttgtcttataccctttcataaagatgttttagtataaatcttgcatagcctggtttcttcctc

SEQ ID NO: 319818 - DNA, 562 bp, Homo sapiens
ctttgttcttctgtcaacatttttcacagaagtgtgtcggggagagaaagaggtggctttgtgggcctgaacaccagcacaaagggaagggtccagcattgggcgggcacaggagtttccagggggtgaaaaacctctgttgatctctcccttgccttttataaaaatgagatttttttaaatctgccaaatgtcttatgcagcactaggtaaatgttctgaattttagagtatgaaaatatttcagattgtccagtcttttggcaatatcttcaactctacattttatttaaaatgcgtatattcatcttaaaattatttttaccatgttgagttgctcatctataaatctatgctgcttaagtagtagtttaaatgtaaattttaatgaatgctatgaatcagtgcctaatttgcacattttgttaattacctgtggtttgggataatccatccaagatgttccctattatatyaccctgggtaattaagagttgacctattttcaaatttttgtggctcaaatagaatgaattccagtcaattttctttcctaatagaa

SEQ ID NO: 319819 - DNA, 606 bp, Homo sapiens
ttaccaatatttgccgaaataaatgtgtgtgcaaatacacccagacactgtatccacacmccctcacacagaggcatgacaatgaagtttcacacagcgtgggtgcactccccccaacattctcttccttgggtgtgaatcatgctctttttatgcctaaagaaggatcaggcatttccttatgagatttttcctcactcaaaaaaaaagaagctgactttaaattgtgggccatattccacatttacaagacccagggatagctttgctgtagacacttacctgtgtgggaatgggaaattttttttccaacatattatacacttgtcttttatctttttgttaaggaccctagatgcacaatggaccaatggttattcaagggcttctcccaggtcttcctctaggctgttatgtccatttctgaaccactgtacccctggagttttcttacaaacctcttgtaatccttcatcctggaacttctgtggcattatttacctcaccctgtccgttgccaggcaaaccacatagcaagttcactttctagaatgtagaggccttctcttgcccatcttccattagagccagcgacacctacttgtc

SEQ ID NO: 319820 - DNA, 606 bp, Homo sapiens
ttaccaatatttgccgaaataaatgtgtgtgcaaatacacccagacactgtatccacacaccctcacacagaggcatgacaatgaagtttcacacagcgtgggtgcactccccccaacattctcttccttgggtgtgaatcatgctctttttatgcctaaagaaggatcaggcatttccttatgagatttttcctcactcaaaaaaaargaagctgactttaaattgtgggccatattccacatttacaagacccagggatagctttgctgtagacacttacctgtgtgggaatgggaaattttttttccaacatattatacacttgtcttttatctttttgttaaggaccctagatgcacaatggaccaatggttattcaagggcttctcccaggtcttcctctaggctgttatgtccatttctgaaccactgtacccctggagttttcttacaaacctcttgtaatccttcatcctggaacttctgtggcattatttacctcaccctgtccgttgccaggcaaaccacatagcaagttcactttctagaatgtagaggccttctcttgcccatcttccattagagccagcgacacctacttgtc

SEQ ID NO: 319821 - DNA, 433 bp, Homo sapiens
actcaatactgtaaagcttcagatctcctcaaattgctccatagattaaatgcaatttcaaataaaatcccaagaggtttatttgtctggttggttggtttttggctttggttgttgttgttgttattgttgttgctattgttttcaattgttgatattaacaagctgatgytgaactaaaacttgtatggacataaaaactcttaagaatacccaaaacaaacttaaaagaaaaataaagttagaggattttcagattgcaagggtcaacaaataacagttaaaatggaatggatgcaaggatagacaaatagaaaaatgacacaaaatagagtgcagaaacagactcacaaatatacagttggctaatatacaacgaaagtggtggcagtttccaccatagggcagggggaaaggaagtacttttcagtaa

SEQ ID NO: 319822 - DNA, 433 bp, Homo sapiens
actcaatactgtaaagcttcagatctcctcaaattgctccatagattaaatgcaatttcaaataaaatcccaagaggtttatttgtctggttggttggtttttggctttggttgttgttgttgttattgttgttgctattgttttcaattgttgatattaacaagctgatgttgaactaaaacttgtatggacataaaaactcttaagaatacccaaaacaaacttaaaagaaaaataaagttagaggattttcagattgcaagggtyaacaaataacagttaaaatggaatggatgcaaggatagacaaatagaaaaatgacacaaaatagagtgcagaaacagactcacaaatatacagttggctaatatacaacgaaagtggtggcagtttccaccatagggcagggggaaaggaagtacttttcagtaa

SEQ ID NO: 319823 - DNA, 496 bp, Homo sapiens
aatagaaaaagaaaccttagatattcctatcacttttacaggagtttttataacgtaattcagagactccctgcttcatttgggaaaaatgtcaaaatatgtacttaactcagatgtgtccaaaactgtagatgtcctctcctcttgtctcaagcccacttaaagcagacctcaggagcaaatccaaytccacaaaacattaatgagtgtattagatttactgaaaattgagtgaggaggctgaggaatggttaatggcacattatgtgtaaaaatacttttcaaatttctaataaatatatctgtggccttgctctgtcgtggctagcctccaggatggaccccactgatccatgtttcctgatttttatgaccttgagtaatctcctcctatactgaatcagcactggctctgagtgatcaagagtatatagtggaagcatggcttccaacttgccctcttggattgcttgctttgggaaaagccagttattgt

SEQ ID NO: 319824 - DNA, 443 bp, Homo sapiens
tgactgttaattaaagaggttgccacatggctaacaggtccagactgtggtgggtgacaactgtagctcctgtagggcctcagaataaaattccttatactaaaccagtgaaattccttatactaaatcagcactaaataaagtgaaagttatatttggactttagagaaattgctaagttacatttcagtcaataatattctctactaattttatacataccatctagaggaactgaagaataacccaaaaaggaatcatatatagattctttcttggcagctggattttcattaaaaaactaytttctacctttctgtattttcagcttcttggcttgtctctttcacagagaaagttccttttaagtatttctaccatgcaggagagtagacccacactaatgacaggggtgcaagtagatttctacagcttagttcttc

SEQ ID NO: 319825 - DNA, 481 bp, Homo sapiens
aaacatcttctaaaatttctacaagtgatgtgaacttcaacaagagcaagaaaagagggcaagagaaatgctttctcgttttactataacaatcctgtgtacagcactgtagtaaatgttggagaagaacgtatcttacaaaagcagcttctaggttattttcaagaacaggaatgttctgaataatcaataattccattagcaaagggataatggttgatgtttagtcagttttaggtactttattgtctgtgatggctcaaacttgaaaacactcctaatttcctttagaaacggaaactggtgctctaaaaaaaaaaatcacaaaaaaaacttaarggttcatctgttccaaatctcattgtacagatgaagagtcaaagcctagtagattacaaaaatgtatccaacttacccaagatttctatttatttatttatttgcactccaacttgttccagaaaagattaatggcaactac

SEQ ID NO: 319826 - DNA, 543 bp, Homo sapiens
ttaattaaagtaaaagaggagataaatgagaatttactttaaaaatctgaattttctgagcctttaaggcaaggtctttagaaactggtggcaatgactttttattatggttaatttcccttcagaacttgtgaatttactgttccttcatatggaaattttaacactactcttaggcagatcagacataattaggataattttttgccacacaagtgaaatgaaaagatagatttccctatccttcctacaagataattgggtaaaaaatgaaatagtgarctaaatgaagaaaagttttaaaaataaatgggtgtgggtaagcaaaatgaacagcttgatggggagatggaaatagcagataaggcaccttaatgcaccttattattattttgtgggtaaaataattttgtcttatttgttaaataagtctgtatttgcgaaatcaaaagagacaaaaagataactactgaaaaaagtgaatcttcctcatacctctttaatcctgctgacccagttgctttccctaggagaagagtgtac

SEQ ID NO: 319827 - DNA, 555 bp, Homo sapiens
cctgcagtgcttaaggcactgctcactaggcaagttagacatcttctgaaatctgggccagttgtggcaagttaatgatagaccatttaatagactagcaaataaatgtattaggttggtgcaacagtgattgtggtttttgccattaactttcaatagtatatcaaaagatatcaaaatggcaatatttctggggtggttcataaacaatctaagccccattgatgttgggtcccactaacccttgttatctcacccccaacctgccttctgggtctaattttaaagttaagctctatttctcccttatctctcttttccaatataagctaccagcccatttcttgctatcaagtttttaaactatttctgcatttcaaatagagtcctgaaaattcctttcrtaaatcagaagggttatctgccattttctaagcagctgatttaagagaattggatatataattgtgccaggtccttagacagctcattatatatgtaagcttatattttattgcttcgagaaaactgcataaaagcaaaatcacaaattcc

SEQ ID NO: 319828 - DNA, 551 bp, Homo sapiens
gagttgaatccagatctgtttgactccaaactrcttctcactgtgctatttcctctctgcatggatggtgctttctgactttcccattagtaccattagttacttgttttacatattttattgtctctttggcagataatgggtattaggtgccaagaattcattaaaacattataccataaaacaattatttataaaacaatataatataaaaatagtattaactttctgtattagttatctattgctatgtaaaaattatcccagttgggtaataatgatgcgtcaatgtaagttcatcaattgtaacatatgtaccactctgttgggggatattgacaatgggggcggctctgtgcacacatggagggagaaaggatatatgggatatttctgtacctttctctcaattttactgtgaatgtgaaactgctaaaaaaagaattcttaaaaaaatttcaaaacttatttacccccaaacatagcaagtaatgacaatatatatttatcactttctaagagttaggaatctgacaatgacttagatgggt

SEQ ID NO: 319829 - DNA, 574 bp, Homo sapiens
gacatttggtttgcttcaacttctagccattatgaatgctatgaacattcatgtataagttttgtgtggacatgttttcagttcttttagatattgttatggcctaagttatgccctccccacaaattcatatgttgaattcccaaccccaataccccagaatgtgattacatttggatacaagggtttcaaagagatgattaaattaaaatgaggccattagggtggacccaaatccartctgatgtaagaagagatcatgactgcagagagatacctagggtacacatacacagagggatgaacacgtgaagagaggtggcaagagggcagccagctgcaaggcaaggagagaggctccaggagaaagcagccctggttggcaccttgatcttagttttccagctttcagaactatgagaaaataaatttctgttgtttaagccacccagtctatagtattttgttttgacagccctagcaaatgaatataggtgtacagctagaagtggaattgctggctcatatggtaactgtatatttaacattttgaggaatggccacactgctttcc

SEQ ID NO: 319830 - DNA, 449 bp, Homo sapiens
ctttatccaagtccagcttctgcttttggcttcactcaccttttgaatttacattcttttttgtctaattctgagaaacgtaggtgtttccaaatttacactctctaaatgtaactgagtgttgatataacgtggctctgaaatactgttggagagtctgggaaacaaaaagttgggcaatctttttgaggaaatgctgggcagtagtttttacttgtgtctctattataagtcacatgttcttataaataagcaagaaaattcctttaacattaagtgctgtgtaagaaaactggatggaaatacgtcacttttattcctccttaccattgctagattaaagtgtgtcacttacctgcatgttggggcctcgagatgctgagagtagaaatcaagttctgctctctctccatgaacttttggatcagyaggccgccactgttaataga

SEQ ID NO: 319831 - DNA, 583 bp, Homo sapiens
atagaagaaaaatctggcctgatacatgttagagttgttagattttcatttccatcctctatttctatttgtggaaaattctccattctcccaccattctcctcctaatgaagcttcaagggccctttcttccttttcccgccctctggcattgaggataaactagatcccaagattcagcagctacctcagctgactaggagccagctcaagatttttgtacatgttagattgaaaggcttaatggactcccaagggggagagatctarcaggcagttggacacatggacaacacatttattttacaaagttggacaatgaaaacaatatatcaactcaatgtttctgtttcagtagcaaaatatttgcaagcattatgtaataaaatatgaaataatatagaagtaacctgatagataatttgtacataatgtcttagtaatgtctaaggaaattggtaacatcaattcaaattacagaattatcataatggtttagttatatgaaaagactgttaacatttcattggtcaccattgataatctctttttattagatttatatttaacagtgattaagtac

SEQ ID NO: 319832 - DNA, 377 bp, Homo sapiens
attgctttattttcaagctgtgattaaacagttattgaacttttcatggagagcattaatcaattctcatctcttctgatttcccagagttctctgaaaataaagatgaatagcttgtgattacccacacttattgtgaggcagcaaacatggaggagaaaacatccttatggggttcatctctatgtgatggaatttgtcaggaagggttctagtccawgtatttttccttaagttcagattatggatatattctagatcaatgagtggggatggaaatttcactagagttttaactaaaagcaccttgaagagtatgaagatacatagaagttaaggcatgcatgtgtattagttaattcttccactgctataaa

SEQ ID NO: 319833 - DNA, 607 bp, Homo sapiens
ggcttgctgtctgattcagtatcttcagaccttccccactccctgccacttgctttctctctctttctcctagattttatttactctttgaattattgtttctgaaatatagatacggtgcttgggtaaaaagtcttaatgatytgaggttgacatgttttagactgaggcacagagagaataagacacagaacagatttgctttgtgtagggtaggagaggacagaagaaattagacacttagatagatatctccacagattgcaagcctgggttaaaagtagtgagtggtgctgaacatctggggaattgtgaaagctcttgttgctctgagggagtggagaaattccagtaaaggaatgcagagatttggtaagggcaaacttcagttaccttaaaatgttgtccgcgactgttctgtacagcagtaaatcaacaggttaagtaaggtttacattggaaggaaagatgggttgcgactctttcttgtttgtgtatgtttttgtgtgtgtgtgttgtagttcaaaacaaatacataaataaatgaaattagattgaaatccacaaatgggaaggcagtgggatgcactaacatgagaggcactaa

SEQ ID NO: 319834 - DNA, 574 bp, Homo sapiens
agttttccaaacttttagatttttcttctacctcggcaacaccaattagtcttaggtttggctgtttaacataatcccaaatttcttggaggcttggttcattttttaaaattcctttttctttgtctttctctggttgggttaatktaaaagccttgtctttgagctctaaagttatttcttctatttgttctagtctattgttgaaaatttccattgtattttgtaattctctaagtgtgtcttttatttccagaagttgtgattgctttttctttatgatatctatttctctgtaaaatttttcatccatatcctgcattttaaaaaaaatttctgagttggttttcacctttctttggtatctcctttaatagtttaatagtcaacattctaaattctgtatctggcaattcagagatttcttcttggtttggatccattgctagggagctgttgtgatttttttggggtattatggaatcctgttttttcattttaccagaattacttttctggttccttatcattttatcatttgggtagactatttcagtggaaaggtctgaaactc

SEQ ID NO: 319835 - DNA, 450 bp, Homo sapiens
gcctgtctcattcccccagtgcccaacaagagcactgagtttatatccaagcagctgggagcaggtctgagatcctgtcctaggctataagcctcccagctgagaaaccaagcagggctctcaggcctcactcctctctgcctgcctgtaccattggctgtagcttctactcttgtatctgcactcccaatttgccctcccagattctgctcaggaaagttcatgcacagtcaaaattattacaaaattcagttgaaagattccttcatcctgtggccctctcccctattccactggctgccttccccaaggacccctgtgtgataaagccaggagtggcttccctgggtttgagctaggaactgggagtgcctacagggctcttcctgccttttctcctacttttatakttcacttgcccccctaaatcttaggtaaggttaaatcctt

SEQ ID NO: 319836 - DNA, 609 bp, Homo sapiens
tttgggaactcagtttttcagctctcttgcagagtttgcagtggcaagttactactttcaaagggactgtgagttctttcagttttcctgatatgttcttgcactggttcttggagcaaaagttcacagtgtgagtctccacatgctgttctgtccatctaagtgggagctgtgtgttagtcctgtctcctatctgccatttttccattagtttccatgcttgcactttttaattattgatttcaaaagtaatgtgtgcttgtaatagaatatttgggacaccgaacctgccaaagaagtcataaaaaatarccataatgctacctagagatggtttctagctttttttccctatggctacttgtatttgtgtgtgtgtgtgtgtgtgtgtgtgtgtgtgtgtgtgtgtaaaatctggatcatgttgcatacacaactttatgttctatttttttcttaactgtatgttgaaatcattgtcatatacaatattcaagaattctcttttaaatgccatttatacacatttcctacacatttgactgctgtctgagccagtttaagactcttaactgttcatccttcatgcttatcaagggcccaggcccc

SEQ ID NO: 319837 - DNA, 609 bp, Homo sapiens
tttgggaactcagtttttcagctctcttgcagagtttgcagtggcaagttactactttcaaagggactgtgagttctttcagttttcctgatatgttcttgcactggttcttggagcaaaagttcacagtgtgagtctccacatgctgttctgtccatctaagtgggagctgtgtgttagtcctgtctcctatctgccatttttccattagtttccatgcttgcactttttaattattgatttcaaaagtaatgtgtgcttgtaatagaatatttgggacaccgaacctgccaaagaagtcataaaaaatagccataatgctacctagagatggtttctagctttttttccctatggctacttgtatttgtgtgtgtgtgtgtgtgtgtgtgtgtgtgtgtgtgtgtgtaaaatctggatcatgttgcatacacaactttatgttctatttttttcttaactgtatgttgaaatcattgtcatatacaatattcaagaattctcttttaaatgccatttatacacatttcctacacatttgactgctgtctgagccagtttaagactcttaactgttcayccttcatgcttatcaagggcccaggcccc

SEQ ID NO: 319838 - DNA, 576 bp, Homo sapiens
tcaaactacctgtagctaaggaaaaaaaatggtacctagaatattcaagaaaagattagtaaaggttaaaaggcggtagtcctgggttaagacatgacatgaaatcatttaatgcaaattaaatttgtatttaatttagatgaattgaggacctaaactatataggtgaattgctagctaacctaggaggactagaagccatttctctgtccatggtgctggaccaacaacaaagattttctttaaattcaatacaagtatatcmtaattaaaatcacaccttggaccattgtaaaaagtatgacttaatcatattttcctttagaaagtcatgctgctgacctgaaattgcatgaaaggcagtaacagcagaatttacaagtgaaagttagaaacacaaggaaatctcttccaaaaaaacattgtttttttcactgatataattttttcttcgattgaagaattgtttttacagaatatcaaactgtttactcagtcatttcaacaccaacctgaagtggggaagaaaaaaatagcaatgcccttcttcctaatctcagtcacattttcaatttg

SEQ ID NO: 319839 - DNA, 586 bp, Homo sapiens
gtttgcattactttctagagttgcatcaaaacaactgtaaaaatttaatgcaaatatctggcactcaatcaaaaataatcaggcatttgagaagataaaatgtaactgaaactcaagattttacaaaaaagacaatagcaaaaggacccataagaaatccactgaagggagttaacagacacagactttaaaatggtcataataatatgttcaaaaattaaaccacgagttgcgaattttgacagggaactggaaactayagaaaagagacttatgcacttctggttctgggtgagataaagtcagcacactccatcctgtctttttctctcaatgaagctatataatctggacagaatgcattcagcagctatttgaggactctgaaaagtaaattttgggagatggatgggggaaaaagatcagagtttaaagtaccactgaaccagcagtgagttctcccttttttgccctctgctatcccttcctgaggtctcaagtcaacctgaaaccaggaagtaggcacccaagaatggacagaatgagctctaggagaatcccttagattctggcttaatgagaggaa

SEQ ID NO: 319840 - DNA, 542 bp, Homo sapiens
ctatcaacccatcatctaggttttaagccccacatgcattaggtatttgtcctaatgctctccctccccttgccccccaccccctgaacaggccccggtatgtgatgttcccctccctgtgtccatgtgttctcattaaacaattattttctatcatacagaaaccatagagtttctgttaaaactactaaactcttccatggttgcctgaaaacagccatagaamacacataaaatattttctaagaggaaagaatgtctccacaactatttggattttctttccttttcttaaatagagatagagctttaagattttttcatggaggtgttgcatatttttggttatgttgattcctaggtacctcagagcaggatcagcacactttttctgtaaaggaccagataacaaatatttgaggctttgtgggccatacagtttctgttaaaactactcaattcacttactgttgcatgaaagctgccacagacaatgtgtaacaggtgtgtctgggctccaataaaaccttacttacaaaaac

SEQ ID NO: 319841 - DNA, 617 bp, Homo sapiens
ttcatctttgtacagtgccaggcataaaatacgtgttcaataaattgtgtatagattaaatgcatgagggaggagaccatagtgacaactaatgggagcaactgggatgagggaaggggcataggtggagtagagtctcagaaagactggataggaagttgaggcacatgaatttttgagtatagcccaggtcttaagctttcttgtttgctgtggtctgcaaagatagcattagcacaacataatcttgctaaaactgggaaatggttcttcaggccccctggggattagctttttgctatttttcctgtcaagaagcattctaaattatcggagacacttagaaattatgggtaaaatgttggcattacaaaagaacctatgccaggcctccaagccagaggttagaggaggcttgaatgcattgttcgcagggatttccctgaagtctaattagcatctaagaacacttcaaactgcagctccattacttgcaacatgtaattatggatattactagcatgtctaatttgacacgtaacgtagagggcgaacattaagtggragctgtaacatttggcaacatatgctgcagagttcagtttttcactgacact

SEQ ID NO: 319842 - DNA, 586 bp, Homo sapiens
ggtggtcaaaggatacaaaatttcacttagacagggtgaataaattcaagagatctattgtacaacacagtgactataattaataacaatgtattatgttcttgaaaatcgctaagagtagattttaagtgttctcagcacaaaaaaataaaaatgtgaggcaatgcatatgttaattagctggatttagccattgcacagtgtctacctattccaaaacatcatgttagataccataaatataagttttatttgttaattaaaaatacattctaagaaataaaattttaaaaagaccctaccacttggtgygtctctggtcccaggcacctggcaatgtgtcaccctccttccccctcttgcagttttgtgcccttatgttccctctggcattcatatcttggcaccccttctctggttttagttttgcttactcctggcctcagaagtgctccctgctgcctgctctagcccccatccctgcatctcaaaggaaaggaaggagaaaatgttcttgtctaattcccactgcaaatctgggagctaattctgccaaaagaaccatgtggcatttatgggaaagact

SEQ ID NO: 319843 - DNA, 579 bp, Homo sapiens
tgagctcctctccctcttctttaaccacagctcccagcacccctgaggggcagccttggctgcggcagttgccagggagaggaagagaaggaaggatgtgcaggtggtcaggcagcaggagggatgttccatgctgtcacttccaagagaattggccttctctactcctgccaggtgggagttgaagtgatgtcaatctcccattttatacagtctccttattttttgtactccatccacctcttcgcctccttcccaagcagcagaaggaaggtatctgcacggtcatcaagctcctttggcaattctgagttagaaggtgcacagctactctttgagacatgctgctctgctcattgcagaccaggtgcatcttatggctaaataggaattacctggggaggtggttaataaaacaaactcctgcacctcatcccccragattctgacctgtagagctgggatgtggcccaagactcactctctctctctgtctctctctctctctctgtgtatgtgtgtgtgtgtgtgttttcttctttttaaaaatgatcctgatgagcatcccggttggcacct

SEQ ID NO: 319844 - DNA, 565 bp, Homo sapiens
atgaataaattgcactcattggttattgtcaggaaaagagaggtaaattacatgtttaaactggcattcctttcttgaaccttattgctaaatgaagcatgaatgatatgactatgaaaatccttcctgagtcagagcagagtaaaataaaaaacaaattttagagtattgacctcttatatacaggaagaaaaatatctgacacctcgacaatattaggactcctggagatccttatgggccagaagaaagagctatctcctttcttctyctctatcatatgagagctaatatttctatatcagaccaatgttgaaatgcttgagcttctgtattagtccattctcacactactaataaagacatacctgagactgggtaatttataaaggaaagaggtttaattggctcacagttctgcatggctggggaggcctctcgaaacttaaaatcatggcagaaggtgaaggggaagcaaggcaccaacttcacaaggcagcaggaaggagaagtaccaagtgaagagtgaagagccccttataaaaccaacagatgtcatgagaac

SEQ ID NO: 319845 - DNA, 555 bp, Homo sapiens
cttcatccacatcacagttatctgtcagcacacgcagagaatgagcttcccaaaaaagatggctatattgagcatttatgtagcaccttccccctcaacaattgaaaaaccttccataggggagagatttgccatctttattacattgctgatgagaaatggaggtggggagtaggaggagaatgatcttagaaggtgggaagaagatatattatcagttacactttgcagatggagcaaccaaagtagagattaggtctatccagctatttccctttatcatttggggccttaggggaggtcataatattggagcattgatcagcagattggcttgccaagaaatcaacccaatcctctagtgaagatacctaaaatagagtatattcacagcccacagatgaaagcatcttaatatttaggcagggcaagctgctgcagaacatagtgtggcactttaatgaaaggcactgtgtatgaccacaatgtcctgggctcaaaccstattctcctctttcctcctaaatctctaagagcctctattttctcatctgt

SEQ ID NO: 319846 - DNA, 578 bp, Homo sapiens
ccctctctgacttacaaagcctctcctctatccccacagactttaggctcctggtaaccatacccccataaacagctgttcrtaggaaaggaggccctgtcctgtgtggtttagaatgaattttagtcacacatttcaatcacctcagcagcttgactaatggcaaattttgtccatgctacaggaattccaagcacaaagaccccttcctaatccctctacacataaggctgccaatttagcatcaagggaaggtttaatgtcctagacaggaagaatttttaaggtagggaattcctaaaatctcaaccttgcttttttctcccttgataagaaatcataagacctgcaattttaagttctttttttcttccttcattttcttttttatttactttttctttcatctccctctatcacttaggctggagtacagtgttgtgatgacagttctctgcaacttccagttcctgagctcaagcgatcctctcacctcagcctcctcagtagctgggactacagatgtgtgccatcaggcctggctggtttttaatttttttgtagaaacagggtctcac

SEQ ID NO: 319847 - DNA, 571 bp, Homo sapiens
gtttctgtgacctcctttttgtgagacaatgaaagtgacaagacaagatcttaaataataaagttaaagccatcagtaaaggcaaaagtcaaagatgtgaaacatctgtgagaacacacgtaaaagctagtggggatatctcgaggaacagagctcagttttgcatcaaagktcaggccaactgaacaccaaggcttgatggcagccagagtcttgctgtgtagagtctggttgctttctgaatggacacggattcttgctttgaagattacttgttaactcaccaaacacacccagcccagctacctgcatcattcctttgtcaaggttcccacctacctggcccagctgcaggtgaaggccagattctcagggtattttacccatccccacttcttctcttttaaaaatcactattctgaatttacagttggccaatgacctctaactggattaataaaatgtctaatttagtttggaacattgagcttctgtttcactttggcttgttcaggtttttattaaatcagaataaattttcatagtccccatggaaatgccagccttctcc

SEQ ID NO: 319848 - DNA, 563 bp, Homo sapiens
ccaaagggtggctgtctgttttcttttagttaacttttgaggaaaatgggacaaatttactcaggactaggttggattatatttgagtatcataaccaagactgtatccccaagctgatgatgatagagtgtcccaggagacagcatgtgcctgattcaatcagaatattctttctggagcctgcttctcaaactgtgtctggctttctcctggtgaactgagccaagttcttctgaggggcccacaaccgatcctctggcatttcttacaggtgaatgatgaaaaattcaatggacttatctttatgtaaaactaattgcttcttagcagtaaaactactgaatgatgctaaaagtttcatatagaaattattctgtggttttttttttcctctagaacaaaatcattagcaaaataataaaaaggtaattttctctcctcatcccccctaacagaattgggctttgtgcttcctgttcctggattcctgattccaggaggaacagcctttttgagtacrgtgatgtatatagagttgtgccaacatgacatggtccccatc

SEQ ID NO: 319849 - DNA, 608 bp, Homo sapiens
tctgtttttagtagtagtgtttccatttacaaagtatagtaattctcgattgcttaaaatgtcaaatcctagaaaatgtagcattcctacatgtgatgttaacattgttctctaacagttgttagccaaagattcatttggtggattagatttttccaaaatagatgattttgatgattcagatgattctgacattagttctgtttagaaatataactcaaagagcagtttttacattttattttcacattgaaaatcagtcagatttgcttcagcctcaaagaatgtgwgtatgtaaaattaaatgagcgctggcagcaagctgcacttttttttctaaatgggaaaaaggttgagtaaataaacattcacattttgagagttccaaaagtagaaaagatacaaaaatgcaggtaaaacttatttaatgaaataacaacagaaaattctccaagtctttggagagatatagacatccagatacaggaagctcaaagtaccaatatagactcatctcaaaaggccttctctgaggcacattacagataaacagtcaaaagtttaactttggaaaagacaaacagataattataaaatcagcaagagaa

SEQ ID NO: 319850 - DNA, 573 bp, Homo sapiens
atgggaatttccaaggaacacttaaatattataaaatttggctctggttgtttgtcacctgagaagagaactacaatgtggaaaagaaagcttggaactggatatagatgttactccctctagagcccttggaaatgcccctccacaggattctttccttgcagttgacctgccaccatgtcccagagctaagcctacctcctctccctgacgatgcctttcagcagaagttcccagtattcagactcacctgctcacagccctatgatgtcatttcctcctccaggmtatggcccaccccatttttctctcttcagatgattgacagaaaagatacagattttctaggtgggaaagtcccacttttgtttacaggatgtgacctctggaccccaaggcatgggataaggcaaatgaaatatttgaccagagttacttcaatcagaattatgcccctttttccaggaagggagaaaggaagaagatcagcagagagtgggctttggcaaatcctatcctgtctgttttatgacgcagcctctagcacaaggtgaagacatgccagatttgcta

SEQ ID NO: 319851 - DNA, 609 bp, Homo sapiens
tgtgaaagagaaaaaaaaagagagagagagaaaaagaaaaatagggcctaacttatccttttatcagaaacccactccctagataactaacccactcctgccatgaygacattaatccactcataagggcaaagctctcatggcctaactaccctttaaaggtcccacctatcaaccctgttgcaatgggtattaagtttctaacacatgaacttttggggacacattcaaacaatagcatttataaactgaggtcatatgaaaataggtgttgatctcccctgcccattttgcccacagcatctcctacaacattaaagaaaagggacaacaagagaaccagcaagaattacagagagacaggaaagataggaggaaaaaagatgccaaagatgatgataataatttactgggtacttactggatatttacttagtgggttataggatgcacacacatgagcatgttcaaagatattatgattatcatatgaatttactagtgaaaaagccaggcttggagaggtagagtaaccagcccatagccacacagccaatatgatgtatccaagttgaggtacaaattcagatctcatttgacaaaagagtg

SEQ ID NO: 319852 - DNA, 611 bp, Homo sapiens
agataggaaaatagaacagaataaagaaatgaaaagaagggagttaaaatgtaagactagaatataacaaatgaaaaaaaacatggatttttcagctcagattaaaagcaagctacaacaaaaaataattataactcactggctttaataataaatgatcaaaaggcagttggaagaataaaagaaatgaaagagaaaacaagtatatgcagatagctttaaggtagagaaaaaggaatgcaaaagacaaaaataaaatagcaaagctttaagagaacttatcaaagtattcttctgagagccttsttggtaaaaggctctcagaatgaaattttgagaaatataaaaggaaaaaataaaataaaataaaacgaaaaaattaaaactaactggaaagatacagtaaaaataggtagaaactgtacagaaagaaagacaaaatttaagattagaacaaaagtgagtacagttttctttttttaatgacataaaattaacgaatgttttcctgcctcagcataagcctcagatttttattaatatccaggacaagcaagaagatagctaaatgtgttttattgcattttggtattaaaattaattgttaaata

SEQ ID NO: 319853 - DNA, 607 bp, Homo sapiens
taaatattccaaaattgttagaattcccaaatctggaacacttctcatcccaagcatttcagataaggtaaagtcaaccgatatagttatagatatagatgatacagttatagattacagatagatagagatggagagaataccttgtcattagtttcctgtattagtttcctgtggctgctgtgacaaaatgccacagagtaggtgactaataccacagaaagttattttctcacagttctggaggccggaagtccaagatcaaggtgccggtagggctggtaccttctgcagcccctctcctggcctcagatagctgtcttctccctgtgtcttcagatcgtcttcctctgtgtgtttctgtgtcctttttaataagaaaatcagtgatactgcattaaggcccaccccaatgacttcattttaacttaataacccccttaaagaccctatctccaaatatggtcacagtctgaggtactgggacttagtacttcaacacaggctttttttggggatgggggcatatacaattcagaccataatatcagcaaaaattytctccttataaggggagaacagctctcaacttaaaatgctgtgttaa

SEQ ID NO: 319854 - DNA, 561 bp, Homo sapiens
gtaagagaaacttcaatctcatatatatgtgaaatacactgctgcaaacacactcaatttcaaataaatattttattcctgcatcttttagagtatagctgttattagagaaagtaaaagaataaagtccaaatttgagctctatctcttttttttaatataggatctggctstgttgcccaggctggagtacagccgcacagtcatagctcaccgcagcctcaatctcctgagtttaagtgatcctcctgcctcagcctcccaagtagctgggactataataggaccataggcacacatcactccacacctggccaagttgattttttttttttttttttttttgtagaggcaaagtttttctatgttgcccaggctggtctccaattcctgagctcaagtgatcctcctgcctctacctccgaaagtgctgggattacaggctgagacaccaaacccagcctgagttccttgttaaaggaacacattttacaggtctctcttgatgaaaatgaagatgaataaataaataaacaaataggcagatggattaaaaaaagc

SEQ ID NO: 319855 - DNA, 561 bp, Homo sapiens
gtaagagaaacttcaatctcatatatatgtgaaatacactgctgcaaacacactcaatttcaaataaatattttattcctgcatcttttagagtatagctgttattagagaaagtaaaagaataaagtccaaatttgagctctatctcttttttttaatataggatctggctgtgttgcccaggctggagtacagccgcacagtcatagctcaccgcagcctcaatctcctgagtttaagtgatcctcctgcctcagcctcccaagtagctgggactataataggaccataggcacacatcactccacacctggccaagttgattttttttttttttttttttttgtagaggcaaagtttttctatgttgcccaggctggtctccaattcctgagctcaagtgatcctcctgcctctacctccgaaagtgctgggattacaggctgagmcaccaaacccagcctgagttccttgttaaaggaacacattttacaggtctctcttgatgaaaatgaagatgaataaataaataaacaaataggcagatggattaaaaaaagc

SEQ ID NO: 319856 - DNA, 561 bp, Homo sapiens
gtaagagaaacttcaatctcatatatatgtgaaatacactgctgcaaacacactcaatttcaaataaatattttattcctgcatcttttagagtatagctgttattagagaaagtaaaagaataaagtccaaatttgagctctatctcttttttttaatataggatctggctgtgttgcccaggctggagtacagccgcacagtcatagctcaccgcagcctcaatctcctgagtttaagtgatcctcctgcctcagcctcccaagtagctgggactataataggaccataggcacacatcactccacacctggccaagttgattttttttttttttttttttttgtagaggcaaagtttttctatgttgcccaggctggtctccaattcctgagctcaagtgatcctcctgcctctacctccgaaagtgctgggattacaggctgagacaccaarcccagcctgagttccttgttaaaggaacacattttacaggtctctcttgatgaaaatgaagatgaataaataaataaacaaataggcagatggattaaaaaaagc

SEQ ID NO: 319857 - DNA, 512 bp, Homo sapiens
taaataaatcagcattttttttcagcaaaacatatttctctagattcttctcaaagattctaattatatgagtcatgttatgatagaaacctaaacccaactttagtttatgaccaggagaagtaaaagaaactaaaagtagcctcaaaaataaaatgcataaaaataatttaaaaatacttgaggaatcattttaaacaatgggacattttcaagaagaacagggatccctgagagatgaaaaacaaattgagcatagtctcaagttatccaagctgattgcttagagggctttgtagtctccctgagttgaggggatattgctaggaggctaaggttactagagctcacaggatagggtatcagagaacagagagaggtgctgggagaaatttygagaatttctgggttcccttcaactctttaactaagtgctgaccagcacatgtatgtgtggaatgtgcccaacgctgggaaagaaccacaaaaaagaaaaaaaaaaaaaaagtcaa

SEQ ID NO: 319858 - DNA, 512 bp, Homo sapiens
taaataaatcagcattttttttcagcaaaacatatttctctagattcttctcaaagattctaattatatgagtcatgttatgatagaaacctaaacccaactttagtttatgaccaggagaagtaaaagaaactaaaagtagcctcaaaaataaaatgcataaaaataatttaaaaatacttgaggaatcattttaaacaatgggacattttcaagaagaacagggatccctgagagatgaaaaacaaattgagcatagtctcaagttatccaagctgattgcttagagggctttgtagtctccctgagttgaggggatattgctaggaggctaaggttactagagctcacaggatagggtatcagagaacagagagaggtgctgggagaaattttgagaatttctgggttcccttcaactctttaactaagtgctgaccagcacatgtatgtgtggaatgtrcccaacgctgggaaagaaccacaaaaaagaaaaaaaaaaaaaaagtcaa

SEQ ID NO: 319859 - DNA, 572 bp, Homo sapiens
tacaaggatcctgtcacatggaaagtgtttctcaaaggactaccctgtctctaaaatgaggggaaagctttggctttgtgacttcttctttcttctatctgcaataccttcctgtattctcacactcttgaatcatgtataaatagatacataaataatttttaaagatcatggtcttcgtcttacagagaatgagtattttygacttaattaagcataggggtgaggtgagtggtaggtttgggttggaggacatattctgggagaatgggatgatgatgttatcttctctgaatcttttccggggccatttgccggtggtccttgataagggctcattttgggctaggacccagcagctggctggccttgccctttactgccataaagacatcatcaatttcctggaaattagctacagaaatccaagagtgatcactcagggctcagtccagtccagttcaaggatgtaaagaacaattctcttttataaatcaattaagatttattgcaagggacttgaaaagggagtgagatttattctccagagggacttccagagcccagtgata

SEQ ID NO: 319860 - DNA, 572 bp, Homo sapiens
tacaaggatcctgtcacatggaaagtgtttctcaaaggactaccctgtctctaaaatgaggggaaagctttggctttgtgacttcttctttcttctatctgcaataccttcctgtattctcacactcttgaatcatgtataaatagatacataaataatttttaaagatcatggtcttcgtcttacagagaatgagtattttcgacttaattaagcataggggtgaggtgagtggtaggtttgggttggaggacatattctgggagaatgggatgatgatgttatcttctctgaatcttttccggggccatttgccggtggtccttgataagggctcattttgggctaggacccagcagctggctggccttgcmctttactgccataaagacatcatcaatttcctggaaattagctacagaaatccaagagtgatcactcagggctcagtccagtccagttcaaggatgtaaagaacaattctcttttataaatcaattaagatttattgcaagggacttgaaaagggagtgagatttattctccagagggacttccagagcccagtgata

SEQ ID NO: 319861 - DNA, 563 bp, Homo sapiens
aagaaacatgccggtttgcctgtatcacaggacattagccgaccgttcattgcacccagggctggctttgcttttgcttggctgtcgagttgacacatgcacatgagtggaacctctgtgcccagcacggtgctgggactggggggatgcacaggtgagcaggtgcagcccacgctgtcaggaatgccctgagagcctggcaacactcccgggactcaagaaggcaggtgggataagagctacaagagaggtgctaatggtaccactgttatcatcaaagagggtagagtagatttcycctcactgcgcatctgggacaccttactggaggaggtggcatttgagctcgttttgatgagatagcatatattttaatcaaatcatgtgtacctgaatcaggtaacttatattttgatattatgaatcaggtaacttatattttgatattatgatccctccaggaaaataaaaactagaagatggtaatagctcacatttatggaaggcgacctatacagcaagcttttcacatcatgtcctacgtatctcatgaggatgctgag

SEQ ID NO: 319862 - DNA, 564 bp, Homo sapiens
accctgttatggacctttcttctcagggactctgtcataagaacctctgtcaataagcttttcacaggaaggccctcttgaaggccacaccctggcacccttgttctgatgaactgtctcctgtggcctctcacccacagtatttcctgacctgttcctggtctcaaattctcaacccctacttgctaagaactgatggaatggagacagaaggggaataagacatggcccttgctgtggaggggtgtgagggagtgtttactgggtgattcaaagcttattttggtaaatggccacaggagtactcaccacttctcctgtgcggcaggcatctggcacctaaggatgtccaggcttaggaaaattcagggagaaatgtgaggtaaaattgctccaagtatatcttttcttttaagastgcgataacaaaaatagaggcacacataaaaggataaagaaaaaatgaaaacaagcagtgaaagacaacatccgctctcatttcagtttcctggaagcggaatgtggttgggcagatggtgttcttttgtttcactagaagaaacg

SEQ ID NO: 319863 - DNA, 511 bp, Homo sapiens
ttcctcactctctcccacttccgacattgctgatcagtggtcacccagcccctctttccattgcccagttgatggggcgctcaccacatcacaagtagcctatcagatctgctacccttataaattaagacctggaggagtcaacacctgctagtcttcctaacctcaatccatgtcacctccgaaagtgcactgatctccagccacactgatcatattgtcctgagcaatgctaagctgcgtcctgcctcaatgataatgaatttgctgctccctgcctgagagaggggcccttttcatcgctgcccacccmtgccctttggtgtcagttcaggtggaatcttttcagggacaccttccctgaccacctcatctacagtggctcttactgccctggacctctatccactcccgatcctctgagcccatcttcatccccttcatagtactgccaatgtgggaaatgatctggcctatgtatgcattagcctgtgtgtgactacgtactgtt

SEQ ID NO: 319864 - DNA, 575 bp, Homo sapiens
ggaggccgaggcgggtgaatcacttaagatcgggagttgaagaccagctggccaacatggtgagaccctgtctctaccaaaaatacaaaaattaactgggtgtggtggcccgggcctgtagtcccagctactcggaaggctgaggcaggagaatcgcttgaacctgagaggcagaggttgtggtgagccaagatagcgccactgcactccagcctgggtgacagagtgacactctgtctcaaaaaaaaaaaaaaaaaaagtcacaagagagatgatgttttgataggaagagaagaaagggatttctcacttcctggagaaggaagggaggagcccaggacctccaagagcactgggtggtttcttagggctctgatgtgatttgaggcctcatttcctgtgccacaatcatcaaagatagttwaaagtgccagagttgggagtttcagagcatgctctactatatgctgtacctctttttggtagagttcatagttaaaattacttcaagatctgccttctcatctagaagttctatctagagtttctatgcatttctccagtgtttatgaagt

SEQ ID NO: 319865 - DNA, 575 bp, Homo sapiens
ggaggccgaggcgggtgaatcacttaagatcgggagttgaagaccagctggccaacatggtgagaccctgtctctaccaaaaatacaaaaattaactgggtgtggtggcccgggcctgtagtcccagctactcggaaggctgaggcaggagaatcgcttgaacctgagaggcagaggttgtggtgagccaagatagcgccactgcactccagcctgggtgacagagtgacactctgtctcaaaaaaaaaaaaaaaaaaagtcacaagagagatgatgttttgataggaagagaagaaagggatttctcacttcctggagaaggaagggaggagcccaggacctccaagagcactgggtggtttcttagggctctgatgtgatttgaggcctcatttcctgtgccacaatcatcaaagatagtttaaagtgccagagttgggagtttcagagcatgctctaytatatgctgtacctctttttggtagagttcatagttaaaattacttcaagatctgccttctcatctagaagttctatctagagtttctatgcatttctccagtgtttatgaagt

SEQ ID NO: 319866 - DNA, 572 bp, Homo sapiens
cggaaattaaaagccacacaaggtgtcaagacacacaccaggccagctgagcccagggctggagggctttctgagcaccccagcttgtcttaaccacagagccaccatccttcatggcccccaaataatggtgcatgttaattaaaccccaccactctcctctagaagcctctgtcaccaggctgctcctcacaggggctggggtgtctcctttctgtgtcatcttctccccagcttcccccgactgttgccgatttcccatgctcccctggcctgggattgagtggcagctcagcttcagaaagcaggtgttgtggaagtgaagcgagcatcgcagacagcacattaggtagcatcmgtcccgggggacccctgaggctccagctttggcagccccaactgctcctccaaggggtgggagggccaggcctgcccggccctgaccagatgtttgggaaaagtgccaggctacagcaaagaaaattgctgccaatttatctaaggtgtaataagtattaaggaagcctctttctcatgtttttgtttacaagaaaggctcaaatcttacaaag

SEQ ID NO: 319867 - DNA, 572 bp, Homo sapiens
cggaaattaaaagccacacaaggtgtcaagacacacaccaggccagctgagcccagggctggagggctttctgagcaccccagcttgtcttaaccacagagccaccatccttcatggcccccaaataatggtgcatgttaattaaaccccaccactctcctctagaagcctctgtcaccaggctgctcctcacaggggctggggtgtctcctttctgtgtcatcttctccccagcttcccccgactgttgccgatttcccatgctcccctggcctgggattgagtggcagctcagcttcagaaagcaggtgttgtggaagtgaagcgagcatcgcagacagcacattaggtagcatcagtcccgggggacccctgaggctccagctttggcagccccaactgctcctccraggggtgggagggccaggcctgcccggccctgaccagatgtttgggaaaagtgccaggctacagcaaagaaaattgctgccaatttatctaaggtgtaataagtattaaggaagcctctttctcatgtttttgtttacaagaaaggctcaaatcttacaaag

SEQ ID NO: 319868 - DNA, 530 bp, Homo sapiens
tgtagctatgtaagcaggttattataaatatatagagataaataaaaagcaaaaacacctaaacattcaaaagcgttttcttctagggggcagatattgggtgtgaacagggctagggcagaggtttgcttttctccattaagatctatctagtcttattttaattttaaaccatagatgtatatgtgtatgtatgtttgtatgtatatgtatgtgtagatagaatatagttgcatcaatgataggtgattgatagatatagatagctagctagctagatagatagatgattgatagatagattagatagawgatagatagacagatgatagatagatagatagatagatagatagatagatagatagatagatgatagatagaatgttagatttttttaaaaaaagctctgatttggcgaagagcagggtgacatggaaggccatcaatccctgacctttgaagttagagagggctcctaaaaggacctttaactgagccaaagcataaaagataagaggaaaagatgt

SEQ ID NO: 319869 - DNA, 528 bp, Homo sapiens
cagcaatgtgctgggcacaggcagcactgggagctggatggagcatctgcatttagtgacacagggccctatggctggggagggacaggctcaggccaccactggccagaagggctgagaactgagagccaagggtctggttcagacacaasggtctggtcctgactcttcggagctgtgtgagggagacagacttcctgggctttaggaaggttatctaccagtgtggatgaagatcattcttattatattatatatgttactatatagtaagatagaaaatagcacatattaatacaatataacactatatcatattataacacgtgtacatatatgctaacatattaatatgttagatttttatataactatatataatataataaactgtcaattaaatatatattaaatttgtattatatcaatacattattttatgtcatttattatgctatattatgcatactaatatacctacattatattattataaattgtaattataaattattacaaatgtggaaa

SEQ ID NO: 319870 - DNA, 558 bp, Homo sapiens
caagtatttgcgtgcttgccaggatattaaaaacatccagttgttttgcagcctcacctcatagtgggtcagacccgggagtcctagaaaaagcagtgtgggttgtragatccccctgtcctgcactcaggggctggccttgcttccactcactgggtctacgactgtgggtgaggacctttctctctctcagcttcagtttcctcagcagcaaatatatcaggcaagaggtttgggctgtgtgtgccaagctcttttacccaaggatcctaagacctgaaaacaatgagtttttattctctctggcatcactcacacaagcacaggcacttaaatgtctccatttgagatatgactatttaccaaaagattcaacagccttatcctctttcaggctaagcttttttctagttgttggtttgttgtttgcttaggtttttgttttgttttgttttaggagggagaggatgttttgtttgttttgttttgtatctgattcagctaatgttctaaaaagtagagtaggatactcatcacttggcctcagttaggaagagg

SEQ ID NO: 319871 - DNA, 558 bp, Homo sapiens
caagtatttgcgtgcttgccaggatattaaaaacatccagttgttttgcagcctcacctcatagtgggtcagacccgggagtcctagaaaaagcagtgtgggttgtaagatccccctgtcctgcactcaggggctggccttgcttccactcactgggtctacgactgtgggygaggacctttctctctctcagcttcagtttcctcagcagcaaatatatcaggcaagaggtttgggctgtgtgtgccaagctcttttacccaaggatcctaagacctgaaaacaatgagtttttattctctctggcatcactcacacaagcacaggcacttaaatgtctccatttgagatatgactatttaccaaaagattcaacagccttatcctctttcaggctaagcttttttctagttgttggtttgttgtttgcttaggtttttgttttgttttgttttaggagggagaggatgttttgtttgttttgttttgtatctgattcagctaatgttctaaaaagtagagtaggatactcatcacttggcctcagttaggaagagg

SEQ ID NO: 319872 - DNA, 533 bp, Homo sapiens
tcccatactttaactatgcctgtgaaccatgtgtgggattcagtgtgtgacctgtgggtttgctgtgataggtattggggaaggaacataaaccaacccatrcaattcccggggctaacaactaagccagggatggccactccaggtggcttccaaggcaaggtgtgattaaagatgggtgcatgtcagccctcgaaaaaaatgagaacatccagatagaggaactaggacaagcaagaggcaagctctgtgtggtgggtggccggtcaggagcaaggggacccatggttgatttaaactgttgaagaagaaaccctgactcagggagtggcccaggaagtccctgggacctctacaaccttatatatgccatgttaaggaagttgtctgtgctacatggttgctcccccttggccctgttgacatttggggctagatccttctttgtggggggctgtcctgtgcattgtagggtgctgagcagcagccctggcctctacccactagatgccagtagcagtccctcctccagt

SEQ ID NO: 319873 - DNA, 533 bp, Homo sapiens
tcccatactttaactatgcctgtgaaccatgtgtgggattcagtgtgtgacctgtgggtttgctgtgataggtattggggaaggaacataaaccaacccatgcaattcccggggctaacaactaagccagggatggccactccaggtggcttccaaggcaaggtgtgattaaagatgggtgcatgtcagccctcgaaaaaaatgagaacatccagatagaggaactaggacaagcaagaggcaagctctgtgtggtgggtggccggtcaggagcaaggggacccatggttgatttaaactgttgaagaagaaaccctgactcagggagtggcccaggaagtccctgggacctctacraccttatatatgccatgttaaggaagttgtctgtgctacatggttgctcccccttggccctgttgacatttggggctagatccttctttgtggggggctgtcctgtgcattgtagggtgctgagcagcagccctggcctctacccactagatgccagtagcagtccctcctccagt

SEQ ID NO: 319874 - DNA, 533 bp, Homo sapiens
tcccatactttaactatgcctgtgaaccatgtgtgggattcagtgtgtgacctgtgggtttgctgtgataggtattggggaaggaacataaaccaacccatgcaattcccggggctaacaactaagccagggatggccactccaggtggcttccaaggcaaggtgtgattaaagatgggtgcatgtcagccctcgaaaaaaatgagaacatccagatagaggaactaggacaagcaagaggcaagctctgtgtggtgggtggccggtcaggagcaaggggacccatggttgatttaaactgttgaagaagaaaccctgactcagggagtggcccaggaagtccctgggacctctacarccttatatatgccatgttaaggaagttgtctgtgctacatggttgctcccccttggccctgttgacatttggggctagatccttctttgtggggggctgtcctgtgcattgtagggtgctgagcagcagccctggcctctacccactagatgccagtagcagtccctcctccagt

SEQ ID NO: 319875 - DNA, 546 bp, Homo sapiens
atcccagcactttgggaggctgaggcaggcaggtcacttgagctcatgagtttgagacaagcctgggcaacatggtgaaaccccatttctactaacaatacaaaaatgagctgggcatgatggtgcacgcctgtagtcccagctactcgggaggctgagacaggagaattgcttgaacctgggaggcagaggttgcagtgagctgagatcataccactgcactccagcctgggcgacagagtgagattctgtgtcaaaagtaaataaataaattaattaataaataaaggaaaggaaaggaaaaaagaaaaaaaaacaattgaaaagtaattgccaaattgctcactaaaaagactgtatcagtttatgaaacactctgagtagctgtctgtgaaagagcagacgttcttccagcttctcagcttagaaccatcatcaattttttaaagaaaaacattatgatggttgaacaatgccaccttattgctttkatttgcatttctctgactactagtggctatttgcagtgaattaatatttcatctt

SEQ ID NO: 319876 - DNA, 619 bp, Homo sapiens
tttctttgcttacagagccagtctgccaccctcttcccaacttctgtagcactttgctcacatccttattaaaccaagtactgcaccatttgcctagctgtgccagaggtctgtccctttccctcactgagggcatagccagagatcagctggctgcagaggacagaaacctgaggacatttggaacttaactgcaaaaaagatcatggggmgttctaggcagtgagaaggcttgttttccttggagatatgtggcatctcttccctttaagcacctgcctcatcctttttgcaagttgtcactgggcacatcgtgaataagactgctccacagtgaacaagaaaacaggggcttcatctcctaattcactgtggggctgatacatggccagatatccattcctgatccaatcagctgaggccagggagacaaaacctgtgttgcttaaattcacttttccctagaaggcagaagagagcaggtctccaaaggagggcttatggctgggagaaagtgaccaatgccttgtcccatccacctccttgtcaacccagtttctagcccaggatgcataatgggtgctcaggaaagacttttttttttttaatcaaaaactgg

SEQ ID NO: 319877 - DNA, 619 bp, Homo sapiens
tttctttgcttacagagccagtctgccaccctcttcccaacttctgtagcactttgctcacatccttattaaaccaagtactgcaccatttgcctagctgtgccagaggtctgtccctttccctcactgagggcatagccagagatcagctggctgcagaggacagaaacctgaggacatttggaacttaactgcaaaaaagatcatggggcgttctaggcagtgagaagscttgttttccttggagatatgtggcatctcttccctttaagcacctgcctcatcctttttgcaagttgtcactgggcacatcgtgaataagactgctccacagtgaacaagaaaacaggggcttcatctcctaattcactgtggggctgatacatggccagatatccattcctgatccaatcagctgaggccagggagacaaaacctgtgttgcttaaattcacttttccctagaaggcagaagagagcaggtctccaaaggagggcttatggctgggagaaagtgaccaatgccttgtcccatccacctccttgtcaacccagtttctagcccaggatgcataatgggtgctcaggaaagacttttttttttttaatcaaaaactgg

SEQ ID NO: 319878 - DNA, 619 bp, Homo sapiens
tttctttgcttacagagccagtctgccaccctcttcccaacttctgtagcactttgctcacatccttattaaaccaagtactgcaccatttgcctagctgtgccagaggtctgtccctttccctcactgagggcatagccagagatcagctggctgcagaggacagaaacctgaggacatttggaacttaactgcaaaaaagatcatggggcgttctaggcagtgagaaggcttgttttccttggagatatgtggcatctcttccctttaagcacctgcctcatcctttttgcaagttgtcactgggcacatcgtgaataagactgctccacagtgaacaagaaaacaggggcttcatctcctaattcactgtggggctgatacatggccagrtatccattcctgatccaatcagctgaggccagggagacaaaacctgtgttgcttaaattcacttttccctagaaggcagaagagagcaggtctccaaaggagggcttatggctgggagaaagtgaccaatgccttgtcccatccacctccttgtcaacccagtttctagcccaggatgcataatgggtgctcaggaaagacttttttttttttaatcaaaaactgg

SEQ ID NO: 319879 - DNA, 599 bp, Homo sapiens
ctagtaacatggtggttcttgcagactcattgaagtaccactttgatggtcttggattgagtttcaatttactaataagggcttgtcctggacaaagccagagcaagtagtgattttccttgaatgtgtgactcagaccaagttactttaggagaacaaagaaaaacggaataacttactgctgtgttttgacgtttgacaagcragaagatatatcagatgtctttcatatactgactactttatgtttcaaaaccacccactaaacagagatgtacaggaaggagagatagaggcatctgagtcactatgacttaaaactcctcttctcaacactacaagaccttagggttttgtttttaagacttagagatccattaatcaagttcctaaatgcaggcagtttttacacataattctgcctgctctatgcctttctagatgatcaaaatccagtctattttagtagaaaataaatgcaaacataagaggactcttattcttcatgggcaatcagtttgtcttcattagagtattctgctcaccgcttccagtaatgcatgtatatatatttatttttatctttctttactgttacg

SEQ ID NO: 319880 - DNA, 602 bp, Homo sapiens
gacagcctggcttcatgaaacacagctgacaagctcgactaaattacccccggaccattacaaaaatcacttaattgccaagcattttgttaggtcaattgactctaattgaaaaaataacaaaaagcttattatgctgcaaatgcggccgtggaaaatgagtcttctgttagaaggaaacaataattctaaatttcagctgctgctaacactacaaagttcagtgtttccttcggatagaatccgcagtggaggagaaagtgaatatgcatcaattgattttttttccttttagcgcttccccccmacacttcttgctcttcctgatcttctccttccctgcctcatcctacccccaccctcatcctacccccaccctcatccccgccttgtccccacatgattagcaggggccccctccacccccttccatcagcaaatatacacctcactcccatctccctccttatcttcctgcaagaaagggttgggagacaaagagggggccagcagtgtggggccctgggttaggagagatgtccagtatctgccctccccagccccagcaggatgctgcagcctcggtaaaatgcctcccccac

SEQ ID NO: 319881 - DNA, 588 bp, Homo sapiens
tttaacatacttacaggatgattttaaaagactaacaattgaccttaggtgcacacaacagtaaagacatgaacaccataattgtttttcttcatattaactaggggtgactgtaattaatatttatccatttaataaacttttaaatgagaaggccaacaaaataagcaatgaagatatgttttgtttattctagggtattagtcagttttcacaatttaaccatgaatttttacaatgataataaatagaggtagtacagaaattggatctsggaataataatgcaactagttgtatcagttcaatgcacctatttgaatcctttacatgtcacatgcttgtgaatttttgccaatgatgaagccaaaaattaatttactgagtgtcacacaacaaatggtgatatcaggaattcagccatggccattcaagtccagagcctcaatttagttgaagctagtggagaaacagggcaacaaatatgaaaaggaagatttttccattttcaaaaacacgtttggtggtcattcttattttttgtttattatttttaactgagtgaagagctaaacaaaataaagataat

SEQ ID NO: 319882 - DNA, 673 bp, Homo sapiens
gcttcacataacgtgggtgaggtgagggagcaccctagacccaggccaggcaccaatttaatctcagacattgagcagagaatcaaaatcgctcaaattcacttgaaggctcaggtactcttttgttaaatcaacatcttttcagcttagcacttcttctattatttacctagttttcatttagatggaatcttttatttattttttgttatatcctcttggtttattgagccttttattaatataagctgtccttctttgtcttttttaatctttttttgatttaaagtctgtttgttcagctattaatatagtcacccttgctctcttttgattactatttgcatggaatatcttttccattctttcactttcaacctatttcaacctatttgtgttttgggatctaaagtgagtctcttttggatggcatgtgtaggttggatattccatatccaaaatgcttgggacaagcagtatctcagatttgagatttttttktggggcggtggggttggtgggggtggatttggaagtgtttgcattgtatttactaatccctaatctgaaattttgaaatctaaaatttgaatgctccaattagcattccctttgaacagcatgttggtgctcaaagagtttcagattttggagcatgtcagatttagaattt

SEQ ID NO: 319883 - DNA, 673 bp, Homo sapiens
gcttcacataacgtgggtgaggtgagggagcaccctagacccaggccaggcaccaatttaatctcagacattgagcagagaatcaaaatcgctcaaattcacttgaaggctcaggtactcttttgttaaatcaacatcttttcagcttagcacttcttctattatttacctagttttcatttagatggaatcttttatttattttttgttatatcctcttggtttattgagccttttattaatataagctgtccttctttgtcttttttaatctttttttgatttaaagtctgtttgttcagctattaatatagtcacccttgctctcttttgattactatttgcatggaatatcttttccattctttcactttcaacctatttcaacctatttgtgttttgggatctaaagtgagtctcttttggatggcatgtgtaggttggatattccatatccaaaatgcttgggacaagcagtatctcagatttgagattttttttkggggcggtggggttggtgggggtggatttggaagtgtttgcattgtatttactaatccctaatctgaaattttgaaatctaaaatttgaatgctccaattagcattccctttgaacagcatgttggtgctcaaagagtttcagattttggagcatgtcagatttagaattt

SEQ ID NO: 319884 - DNA, 619 bp, Homo sapiens
catgctctctctctctctctagttttctactgtcagtgtagcatacataaatactacataaatacaccatatttactcattaaaaaaacaaggctgcaaacattgtctcatctttttcccaaattaactgcagttagcagaaagtttagtaactctgggttagtttgccttcctattaattattccagctacttcagagtttatagccctaaaagggatcagtttgattccctcacccatgcagagggaacactcaaaytcccccttgcatccctgctaatgattccttctatcctgcagcgtgtatcattcatgcttagttatgcgagtccaacagatccttgatgttaccttgctgatctggctcattgtacagattcactctgtccctgaaggatggtgatacccaacttcagggctcatttcagacaatggcttctcagactatgtctgttaatattgcaacttttggtcctaaccttctttagtccctatacattttcctgaaatgaggtggtccctggagtgctgatttggactagctcgtaggtacaccacattaaaacactttccccttctcttgagcttacccacacctgcaagtcaagcagattaatat

SEQ ID NO: 319885 - DNA, 619 bp, Homo sapiens
catgctctctctctctctctagttttctactgtcagtgtagcatacataaatactacataaatacaccatatttactcattaaaaaaacaaggctgcaaacattgtctcatctttttcccaaattaactgcagttagcagaaagtttagtaactctgggttagtttgccttcctattaattattccagctacttcagagtttatagccctaaaagggatcagtttgattccctcacccatgcagagggaacactcaaactccccctygcatccctgctaatgattccttctatcctgcagcgtgtatcattcatgcttagttatgcgagtccaacagatccttgatgttaccttgctgatctggctcattgtacagattcactctgtccctgaaggatggtgatacccaacttcagggctcatttcagacaatggcttctcagactatgtctgttaatattgcaacttttggtcctaaccttctttagtccctatacattttcctgaaatgaggtggtccctggagtgctgatttggactagctcgtaggtacaccacattaaaacactttccccttctcttgagcttacccacacctgcaagtcaagcagattaatat

SEQ ID NO: 319886 - DNA, 551 bp, Homo sapiens
tacaattaattatttttgatattcgatatatacaaggttagaattgggaaattcataccaaagggatttgttcacctattttctatcaaaaaaaatcccattggatattaagcagcaaattatttatacaatgttgggaaataatgtggtaacacttgtttaytttttaatgttccatatggatttaatttttgtgttattgtctgtagaataaaggacaataaaaaaattaccaagactttatctggttgttctggtatgtttaaacaaattccttggggattagtatttcatttactaataaaaacttttcaacttcagtggacagctattagttgatacacatacaggtatagaaattataaataatttttcaccgaatcatactgaaaaatttatagtcattgttttagaaatcatatttgaatatgacttctttcaataatatgacaattaaaatgttaggaaaacactgattcaatatgtactaatttattctaaatgccaagtgctaagtgtacttatatctataaaaatgaaattatatgaag

SEQ ID NO: 319887 - DNA, 605 bp, Homo sapiens
atttatttaattagcttctccttactataacaaataaatgctagtttgaatgaaaatctaatgagagccaattatatatttaaagcatcacctgacttttgaaagatgttattaccagatagggagaactaaaatatactcaattagttataacattctcttctcaatgttcatggatttcctagtaggatccaattctcagaaattcatgatgcaaatgcagttaaattgaagtagatatcatagagaaataaaaatggtcattttattttcagttagttctttgggtttgagaggatattaagttacagtatgagacactgatctgtcaaaattatgaaacattgatctgtgagataaaaatgtaagccacggtacattttctgacttacagtctgagactgcacrtttatttttctgttatgttttgctgttcctagaaattaataatgacagaaataaacacatttaataaagtaagatttccagcagtggattttaacacaatctgatttatttgtttaatattgagtcttcaatagagtttctcagatagtatgtagttttacattatgagtactacatttaaaagtgggaacttaata

SEQ ID NO: 319888 - DNA, 541 bp, Homo sapiens
actgaaaaaagtaagaagaacagttttactttatcagcatcaccccttttcccaaggcagtaaagctcagtgccaagagagaccctcttaatccatgatttctctaacggagaaaactgaaagcrtagtgaattcctaccttccttaatcatgtggaatgctgtctaagaggcatgccccttccaaacctcacagataacatgagaacagtaggtgtaagtatcctgcagatatttaagagtagaaaaaagaaagataggctcacagacaccagagaacagaacttaaaataatatgttaaaatattaacataaaataataataataataataaaagaaccaaaatagtatgtcgaaagaactttaaaaaagagccaagaactccaccaaaaggttcacttatgaagcttgtgatatgcatcccttgcagatttcctcaactaacccacacatgcccccagcattcatcccttccttagcaggtgctccatgtgtgcccccacagatagcacatgcaaacctctgaagactgtactgtagc

SEQ ID NO: 319889 - DNA, 592 bp, Homo sapiens
aacagtatacacattatgtaagtgtctgaagataacaaaaggaaaagagagcttatttaaagatataataactgaaaatgtgccaaatcttgagagggatatgaacatccacgttcatgaagttaaaagatttctaaaacagaataacttcaaaaagaatataccaagacacacgataaaaatattatgaaaagtaaaggacaaagaaagaattttgaaaatagcaagacaaaagccacttgttataagcaaggaaaccccattaagctattagatgatttctcagcagaaagcttccagtctaggagagtgagataatatattcaaaattctgaaagaaaaagactgccaaccaagatactacacccacaaaaactgtccttaagaaataaagaagagataaacactttcccagatgaacaaaatgacaatctataaaatgtctaacaaaaatttagagggaatttattaacattagacatgccttaaaaaatggtaaagggagttcttcaagatgaagcaaaatatgctgtttggtaagaggaacatatgaaagcrtaaaactcactggcaaaggtaaatatatagttaa

SEQ ID NO: 319890 - DNA, 633 bp, Homo sapiens
tggaagtgctacacacttttaaacaaccagatctcttgagaactcactcactatcacaagaatagcaagggagaaatccacccccatggtccaatcatcttccaccaagcccctcttccaaccttggggattacaattgaacatgagatttgggtggggaaagaaaagcaaaccatatcagagattgaatcaataatccaaagcctttcagcaaagaaaagcctgcaaccagatggttttactagtgaattccacaaacatttaaaaaataataaatgccaatacttttcaagctcctccaaaaaaattgaaaaggacagtatgcttcaaaactcatattacaaggcccaaattaccctgaatatcaaaccttacaagtattctacgagaaaagacaaccacaggcaaatatccctgatgaacatagatgtaaaagtcctttccaaaataacagaatacagtacatgaaaggattacactccatggtaaagtgggatttaaccrtgggatgtaaggatgattcaatatatcaaaaataatgtcatacaacacatgaacagaatgaagaataaaaacatataatctcaataaatgcagaaaaagaaattgatgaaattcaacaccttctcatga

SEQ ID NO: 319891 - DNA, 591 bp, Homo sapiens
tgactggcctaagttaggcagttagattttggagaatggatgtaagtccaaatatttcttaaagcaaagactttttaaataaaatgaatgccatagtcagttcaggctgctatattaaaatatcataaactgggtggcttaacaaacgtttcttacagttttaaaatctgagacattcaagatcaagatgctggcagactggtatctggtgagggctcttttcctggtttgcagatggctaccttcttgctgtaacatcacatgacagaaagagtgagctctgacatcttcctcttctttgaatggcagtaatttcatcacggaggctccaccytcatgacttcacgtaaacctcattacttcccaaaggccccacctctaaatattgttacattggggtgtagggtttccacatatgaatttgaatggagggaacacaaatactcagtccatagcaatatgcataaattagcaggattttttcaaacttacttctcacttgtaatttgcaattttaaccaagggtttaatctaggaccagaatgggaaagatattatatagaatgctagatgagatccaatagggtgagg

SEQ ID NO: 319892 - DNA, 506 bp, Homo sapiens
cttttaacagtttggagtatattaaaataaaagcaattccatttgaatcccatttttttttgtccttggataaatgtaatcaataattaagttgtcagctttttgtagagaatagacatctcatgttgtttttaatgattattcatttacacataattctttgcttgcctaaaaaatatttctactacctcaaattcccagtctaatttaatttttttctctttatgtactaaacatttttgaaatcagcaactctgttattttgtcaaatttactgtaaataatttgggtagagaactggatatgtgacctccagggcatcttcagtcactgaaaatctgtgatcctcttcctaaatctttcgtggactctctccagatgtttgtattactagaaatacctgagagtcctgttttaacagtgtttattaataatatagagccttaaasaacctcataaagcaagattttggtgttttcaagcaagactaacaatccaaattaagg

SEQ ID NO: 319893 - DNA, 525 bp, Homo sapiens
caaagaagatctgcaaagaagatctggtaccaatcttactgaaattattaaaaacaaacaaggaggggggaatgcttcctaattcattctaggaaacgagtatcaccttgatacgaaaacctggcaaggacacaacagaaaaagaaaactataagtcaacatccctgatgaacacagatgcaaaaatcctcagtacaatgctagcaaaccaaatcaaacagcacatcaaaagataatccataacaatcaagtgaattttgttactaggatgaaacaatggttcaacatatgcaaatcaatcatcgtgatttatcacataaacaaaatttttaaaaaaccctatcattatctcagtagaggcagaaaaagttttacataaaatccaacatcctttcatgataaaaaccctcaacaatctaggcatcaaataaacatatctcaaaataataagatccatatatcacaaacccacaaccaacatgatactgaatggtaaaagttgaaagaattctttytaagacctag

SEQ ID NO: 319894 - DNA, 596 bp, Homo sapiens
actttgaaaaacaggtcatgtaatcccaaatcatgacaagacttaggcaggtcatggacacacccgtttttaaaatgaggataactttcatggttgttataaggcccttagaacacactaccagcatagagaaagcatgtagtaaattcactgaatggagatctcattccccctgcttttcaaaaagtatttgggtagattatttctagtatctagcatttaacatgtgcttacttgttttgaaatgattctcttgtagcatagttttgcctcsagtatataatttcatcaacaaagtatcttttacacgttcatgtatttttatgtaaaaaaaaaaaccgaacgataagtactgcattagaattactattatgtatcaaacagattccaaggaaataattacttttgagagcagaaatatgaatctatttaatgagaaaaaaactcagataactatgactagcagattcacagtcatttcatttgatttctatgaagaggatcactctatactctttttcctgagcttgttttgaatttattcaatgcatttacatataattttattctagctttagttcatatactaaaattaa

SEQ ID NO: 319895 - DNA, 540 bp, Homo sapiens
tttcatacctaaaggcatctggtttatggattattcaggtcctttgtcaaaattaatttccttcctttcttccttctgtttatttaaataattaggactctaactccttgtgatgagcagaatagcagcttatcacggtagcctattagttaaagcaaattgattaaaaaatgaatatttgaaaagcagtagatccaattaaaatttttcattatgtattacttttttgatataaccttacttgtactaatataataaagcacatagaactttccttgcatgtaatctacttcagttgaagataaccacatgtttttaatgaaaacatcctttctgcaatgttattatactcacattacataatggtaagatgaagtatttcacagactaacatcagttaataaatatgggatggattcaagtatagcttgttaattttcctcagcaagtgctttattttgggccagtgaactatacagtaagtttgtaytgatattgtattttttccttaaaaaaaaacaattttgaagagtaatttat

SEQ ID NO: 319896 - DNA, 584 bp, Homo sapiens
tgatcttaaggaaactcagtgagatacaagagagtacagataaacaatttaatgaaatccagaaaacaattcattatctgaatgataaatttagcaaagagatggatataaaaaagaaacaagcagaaatattaagaggtgaagaattcaacaagtgaaatgaaaaaatacaatatagagcttcaacagcagactaggtgaatcagaagaaagaatatctgaacttgaagatacatcatgtaaaattacccagtcagaggataaaaatgaaataagaatgaaaaagaattaagacagcctgtgggacttatgggacaccattaagtaaacaaacaatattatgggatttccagaaaggaaagcgtcaaaaatggggcagtaagcttagttaatgctgtaattgctagaaacttcccaagtcttcaaagagatatggatttccagatacatgaaacacaaaagttgccaaacagattcaaccaaaaattgtcctcaacaaggcatttgtaattaaactgtcaaaargtaaagacaaacagggaattttaaaagaagcaagagaaacacatcaagtcggatgcata

SEQ ID NO: 319897 - DNA, 619 bp, Homo sapiens
attcctctcatatacatggaacattatccagaatagaccatacgacaggctactaaacaagtcttaatgaatttttaaaaattaaaagtatattaagtattgtttccaatcacagtgtatgaaactagaatcagtaaaagcaggaaactatacaaacacatggaaattaaacatcacactcttggyggccaatgggtcaactaagaaattaaaagcaaaattttaaaattttagagacaaattaaaatgaaaatacaacatatcaaaacctatgggatacagcaaaagcagtactcaaagggaagtatatggcaacaagcatcaatgtcaaaaaatccaggaagagcttaaacaaccaagttaacattacacctcaagaaactagtaaaacaagaacaaactaaaccaaaaattactaaaaggaaagaaatagtaaatatcaaagcaagagtaaaagaaataaagatgacaaaaacaatacaaaagatcaacaaaagagttttttttttttttttgagaagataaaattgacaaatgtttagccagagtaactaggaaaaaagagaagacaaataaatagaaccagagattaaaaaggagacattaccattgatgcaat

SEQ ID NO: 319898 - DNA, 619 bp, Homo sapiens
attcctctcatatacatggaacattatccagaatagaccatacgacaggctactaaacaagtcttaatgaatttttaaaaattaaaagtatattaagtattgtttccaatcacagtgtatgaaactagaatcagtaaaagcaggaaactatacaaacacatggaaattaaacatcacactcttggcggccaatgggtcaactaagaaattaaaagcaaaattttaaaattttagagacaaattaaaatgaaaatacaacatatcaaaacctatgggatacagcaaaagcagtactcaaagggaagtatatggcaacaagcatcaatgtcaaaaaatccaggaagagcttaaacaaccaagttaacattacacctcaagaaactagtaaaacaagaacaaactaaaccaaaaattactaaaaggaaagaaatagtaaatatcaaagcaagagtaaaagaaataaagatgacaaaaacaatacaaaagatcaacaaaagagttttttttttttttttgagaagataaaattgacaaatgtttagccagagtaactaggaaaaaagagaagasaaataaatagaaccagagattaaaaaggagacattaccattgatgcaat

SEQ ID NO: 319899 - DNA, 568 bp, Homo sapiens
aaagaatggatgcacttatagaaatgcaaaatgctctggaaattctcagcaacagactggagcaagcagaataaagaacttctgagcttgaagacagggtctccaattaacccaatctgacaaagaaaaaagaataagaaaaaatgaacaaagcctccaagaagtttgggactacgttaaacaaccaaacctaagaataactggtattcctgaggaagaagggaaatgtaaaagtttggaaaacatatctgggggaataataaaggaaaacttccctggccttgccagagacctagacatccaaatacaagaagcacaaagaacacctgggaaattcatcacaaaaagatcaytgcctcagcacattgtcttcaggttatctaaagtcaaggtgaaggaaagaatattgagagctgaggcaaaagcaccaggtaacctacaaaggaaaacctatcagattaacagcagatttctcagcagaaattctacaagctagaagggattgggaccctatcttcagcctctttaaacagaacaattatcaggcacgaattttggatccagcaaa

SEQ ID NO: 319900 - DNA, 473 bp, Homo sapiens
gctgccttgtggctgagaaatcatctatcttgagtctccttataagagtgctaattctgttatgagaaccacaccctcattatttaattacttcctagaagtaccccttccaaacactaccatattgaggtttacgtctycaacatacgaattttgagaagacataaacagtcactaacatacattacaatatttggcatatagtaggtatttaataatttgagtaattgataaatactacttattatatgtcagcattatgataagtgctctatacagatgttacttgacttatgatatggttacactcatcctgacaaacccatcataccatcataagttgaaaatattataagttaaaaatttatttagctgggtgcactggcatgctcacgtagtcccggctatttgagaggctgagatggaagcattgcttgaacccaggagttcgaggttgtagtgcattatcatca

SEQ ID NO: 319901 - DNA, 535 bp, Homo sapiens
acagccaagtgaaagggcaaaaactgaaagcattcccctggaacaagacaaggatgccctctctcagcaccccttattaaacatagtactggaagtgctagccagagcaatcagggaatataaagatataaaaggcatccaaataggaaaggaagaattcaacttatctttgtggatgatatgactctatacctagaaaactcaaaagactctgccagaaaactcctggaactgataaacaacttcagcagagtttcaggatacaaaatcaatgtactcaaatcagtagcatttctataaactgataacattctagctgagggccaaatcaagaacacaatcccatttacaaatgctacaaaaaataaaataaagtgtctaggaatacatctaatcaaggaagtgaaagctctctamaaggagaactacaaaacactgctaaaaaaaatcatagatgacacaggcaaatggaaaaacatcccatactcatgaaattcaagaatctatattgtcaaaaaggccatactgcccaaag

SEQ ID NO: 319902 - DNA, 455 bp, Homo sapiens
cttagcttagagtcaggcttctggccccacctgggatctgtgaccctgaagaaaagtagcagatacaaggttgtctctggtgagcaggagtctctcagcaaagcctttcccctktcctccttctctaagaaatctcagatgtagctggagcaaattcaacttttgggattggaggacaaagcaatctattttctgatagattgtatttatttttaattgtgttccactttaacctttgttttagcactaatcttttcttatcgagcaccttgttatagatatttctacttttccttcttctctctccttcctactttgtaattcccctcttattttaacctatttcaacatttctgtgatgttttttgtatttgccataaaaatgaaagaaagataactccacggagaaagatttgtgtgcatatttaaatatgtatctatatatcttttaatct

SEQ ID NO: 319903 - DNA, 455 bp, Homo sapiens
cttagcttagagtcaggcttctggccccacctgggatctgtgaccctgaagaaaagtagcagatacaaggttgtctctggtgagcaggagtctctcagcaaagcctttcccctgtcctccttctctaagaaatctcagatgtagctggagcaaattcaacttttgggattggaggacaaagcaatctattttctgatagattgtatttatttttaattgtgttccactttarcctttgttttagcactaatcttttcttatcgagcaccttgttatagatatttctacttttccttcttctctctccttcctactttgtaattcccctcttattttaacctatttcaacatttctgtgatgttttttgtatttgccataaaaatgaaagaaagataactccacggagaaagatttgtgtgcatatttaaatatgtatctatatatcttttaatct

SEQ ID NO: 319904 - DNA, 455 bp, Homo sapiens
cttagcttagagtcaggcttctggccccacctgggatctgtgaccctgaagaaaagtagcagatacaaggttgtctctggtgagcaggagtctctcagcaaagcctttcccctgtcctccttctctaagaaatctcagatgtagctggagcaaattcaacttttgggattggaggacaaagcaatctattttctgatagattgtatttatttttaattgtgttccactttaacctttgttttagcactaatcttttcttatcgagcaccttgttatagatatttctacttttccttcttctctctccttcctactttgtaattcccctcttattttaayctatttcaacatttctgtgatgttttttgtatttgccataaaaatgaaagaaagataactccacggagaaagatttgtgtgcatatttaaatatgtatctatatatcttttaatct

SEQ ID NO: 319905 - DNA, 579 bp, Homo sapiens
gtgagaaaatcaaggcttaaatagctacatactactttctcatggtcatgagtctccagatacctwttaaggtaacataaatgctgtgtctgagaatatcttaagcacaaatgacatatttttaaaaataatagccttaatattttccatgaaatttctatgttctagatattttggttgttcatttatcctggccctttaatttaaaaatgtgaaataattcataaaagaaactttatctttttggaattaatgatttttgagacatagataataaagtgatagccaaataataatattccttaaaggagacaaagataactgatgatttgactcaccagaaacagctaatatttttgtaccaaacactctatactgagtgtatattgtgggaaaggatattatcctaaatcatattgaaaatattggcagagtctagaatctaaagaaggaaaaggcatcctatgtagaagggagagtcatagataatgtttgagacatttgcacaaaagatgtgcaagccaggctgtgttgaggctcatcagtgggatgtttagagcagacaactgataggccagt

SEQ ID NO: 319906 - DNA, 617 bp, Homo sapiens
ctgatgatttgactcaccagaaacagctaatatttttgtaccaaacactctatactgagtgtatattgtgggaaaggatattatcctaaatcatattgaaaatattggcagagtctagaatctaaagaaggaaaaggcatcctatgtagaagggagagtcatagataatgtttgagacatttgcacaaaagatgtgcaagccaggctgtgttgaggctcatcagtgggatgtttagagcagacaactgataggccagtccagtagaataaaataacccaagattttcaaacaggaaaccaaacatattcaggagaaactgatttactgtcctgggagaaacagataattcacagaaggacataaaacaaggaactcaggatggagccacattcctgagagttttcactgatagttttgccctttctacctgggagctcctaaaggtatttaaaagrgatgagagacatatttttaaaaagctttatttggaggggaataaagtgttatcaatgaagttcaaatgtataaaagatgatgaaacttagcaaatggaaaaattgactgtgtttgttacaaatctttattattatttttagcatcttttacagggtaggaa

SEQ ID NO: 319907 - DNA, 589 bp, Homo sapiens
gtttcttagcaattctgtgtaatccacctattgaaatgattttcagtttaataagctactcagatatatatgtgcttttaaggaacaaagcattaaaaagtgaattacatttttttctaaaatttaatctttttctttgtgattacctaattgtaaaaagatggtgttccagtgacttctagcagtgtctctttggtatgctggatgttctggaaaagttttgcctaattaatgatttcagctagcttctaaaacgaactattcctttataatgataaagattagttacagcttttgttataggaattttgcagatctcgaaggataataataagmgtcctttgagaaatataaagtagaagataggtgcgtgagtctgtcattagaatcttctccacctcaaacatgtcctttacaaaacaaatatcttacatggccaatttccaaagaatacatgtttttataatacatcacacatatctgtttaattctataatcactgctattcctttaatcaaagttagttatatttattttcaatgctaattatattcaagggttatcatggatgaactgaaataaaattagt

SEQ ID NO: 319908 - DNA, 605 bp, Homo sapiens
ttgcaaatgcttcttagatgctcacaaaatttcttttaattttggatggtaacaactgccgatggtttttactaggagttccttaagccctgcaacatagagaaaacctgcctgagaacaaagtcaattcacgagacgtgaaacaggtgaagagagaggcagtgtcatgaggatatcacttgagcgcatggatccactcatgcctgaagccagtcctgcattttgtctttacgtttacgtgagctaataattttctatttccccaaaactagcttgtatatgattttattaggaaccaaagtaggcttgacaaatacagaatcaaaccctactatctgactcatgcttttcaatgaaatctcattcttcatggttgcaaagggcagaattcacaaatagaagaaaagaaaaaaacgaattgtcttyaaacaattaatatagatgtattagtccactctcacactgctataaagaactgcctgagactgggtaatttataaaggaaagaggtttaattgactcacagttccacatggctgggaagcctcaggaaacttaaaatcatggaagaggaagaaaatatgtccctcttcacatgatggcga

SEQ ID NO: 319909 - DNA, 560 bp, Homo sapiens
tggaatcagcactctggcaccacataactgtttggagtgttctcttccagcaaagcaggactggaattatttacgatttcatcgtgtcacataacatgaggctacgatgcataataatccacaaaaagacacctcaggtgacacagatggtagcaccaattgtttaagaaaaaaatcctgatcacaagctttgcattaaaactgctctgaaaaatgaaatcatcataagaagaaaatagaactttgattgaataataattctaagtaaatgtcaattttccccatatccagattcatccttgccattaaagatggcttctgaataaaataagaaggagatcctttcttgtttcacatgmatagagattaagcactgtatggtcttttaagaatcaagacttcctgcagggtatagaaggggtcatattttagaaaatcggggtacatgtatatgcagcttataaacatgccatcatactcttcatatatgcactgtttctaagtgttcagtctctcagatatgtgggaaacagaggccaacaagctaatacagaaacagg

SEQ ID NO: 319910 - DNA, 551 bp, Homo sapiens
tccatgacctgttcaattgattcatttttcaccacgttgaagggcagtcttggaaaggggaataatgcttaataaccccaatggatttccaagctatttttgtacccccaagcacagccagggcctcttttctcacctattgccatcaataattatttgtcagaaagcttacaaggcagcagaatgtcccatgtacagacagctttcwtttctgcatctcaaaataatatctttagtattgtgagtggtcatcatggtgtaaggtgggactgttatttcagtcttcttccacatgaagtctctctcctatatgtctctggtgtgtatggctggctccatactcccactgagttatcatgtatgaaaatggttcccgagagctttaaagatatccataatttttttagctgaaagggctttccccagaggctaaatttataatctaataacatcatttttcatctccctaaacaggctttcagaaaaagatgtttctgaagccaaatctgcaagttatgcatacttccacaccattagtaaaggagaatggc

SEQ ID NO: 319911 - DNA, 551 bp, Homo sapiens
tccatgacctgttcaattgattcatttttcaccacgttgaagggcagtcttggaaaggggaataatgcttaataaccccaatggatttccaagctatttttgtacccccaagcacagccagggcctcttttctcacctattgccatcaataattatttgtcagaaagcttacaaggcagcagaatgtcccatgtacagacagctttcatttctgcatctcaaaataatatctttagtattgtgagtggtcatcatggtgtaaggtgggactgttatttcagtcttcttccacatgaagwctctctcctatatgtctctggtgtgtatggctggctccatactcccactgagttatcatgtatgaaaatggttcccgagagctttaaagatatccataatttttttagctgaaagggctttccccagaggctaaatttataatctaataacatcatttttcatctccctaaacaggctttcagaaaaagatgtttctgaagccaaatctgcaagttatgcatacttccacaccattagtaaaggagaatggc

SEQ ID NO: 319912 - DNA, 542 bp, Homo sapiens
accagaaatctctaaatcagggatcaaaagttggctctctctgttgtattattttgcttgcttgcctttaattgaatcygaatgtctatgttggaggacagggtggcacttgaagccacttgggaggatgggatgccccactttgctgtaagatatgaggcatgagtttggaggactgccccaaagagtgagagctcatgccaggggtgatcctctatctgcatttatttcgccatttttggcccctgctctcgcactctccctcatttccttgttgggtattttgcctcatgatgactgtatactgtcgtttgactcctcagcaagtcattatcattttctttattgtctctgccataaggagaactaggaattattgtttatatttctcctttatcctcatcatttcttaaaaagtttttgagcatgatgcttctatcttatctttatttctcaacttaaagtccccattccactcatttaaaaagaaacaaaattataagtcagacaccaaaaggcaaatagtactacatgttctcact

SEQ ID NO: 319913 - DNA, 542 bp, Homo sapiens
accagaaatctctaaatcagggatcaaaagttggctctctctgttgtattattttgcttgcttgcctttaattgaatctgaatgtctatgttggaggacagggtggcacttgaagccacttgggaggatgggatgccccactttgctgtaagatatgaggcatgagtttggaggactgccccaaagastgagagctcatgccaggggtgatcctctatctgcatttatttcgccatttttggcccctgctctcgcactctccctcatttccttgttgggtattttgcctcatgatgactgtatactgtcgtttgactcctcagcaagtcattatcattttctttattgtctctgccataaggagaactaggaattattgtttatatttctcctttatcctcatcatttcttaaaaagtttttgagcatgatgcttctatcttatctttatttctcaacttaaagtccccattccactcatttaaaaagaaacaaaattataagtcagacaccaaaaggcaaatagtactacatgttctcact

SEQ ID NO: 319914 - DNA, 576 bp, Homo sapiens
aaaatatttagagctgaagaaaccttaaaatcctctaatgtagtgattttcaaaatatgcaatgagacatcttcattaacacctacatggtgggcagggagggggctggagcagagtttggggctgcttactgggcatggcttcgtggcgctgagagccctcattcataggaactctattttaatctgtttataatcccacatagtaatgcttttaacaaaatatcccaaagtgaatagtatttcaaatctaccaatctatgccaatgttaaaattttatttattggaaaattttgactcagagaagtctttgcccattatcccactatgagttaggacttgaccacaagtctacrgaacactagccagtttctgtatttcgttgtagggtgcaaatcagagatgtgctttaagatcttctgaaatgtgctttgaagaaaataaatgtcagaggctgggctaccagttataacctacttcagttgctacaccagagatggtgatgggctgaaaccagagaagtttcggtagagctacacaggtagggatgtgtatcagtgatccttaatagattct

SEQ ID NO: 319915 - DNA, 504 bp, Homo sapiens
gggtaagtcctaagtaaaaactcattaaatctaccatttagaatgttaatggtgattctttatagaaaacaggggataaaacgcttggaaataaaagaaggaggttggaaagatctgagaagtgagtaagcagttgatgactagcaaatgtggactatattttttagttttttgttttttgttttttttttttttttaragaaagaaaggatagctttataatacaccttgagaaaatctaatataccttgagctagtagagagataaaaattgaggatgacagttcagcagaggttgagagggttaaaatttctttcttttttttttttttcttttttctttttttcttttttagagatggaggcctggctctgctgctcagtctggagtgtagtgatgcaattatagctcagtgcagcctggaactcctgggctcaagtgatcctgcctcagcctctggagtagctgggattgccagtgtggtccactgagcccagctagag

SEQ ID NO: 319916 - DNA, 412 bp, Homo sapiens
ggtaagtcctaagtaaaaactcattaaatctaccatttagaatgttaatggtgattctttatagaaaacaggggataaaacgcttggaaataaaagaaggaggttggaaagatctgagaagtgagtaagcagttgatgactagcaaatgtggactatattttttagttttttgttttttgttttttttttttttttagagaaagaaaggatagctttataatacaccttgagaaaatctaatataccttgagctagtagagagataaaaattgaggatgacagttcagcagaggttgagagggttaaaatttctttcttttttttttttttcttttttctttttttcttttttaragatggaggcctggctctgctgctcagtctggagtgtagtgatgcaattatagctca

SEQ ID NO: 319917 - DNA, 595 bp, Homo sapiens
aggatatttgtctaatatactaagttctgaaacaggaacwttgagttatttcaattgggctgtccagatactttaggacagatagagtcttcccatttgtaagttataaaagaggtcacttgtaaacagaatcttaaatctgattaatctctcaaaataagggttttttttgagcagtatttacattgaattcattcggattttgccctgaattaggcttgttgtcaagtgacatgtaaattttagacccatgatgagtcttaaagctagaaagcacattagctaagatctcacatgatctttcaatttaccgaaggcacccaagtagtttcaatgctgttccctagttgacctagctaaggacaaagctggtctattttcagtacgatgctttccatagtgcccaggtctcccatataaaaatatctaagtaaaccagctccttttctttcattaaaattacacatttttctgctgaatggatgtttttaaagaaaaatgacttagaatgtgtagtaccttgaattgacatttttggattgatgttagtttaaatcttaaaggatagtacttaacagaacatcaacttgaagat

SEQ ID NO: 319918 - DNA, 569 bp, Homo sapiens
tagcacttagttcctatagcagtgtgagttcaaggtacgagggctatacaaataaagtgcttgagctgtgcagagaaggtgttgtgctgtggctatagctttacagagaaattattaataaatatagactcttatcttactggagatatggtcccccaaatttgcagaaatccctttgtgtcccakttctgagtctagtcttttgctacataatcttgcttatagtaaatgttcagtaaatacttgttaaatgtaacaactccaaactattgtttaatctgttctgccaagtctattgcatatatggccatgaaaaaatacattgctttaacttagtctttgtttccaaatttcccttttaattagtttggttttacaaaacttctctaactgaaaacttattaaagtaatataatcatggacgtttaaggctgaagtaaacattagagagaaagtgtatattagccctttaattttatagatgaagaaattacggcccatagaactgggacattttggtaagagtcacaaatttagcttgttgcagaaggcaggactgaaaatgagtt

SEQ ID NO: 319919 - DNA, 551 bp, Homo sapiens
ccccaaaaaatgtgaaaatcactccagaaggtgcattaaaaagttcattctacttggccagcatttagctcagacactagcaaactcaattattctcttcttactggtagggtcatttcaccttagcctttccagctttacaacacagcacaatataacaactctctggaacactcatttctctcattgccattagcatctcttttatcagctttcccccttcttggcctccgtgtctgctttcataygcttttggcgactttcgcgttcatcaattatgttgcaaagagccctttacttctccactgttttaaataacatctctttgactcattcaacctctcttttatttttttgtttctttccaacttttattttaggttgaaggcattcatgtgtaggtttgttacatgggttaattctgtgtcatgggggtttggtgtatagataattttgtcacccaggtaatcggcctaatacgtcataggtagttttttgatcttcaccctcttcccacttgctaccttcaaatagtccccagtgtgtattgt

SEQ ID NO: 319920 - DNA, 625 bp, Homo sapiens
aaccgtctgtttttgtatgttgtgtactattgctgttcttgttgttattcttttcccagtgtatcctaacacaagaagagacagatagttaagcttccttaaaagtggaatgtccatacaattgattttcaaaaagcttagatgcaagacatttgagaaggggatacatcaggtcacctgactctgtgcctaacatcttttgatgacatgtataagcagccatgmgctctatgtataggtttctttgcattctctatatgaaaaaaatgcatttttttaatccactatcattaattggtgcttaaaagcgcatgtttgtttcaggaaatctgcttgacagtctatggtggcagaagaaaaattccatagacactttgctccaccagtagagtgtagagtaagcatatagcctttcagattaggaactgagtgagcatctagcctttcagtaaatgggagtgctagaaagcagtgggatgttaaaccagcaaatggcttctgtggcggtggcccatgccttactgtggctactctgtcttacactgtcaatttaaagctctgaccaaacacaacttaaaggtgattggtgccctctgaaaaggagctactcgtttccagaaaggcc

SEQ ID NO: 319921 - DNA, 403 bp, Homo sapiens
catattactccacaggaagagtttgcatccctggatccttgcatagctacttcttgcatgcatggaatgtcttcacaagcaagttggtaatctttgctagtttagctctcaaactgttcatctgtaaaaagaaggtgtttgccaagtgcaatggctcatgtcataatctcagtgctttgggaggccaaaataggataaacatttgaggccaggactttaagaccagcctgggcaacrtagtgagaccccatctctaaaatatatatatattaaaaatgaaggtactaccatgtgatatacaacaccacattcagctccatgactctaagaataaaaagaaaaaaggatttttaaaaatccttttctttaaaaatagagcatggctggtagatgcaccaaagat

SEQ ID NO: 319922 - DNA, 607 bp, Homo sapiens
gcctcaaggtgaagctcattggttttaaaagtaatacctaatacctttacgagtacagcctatgcacattcatatagaagttcaattattgccatcctgttctattttccaccaatcaggttagaagctacttagtggatcatttttctttactctgtctcagtaacaggcaatatgttttagtaatcttctttccttcatgaatagattgtattaatacattttatgtatcttctcaatttgtcctttaatttcaacccacacccattgaaaagatgattgaggatatgrctctatctagaattctggcatcccatctctgccttctggagtaagagtcattgtgtatcagcttcattctctttaaaatggagttatgatggataggaaatagaatcatgtatttaaagcatctaatacttgggaaacattcattccttcattcatttattcttctacatttagtacttagttgaggatgatgtattctacatattcaaatttttaaatttcttccccaaagagcgtactagaaaagtatttgtcttgtttttgcagtaagttcaactcataaaataggaaaccagggtaattcatttgttttttt

SEQ ID NO: 319923 - DNA, 547 bp, Homo sapiens
cacacatataccacaccactctaagtgtaaatgtaaaataaaataaggtttattggggaaactcacaagcagagatgcagcagagtacatgactcttccatcctcttgatggcaagtagagaggcatgcttgggtagagcacagctggagagcctctgagcttagcttctggtatcaggctgttgtactaattcaaaagtgttgtsccagccacttggtaaaccaccaaaagtgtgtaggtgtttgtgagggggatttgggaggaggatgagcctcaaaaccatccaaagttttttctcctcggtcaatcccgtggcccttggttgttcattaaatgtgagccttcctactagctctaatggatcctgagtgagagtcattcttgcatagttgtctgggaggtctcctgctgcctggatagtaagtcactgcttgaaacaattgtaaaagatcattttggcctttgcatccatatgtgatatgggaaatttacacccaccacacactttctggtgtcagagatattaatgcctgaggtctgtcatcc

SEQ ID NO: 319924 - DNA, 547 bp, Homo sapiens
cacacatataccacaccactctaagtgtaaatgtaaaataaaataaggtttattggggaaactcacaagcagagatgcagcagagtacatgactcttccatcctcttgatggcaagtagagaggcatgcttgggtagagcacagctggagagcctctgagcttagcttctggtatcaggctgttgtactaattcaaaagtgttgtgcmagccacttggtaaaccaccaaaagtgtgtaggtgtttgtgagggggatttgggaggaggatgagcctcaaaaccatccaaagttttttctcctcggtcaatcccgtggcccttggttgttcattaaatgtgagccttcctactagctctaatggatcctgagtgagagtcattcttgcatagttgtctgggaggtctcctgctgcctggatagtaagtcactgcttgaaacaattgtaaaagatcattttggcctttgcatccatatgtgatatgggaaatttacacccaccacacactttctggtgtcagagatattaatgcctgaggtctgtcatcc

SEQ ID NO: 319925 - DNA, 562 bp, Homo sapiens
ctgggtatggcagtcaattccaaaacagcctaacctgaaatcttgccagaaaatagaaactgtccattcaaagatgaaactgtctattgttgccttcagcagaccctttactagttgggttccctctctactaaattactttatggattcccgtgacatttcacatttctttaattagataattatctaactccatttgaactatttgtaaatgtgttttcatgcatccaactcctcagaatgtattgtatcgtttaacaggcatccaaacacactgtcctgtaccagacaggtttaaatattatactgataatttccccatgagataatgttacatgaaatttttctttaatcaatgttgattgaaaagaaaacaagacagtattttaccagtgagggcatattggcttaggtattcattgcattttagatctatttttaaccttggctttatgtttgagccaaaaaaatcatcaacwtcctgaggatttttctccccttttgctgattagctatagaatgaggagaagcacctgacggggccacattaagaaggatgcta

SEQ ID NO: 319926 - DNA, 550 bp, Homo sapiens
gtaggagagacaacaaagttaataaaacaagatagggtttacaattgacacatatattctctcacacacatttgtaatcaattgaaaaacaaatactgaacaagattatgagctacagaatccagtgagattttgacagtagatacaaaggagaagggaattgttaagaaaagtcaygtgaacaaataacagagaatagaaacatgaggtctggtttattatttccctctttatctgtcaaaatcctactcttcctttaaggcctaatacaaattgtaaactgacttctaattttcccccatactcttaatttttgtcttcccatattgcctttttttttttttttttttttgccttagtaagttaagtgtttatctaaattaggaacaatgacttggcaagacttacttccctaggacctgacatggtgcctctcctcatatattagaattcaataaaaagttctcatcctaaaatataggaattgaggaaaaataagaagtcaaggttgctgctggaatttaaatttatgtatagaaagagcacagaa

SEQ ID NO: 319927 - DNA, 550 bp, Homo sapiens
gtaggagagacaacaaagttaataaaacaagatagggtttacaattgacacatatattctctcacacacatttgtaatcaattgaaaaacaaatactgaacaagattatgagctacagaatccagtgagattttgacagtagatacaaaggagaagggaattgttaagaaaagtcacgtgaacaaataacaragaatagaaacatgaggtctggtttattatttccctctttatctgtcaaaatcctactcttcctttaaggcctaatacaaattgtaaactgacttctaattttcccccatactcttaatttttgtcttcccatattgcctttttttttttttttttttttgccttagtaagttaagtgtttatctaaattaggaacaatgacttggcaagacttacttccctaggacctgacatggtgcctctcctcatatattagaattcaataaaaagttctcatcctaaaatataggaattgaggaaaaataagaagtcaaggttgctgctggaatttaaatttatgtatagaaagagcacagaa

SEQ ID NO: 319928 - DNA, 587 bp, Homo sapiens
acacttgtgcttttgttttgaaggggagcaagtttgggaaggaaatgatgagattagctgtgattatgctgagtttagatgcgccgggaaaaaaatctaaataataatatgaaataagcaaatctgaagcacaagaaaaatatyaaagctaaaaatatatattttagagttacatacatgctgataattctggccaaattataaaatagttaatccagaaaaaactaagattgaatcaagatggtgttgtgaacaaacactttcactctcctgtcctatatgcaaagaagggacagcgagagtgaggcaaatagcagataaagggaggttcaaaaataaaatatgtaacggaagaatatttgtgatgaattggaaatgttcagtctcagactataaagagcatataaaatataatctttagaaatatatagttttcttttctttggaagatagtggattagaggcttttgtatgtctcagccacgtggaaacaggaaaatagcacataaaaatgaactctgagagtgttaattcaagaagaaagacaataattcaccagaatagccaaggacaacccagaccctgga

SEQ ID NO: 319929 - DNA, 587 bp, Homo sapiens
acacttgtgcttttgttttgaaggggagcaagtttgggaaggaaatgatgagattagctgtgattatgctgagtttagatgcgccgggaaaaaaatctaaataataatatgaaataagcaaatctgaagcacaagaaaaatattaaagctaaaaatatatattttagagttayatacatgctgataattctggccaaattataaaatagttaatccagaaaaaactaagattgaatcaagatggtgttgtgaacaaacactttcactctcctgtcctatatgcaaagaagggacagcgagagtgaggcaaatagcagataaagggaggttcaaaaataaaatatgtaacggaagaatatttgtgatgaattggaaatgttcagtctcagactataaagagcatataaaatataatctttagaaatatatagttttcttttctttggaagatagtggattagaggcttttgtatgtctcagccacgtggaaacaggaaaatagcacataaaaatgaactctgagagtgttaattcaagaagaaagacaataattcaccagaatagccaaggacaacccagaccctgga

SEQ ID NO: 319930 - DNA, 587 bp, Homo sapiens
acacttgtgcttttgttttgaaggggagcaagtttgggaaggaaatgatgagattagctgtgattatgctgagtttagatgcgccgggaaaaaaatctaaataataatatgaaataagcaaatctgaagcacaagaaaaatattaaagctaaaaatatatattttagagttacatacatgctgataattctggccaaattataaaatagttaatccagaaaaaactaagattgaatcaagatggtgttgtgaacaaacactttcactctcctgtcctatatgcaaagaagggacagcgagagtgaggcaaatagcagataaagggaggttcaaaaataaaatatrtaacggaagaatatttgtgatgaattggaaatgttcagtctcagactataaagagcatataaaatataatctttagaaatatatagttttcttttctttggaagatagtggattagaggcttttgtatgtctcagccacgtggaaacaggaaaatagcacataaaaatgaactctgagagtgttaattcaagaagaaagacaataattcaccagaatagccaaggacaacccagaccctgga

SEQ ID NO: 319931 - DNA, 614 bp, Homo sapiens
cttcaaactaaactaccagactacagtaaccaaaacactacggtgctggtataaaagaggcacatatacaaatggaaccacaatcccaaaatatgtgtgagaaaatattgctgaacaaatagaggtaatttaagggagttgaccctagaatttctctttgagaagagaaattgtagacttattgtcttagatacaggaaaagtaaattgtcaacaaaaacatgtgttactggaaagtttctttgagcatggaaaccaaatttttagtcataaatytaaagggagacaagtcagcatatttgcttatttttgaaaattaggtggaattttggatgtaatcataattggagttttgccaagtgggtaacacagagggagagtgagttaggtgttttgattttattaaagaagaaattgtgatgatggacctagaagtacaagctgcatacagagtatatggcaggcctgtggacagtggtagacacaaaagtggtagagtcaatggattgtatgatccagataaattaaggccttgttgatctgtgtacacagtaaatgagttgaaatgttaggaagtggtagtgagtctgttttaaattaaggttttggatgcca

SEQ ID NO: 319932 - DNA, 599 bp, Homo sapiens
gttacctatataaatagtgttaattcttggatttaaaaacattaaattatctatttttcactaaagcgaaaaggacttttagtctagttcctttgaaaagaacgtgaaatctgtgtayatacctgatcccctgttcaaaagcagcaagcaagatcaaatgctggatttcttgaaaattatcaatttaagaatttagcagtgtatcagttggcaatttaacatataacggaaacatctattgtgcattgaattgtgtcccctttttagatatatggaggtgtaatagccattatctatgagtgtgaccttatttgaaaatatgtactttgtagatgtaatcaaattaagatgagttcatgttagactagattgggctctaatccagtataagaactgctgtttttataagaagagaaaacagagacacagtgaggtaagtgtcatatgaagatgagacatggggacacagagacatagaggaaagatggatgtgtgaaaatggaagcagagattaaacttatactgccacatgccaaaaaatatttggaggtagaagaaacaaggaaagattctcccctagagacttcaaagggagcaag

SEQ ID NO: 319933 - DNA, 599 bp, Homo sapiens
gttacctatataaatagtgttaattcttggatttaaaaacattaaattatctatttttcactaaagcgaaaaggacttttagtctagttcctttgaaaagaacgtgaaatctgtgtacatacctgatcccctgttcaaaagcagcaagcaagatcaaatgctggatttcttgaaaattaycaatttaagaatttagcagtgtatcagttggcaatttaacatataacggaaacatctattgtgcattgaattgtgtcccctttttagatatatggaggtgtaatagccattatctatgagtgtgaccttatttgaaaatatgtactttgtagatgtaatcaaattaagatgagttcatgttagactagattgggctctaatccagtataagaactgctgtttttataagaagagaaaacagagacacagtgaggtaagtgtcatatgaagatgagacatggggacacagagacatagaggaaagatggatgtgtgaaaatggaagcagagattaaacttatactgccacatgccaaaaaatatttggaggtagaagaaacaaggaaagattctcccctagagacttcaaagggagcaag

SEQ ID NO: 319934 - DNA, 646 bp, Homo sapiens
taaacccacataaaggagaaaagaagagaaaaagaaatatataataggcaagacatataaaaagcacaaagtatgatactagttatcaaacttacatggaaattatattaattatgaatagactaaattctctggttaaactacaaggattattccaaagcaaaaccaactatatgctctttttaaaagatgaaaataggccgggcacggtggctcacgcctgtaatcccagcactttgggaggcaggtggatcatgaggtcaggagatcaagaccatcctggctaacatggtgaaaccccatctctactaaacatacaaaaaaaaaattagctgggcgtggtgggggggcacctgtagtcccagctacttgggaggctgaggcaggaaaatggcatgaacccagaggtggagcttkcagtgagccaagatcacaccactgcactccagactgggcgacagagcgagactccatctcaaaaaaaaaaaaaaaggtgaaaataaaacatatgtaaaattttacacataaatgtataaatttacatatgtatgttttaaattgaaataaagttaaaacatgcagaatatgctaaacaatataatgtcagaattggctattaatgtcagattaaataatatttatagaa

SEQ ID NO: 319935 - DNA, 599 bp, Homo sapiens
aagccatgaagcttaaaagaaagaataattattttccccctgagagatatcaatctaatatttgatgcactgccatgcccctttaaaaataatatatggaacctaatttagcttttaaaaaatgactcatgtttctaagaaacatgagtgactgagctgaatattaatatagtgatactgtccaagatgatgaaagtatacaagctgttttctgtcactaaatacaatttccgtatcattgctttttggtacctttgataaagttgtcgttcatttcgtctcctgtgcctaagagatctttagtactaaatgtatctttctgtcaatttttctaacttattttatataatttgctgtagaagagaatatttcaaaacaagtttattaatattattacaatagagtcaatcaattcaatgtaagagccaatgatcccttctagaataagacacagawtttgacggttggatggctggagaatcttcataaacattgggacttcactggctagctgaggttgtagaaaatcttgttttcagataactgaggtgtatatgcattttcaaaatatcagcagtgtcaaatgtcttggcaggcca

SEQ ID NO: 319936 - DNA, 586 bp, Homo sapiens
atcccctctacataaaggaggaatgttttgtttagccatatttacaatgtgttcttacttcyaaattacatgtttaatcacagaaataatacagcacaatgaatgtcacgcttttcactttgtttttgtttttccatctaaaccaagaagagaatacaaaagcaggtgagtatgtagagttatcagtcctaagttctgctaattcttcaagtttttttgttacattctatgcttatataataatggaatattaaaatgcaaattcatttttatttgtcaggattattttaaaggtaaagtttcctacggccaattttcttacaaaaataactggacctgcaataataatctggaaacgtttgggcataataatgggaccaaacatgaaagctttctcactaattagagaaaaaaatattcagtactactcacctacagtgggtttaacttctttcagaaaaggtaactaaacttgcacttaagccattattaattcttaactttgaaggattttggaaataattttttctcttgaggtcagaaacttccagatgtttagttacctaaaatataacagaaccgaacc

SEQ ID NO: 319937 - DNA, 586 bp, Homo sapiens
atcccctctacataaaggaggaatgttttgtttagccatatttacaatgtgttcttacttctaaattacatgtttaatcacagaaataatacarcacaatgaatgtcacgcttttcactttgtttttgtttttccatctaaaccaagaagagaatacaaaagcaggtgagtatgtagagttatcagtcctaagttctgctaattcttcaagtttttttgttacattctatgcttatataataatggaatattaaaatgcaaattcatttttatttgtcaggattattttaaaggtaaagtttcctacggccaattttcttacaaaaataactggacctgcaataataatctggaaacgtttgggcataataatgggaccaaacatgaaagctttctcactaattagagaaaaaaatattcagtactactcacctacagtgggtttaacttctttcagaaaaggtaactaaacttgcacttaagccattattaattcttaactttgaaggattttggaaataattttttctcttgaggtcagaaacttccagatgtttagttacctaaaatataacagaaccgaacc

SEQ ID NO: 319938 - DNA, 583 bp, Homo sapiens
ttgacttattaacatcttccacattaatctttccaaaatatagctgttatcatcacagcattttttgatagaacattttcagatccttcactatatcttaaataaactcgaaaaaattatcatctaatccatgccttcaataatgtkttttctatttattattctatcctactgaccattacttcttattcgtaaacaacagctctccaactaaatcaagctagttgccattgtgtaaatatacaattttttcttttggtgtatgctcactggtacttctacttgaaattcccatattacatacttcatagctcagctcaactctccttgtggttaattctcgctcattactcctttagcctgaagtaatcaccgactttcctagagcttcaattctttcaagtaacatggaacttgaattatttcaactagcatacatacacacacacacacacacagacatacatacaaacacacacatttgtgttcatagcatatattatctattagttaaataacatattttgtttactcttaaccaatccctctcatagtttaacattatcatgaacataggcatgca

SEQ ID NO: 319939 - DNA, 583 bp, Homo sapiens
ttgacttattaacatcttccacattaatctttccaaaatatagctgttatcatcacagcattttttgatagaacattttcagatccttcactatatcttaaataaactcgaaaaaattatcatctaatccatgccttcaataatgtgttttctatttattattctatcctactgaccattacttcttattcgtaaacaacagctctccwactaaatcaagctagttgccattgtgtaaatatacaattttttcttttggtgtatgctcactggtacttctacttgaaattcccatattacatacttcatagctcagctcaactctccttgtggttaattctcgctcattactcctttagcctgaagtaatcaccgactttcctagagcttcaattctttcaagtaacatggaacttgaattatttcaactagcatacatacacacacacacacacacagacatacatacaaacacacacatttgtgttcatagcatatattatctattagttaaataacatattttgtttactcttaaccaatccctctcatagtttaacattatcatgaacataggcatgca

SEQ ID NO: 319940 - DNA, 583 bp, Homo sapiens
ttgacttattaacatcttccacattaatctttccaaaatatagctgttatcatcacagcattttttgatagaacattttcagatccttcactatatcttaaataaactcgaaaaaattatcatctaatccatgccttcaataatgtgttttctatttattattctatcctactgaccattacttcttattcgtaaacaacagctctccaactaaatcaagctagttgccattgtgtaaatatacaattttttcttttggtgtatgctcactggtacttctacttgaaattcccatattacatacttcatagctcagctcaactctccttgtggttaattctcgctcattactcctttagcctgaagtaatcaccgactttcctagwgcttcaattctttcaagtaacatggaacttgaattatttcaactagcatacatacacacacacacacacacagacatacatacaaacacacacatttgtgttcatagcatatattatctattagttaaataacatattttgtttactcttaaccaatccctctcatagtttaacattatcatgaacataggcatgca

SEQ ID NO: 319941 - DNA, 581 bp, Homo sapiens
cttcacttacaaaacacaaactgaatgataaaattattaaggtgtacacaatagagaggcagagccttaaaccgagtgggggctctttggaaggcaaggccatatggaactgcacaggatayatgtccatgaagctggctctgcatgaatgcttcatttgctgaattcatgtcatacacttagaaaatgatactagtgtatataataagtaagtgagaggtgtgtttgagtaaaggaaaagaaacacccacttcatgacatttctttttttttttttctgttctcgttctgcttgtctttctatacactctatatgaggcttttcttctcatgtaattcccgacttagcaaaagtctgagctcaatgaatcttaaagttgaacaactaccttagagatatccgacatgtgtttcacttgatatggcctcagttgctacaatttctccaagacacactgcttttctccatcttaagtatgaaagttttctcagacctggatgaataaaggtgtttatttatcactcaagaggaccactcatacgtgtctgaggaaggaagagtttagtggttaaaatcatag

SEQ ID NO: 319942 - DNA, 455 bp, Homo sapiens
ggttaatgccattctcctgccttagtctcctgagtagctgggactacaggtgcccgccaccacgcccagctattttttatttttatttttatttttagwagagatggggtttcaccctgttagccaggatggtcttgatatcctgaccttgtggtctgcctgcctcagcctcgcaaagtgctgggattacaggcgtgagccaatgcacccggccttatctttgtttttattgcatttgcttttgtgtgcttgggcatgagatccttgcataagctagtgtctagaaggggttttccaatgttatcttctagaattttcatagtttcaggttttagatttaagttcttaatccatcttgagttgatttttatataaagtgaaagataaggatccagtttcattctcctacatgtggctagccaattgtcccagcaccatttgttgaaaagggtgtc

SEQ ID NO: 319943 - DNA, 455 bp, Homo sapiens
ggttaatgccattctcctgccttagtctcctgagtagctgggactacaggtgcccgccaccacgcccagctattttttatttttatttttatttttagaagagatggggtttcaccctgttagccaggatggtcttgatatcctgaccttgtggtctgcctgcctcagcctcgcaaagtgctgggattacaggcgtgagccaatgcacccggccttatctttgtttttattgcatttgcttttgtgtkcttgggcatgagatccttgcataagctagtgtctagaaggggttttccaatgttatcttctagaattttcatagtttcaggttttagatttaagttcttaatccatcttgagttgatttttatataaagtgaaagataaggatccagtttcattctcctacatgtggctagccaattgtcccagcaccatttgttgaaaagggtgtc

SEQ ID NO: 319944 - DNA, 455 bp, Homo sapiens
ggttaatgccattctcctgccttagtctcctgagtagctgggactacaggtgcccgccaccacgcccagctattttttatttttatttttatttttagaagagatggggtttcaccctgttagccaggatggtcttgatatcctgaccttgtggtctgcctgcctcagcctcgcaaagtgctgggattacaggcgtgagccaatgcacccggccttatctttgtttttattgcatttgcttttgtgtgcttggkcatgagatccttgcataagctagtgtctagaaggggttttccaatgttatcttctagaattttcatagtttcaggttttagatttaagttcttaatccatcttgagttgatttttatataaagtgaaagataaggatccagtttcattctcctacatgtggctagccaattgtcccagcaccatttgttgaaaagggtgtc

SEQ ID NO: 319945 - DNA, 521 bp, Homo sapiens
ttaacaagcaaggcagctgagtacacagtgctctacaaaagatacacagtttttgcaaaactacaggtttaaactttaacgggtgtgcaagagaggtaggaaccagctcagataacacaaatttaattccacattcaggggtatacatggagttttctatagtttaatwttgtgttggggttattttaagacagctctacatttttttactgatatgaggaaaaaaaatcatctttatcatgcaagtttcttatgcctaaagaatttcatagcaggaagcaatataaacactcccaggggcataaggatggaacacaccttctcacctctcttttcttgaaaatatggatacacacatttagtaaagcccccacacaactcaataatggggcacgaacactggaactaaagagatttacacgctgaaaggaggaaaaagcatttagtctttgaccatgaaatacgatattagatgtggacttatcacagccgggtgagtttttgtttttaattatgaaacg

SEQ ID NO: 319946 - DNA, 521 bp, Homo sapiens
ttaacaagcaaggcagctgagtacacagtgctctacaaaagatacacagtttttgcaaaactacaggtttaaactttaacgggtgtgcaagagaggtaggaaccagctcagataacacaaatttaattccacattcaggggtatacatggagttttctatagtttaatattgtkttggggttattttaagacagctctacatttttttactgatatgaggaaaaaaaatcatctttatcatgcaagtttcttatgcctaaagaatttcatagcaggaagcaatataaacactcccaggggcataaggatggaacacaccttctcacctctcttttcttgaaaatatggatacacacatttagtaaagcccccacacaactcaataatggggcacgaacactggaactaaagagatttacacgctgaaaggaggaaaaagcatttagtctttgaccatgaaatacgatattagatgtggacttatcacagccgggtgagtttttgtttttaattatgaaacg

SEQ ID NO: 319947 - DNA, 577 bp, Homo sapiens
aaaagtgcagccttgttacataagtaaaagtcccttcacatagaagaagcaacaggaattggaaggaaatattccccaatawtattattaaggttttgttctttcaatccagcattggtagacttaagccaattgcctaccagatgaatggttatcccctgtgttggagaagataagctgcctattttgatagcactgctgagtttaacttcttaatattaactatttaaattattttcattgaggttctgttggtagctacagattcttgcactgaaaacctccaaaatttgtcagaagagtatatttataaaatgaatttaaaggttgttctatatccagagctgacacatttactccgatctttagtgttggtttattttaattgacacattgtaattgtatatatctacgagatacaatttgatgttttgatgcatacttatgttagataataatacaaccagggtaattagtataacaatcacctcatgcatttatcatttatttaaggtgaaaacattttaaatcctctcttctaacaattttgaaaaatacaatattttattgttaacta

SEQ ID NO: 319948 - DNA, 568 bp, Homo sapiens
ttatttagttttataaacatggactcatggattctttttgtattcagtggtttataatcagttaccactattacttaatagtatctgagattgcctccagttttgccagtggatacttcaaggtgatttggggtcttttttcacctgtattcattatttttgagcactttcttactcttaggcacagcatgatattcaaggatcatcatgtgtatcttctaccccagccctggaatgtaccatgttttaaaatagtttcattcctttctgtggagaatcaaatttagaaacgaagatcttggcaataggtttgcagacagrtactgaggtgttgctactcttaaagctctctcagtgaacacaggctcacacatacacatctaaattaattttagtatctctccatatatactgaaaactttgagttacaccaatactttctattttgattcactatatatgactcattcgaatttcctgcctttgcatatttgcaagtcccttccataaagtcgaaaattagcttccattttcactagtatatttacttatttaattaatccaccta

SEQ ID NO: 319949 - DNA, 521 bp, Homo sapiens
ttaacaagcaaggcagctgagtacacagtgctctacaaaagatacacagtttttgcaaaactacaggtttaaactttaacgggtgtgcaagagaggtaggaaccagctcagataacacaaatttaattccacattcaggggtatacatggagttttctatagtttaatattgtgttggggttattttaagacagctctacatttttttactgatatgaggaaaaaaaatcatctttatcatgcaagtttcttatgcctaaagaatttcatagcaggaagcaatataaacactcccaggggcataaggatggaacacaccttctcacctctcttytcttgaaaatatggatacacacatttagtaaagcccccacacaactcaataatggggcacgaacactggaactaaagagatttacacgctgaaaggaggaaaaagcatttagtctttgaccatgaaatacgatattagatgtggacttatcacagccgggtgagtttttgtttttaattatgaaacg

SEQ ID NO: 319950 - DNA, 521 bp, Homo sapiens
ttaacaagcaaggcagctgagtacacagtgctctacaaaagatacacagtttttgcaaaactacaggtttaaactttaacgggtgtgcaagagaggtaggaaccagctcagataacacaaatttaattccacattcaggggtatacatggagttttctatagtttaatattgtgttggggttattttaagacagctctacatttttttactgatatgaggaaaaaaaatcatctttatcatgcaagtttcttatgcctaaagaatttcatagcaggaagcaatataaacactcccaggggcataaggatggaacacaccttctcacctctcttttcttgaaaatatggatacacasatttagtaaagcccccacacaactcaataatggggcacgaacactggaactaaagagatttacacgctgaaaggaggaaaaagcatttagtctttgaccatgaaatacgatattagatgtggacttatcacagccgggtgagtttttgtttttaattatgaaacg

SEQ ID NO: 319951 - DNA, 557 bp, Homo sapiens
ggtgattaattaaaagtaaattggatgggaaattagaattttcacttaattttgctgtttggaaagttctcatttcttaacaagtgattcagacaaatgcttattgatgctagttaatgaaggtattaaaagaagaatgaactttatgtggggaaacatttcaaayggaaatctcttatattgttttcccacaggtaattttttctttccaagagcttagtagaagtgtattttgccaattttaattatctgaccattaagaggaatggagaatttttttgcaagcagctaagagaatttccagtgctttaatgtgtttagagaacccaaagtgagttactattttatttttaattcaaacttggcttaggtttggtcctctaggagataaactggaagacattggttttgaaagaataataacaataacaatattaaggtttatgttatttactaattgttttttattcattcccaaatggctgaaaatgcctcttggcaaattttccaagtgtttgcaggtgccgagtatgtcaaaatttcacctgcagatttct

SEQ ID NO: 319952 - DNA, 557 bp, Homo sapiens
ggtgattaattaaaagtaaattggatgggaaattagaattttcacttaattttgctgtttggaaagttctcatttcttaacaagtgattcagacaaatgcttattgatgctagttaatgaaggtattaaaagaagaatgaactttatgtggggaaacatttcaaatggaaatctcttatattgttttcccacaggtaattttttctttccaagagcttagtagaagtgtattttgccaattttaattatctgaccattaagaggaatggagaatttttttgcaagcagctaagagaatttccagtgctttaatgtgtttagagaacccaaagtgagttaytattttatttttaattcaaacttggcttaggtttggtcctctaggagataaactggaagacattggttttgaaagaataataacaataacaatattaaggtttatgttatttactaattgttttttattcattcccaaatggctgaaaatgcctcttggcaaattttccaagtgtttgcaggtgccgagtatgtcaaaatttcacctgcagatttct

SEQ ID NO: 319953 - DNA, 589 bp, Homo sapiens
aagacagacatctagaacaaatatcctcctgagttcatctttcttgtgatttttattgwtatattttattattttatgtttataaaatatttttacctccaatagtgataacttttgtccattagtcacaaattttgctatgataaagagttcagatttgatacatccctacctgtgatatgcaaggagggaaatggggaaatatttctttatattctatttggcaggttcaaatcttttgaaacaatgtagcaagtaggcatttagaaaagatatgtagagttagagatataatgaggaggaagcccccaaagaataactgtcaacccttgatgaccccaatttcagaagcttcaataatattgcaactacgagcaaagaaagctcattttttactagcttccctggagacaatatctccaatcaaaattgattactttttcatgctatatatcatgcagaattgctaacaggaaatctactcttcactcatttccttggcctacttcttggcaactccattacactgtacttaattttcgagtaaataacatattaaaaattaatcaaaggaaagagtaatttggaa

SEQ ID NO: 319954 - DNA, 501 bp, Homo sapiens
tgtaccttgaaacaagtagcatgtcagttttatatctctgacaatgggtcccatgattataaataaaataaacattgtagtgcttttcaattgaacactagcaaaatcaaatattagagctgtggctagtctttttcctaattgttatggyaccattcaaatcaaagggaaggactggtttctaaataattctgtattcattatctgaaatatgtgtttatatattgcaaataaaacataatgtaaagttgactttctaaagaaaaataaatatttccagagaaaaatgaatacttgagaagagtttttgaagaaataatatctgaaataagaatcagttcttgaaaccaacaaacaaaaaatcttaaagtttggtaatagaaatgccaggtattaaaggctggttatccatccaacgtcatatcaaatttcttacatcagaatatattacatgcacttggtgattatgtaaaaatctcttcagtgaccttatttaaaaaa

SEQ ID NO: 319955 - DNA, 501 bp, Homo sapiens
tgtaccttgaaacaagtagcatgtcagttttatatctctgacaatgggtcccatgattataaataaaataaacattgtagtgcttttcaattgaacactagcaaaatcaaatattagagctgtggctagtctttttcctaattgttatggtaccattcaaatcaaagggaaggactggtttctaaataattctgtattcattatctgaaatatgtgtttatatattgcaaataaaacataatgtaaagttgactttctaaagaaaaatraatatttccagagaaaaatgaatacttgagaagagtttttgaagaaataatatctgaaataagaatcagttcttgaaaccaacaaacaaaaaatcttaaagtttggtaatagaaatgccaggtattaaaggctggttatccatccaacgtcatatcaaatttcttacatcagaatatattacatgcacttggtgattatgtaaaaatctcttcagtgaccttatttaaaaaa

SEQ ID NO: 319956 - DNA, 501 bp, Homo sapiens
tgtaccttgaaacaagtagcatgtcagttttatatctctgacaatgggtcccatgattataaataaaataaacattgtagtgcttttcaattgaacactagcaaaatcaaatattagagctgtggctagtctttttcctaattgttatggtaccattcaaatcaaagggaaggactggtttctaaataattctgtattcattatctgaaatatgtgtttatatattgcaaataaaacataatgtaaagttgactttctaaagaaaaataaatatttccagagaaaaatgaatacttgagaagagtttttgaagaaataatatctgaaataagaatcagttcttgaaaccaacaaacaaaaaatcttaaagtttggtaatagaaatgccaggtattaaargctggttatccatccaacgtcatatcaaatttcttacatcagaatatattacatgcacttggtgattatgtaaaaatctcttcagtgaccttatttaaaaaa

SEQ ID NO: 319957 - DNA, 585 bp, Homo sapiens
catttattgaggattttgcatctacattcatgagagatatggtctgttgtttttctttcttgtaatgtctttatctgttgtggtattagaataattctatccttgaggatatgtaggaaatgtttcctccatctctgttttctggaagagattgtagagaatttgtgtcttttctttcttaaatgtttrgtagaattcactaataaattttctaggcttgttgctttcttttttggaaggttattactttttgactcaatttctttaatagatacaggcctatttaggcaatctctttatctttctgtaagttttggaaatttgtgtctttcaaggaggtggtcatttttgtctaagttatcaaatttgtgaaaaaagagttgttcataatattcctttatttttttaatgtgcataggatcagtaatgctgacccctcttttatttatgttattagtaatttgtgtcttctctcttttgtgcttgggtaacttggctagaagtttgtcactgttaatgatctttactaagaactacctattaattttgctgattattgttacacttttccaattttattgattt

SEQ ID NO: 319958 - DNA, 585 bp, Homo sapiens
catttattgaggattttgcatctacattcatgagagatatggtctgttgtttttctttcttgtaatgtctttatctgttgtggtattagaataattctatccttgaggatatgtaggaaatgtttcctccatctctgttttctggaagagattgtagagaatttgtgtcttttctttcttaaatgtttagtagaattcactaataaattttctaggcttgttgctttcttttttggaaggttattactttttgactcaatttctttaatagatacaggcctatttaggcaatctctttatctttctgtaagttttggaaatttgtgtctttcaaggaggtggtcatttttgtctaagttatcaaatttgtgaaaaaagagttgttcataatattcctttatttttttaatgtgcataggatcagtaatgctgacccctcttttatttatgttattagtaatttgtgtcttctctcttttgtgcttgggtaacttggctagaagtttgtcacygttaatgatctttactaagaactacctattaattttgctgattattgttacacttttccaattttattgattt

SEQ ID NO: 319959 - DNA, 550 bp, Homo sapiens
agctattttgaaaatgaaaacaaatatgcaaattatcaaagcctaatattgacattttgaaattgttcaaggaaaatgaagtatttagagcctataattctaaatatacctaataatttataatattttttctgcattattagtagtattttataaagtcagtgtttacttaagttcactccactatatatgttttcattatgttttattctttacacacttccaaaatccatttggcataattttcctttattttcaagaatattcctaagaatccctcttattttacttctactgatagtaaattatttgtttttgttttcctaaaaatgtmtttatttcaacagcatatcttcaatcataattttctttggcatagaattctgaattggcagttattttctttttcacaaatgatgatatcttgtcactatattttggcttccaccactgttgagaaatcatctgtaaatgtcactattactaatttgaaaataagagctctttcatgtttttacttgaccagttttctttagttttattttgatgg

SEQ ID NO: 319960 - DNA, 540 bp, Homo sapiens
aaatatcgatactacaggagaaactataattcataaaaacttaaaaatcttagtttatacagttatgcaaaacaaaaacctaggaaaaacattttgattttctcagcaaagggcaataatagatcctgggatactcctgctgccttgaaattccaattttatttctgctaagtattggagaaaatcatcatacaaagcatgggacatcactttactasatttgaatgttgttaataaacctaaaacctctgaaaagtggcagagagcccaattacgtagaacatggttaaaacagatgctccctaacatacaatagattatgtaaactgtcacaattcatttcagctgagagcatttgaatgccaagacttggctcctttgaaggtctggcacacaatgacaaacaggattgcaggatgcctctcttagggttgcactatgagtgattacagtccaaaacttctagttctcaggtgttcccactacttccactgagttcttacaacactagcattgcttaatgttacaaaagaacagaca

SEQ ID NO: 319961 - DNA, 540 bp, Homo sapiens
aaatatcgatactacaggagaaactataattcataaaaacttaaaaatcttagtttatacagttatgcaaaacaaaaacctaggaaaaacattttgattttctcagcaaagggcaataatagatcctgggatactcctgctgccttgaaattccaattttatttctgctaagtattggagaaaatcatcatacaaagcatgggacatcactttactacatttgaatgttgttaataaacctaaaacctctgaaaagtggcagagagcccaattacgtagaacatggttaaaacagatgctccctaacatacaatagattatgtaaactgtcacaattcatttcagctgagagcatttgaatgccaagacttggctcctttgaaggtctggcacacaatgacaaacaggattgcaggatgcctctcttagggttgcactatgagtgattacagtccaaaacttctagttctcaggtgttcccactrcttccactgagttcttacaacactagcattgcttaatgttacaaaagaacagaca

SEQ ID NO: 319962 - DNA, 564 bp, Homo sapiens
cattgcctggaaactagaaatctgagggcaaagtgttgggagggtcatgcccactctaaaggctctggagaagacattccccttgcctcttacagcttctactagtctcaggcatgccttagcttgaggaagcataactacagcctctgcctctaccttcacaaggtatcttcttcctgtgtctctgtgttcaaattttcctctttttacaaaagcaccagtatgacctaatattaatttaactaattaaatatttaaagactctatttccaaataaggtcacattctcaggttctggatggacatgaattttgttgttgttgttgttgttgttggggctgtcggggagcagatactattcagccccatagagcccaccctcttgccaccaaaatttatgtctatcccaatgaaaactacatttaccacatttcawctatccaaaaagttttaattcatttgagcataacccctaaatttaaaatctcatataaaatcaactataaacgtttcaaatttcattatctaaatcatcaaataattatgaataaaactctgggtatt

SEQ ID NO: 319963 - DNA, 562 bp, Homo sapiens
taatatacacacaagtgtgcgcactcacgtaacactcaggctcagctctctctctctctctctctctctctctctctctctatatatatatatatatatatatatatacataaaataggatatccaaacaacatattaggaacagttaaaaataattcctaaatagcaatggaattaaatgcaaataagttttytaaagtatttgacatagtttattatcttaaatatttcagcatattctttaagattttatgagaacccattgttattaacaattcattttaagcttctgctctgactctttctgttttactacaaattcctacttaagagtgcttgaatgaccttcattgaattgtttgtggttgttatgccgcagtttgtttattgttgaagtcccagtttccactatctggacacagagaaagaggtgagggaaagaaaatggcaattacatgttgttaaataactacataaatcattccttaaaaacatctatagtgatttgttgattgtttacagccctttaaattttgaacaccccccccccccacatacgtag

SEQ ID NO: 319964 - DNA, 637 bp, Homo sapiens
catgttgttaaataactacataaatcattccttaaaaacatctatagtgatttgttgattgtttacagccctttaaattttgaacacccccccccccmacatacgtaggattttacatttgattaaaaggaagaaaaattctcattcttgtttactgacttccattcacacaccccagagtaatgtggctggactccagagtataaatctgagctgaaactgttgtgtgtctaataatgacaaacattacgcaagcctgcttaattggcagaggctttagtttagtatatttaactgattataaataggaaatagattattttactaaaataacagactttttttctaaaaacactatttcttacttacatacggttgtcaaatagctttgaatggcctagattattcactctatatacatttattcattttagtcaacatcaaattcctattatggctatctatgctattctatgcatctctcatagcatgctatagtagtttgagaaactcaagccaaaaaaaaaaaaagtgactctctgtgcacaatccttgccaatgaggctttgataatcaggccaatcacttaattacaagtttgtatttctattcccactgagatgtgccaattaaaaga

SEQ ID NO: 319965 - DNA, 637 bp, Homo sapiens
catgttgttaaataactacataaatcattccttaaaaacatctatagtgatttgttgattgtttacagccctttaaattttgaacaccccccccccccacatacgtaggattttacatttgattaaaaggaagaaaaattctcattcttgtttactgacttccattcacacaccccagagtaatgtggctggactccagagtataaatctgagctgaaactgttgtgtgtctaataatgacaaacattacgcaagcctgcttaattggcagaggctttagtttagtatatttaactgattataaatagkaaatagattattttactaaaataacagactttttttctaaaaacactatttcttacttacatacggttgtcaaatagctttgaatggcctagattattcactctatatacatttattcattttagtcaacatcaaattcctattatggctatctatgctattctatgcatctctcatagcatgctatagtagtttgagaaactcaagccaaaaaaaaaaaaagtgactctctgtgcacaatccttgccaatgaggctttgataatcaggccaatcacttaattacaagtttgtatttctattcccactgagatgtgccaattaaaaga

SEQ ID NO: 319966 - DNA, 621 bp, Homo sapiens
ctgattgtttggaaacagtgtttatcattgcatcaaatatcttttaacaaatgccaagaaatgactccacttgaagagttcagttagttggacaaagcccagagtaatttctgttccataacaccttggaaagtttcagaggtttcatgtaagacccaactaacgtagtattgaaaatatattaatggatctaaaagttctgaatgtgaccaaacttatccatttcttgattatgtcagaggcgtccatgccagaatgactccatcttgaatagagacccagtaaagtgagacttgctgggggacattcccaggaagttaggtactcttggtgacaagatgtttatggttgagggaatgagttaatkatgctaactaactaaataagaccccttaggacaaaaagaattcttttttttgttttttgttttttttgttttttgtttttttgaggaggtgtctcgctgtgtcacccaggctggagtgcagtggcacgatctcagctcattacaaactctgcctcccaggttcacgccattctcctgcctcagcctcctgagtagctggaactacaggcacccgccaccacacctggctaattttttatatttttagtagagac

SEQ ID NO: 319967 - DNA, 527 bp, Homo sapiens
tggggttttgaggcattggtaccaaggttcccattcttgtggaatatgttgcttcctgcttctcaactactgcctggaataatgtgtggcttttgtctctacttggtctgaggtcagatagactttctgtctgactgggccccacctcagtactctagctggcattacatatatattctgattcttctcttccctktccaccacaggttcttagacttagacattctatctatcatacagcctttgctatatttctctctgaatcatcttggctctcatccatggaatgtccacaaactctcagctacctgctgtaatgcccctgatatgggacaagtaggaaactctgggtgtcttaaaaccaaagagaaccaaaagtaactcaataatgctaaataggtaccctctatctggctacagaactttgtaaagagtcttctgctctttacaggaatatcatgggttgattccagaccttggtgtactaccagttgtccctctgagagtcctaaaatcgaagagaaggc

SEQ ID NO: 319968 - DNA, 527 bp, Homo sapiens
tggggttttgaggcattggtaccaaggttcccattcttgtggaatatgttgcttcctgcttctcaactactgcctggaataatgtgtggcttttgtctctacttggtctgaggtcagatagactttctgtctgactgggccccacctcagtactctagctggcattacatatatattctgattcttctcttccctttccaccacaggttcttagacttagacattctatctatcatacagcctttgctatatytctctctgaatcatcttggctctcatccatggaatgtccacaaactctcagctacctgctgtaatgcccctgatatgggacaagtaggaaactctgggtgtcttaaaaccaaagagaaccaaaagtaactcaataatgctaaataggtaccctctatctggctacagaactttgtaaagagtcttctgctctttacaggaatatcatgggttgattccagaccttggtgtactaccagttgtccctctgagagtcctaaaatcgaagagaaggc

SEQ ID NO: 319969 - DNA, 527 bp, Homo sapiens
tggggttttgaggcattggtaccaaggttcccattcttgtggaatatgttgcttcctgcttctcaactactgcctggaataatgtgtggcttttgtctctacttggtctgaggtcagatagactttctgtctgactgggccccacctcagtactctagctggcattacatatatattctgattcttctcttccctttccaccacaggttcttagacttagacattctatctatcatacagcctttgctatatttctctctgaatcatcttggctctcatccatggaatgtccacaaactctcagctacctgctgtaatgcccctgatatgggacaagtaggaaactctgggtgtcttaaaaccaaagagaaccaaaagtaactcaataatrctaaataggtaccctctatctggctacagaactttgtaaagagtcttctgctctttacaggaatatcatgggttgattccagaccttggtgtactaccagttgtccctctgagagtcctaaaatcgaagagaaggc

SEQ ID NO: 319970 - DNA, 527 bp, Homo sapiens
tggggttttgaggcattggtaccaaggttcccattcttgtggaatatgttgcttcctgcttctcaactactgcctggaataatgtgtggcttttgtctctacttggtctgaggtcagatagactttctgtctgactgggccccacctcagtactctagctggcattacatatatattctgattcttctcttccctttccaccacaggttcttagacttagacattctatctatcatacagcctttgctatatttctctctgaatcatcttggctctcatccatggaatgtccacaaactctcagctacctgctgtaatgcccctgatatgggacaagtaggaaactctgggtgtcttaaaaccaaagagaaccaaaagtaactcaataatgctaaataggtaccctctrtctggctacagaactttgtaaagagtcttctgctctttacaggaatatcatgggttgattccagaccttggtgtactaccagttgtccctctgagagtcctaaaatcgaagagaaggc

SEQ ID NO: 319971 - DNA, 536 bp, Homo sapiens
ttccacgtaactaatgtggaagccaaggcttaaaatcattaatatatccaaagattatacaaatagtaaatagtgaagatgaaatttgaatgaagataccttgcactgcataacctatgttagtaggggtagataacctgaaataaggatgttggcaaaggaaaaagcctgactcagattgggaattttcagacaaawctcagactctaagctaccaaaaaccatcaagaagaacattccagacctaataactcttatcttgtatattttagaccagagctgagcttggaacgttgctttcatgtagattttgtctttctaatcttggccatactgtattacttcacatggcataaacaagttttaagttttctctctctgttcaaaattcacaaactgccaacttccacttttgaattcataatatataatgagccagagcagtccagataagagattggaggggcaaagaggaaggagaagatggggaaaatatataataacaatataatttcatgctgtttcatgctttcttg

SEQ ID NO: 319972 - DNA, 514 bp, Homo sapiens
atacaaatagacaaggagaggcttcacaattttgtaaaacctttaggggacagaaaaggagaaagatgtttcttcatctttggaatacagtagacatgaccctaaccccacaaattcagaaccctgggcaggtccctgagagccaaatgagacgcatatttcagagcagagatagctggcttgagtcttgggagaggctaaagctacaggacactaggtgatagatgaggcagcattgctggaagtgagcacaggaagcattttaagatggcagaagcaacagcagaacagtaatttggataaaccctaagacagattcctgtactaacttccctccttcacctcctagctctgtgtgcttgttcaagttacatgacccactgaacttgtttctttaactgaagaataagactatcaacaccaaacttaaataatttttatacatayttggctaggaaaacagagccacttaatgtgttctaagtatgaagggtttaatatgaaaaagtaaaga

SEQ ID NO: 319973 - DNA, 599 bp, Homo sapiens
  misc_feature (1)...(599): n = A,T,C or G
aacttctccagtgcagtggctcactcctgtcatcacagcactttgggaggttgggagcccgaggcaggcggatcacaaggtcaggagtttgaaaccagcctggccagcatggtgaaaccctgtctctactaaaaatacaaaaattagctgggcatggkggggcgtacctgtagtcccagctactcaggaggctgagacaggagaattgcttgaacccaggaggtggaggttgtggtgagcccanattgcgatactgcactctagcctgggcgacaaagcaagactctgtctcaaaaaaaaaaaacaaaaaaaaaaaaactgagaaactgctactggtagctaaacagtcattgtgaaaattaattacaagccatttcaatgtgctctgtctgctttctgctcatagaaatgcggaatctgtgtccttaaaaacagatacatctaaacttattttaaaacattatatcatttaaatgcattgtttcctttcctaatttggggtttctccaccaaacgaaattgcgtataagaaaatctataaatcaccttcatataagatatttaatttaaaataaaccttcaaaaaagtgagaaactga

SEQ ID NO: 319974 - DNA, 544 bp, Homo sapiens
aatcaaacgtgttcttacaaaagatcttacaaaagttcttacaaaagtgtgttaccaattcatgcaataccagtacctctgtctacagtcatatggagttcaattctcaatattgcaacctgactagcaacagaaaaagataaggcagcaattcttagattccaggtatgtggggtcaatgccaggaagaattttggttctaactattaagaaaataacattgctacctagaatttcagttaggattatatttaatctcatatctaggataaccatatgttctggtttgtctaggacagctggttgctgtcagttgtcctttagaccccaaatctgtggtcatgtttataaaactgaaataattatggagtaaagtaaatacatgctccattctgagtcaattcagaaatcagaaatgaaatcagacattttaacatgagacaatttactacaaaactgttttaaccatggtatcacaaagataataattgtaggtgacaamtgaaatccttaggactggataatcaaagggaacagactgaaa

SEQ ID NO: 319975 - DNA, 394 bp, Homo sapiens
atttctacaacctctgctgcctctaccgcaaatgaaaactccacctctgaatgccgagttagaactgcacaattgtaaggaagaaaagttgggcaggactggtggctcacaactgtaatcccagcactttgggaggatgaggcaggcagatcaccggaggccaggagtcaaggccagcctggccaacatggtaaaaccccgtctctactaaaaatacaaaaataagccgggcagagtggctcacgcctatcatctcagcaytctgggaagccgagacaggcggatcacctgaggtcaggagtctaagaccagcctggccaacatggtgaaaccctgtctctacaaaaaatgcaaaagttggctgggcacggtggctcacgcctgtaatcccaga

SEQ ID NO: 319976 - DNA, 577 bp, Homo sapiens
aaacttaactttcagtttttagactgggaaaaatgtgccaattctttccaaggacatcgtattaagtgaaacagaaaatacaggaaagcattctgctgctaggacaggttatggacagctctgtgttgtgtgtgctggagatgttctggagcttttatstttacagctctatagcaagtaactggagacatttttccttgttgataaatgagtgaagggccaggggaaggaagttagaacaaaaattactcttagaattcttctactttaagaacaataatacctaacacgtaggtcttgccatgtacttggttttacaaacatttaattctcagcacaaccttgttatttaggaatatccatatcctatttacagttgtggaaatctaggctctaagaggtgagcattcagcccaagatcatgtagttgataatttgtagctggaagtcaaatgcagacctttatgtttccaaaacctatgttcaaatttgttggcctctactctgtttgtttaaaatccagagtactgtttcatgtagatgcattctgtaagatttttgtgtgtgcctgtttttg

SEQ ID NO: 319977 - DNA, 608 bp, Homo sapiens
ctaacatgttacatcattgtatgtatgagaagataaaaaatgaagaattaatgactgatttatccttatgtggggaaattagaggtgatgtaaaaatgaaaggaaattacatcattctttcagacaaagcaggctggtccaggtattagccacatttaagctctcatcagaagatcaaatgaggaattgtttctttttaggctttctcagactgttggcagaactcatctccttgtgaccataggactgaggcytccattttattcctggctgtcatctggggcttgcaagcctctagaggctgaccacagtcctctgccacctagcctttttcatagtcaggaaagaaaaacaaaaaacaaaaaacagggctttcagccatacaattgcaagagaatgagcttggaagtggattatcccctagtggagtttccagtaagaatgcaatccaactgacgaattgattgtgggcttgtgaaatcgtgtagcagaggatccagttagtacatgcctgggatcctgacccacagaaattataagataataagcatgttttttaaacttctagagtttgtgcaatagaaaattaatacaaatttcagtatcat

SEQ ID NO: 319978 - DNA, 610 bp, Homo sapiens
ttttaatacataaatatgcatggacaaatgagacaaaatagtgcattcaaccaactactagtaattttatattgctagaatgtgatgttcaaagattagaaaacaacaagagatgaagaaaggagacaatttaaacagccagtgcagtgatccaggcaaaatgcaaagagaaccagaactaacttagtggcagagacctgagaagaaaaagaaaaatagcttcaaggaatagtcaggaaacaggaactttgggacttgttgattattcaaaagaaggggatattttaatcactttatagtttccaatgcctttttgatctttaaataaatatgagagctgatattattagaacaaaaaatatctttaggtatttatatatggatcattatatttatatgcttttccatttaaatgtcctattcattaaatttttcacttatcatctagatattttattgatgaatacacagagagtagttaaaattattaatacaaagtgaaatatttttaaaaataatracaataaaagattaaatttaatgagtccagatttatttaaatcccaaagtcagttaactggcatagaacaatatttttatgatatgcaaa

SEQ ID NO: 319979 - DNA, 494 bp, Homo sapiens
gtcttcttcttgctcctctcctgaattgtagccatcctttaaagtttagttcatatgtccctacctccaggaggcccttcccttgttgctcagcygaaggcaacctctctcaacctacatagcacagagactgtaaaagcctcacacatgcagtatttgctcctttttatgtgagtgtctgcattcaggttctgcaaactgcctacctggctatctatagtccttcacaagactaaccccaaagccagaggtcaagacacttaagttctgaccttctccctacttttccccttttccttttccaatttatttcaacttacacaatagtttagatataaaaataaacttttctgcattggcaataggattatggatgtgcgttgtatgtggcatgccaatcctggctcttttatcgtttcgtttcatgactttaaaccagtcattttgctcctctgatcccagtcttcctcatctacaaaaaaaaaaaaggagac

SEQ ID NO: 319980 - DNA, 494 bp, Homo sapiens
atatcatttccattttccagaagttagaatcaagaccctgtggacaaatccattttatccaaagtattttatgttttatggcaaacgccttcctgggagtcactacttggatgtggtccaaaggtcggaaataaagaaattgcctcctccctggggtggaagctctagttccagaaggytagctcccactgaagatggcagacaagggagtagagctgccttcaaacgcagaagcccaaactcctttggggatttctgaaaatgcagtgacaaagagcagacaaggagtctagcattttctagactccgtgcagagggagaaagctgaagcccccagggccaccccagtcagtaactgtataactcctccctaaccctgtgtttctatgagatccaaactggccagaatcttcacagctcaatccccgcttgagcactcagcagaggggctgactctcagctatcacatcagttaaaacccagccaagcagtgg

SEQ ID NO: 319981 - DNA, 494 bp, Homo sapiens
atatcatttccattttccagaagttagaatcaagaccctgtggacaaatccattttatccaaagtattttatgttttatggcaaacgccttcctgggagtcactacttggatgtggtccaaaggtcggaaataaagaaattgcctcctccctggggtggaagctctagttccagaaggctakctcccactgaagatggcagacaagggagtagagctgccttcaaacgcagaagcccaaactcctttggggatttctgaaaatgcagtgacaaagagcagacaaggagtctagcattttctagactccgtgcagagggagaaagctgaagcccccagggccaccccagtcagtaactgtataactcctccctaaccctgtgtttctatgagatccaaactggccagaatcttcacagctcaatccccgcttgagcactcagcagaggggctgactctcagctatcacatcagttaaaacccagccaagcagtgg

SEQ ID NO: 319982 - DNA, 494 bp, Homo sapiens
atatcatttccattttccagaagttagaatcaagaccctgtggacaaatccattttatccaaagtattttatgttttatggcaaacgccttcctgggagtcactacttggatgtggtccaaaggtcggaaataaagaaattgcctcctccctggggtggaagctctagttccagaaggctagctcccactgaagatggcagacaagggagtagagctgccttcaaacgcagaagcccaaactcctttggggatttctgaaaatgcagtgacaaagagcagacaaggagtctagcattttctagactccgtgcagagggagaaagctgaagcccccagggccaccccagtcagtaactgtataactcctccctaaccctgtgtttctatgagatccaaactggccagaatcttcacagctcaatccccrcttgagcactcagcagaggggctgactctcagctatcacatcagttaaaacccagccaagcagtgg

SEQ ID NO: 319983 - DNA, 582 bp, Homo sapiens
gggacattatcctataaaactacattatcattattatagctaagaacatttcaggtggcaaaacttcataatgtcacctgaaacctatccaatctatattgatatttctgaattgtycccaaaatgtctgtttttttcctgatactcaacatccagttaagcttgccatattgcatttggttgccatgtctctggggacccttttaatatacaataattttcacactttatcttttctttaataacactgactttttgaaacttcagtccagttgatatcctgatttttggatttggctaaatgcttcctcatgtagtcacttaacctatttctccatcctctatttcctataaacctctattttcctataaaatagacctgaagtagcactaatagatataacatgagccacatgtataatattaaattatctaggagttacataaaaaagtaaaaatgaaaagaatatgtatgtgtgtgtgtgtagtaagtaagcgttctttgattgctattttgctacatgtttttgtcagaaatggacgtttaattttgtcaaaagccttttcagcatctgtgaaagt

SEQ ID NO: 319984 - DNA, 672 bp, Homo sapiens
ttgactgaaacatcagctgtatctcttaatggctgtgggatcttgggctagttcctcatgaatcattttcctcatctgtacttggtggaggaaactgaagtttattattttcccaagggcaacaaaaatagtcactggaggaactatgccatggattcctgttgatttaaagaactataagaaacatttcactgcagtgtcacaacagtgaatcagctaagaagcctggcctcctctgctgttctgtgtctacattcaggcatcaagaagcaaccatatggtggtgttaatacaacttatctctgtgaattataatctctaatatgtgtgcgtgcatctccyaaggatattgaagtttgatccctaggggaaaaattatacatgactttattcttgagaaataaacaattcattctaatgcacccctggttgcagcacgtgtaggagtgtgaggttcacactccaaagtctttattcattgacagagttaaaacagaaggaaaaataacataaaaatcatggcaaatgttatagattcctttaaagtactatattaatatattgggattaagaatgaccacaccaatcactttttttttctatgcctgggacacgcacaaggtgaaatagttgcacacctcacctagggatgacttggtattgtttggaaga

SEQ ID NO: 319985 - DNA, 550 bp, Homo sapiens
aaactgaagtttattattttcccaagggcaacaaaaatagtcactggaggaactatgccatggattcctgttgatttaaagaactataagaaacatttcactgcagtgtcacaacagtgaatcagctaagaagcctggcctcctctgctgttctgtgtctacattcaggcatcaagaagcaaccatatggtggtgttaatacaacttatctctgtgaattataatctctaatatgtgtgcgtgcatctcctaaggatattgaagtttgatccctaggggaaaaattatacatgactttattcttgagaaataaacaattcattctaatgcacccctggttgcagcaygtgtaggagtgtgaggttcacactccaaagtctttattcattgacagagttaaaacagaaggaaaaataacataaaaatcatggcaaatgttatagattcctttaaagtactatattaatatattgggattaagaatgaccacaccaatcactttttttttctatgcctgggacacgcacaaggtgaaatagttgcacacctc

SEQ ID NO: 319986 - DNA, 543 bp, Homo sapiens
ctatgccatggattcctgttgatttaaagaactataagaaacatttcactgcagtgtcacaacagtgaatcagctaagaagcctggcctcctctgctgttctgtgtctacattcaggcatcaagaagcaaccatatggtggtgttaatacaacttatctctgtgaattataatctctaatatgtgtgcgtgcatctcctaaggatattgaagtttgatccctaggggaaaaattatacatgactttattcttgagaaataaacaattcattctaatgcacccctggttgcagcacgtgtaggagtgtgaggttcacactccaaagtctttattcattgacagagttaaaacagaaggaaaaataacataaaaatcatggcaaatgttatagattcctttaaagtactatattaatatattgggattaagaatgaccacaccaatcactttttttttcyatgcctgggacacgcacaaggtgaaatagttgcacacctcacctagggatgacttggtattgtttggaagaaaagaacaaacaaa

SEQ ID NO: 319987 - DNA, 586 bp, Homo sapiens
gagtcatgcagcatgttttgcaattctacttcttagattatagcttaactctcttcctcattgttttgttctgtaagtgactaggagaccagagaccagacctctaccttccaatcacaaatctttgttagagattaactgccttctttattgtcctgacctatctcctgacctaactcagactagatggtgctctgaacagggaccccatgacagttacatctgcagtaactgcaatggaatgttaaatgtacctttctcaaaagaggaggaccatctgaactaatcaggtcaytgtgactacgtattaagccttacatagaaagatgctgaaattctgctaaaattccccaggctttgtctacataagcaatctcacacgtctacgctttgtaacactgacttccattgttaggaatctgtgcttcttgggtgggcttgtcctcaacctttgcacttaaagtctctttaatctagattctgacccttttcattattttaggttggcatagagtacctgagaggccctgtaggcggctagggctgcactgtcttcccagtgctttcatctatttcctctattgaa

SEQ ID NO: 319988 - DNA, 517 bp, Homo sapiens
cttaactctcttcctcattgttttgttctgtaagtgactaggagaccagagaccagacctctaccttccaatcacaaatctttgttagagattaactgccttctttattgtcctgacctatctcctgacctaactcagactagatggtgctctgaacagggaccccatgacagttacatctgcagtaactgcaatggaatgttaaatgtacctttctcaaaagaggaggaccatctgaactaatcaggtcattgtgactaygtattaagccttacatagaaagatgctgaaattctgctaaaattccccaggctttgtctacataagcaatctcacacgtctacgctttgtaacactgacttccattgttaggaatctgtgcttcttgggtgggcttgtcctcaacctttgcacttaaagtctctttaatctagattctgacccttttcattattttaggttggcatagagtacctgagaggccctgtaggcggctagggctgcactgtcttcccag

SEQ ID NO: 319989 - DNA, 576 bp, Homo sapiens
ggtgttctgggcacacctccacacctgtaggaaaaggacaatttcttctctcagcctcagtgagttcttcccctaagcctttctgtgctaaagatggacagcatcacctctcagactgaagccaagcatcaggcaccaggagaggcactctgaatatttctacatctgcctactttgtgacatggagactcaagggtaggaagtaattaattgtctttaaagggatttcctaaaagcttctcctgaaccctggctataggaattagcaaattaaatagaaaggaactacagaaagtagaaatcattattggctatattgaagatgatcctaattactgacttgctgaagactatgcatctgtggcatattctttgtttcgaatcaccccacagattccacactttcgaataactatgtagatgctcaacagatggcmaaaagaattctgaagggatgaagtacagaaagcacctactccaatcacagttggtgagcagggagactctacagttcacgcattccatagcttattgcagtttcattgtcgggggccattaaagcaggagagcagagac

SEQ ID NO: 319990 - DNA, 597 bp, Homo sapiens
taattgacagtacactctggaaaatgcaaccaaattatctggatcagtaatatcatagagctgcatgctagagactcccaaagtcattattttgaatgactttaaaggtcaggggatttccgttatggcttcaacattcacagggaagagaccaacacagaggcatttaaaggaatagggtgggtatgactcccaggtaatactgtagaccactctgaagcagmtgattctccggcttcctgcactggtatcagaggcaggcagaagcatgggggcaacccaattcaggccgctttgctattagctctgaaaaaacaacatggttttcatggcttcatgcctcttctttggctttcatgtagacttgctactacctttcagctttggttaagaagcagtgacacaaactattatgtccagaatatccaaaatatcactgccatcactactccagtggagtaacatctctgtctcatgaactaatggtctaaagagctctttttaaaaatggcccctccatgagacactttatacaaacaaaattcgaaaacttgctatactcaaagggtggagaccactgaacttgcctgtgcccaa

SEQ ID NO: 319991 - DNA, 597 bp, Homo sapiens
taattgacagtacactctggaaaatgcaaccaaattatctggatcagtaatatcatagagctgcatgctagagactcccaaagtcattattttgaatgactttaaaggtcaggggatttccgttatggcttcaacattcacagggaagagaccaacacagaggcatttaaaggaatagggtgggtatgactcccaggtaatactgtagaccactctgaagcagaygattctccggcttcctgcactggtatcagaggcaggcagaagcatgggggcaacccaattcaggccgctttgctattagctctgaaaaaacaacatggttttcatggcttcatgcctcttctttggctttcatgtagacttgctactacctttcagctttggttaagaagcagtgacacaaactattatgtccagaatatccaaaatatcactgccatcactactccagtggagtaacatctctgtctcatgaactaatggtctaaagagctctttttaaaaatggcccctccatgagacactttatacaaacaaaattcgaaaacttgctatactcaaagggtggagaccactgaacttgcctgtgcccaa

SEQ ID NO: 319992 - DNA, 575 bp, Homo sapiens
acctggaaatcacattttaccagctatctgagtgtctcttagcctaatcaggttgacatattaaccatcataattatctgttaaaactaaattgaaataatagttaaaaaaaggggacagatacaggtaactcaaggggatccccccagtagtatatttttaagactcttcctaattttatttggtgttcttggaaatttgcaatttttatcatatattaccgaagggagagataaaaatacttttatttctgcacatgaaaactttaacttctgcacataagggtcatctaaaagtacttgattcacatgtgataggcttagaaaaaaaacacatatccttcagctgaactgtaacattaaatattcctatgattttgaatagagcatctatttgcctcatttctctcagttccagtcagaatgcatgctgcataatgcatcaaagttatatttatttaaakcctattagtcacacaagctctttgtggagatgctggaagaatttttttgaaaattgggaaattgattttatggtctagttttcatcccctctgtatatccctataacaatgg

SEQ ID NO: 319993 - DNA, 537 bp, Homo sapiens
tgcataatgcatcaaagttatatttatttaaatcctattagtcacacaagctctttgtggagatgctggaagaatttttttgaaaattgggaaattgattttatggtctagttttcatcccctctgtatatccctataacaatgggatagcctaagatcattttcaacaattttctctaaaatcaacaccctgaatgtactggttctaagagcaaagggcatatggttacattttacataaaaatctgtaaggaaagagaatttgagcagctcccaactagagaccaggagtcctcaaggctcctgccgttgaatctaccatatatattttagagggaaaatgactgaggactgkgaaatagcagcttaataacctttgaaactgctaaacataaatagtaacaagaagaagggtcacataaagcaggttatacaaataatcacctaagtaatctccccttccctcccaatgtagaggagaagagggggccccaatgtttcagatgagagatcatcacagaacattatcagtggggg

SEQ ID NO: 319994 - DNA, 569 bp, Homo sapiens
ttcctgaaaatatgatttcagggagattcaacaacccaaaaggtttcccaatatgtttgattttttaacttccttagacatttctccatagacctgcagagaaaataaatttgcatgaattttggataaagggaacacatacaatgaattatagaacctagttaatattagttattgcaaactaatagttatattttatatggaaaatttatataacatgtctgtttcatgtaatataactgtgaaacaaacaaacaggtctgagcaagacagtaaatgcccagagttgtgacaacggatggtttctgaaagggattaaatccaattccacctatggtattagacaaggaagataatggaaggggttaactacagtcacaaagtcttattctgttcttacttcctcaattctagaaacagatgtaaacatcatttwtgatccattcttaggcgagatttacagagtatcaaaaaacaaaggcttcaaagtcacggccaactgactcaagaatgtattaagtttctccacaagaagctcaaaggctgaaaataaaaacttgaaaaagaga

SEQ ID NO: 319995 - DNA, 574 bp, Homo sapiens
attaaccagtatttctcttacggagcaaactgaactggttagatttcctcatctatttttactctggatgcagaagctaaagagcaggggaagagttcagagtcaaaaaccaacctgggtaattgagtgagtaatcctggagtaactgaggttgttctgtaatctgtattttttttattatactttaagttttagggtacatgtgcacaatgtacaggttagttacatatgtatacatgtgccatgctggtgcactgcacccactaactcgtcatctagcattaggtatataaaaaawctcttcctatacccccagggtatatttcttattaaaataacaactgcatgaatttatataacatctttcagtttgtaaagaatttctatgatcattatcttcatttttattctcacaacagctctatgaggtatatattactctagggtcacaagtgtgaaaaccaaggctccaagactctcccagcctaaatgtagacctcctaagccagccctaccatcatcttccttagtgtaataaatatagaagtaaatatatcaataagcaagtatctgg

SEQ ID NO: 319996 - DNA, 531 bp, Homo sapiens
gactaccaactcatcatcaacagctgtgtttgcacttgccaatccctttaagaggtattgccaggcctctccctttcccagatctcaattaaatgtaagttagatctggctgaaatttataacaggtaaataaatataatttacatatataaaatcaatataaatatacaaaacataaagagacaaacatataagtcatccctccatatggagggggatttgttccagggcccccgtggatacaaaattctrcagatattcaagttcctgatataaaatggcatggtatttgcatataacctacacacatccccctttatgctttaaatcatctctagatcatttataatatctcatacaatgtaaatgctgtgtaaatatttgtcatgctatatattttaaaaatttatatatatttttattgttgtattgttatgttttaccattttttccagaatatctttgatccacatttggttgaatctgtgttacagaatctggggatatggagaaccaaatctatatagtttt

SEQ ID NO: 319997 - DNA, 569 bp, Homo sapiens
gtcattcagttgcatgataatcatgatgctccaaaggaggctctgtttagtactgtgactgtcactaaatattttatagatgaataataatttaagtaatmatgacgatattagcttttacttctatgaacagagtgattaaatgcaaagcctacccggtgatagaagttggctcttaatccacaaagtccattaattatctgtgaatttaggcaataccaagctctttctatattacattgattaatcaatactaaatcacatcactgcatttcaatgttggataacctctaatatcctcttttaagatggagattcttccaaaaagttaaatttcatccatacttttgtgataatgactaaccagaaaaattcttttaaaaattctggttaaatcaagcctttccaaacggaagagttgttaacccaagctgggcaggatgcagtgtgaacatcagtcaatcacaatcacagaacagctaccatactaggtggcaggtactatggtaagatgttacattcctcaaagggagatattcttacccttatgttacagttaaggaaacaca

SEQ ID NO: 319998 - DNA, 589 bp, Homo sapiens
gtaattacattcaaaaggcttgctttatagaggctacggaacagatagcgtgctcaatggtggtttcagaattatcttttgtctcaagttggtggctaatttcaaggaccaagaaacttacttgcttgttgcctggagctggacgacaaagaaaaatggacttaatgctcaggaatactttgtaagtccataaatgcaaaagcctacttgaaggacaccttggaattattgattgctgttgttaccaagagaagaatggaccattctattaggtcttcttttggcattgtgaaggtaatgcagtggaacaccagcctactcccaagtcacaagcatgtctgccccagaggctaactaaagtctcasgaaaaagcccaatgctccctccctgtcatatagacaactatgagttcatactctcctctcaattcactgtttcaatcttctcattgacaaggatcaaacatttaggattttattcaggtctctttaaacacttaaattcaggatatgcataaacactcatggatatctttaggatttacttaaccttggttcttatgaatagttacagggtatcaggagaatg

SEQ ID NO: 319999 - DNA, 325 bp, Homo sapiens
gagcaatttgtaaagggcaggagttcttcccctcaggctttcactgccccactactgagatgctggctgagcccagacaaagaggggaatatcaattcaggccaggaattcagcagtrgttccaatgccactgatttggaagccactgatttgcttctgagtaatacccaagggtacatggaagtggcatggccaattcagtcatgctagctgctaggcaaatcaatttgcctacaggacccctattatgagcattcaccctaggagcttccatatgcacaaatggacattagtaaagcacatacacccagcctcctggagacta

SEQ ID NO: 320000 - DNA, 617 bp, Homo sapiens
tctcactaaaagctgttgatttttaatacttcatgagatgccagtaaatacaattcaggggtgttgcttctcctgaatagctgggaaccccagctattcctagggtaattcattcattctgcctgtccattggttttttcatttgttccttcagtgtgatgtaggaacaccacacaggcactccctcccgcctggatgcatacaccagcaaagctatcataaggaaaagtaacaaatgaaatgtcccatgagctatttgagaaaatgttgcacatttaaaggtgctactgtaattagtaacggtgatctgccacagagagtagaatcttggtgctgcttctcattgtggaggtggagagggagcagcacagtgaaatctctctgctaatacctgctaataaagtcttacttttctcattcctctctctccttagcttgccatgaagcacaaatgttgagaaactgcctatcctggtgactcttcttaagagaaactgaagagtttgttcagcagtttttacaagaattcrggacctccgcttgcttctttttttccaatatttggacacttagagtggtttttgttttttcttttcagatgttaatgtgaaagaaag

SEQ ID NO: 320001 - DNA, 582 bp, Homo sapiens
gacaatattctcactccctgttctttatcctctctaaacatctctggcatctagctttgcacaaaaactaatacaaaatcagcacaatcacattgcaaaaccttttggcagcacctgygcaagctgattgtatgcacatactatgtcctgtgatccagcaattacaccacttggcaaatacctaacaaaaaagggtatatatgcatgcaaaacaaatgtgtatagatgctcataccagcacaattcagaacagtagctagaatagtaactggagtcaactcatcataagaatcgattaaaaattgtggtacatttattaatatagcaatgagaataaattgcaactaacaacatgaatttccctcacaaaataatgttgagcaaaagaaacttgacacagaagagtatatattcatgtatgtgtatgtgtgtatattataaaaataggcaaaattcatctacggcatagaagttaggatagcagggatggggctgtggcgaatgacaggaaggagacacaacgaggtcttctgggtgctggaatgatctgtttcttgatctgagttctggttaggtagttgt

SEQ ID NO: 320002 - DNA, 582 bp, Homo sapiens
gacaatattctcactccctgttctttatcctctctaaacatctctggcatctagctttgcacaaaaactaatacaaaatcagcacaatcacattgcaaaaccttttggcagcacctgtgcaagctgattgtatgcacatactatgtcctgtgatccagcaattacaccacttggcaaatacctaacaaaaaagggtatatatgcatgcaaaacaaatgtgtatagatgctcataccagcacaattcagaacagtagctagaatagtaactggagtcaactcatcataagaatcgattaaaaattgtggtacatttattaatatagcaatgagaataaattgcaactaacaacatgaatttccctcacaaaataatgttgagcaaaagaaacttgacacagaagagtatatattcatgtatgtgtatgtgtgtatattataaaaataggcaaaattcatctacggcrtagaagttaggatagcagggatggggctgtggcgaatgacaggaaggagacacaacgaggtcttctgggtgctggaatgatctgtttcttgatctgagttctggttaggtagttgt

SEQ ID NO: 320003 - DNA, 610 bp, Homo sapiens
acacatagtgtatagtgatcagattggggcaaatagcatatctatcatctcaaatacctattatttctctgtgttgggaacattcctctagctatttaagactatatattattattaagtatagttatgctacagtggtagagaatactggaacttattctatctatctagctgtaactttatatgtaattttatatcctttaacacatctctccctgtcsctcccttaccccatccttcccaggctccactatcctctgtttaactttttgtttctataagatctactttttttagcttccacataagaatgagaacatgtagtgtttaaatttctgtttctggcttatttcacttaacataatgccctccagttccatccatgttgcctcaaatgaaaggatttctttctttttttatggctgaatcatatcccattgtgtatacagactacatttaaaaaggcattcatctgttgttggacatctaaactgactttatatcttggctattgtcaatagagctgcaataaacatgaggatacagatgtctcttcaatatacagatttcctttttttattagtccattttcactctgctgaaaaagaca

SEQ ID NO: 320004 - DNA, 610 bp, Homo sapiens
acacatagtgtatagtgatcagattggggcaaatagcatatctatcatctcaaatacctattatttctctgtgttgggaacattcctctagctatttaagactatatattattattaagtatagttatgctacagtggtagagaatactggaacttattctatctatctagctgtaactttatatgtaattttatatcctttaacacatctctccctgtccctcccttaccccatccttcccaggctccactatcctctgtttaactttttgtttctataagatctactttttttagcttccacataagaatgagaacatgtagtgtttaaatttctgtttctggcttatttcacttaacataatgccctccagttccatccatgttgcctcaaatgaaaggatttctttctttttttatggctgaatcatatcccattgtgtatacagactacatttaaaaaggcattcatctgttgttggacatctaaactgactttatatcttggctattgtcaatagagctgcaataaacatgaggatacagatgtctcttcaatatacagatttccttttttwattagtccattttcactctgctgaaaaagaca

SEQ ID NO: 320005 - DNA, 498 bp, Homo sapiens
gtggatctaccattctggggtctggaggatagtgaccctcttctcacagctcaactaggcgatgccccagtagggactctgtgtgagggctctaaccccacatttcccttctgcacagccctagcagaggttctttatgagatccctgccctagcagtaatcttctgcctgggcatccaggcgtttgcatacatctgaaatctagggagaggttcccaaaccccagttcttgacttctgtgcacttgtaagctcaacaccacctggaagctgccaaggcttggggcttgaatcctctgaagctatggcctgggctctatattggcccctttcagccatggctggaaaaggtgggatgcagggcaccaagtcyctaggctgcacacagcatggggacctggggcccagcctatgaacccactttttcctcctaggtctccaggcatgcgatgggaggggctgccatgaagaactctgacctgcctgggagatgttttcc

SEQ ID NO: 320006 - DNA, 562 bp, Homo sapiens
ggacttattatgagtaacaaaatatactcctaccatttaggaaatcccaagggttttagaagctgtgtgccaggaatcagggacaaagacaaaatatattttttattatgccacagagtgacagtgaagcagcctgcaatcctgaagttcaggtttcccattaagaatgagattagaaatatcaaacatttgatgaatcagattagctccagtacttcagggaaacatctggaagtgaagtgtgtgatgggtagttttcargaatacttgagctttaaaaatgttaacccatgttcagtccctataatatacttcaacatttgcaggtctgagttgtaacttcatcaatgtatgtaaccagaatgaaaaatataaacgtgattaaaaagaaagatcatagacattctgtaggatagaaaaaagtaagtgtatgacagttgtttggcacaggcaggggagagaaaaaaacctaggtgtaggagaagtgagcatctgaactattccagagatgttctccattgtggagaagggatgactcatcagacctttgtgtgtttggatg

SEQ ID NO: 320007 - DNA, 562 bp, Homo sapiens
ggacttattatgagtaacaaaatatactcctaccatttaggaaatcccaagggttttagaagctgtgtgccaggaatcagggacaaagacaaaatatattttttattatgccacagagtgacagtgaagcagcctgcaatcctgaagttcaggtttcccattaagaatgagattagaaatatcaaacatttgatgaatcagattagctccagtacttcagggaaacatctggaagtgaagtgtgtgatgggtagttttcaagaatacttgagctttaaaaatgttaacccatgttcagtccctataatatacttcaacatttgcaggtctgagttgtaacttcatcaatgtatgtaaccagaatgaaaaatataaacgtgattaaaaagaaagatcatagacattctgtrggatagaaaaaagtaagtgtatgacagttgtttggcacaggcaggggagagaaaaaaacctaggtgtaggagaagtgagcatctgaactattccagagatgttctccattgtggagaagggatgactcatcagacctttgtgtgtttggatg

SEQ ID NO: 320008 - DNA, 590 bp, Homo sapiens
tgattatttttaagaaggtgctcccttcaaattaagtcaggtgtttatgagacagggagcttccagtcacaggagaagtttagatgaaggttggaactctttgtgggactgtttctgggagactcaaacatcaaatagggcatgggctccatggttgtcattagtttggttaccaatgttctgcttcccccagcatgccctcagtaggatcatactttccacctctttgaagctaaacactgatgtgtgattgatttgggccaaaggaacatgaatagcggtgatgtgtgtcacttccaagcagatgctatgttagtcatcatggggkcaatgtcaaggtgatgcttctgttagtctgagatcctgagtgaacccagggaacagagctgacctgatcagacgtgtagtgtgaatgagacatgagttttgttgtgttaagcccctgagatttagggctcatttgtttctgaagcataccctatcttgactggaactaccactatggtcctatccaagcccgtaattctgtacatctgtgaggggaaatagagggattaggaggaatcattgtctgggaaaggtagagtggg

SEQ ID NO: 320009 - DNA, 576 bp, Homo sapiens
tgcatgcttattggaagttagggcttcaacataagaatttgagaaggacacaaataygcaatccataacatcctgggacaggtttttgtctccacaaatatcagctgaattctctttagtggcattttctctggcctttactggatgtgtaagctcgagttctcaaattaattaatcattgggaaatagtagaaattactcaaaaatcacattagccagaacagtgaaatgtattttagagaatagttgatttcaggaaaaagaaacaaaatcaaccaatttaaacaacaacaaccaaaaaaaaaaaaagatggaagattgttggaaagatagaatgatagccacagaactcatgggctggaaatgttgccagggctctcaaaggatccaaagcagaacccactggcaaggcgagagctgccatctatgttcctttgggccacatagctacttacctctgcctgcttctgggtaaaggctcctttcacttttgtctttgctaccacccttttctgttccacttgaactcaggttaagtatggcccctctagccctagctttaaaagttcccagcag

SEQ ID NO: 320010 - DNA, 576 bp, Homo sapiens
tgcatgcttattggaagttagggcttcaacataagaatttgagaaggacacaaatacgcaatccataacatcctgggacaggtttttgtytccacaaatatcagctgaattctctttagtggcattttctctggcctttactggatgtgtaagctcgagttctcaaattaattaatcattgggaaatagtagaaattactcaaaaatcacattagccagaacagtgaaatgtattttagagaatagttgatttcaggaaaaagaaacaaaatcaaccaatttaaacaacaacaaccaaaaaaaaaaaaagatggaagattgttggaaagatagaatgatagccacagaactcatgggctggaaatgttgccagggctctcaaaggatccaaagcagaacccactggcaaggcgagagctgccatctatgttcctttgggccacatagctacttacctctgcctgcttctgggtaaaggctcctttcacttttgtctttgctaccacccttttctgttccacttgaactcaggttaagtatggcccctctagccctagctttaaaagttcccagcag

SEQ ID NO: 320011 - DNA, 619 bp, Homo sapiens
aacccactggcaaggcgagagctgccatctatgttcctttgggccacatagctacttacctctgcctgcttctgggtaaaggctcctttcacttttgtctttgctaccacccttttctgttccacttgaactcaggttaagtatggcccctctagccctagctttaaaagttcccagcagagtaataatggcctttaagtatcaattcaaattcttggaaagcagaatctaactgatgttacgtgagtcagatggccacgctttatgctaatttgatcagttatcactgtataaggggttasggatatataggtatgcaggggcctactgtcaggaggtagggagggacacaggacttagagaagggatatttgttggcaatttccaaaaccaaaaatcaattacaggtacatttcatattaccctcctggctcaaaggggaaatgggaataggaaaaaaaaaaaaaagcaggatatggtggtgcatgcctctagtcttagctactcaggaaaccaaatcaggaggatctttttagctcaggagttaaagtccaacctgggcaacatagtgagactttctctctgaaaataaaaatgaatgaatgaatgaataaataaa

SEQ ID NO: 320012 - DNA, 598 bp, Homo sapiens
accagtgttctattggacgtgaacagcagaaaaaatacaaacaagtacgcgagtgaaagaaatgctcacctcagtagtggtcagggaaatgaaaataaagcgtccctcgcccccttttagatgtgttggcgtttaagtcaagggcggttcacctacagcgcgcttcgagccaagagatgcttctcgcgggccgctgtgtaatagtggcaaatcggaaacaccagccttctgtctccttagcaaccaaatgatgggaggcgcccgtgtgcaattacgtcctagacgratagaaatggaaagaatatcagattaaaacaagtgtggtagtctgcatctttgaatgaattaccatgttattttttgcttttgtctaagtctcccgttttaaaacatgtatctcaaaacaggcatttttggtaactagaagaggtaaatgaattgagggagaatgaagacttttccgaaatttggccaaaacttgaatttttatttcatctgggcaagagcacattgagggtctcactcgttctgtcgcccaggctggagtgcagggccgcgaccagagctcacagccttgaactcctgggcgcccgggacc

SEQ ID NO: 320013 - DNA, 598 bp, Homo sapiens
accagtgttctattggacgtgaacagcagaaaaaatacaaacaagtacgcgagtgaaagaaatgctcacctcagtagtggtcagggaaatgaaaataaagcgtccctcgcccccttttagatgtgttggcgtttaagtcaagggcggttcacctacagcgcgcttcgagccaagagatgcttctcgcgggccgctgtgtaatagtggcaaatcggaaacaccagccttctgtctccttagcaaccaaatgatgggaggcgcccgtgtgcaattacgtcctagacggatagaaatggaaagaatatcagattaaaacaagtgtggtaktctgcatctttgaatgaattaccatgttattttttgcttttgtctaagtctcccgttttaaaacatgtatctcaaaacaggcatttttggtaactagaagaggtaaatgaattgagggagaatgaagacttttccgaaatttggccaaaacttgaatttttatttcatctgggcaagagcacattgagggtctcactcgttctgtcgcccaggctggagtgcagggccgcgaccagagctcacagccttgaactcctgggcgcccgggacc

SEQ ID NO: 320014 - DNA, 512 bp, Homo sapiens
caaaaacatgacagaagctcctctcaagggcggccatggtagtctcaacatccacttgagtgacatctctgtgtcccttccaggcagcaagctattgtcatagtcctttaacaggaaaccctttaatagtccagccactcagtagccattctcctgaacagtcatgtaggctgttagccacagtccatgaatcagtgaatatctaacaagatatggtggtggcttgcatggccatcacccctgcctgtggtccagcccgttggacagaacatccatgtgcagtctcaattgaaagacagccattcactggctggacagtggccgcagcccagtggaccctgtctgctcgttgttttgcagagctgtcagtaarccatgccatatcataggcagtccagtctctgaatctgaatcttgggtcccaggtagccccaggaggagctgaagcacccctgtcagctcacatggtaccttctgtcaagctagccattattcatgaagcccaccggccc

SEQ ID NO: 320015 - DNA, 501 bp, Homo sapiens
  misc_feature (1)...(501): n = A,T,C or G
gataggaactactatcctcattttacaggtgaaaattgaggtacagaaaggtatagcttgtccaagatcacatggctaagaaatggccaagtcaggatttgaacctaagttcttgaccaattacagtacacacatggtaactgataatgtgtggatcagtttcccctactaggttgtaargagttttctgccagggctctgtcttactcctctgagcatagccaggtcttatcttgaatgaatgaatgaataccacatactagcatgtggtaacaaattcaaactacagaaaataactgaaatagaatactcgatgcccccgatttaagtttctatctgcataacaaacacagtcaatagcttcttgtgatttctttgagatgttttaatgcacacaccagcatatatngtattttccttaaaggatttacccaaacaggatcacacttaaacacattctgctcctagctactacatacaggtataaagataattttcaac

SEQ ID NO: 320016 - DNA, 501 bp, Homo sapiens
  misc_feature (1)...(501): n = A,T,C or G
gataggaactactatcctcattttacaggtgaaaattgaggtacagaaaggtatagcttgtccaagatcacatggctaagaaatggccaagtcaggatttgaacctaagttcttgaccaattacagtacacacatggtaactgataatgtgtggatcagtttcccctactaggttgtaaggagttttctgccagggctctgtcttactcctctgagcatagccaggtcttatcttgaatgaatgaatgaataccacatactagcatgtggtaacaaattcaaactacagaaaataactgaaatagaatactcgatgcccccgatttaagtttctatctgcataacaaacacagtcaatagcttcttgtgatttctttgagatgttttaatgcacacaccagcatatatngtattttccttaaaggatttacycaaacaggatcacacttaaacacattctgctcctagctactacatacaggtataaagataattttcaac

SEQ ID NO: 320017 - DNA, 573 bp, Homo sapiens
tttatctcttcactgaagtttttattcactaagttcattgtatgtaccttaaatcagtggaccctaagaagtctcccaggctcctttgtcttcacaaagctgtaatgggctcagacagggattttagaactggatcagacagaagagatattttaacactttgagatgtttagcatagaaatgggccaaactatagcagaaggtttgtgtggcttaccagtccataccagggtatgagcctagaggagagcctagaactagtgaagaattccatacctgtggtaacaagctgtcagaccacaaaatggcacagtargaaaaattcaaatcaaggtgagcatgtcccccagaaacaatcatagaacagagcctccacatgctcagagtaaaatgggatgtactaacctagtcctctcaaagaaagaaacacctatttcaacaacctcaatgcattttgtttcctttccaaatttaataggcattttaaaatgttcagttctcatcctgcttaatttttctttaaatgcatttttagaaaataacctctagctacagcaaaactatagtggcaaa

SEQ ID NO: 320018 - DNA, 472 bp, Homo sapiens
gacaacatttatatttatctattgggctgtctgtcctgttctattaatctatttgtctattctttcaccaataccacactgttttgattactagagctttacagtaagctttaaagtcagtgtcaatcctctaactttgtccttctaatattgcattggctatcctgggtcttttgaatttgaaaacatctgttatttacatgaacyattttatactcaaaaacattaattcttctattattccatgttttatttgttctttcatttcttcatactatactagctatcaagttttatacttcttatgccttgagacttcccagaatcttctatgtaaacaatcaacgagaagataacaaacgaaaagcctccctcaagccaacaacatcttttagttattattgtttcatattttgttctttaatagtcaaggtccccaacaaagtagtttacacagctttttttccaccaa

SEQ ID NO: 320019 - DNA, 472 bp, Homo sapiens
gacaacatttatatttatctattgggctgtctgtcctgttctattaatctatttgtctattctttcaccaataccacactgttttgattactagagctttacagtaagctttaaagtcagtgtcaatcctctaactttgtccttctaatattgcattggctatcctgggtcttttgaatttgaaaacatctgttatttacatgaaccattttatactcaaaaacattaattcttctattattccatgttttatttgttctttcatttcttcatactatactagctatcaagttttatacttcttatgccttgagacttcccagaatcttctatgtaaacaatcaacgagargataacaaacgaaaagcctccctcaagccaacaacatcttttagttattattgtttcatattttgttctttaatagtcaaggtccccaacaaagtagtttacacagctttttttccaccaa

SEQ ID NO: 320020 - DNA, 614 bp, Homo sapiens
agacatgctatttgaaagtatacagtcagagtagaacaaagaataaaaaacaattaagcatgcctataggatctagaaaatagcctcaaaatggcaaatctaagagttagtgagattaaagagaaggtagagaaagagataggagtagcaagcttattcaaaggcatacaaaagaacttctcaaacctaaagaaatatatcaatatccaagtatggaaagattgtaggacaccagtcagatttaacccaaagaatactacctcaaggcattaaataatcaaactttcaaagacccaagatttaaaaaaatcctaaaagcattaagataaaagaaacaaataacatacaatggagctccaatatgtatggcagcagatgtttcagtgaaaaccttatgggacaagagagagtgacatgacatatttaaagtggtgaagacaaaaactttaccctagactagtttatctgctgatattatcctttagacatgaagactttattaataaaggcttttccagacaaacaaaagctaaggattttgtcaacaccagacctgtctgacagaaaataccaaagagaatgctwcattcagtaaggaaagtatgtgaataaac

SEQ ID NO: 320021 - DNA, 541 bp, Homo sapiens
agagttttgattagttttctatttgcttgtttgtttatgcaaacaatgttaagttgttattagcttaaactaatggattataagatagtattcccaagccacatgataagctcaaatcaaaaacatacaatggctatacaaaaaaaattttaaaaaagaaattaaagaataccactagagaaaattgtcttcataaaagaaagacaggaaggaaggaaacaaagaagagaagaccataaaataaccagaaaacaaataacaaaatggtcagagtaagtcattacatattcataataacattaaatgtaaatggactaaactctccaatcaaaagacatagagtggctgaatggaaaaaaaaatgagaaataatgatctgtcccctttcagaaacayacttcacctaaaaagacacacatagattgaaaataaagtcatggaaaaagatattccttgccaatggaagccaaaaaagagcaggaatagttatatcagacaaaatagatgtgaagacaaaaactaggaaaagagaaaaagtagg

SEQ ID NO: 320022 - DNA, 614 bp, Homo sapiens
cacatatacccttctcctacacaggcaaaaataatcctgcctaacaaaatttagctattgtaatgcaaatgaaaacacaattgtcaggtctctgatcagagggctaccaaattgtctcaagttgtcacatccagatatgagycattctcctatcggatccaggaattttatccattaacctctgagtggctctcatcttggcctacttattctgtagcattgcatttcttcaaactacaatgagtcatgcgtttaacactattatttcatagtatatataatcttcaaaagggaggtcatagttaacggtaaacaggaggccaggtttggtggctcatgcctgtaatccgagcactttgggaggctgaggccagaggatcacttgaacctggagttgaccccaacctgggcaacataaggagacctcgtgtctactaaaaatgaaaaagtagccaggcatggtgggatgcacctgttgttccagctactcaggaggcccaagagggagaatcacttcagtctgggagatcaaggctgcagtgaatgacgatcttgccactgcactccagcctgggtgacagagcaagggcctgtctcaaaaaatgaataaataa

SEQ ID NO: 320023 - DNA, 614 bp, Homo sapiens
cacatatacccttctcctacacaggcaaaaataatcctgcctaacaaaatttagctattgtaatgcaaatgaaaacacaattgtcaggtctctgatcagagggctaccaaattgtctcaagttgtcacatccagatatgagtcattctcctatcggatccaggaattttatccattaacctctgagtggctctcatcttggcctacttattctgtagcattgcatttcttcaaactacaatgagtcatgcgtttaacactattatttcatagtatatataatcttcaaaagggaggtcatagttaacggtaaacaggaggccaggtttggtggctcatkcctgtaatccgagcactttgggaggctgaggccagaggatcacttgaacctggagttgaccccaacctgggcaacataaggagacctcgtgtctactaaaaatgaaaaagtagccaggcatggtgggatgcacctgttgttccagctactcaggaggcccaagagggagaatcacttcagtctgggagatcaaggctgcagtgaatgacgatcttgccactgcactccagcctgggtgacagagcaagggcctgtctcaaaaaatgaataaataa

SEQ ID NO: 320024 - DNA, 614 bp, Homo sapiens
cacatatacccttctcctacacaggcaaaaataatcctgcctaacaaaatttagctattgtaatgcaaatgaaaacacaattgtcaggtctctgatcagagggctaccaaattgtctcaagttgtcacatccagatatgagtcattctcctatcggatccaggaattttatccattaacctctgagtggctctcatcttggcctacttattctgtagcattgcatttcttcaaactacaatgagtcatgcgtttaacactattatttcatagtatatataatcttcaaaagggaggtcatagttaacggtaaacaggaggccaggtttggtggctcatgcctgtaatccgagcactttgggaggctgaggccagaggatcacttgaacctggagttgaccccaacctgggcaacataaggagacctcgtgtctactaraaatgaaaaagtagccaggcatggtgggatgcacctgttgttccagctactcaggaggcccaagagggagaatcacttcagtctgggagatcaaggctgcagtgaatgacgatcttgccactgcactccagcctgggtgacagagcaagggcctgtctcaaaaaatgaataaataa

SEQ ID NO: 320025 - DNA, 614 bp, Homo sapiens
cacatatacccttctcctacacaggcaaaaataatcctgcctaacaaaatttagctattgtaatgcaaatgaaaacacaattgtcaggtctctgatcagagggctaccaaattgtctcaagttgtcacatccagatatgagtcattctcctatcggatccaggaattttatccattaacctctgagtggctctcatcttggcctacttattctgtagcattgcatttcttcaaactacaatgagtcatgcgtttaacactattatttcatagtatatataatcttcaaaagggaggtcatagttaacggtaaacaggaggccaggtttggtggctcatgcctgtaatccgagcactttgggaggctgaggccagaggatcacttgaacctggagttgaccccaacctgggcaacataaggagacctcgtgtctactaaaaatraaaaagtagccaggcatggtgggatgcacctgttgttccagctactcaggaggcccaagagggagaatcacttcagtctgggagatcaaggctgcagtgaatgacgatcttgccactgcactccagcctgggtgacagagcaagggcctgtctcaaaaaatgaataaataa

SEQ ID NO: 320026 - DNA, 597 bp, Homo sapiens
tgtatgttttataccatccttacttcagaggacatttttcttttataaatatatcctaaatatatcactgaatagttaataaaaactgacattttgcaaattttaaatttatagaaattgtatcacctgatatatgggatttggctatctcctttttcacctccaacattagactgaaatttatctrcgttgatgcacatagatttactttattcagtttaattgctgatattctgaggaactcttatttttccatcattgctcttagaaacaatgctgctgcaataaaacatctctgagtttgtgtttaattgcaagtacctctctagagtagatgtctggaggtaaaatttctgagttgaaaataatgagtttcctttggcttagcatccttgattctccagacactgctcaaatatatactctcaccagtaatctataaaaacacaaattaatcaaccttgtctttaaaaatgggtactgtcagatttacaaatttttgtactgtgatgagggtcttatgagtttaaattgctttcgcctaatgagtatcaataaaaatatcaggtgtattggtttgctagaactgccattaca

SEQ ID NO: 320027 - DNA, 597 bp, Homo sapiens
tgtatgttttataccatccttacttcagaggacatttttcttttataaatatatcctaaatatatcactgaatagttaataaaaactgacattttgcaaattttaaatttatagaaattgtatcacctgatatatgggatttggctatctcctttttcacctccaacattagactgaaatttatctaygttgatgcacatagatttactttattcagtttaattgctgatattctgaggaactcttatttttccatcattgctcttagaaacaatgctgctgcaataaaacatctctgagtttgtgtttaattgcaagtacctctctagagtagatgtctggaggtaaaatttctgagttgaaaataatgagtttcctttggcttagcatccttgattctccagacactgctcaaatatatactctcaccagtaatctataaaaacacaaattaatcaaccttgtctttaaaaatgggtactgtcagatttacaaatttttgtactgtgatgagggtcttatgagtttaaattgctttcgcctaatgagtatcaataaaaatatcaggtgtattggtttgctagaactgccattaca

SEQ ID NO: 320028 - DNA, 521 bp, Homo sapiens
cactgaatagttaataaaaactgacattttgcaaattttaaatttatagaaattgtatcacctgatatatgggatttggctatctcctttttcacctccaacattagactgaaatttatctacgttgatgcacatagatttactttattcagtttaattgctgatattctgaggaactcttatttttccatcattgctcttagaaacaatgctgctgcaataaaacatctctgagtttgtgtttaattgcaagtacctctctagagtagatgtctggaggtaaaatttctgagttgaaaataatgagtttcctytggcttagcatccttgattctccagacactgctcaaatatatactctcaccagtaatctataaaaacacaaattaatcaaccttgtctttaaaaatgggtactgtcagatttacaaatttttgtactgtgatgagggtcttatgagtttaaattgctttcgcctaatgagtatcaataaaaatatcaggtgtattggtttgctagaa

SEQ ID NO: 320029 - DNA, 521 bp, Homo sapiens
cactgaatagttaataaaaactgacattttgcaaattttaaatttatagaaattgtatcacctgatatatgggatttggctatctcctttttcacctccaacattagactgaaatttatctacgttgatgcacatagatttactttattcagtttaattgctgatattctgaggaactcttatttttccatcattgctcttagaaacaatgctgctgcaataaaacatctctgagtttgtgtttaattgcaagtacctctctagagtagatgtctggaggtaaaatttctgagttgaaaataatgagtttcctttrgcttagcatccttgattctccagacactgctcaaatatatactctcaccagtaatctataaaaacacaaattaatcaaccttgtctttaaaaatgggtactgtcagatttacaaatttttgtactgtgatgagggtcttatgagtttaaattgctttcgcctaatgagtatcaataaaaatatcaggtgtattggtttgctagaa

SEQ ID NO: 320030 - DNA, 505 bp, Homo sapiens
tccttcagacccaggatttatatgccatagggaaaggtttatgtaggacaattgcttaagtgcaggatttatggtaaatatgataacataaaggttgttttgacctaagggcaggatttacagtaaacacatgctcttatacaagaagagttgataaaartagaaatcttagaggccttcctggaactggaattactcagaagtcaacatggtagatgagcattcaagatagagttgctcttgcctccatactccacccccctcaatctagcttttacaacctcatgcaccctcctcttccacaattgtccctgagcatttaaggaagatgcttcatatcctatagctttagtgacagtgtgttggcaatgaaaaacccagtgggtttccaaatgtgagagattgacaggctctgttgaataatctctaatctttgaaacaccacccatgactttggttttctcagaagtaaaacagtgaaatatctataatatgaataatttga

SEQ ID NO: 320031 - DNA, 505 bp, Homo sapiens
tccttcagacccaggatttatatgccatagggaaaggtttatgtaggacaattgcttaagtgcaggatttatggtaaatatgataacataaaggttgttttgacctaagggcaggatttacagtaaacacatgctcttatacaagaagagttgataaaaatagaaatcttagaggccttcctggaactggaattactcagaagtcaacatggtagatgagcattcaagatagagttgctctkgcctccatactccacccccctcaatctagcttttacaacctcatgcaccctcctcttccacaattgtccctgagcatttaaggaagatgcttcatatcctatagctttagtgacagtgtgttggcaatgaaaaacccagtgggtttccaaatgtgagagattgacaggctctgttgaataatctctaatctttgaaacaccacccatgactttggttttctcagaagtaaaacagtgaaatatctataatatgaataatttga

SEQ ID NO: 320032 - DNA, 602 bp, Homo sapiens
ggtgatgttgtattcaatggtgtatatgtacaacattttctttatctagtccaccattgatgggcatctaggttgatttcatgtctttgctattgtggatagttctgtgctaaacaggtgagtgcatgtgtctttttggtcgggtagracaatttatttagtattggatgtatacccagtaatgggattgctgggttgaattatagttctaagttctttgagaaatctccaaactgctttccaccaacagtattataagccttcccttttctctacagcctcaccaacaattattgtttttaaattttttcatgattgccattctgactggtatgagatagtatttcaatgtggttttgatttgcgtttctctgattagtgatgtgagggaattttttctgctttttggctgtttgaatgtcttctttgagaaatgtccatgtttttttgcctatttttaatggggctccttatttcttgttcagtagttaaattcctaatagattctggatattagaccttttttggatgtgtagttttaaacattttctcccattctgtatgttgtctgtgtactctgttgatagttaattttgttgtgc

SEQ ID NO: 320033 - DNA, 603 bp, Homo sapiens
aggaacatcagtacccccgtgttcattgcagaactatttacaatcaccaagatgtggaaaaaatctaaatttccctcagtgaatgaattaagaaaatgtgtgagagagagasacacacacaagtaaatactactcatccattaaaaaatgaaagcctgtcatttgaagcaacatggatgaatctggataacattatgtagaattatgtaagtgaaataagacagaaagacaaataacacatgatctcacttatatgaggaatctaaaatagtagactgcatagaggttgagagtagaatgatgattatcaggaactaggactaggaggcgacattggggagatattggtcaaagcatacaaaattttgattagacaggaggaataagttcaaaagatttacactacaaggtgtctagttaataacaatgcattgtatacttgaaaattgctaagtatatgactttgaaatgctttcaacacaaaaaataagtatatgagataatggatatgttaatgaggttgatttaatcattccacagtgtatacacatgtcaaaacatcatggtgtacaccataaatatatacaattttaatttgttaat

SEQ ID NO: 320034 - DNA, 603 bp, Homo sapiens
aggaacatcagtacccccgtgttcattgcagaactatttacaatcaccaagatgtggaaaaaatctaaatttccctcagtgaatgaattaagaaaatgtgtgagagagagacacacacacaagtaaatactactcatccattaaaaaatgaaagcctgtcatttgaagcaacatggatgaatctggataacattatgtagaattatgtaagtgaaataagacagaaagacaaataacacatgatctcacttatatgaggaatctaaaatagtagactgcatagaggttgagagtagaatgatgattatcaggaactaggactaggaggcracattggggagatattggtcaaagcatacaaaattttgattagacaggaggaataagttcaaaagatttacactacaaggtgtctagttaataacaatgcattgtatacttgaaaattgctaagtatatgactttgaaatgctttcaacacaaaaaataagtatatgagataatggatatgttaatgaggttgatttaatcattccacagtgtatacacatgtcaaaacatcatggtgtacaccataaatatatacaattttaatttgttaat

SEQ ID NO: 320035 - DNA, 635 bp, Homo sapiens
ttacactacaaggtgtctagttaataacaatgcattgtatacttgaaaattgctaagtatatgactttgaaatgctttcaacacaaaaaataagtatatgagataatggatatgttaatgaggttgatttaatcattccacagtgtatacacatgtcaaaacatcatggtgtacaccataaatatatacaattttaatttgttaataaaggtatgatctatgaggaaaaaaataaaaacaaattcaaacaaatgagcaaacaaaaagcagttctgggctgttgtgaaaactgctctgctgctggacatgtgatccagtatattcaatgacactggaattgtcagtggcagatgctgtttggagcttttggcaggcccctgttggtgattcacagtacaggcccttagaattttgaagcaaaacattgccatcctctccataaaacatttctcctgagaaacagctcctggcctccttcttggtcttaatagaaattaaaagcctaaatatgggccaacaagttgcattgtcatgagtatccctccttatttgttatgaatatgtttgtgtgtgtatatctatatctagatagagagaataattaagcaaayatattttttcttctctttcttatc

SEQ ID NO: 320036 - DNA, 494 bp, Homo sapiens
tagatgagattattttattgatttctttttcagattgttcatgatcagcatataaaattgctacagatttttgcatgttaattttggawcctgaaattttactgaatttatcatgtctaatagttttttggtggagtctttaggcttttctgaatagaacatcatatcatttgcaaacaaggataattttcctttttccttcccaatttgaaacacattttatctctttctcttctctaatggctctagttaggagttcaaatactatgttgaataatcgtgaagaaagcgggcatccttgtcttgttccagatcttagaggaaaggctttcaatttttccccattcagtatgatagtagttgtgggtcttttgtgtatggcttctattgtgttgatgtatgctccttctataccaagtagttttgggtttttatcatgaaagtatgttgtatttatcaaatgcattttcagcatcaaatgaaataatcctatg

SEQ ID NO: 320037 - DNA, 494 bp, Homo sapiens
tagatgagattattttattgatttctttttcagattgttcatgatcagcatataaaattgctacagatttttgcatgttaattttggatcctgaaattttactgaatttatcatrtctaatagttttttggtggagtctttaggcttttctgaatagaacatcatatcatttgcaaacaaggataattttcctttttccttcccaatttgaaacacattttatctctttctcttctctaatggctctagttaggagttcaaatactatgttgaataatcgtgaagaaagcgggcatccttgtcttgttccagatcttagaggaaaggctttcaatttttccccattcagtatgatagtagttgtgggtcttttgtgtatggcttctattgtgttgatgtatgctccttctataccaagtagttttgggtttttatcatgaaagtatgttgtatttatcaaatgcattttcagcatcaaatgaaataatcctatg

SEQ ID NO: 320038 - DNA, 581 bp, Homo sapiens
gatttttgcatgttaattttggatcctgaaattttactgaatttatcatgtctaatagttttttggtggagtctttaggcttttctgaatagaacatcatatcatttgcaaacaaggataattttcctttttccttcccaatttgaaacacattttatctctttctcttctctaatggctctagttaggagttcaaatactatgttgaataatcgtgaagaaagcgggcatccttgtcttgttccagatcttagaggaaaggctttcaatttttccccattcagyatgatagtagttgtgggtcttttgtgtatggcttctattgtgttgatgtatgctccttctataccaagtagttttgggtttttatcatgaaagtatgttgtatttatcaaatgcattttcagcatcaaatgaaataatcctatggttttatccttcattctgttgataagatatatcacattgattaatttgcatatgttaaatgatccttgcatcctaggagtaaatcccccttggttatgaggaataaatgtatttaatatactgttgaattcagcttgctagtatgttttaaa

SEQ ID NO: 320039 - DNA, 494 bp, Homo sapiens
tagatgagattattttattgatttctttttcagattgttcatgatcagcatataaaattgctacagatttttgcatgttaattttggatcctgaaattttactgaatttatcatgtctaatagttttttggtggagtctttaggcttttctgaatagaacatcatatcatttgcaaacaaggataattttcctttttccttcccaatttgaaacacattttatctctttctcttctctaatggctctagttaggagttcaaatactatgttgaataatcgtgaagaaagcgggcatccttgtcttgttccagatcttagaggaaaggctttcaatttttccccattcagtatgatagtagttgtgggtcttttgtgtatggcttctattgtgttgatgtatgctccttctataccamgtagttttgggtttttatcatgaaagtatgttgtatttatcaaatgcattttcagcatcaaatgaaataatcctatg

SEQ ID NO: 320040 - DNA, 581 bp, Homo sapiens
gatttttgcatgttaattttggatcctgaaattttactgaatttatcatgtctaatagttttttggtggagtctttaggcttttctgaatagaacatcatatcatttgcaaacaaggataattttcctttttccttcccaatttgaaacacattttatctctttctcttctctaatggctctagttaggagttcaaatactatgttgaataatcgtgaagaaagcgggcatccttgtcttgttccagatcttagaggaaaggctttcaatttttccccattcagtatgatagtagttgtgggtcttttgtgtatggcttctattgtgttgatgtatgctccttctataccaagtagttttgggtttttatcatgaaagtatgttgtatttatcaaatgcattttcagcatcaaatgaaataatcctatggttttatccttcattctgttgataagatatatcacattgattaatttgcatatgttaaatgatccttgcatcctaggagtaaatcccmcttggttatgaggaataaatgtatttaatatactgttgaattcagcttgctagtatgttttaaa

SEQ ID NO: 320041 - DNA, 394 bp, Homo sapiens
acatgtcttttcaagacagtcattrttttcactggagtggaaatcacattccatcactttcttagaataaaagcaatttgagccaatactttccacaaagaaaatgaaccaaaaatgagcctttaaaaaaatgtgtcttcataattaagcatgtaaacaggcatacacaattatttaacaagctctttttatgtgccagaaagtagactatttcaaactaaataacgaaaaacatggaaaatatgaatatctgcagggtatgcatatacacatgtgtattgttataaaataataatacttttaattatctttcttttcctacagtatacaaagattcagatttttgagttaagtttttttctatttacccttgctatgttattatttctaaaat

SEQ ID NO: 320042 - DNA, 594 bp, Homo sapiens
acgggtttcaaatacaaaataattcacgtaagttgtttttacacaaagaaagcaaagcctgtttccgactcaggaatctagttgacttcattattaacaaactgatattcaggagccttttttcctcacacagtgtcagtgtttcctttagcaaaacgagaatctgttgtaacatggaaatgcttggaaggtctggggtgtacttgaatataatatttattatgtgcttactatgtgctaacagtgggctaggctttcacttgctgtattttattcacaagaaccctgtgaataactggtaagtttaacagatgtagtcatgaggatggagawgagtaaatatcactctaaaatcattgaatataaaattcaagtttgtcctttttcagaattcaagttttttctcactgaagcacatttcctaaaaaataagataatttagaaaaatttaatagattttcataaaaaaccatttcaaaattttttgtacttgagattaagtttggtataaaataatagagatgctgattatgatgatgatagtgattatgaggatgatgataaggagctaaaatattgaatgcctgatctttc

SEQ ID NO: 320043 - DNA, 662 bp, Homo sapiens
ggaccgttccattgtgacctggattccattcctaaacttgcctcagacctttcaaagaaaaatcagggccttaggtataatgtcaagtgaaaatattgacatattataatgaagaatccaggggattaaacaccactataaaaayatatactttgcgaagtactctatccttgccactctaacagtcaaccatttggtgttttgttatttcaatatttccactgaatacatttcggttatatttaatctttctgtcaaacctattggactcactgcctcctccttcgtattcttcaactaggtgtttctattgttactgaactctgaagtggaagctacaccaaaatacatatgtgtctcaactagtgaacctcagtttgctggttggctaagacactttcttttcattagaaacttaggttgctagaaatatttcactcttatccaccagagaaaaaacagttgaaacttgctatgctgcactgaattctaagacagactaatcaatctaattccatctaaacctatttaccctgtccaggagatctgctaatgaggaatgccagtaactcctagttcctgacactgctttccaaaagtgagttaatgaaccagtttaaagggacatgcttgacatttgcaaattagtttaactggcttgt

SEQ ID NO: 320044 - DNA, 548 bp, Homo sapiens
ggtaaaacacaaaaatccctgggaattttcaaaagacaaattttataacccctgcaatattagcgcttactaccagtttctttctctcccagtcagatgtaagaggtctctaactggatccaagccagttcattcctgtatcaaatccattcctggacccagtscagtttctgttgcgactccaaacccagtttggatcagaaatttgctcaaagaaactcggagaactcaaaacacaaatccgtggagctcagaaatctgagagggagcttatccatgatctccagctgctctgagagattaaaggacccaagtgggccctgtaggtaccttgcgtgttcactcagtgctcctaggggtcgctagaagctccacttctggtaccatctgataaaagaaaaacttcagaattaatttaaaggagtttaattgagcaatgaatgattcgcgaattgggcagcccccagaatcacagcagattcacagagactccaggggtgcctcgtggtcagaacaaatttatagacaaaaaaggtaaaatgacatac

SEQ ID NO: 320045 - DNA, 475 bp, Homo sapiens
aaagtcatcatttctgaccttatagaaataaaaagataagaaaatactatttacaattgtatactaaaaattagataacttagaggaagaaatggaaagtgactactaaatggtatgctgtttatatttttattgatacataatacatatgcatattttcaggatacatgtgataatttaataccttcatatcatttgtgagggtccaatcagtgtaaatggtacatccaccacttaaataattgtcttttctgtatgctakaaacattaaaaattttctaaatttagtttgtggtaactttgcaagccttaatacattgaaaatgagggaactgcatgctttaaatgggtgaatattatggtggtatgtgaaatatatctcaatgaagatttagaaaacaacaactattaatcctatacttgagaattctatcaaaaatgagaaatattgaaaaggttatctttggtgtttaga

SEQ ID NO: 320046 - DNA, 546 bp, Homo sapiens
ttctttaagtgaatgaatcaggtctaataccaaactccttgcaaaaatgttctccctcctctgtattctggagagaatctaagagttattctggtaataattcaaattttcaaggtattgtttacaaatctggatgcagttcactcacaataaaatttttaaactcacactcactaccttgggtttgaaaatggctyaaccaccatcatcacagaaatgctttgaaatacgtttcagtgttgtgcttttagatggtaaattccttgatgtccagtgagattaaacaaattgtttgccgcaattcttactgtgaaacaatcaataacttcactcctgaagtatggtcatctctattgtgaggttcacaaggcctttgcccacagaaagaattgagaaatcaattttgactccctacgagttgtgactgtgtctctacttgactaaataaataagtagatcaagtggaaaagaaagaggatgtcatgctcagcaaaggttactaatagatatatctgttagcccacagatctggggtaatgatatttt

SEQ ID NO: 320047 - DNA, 546 bp, Homo sapiens
ttctttaagtgaatgaatcaggtctaataccaaactccttgcaaaaatgttctccctcctctgtattctggagagaatctaagagttattctggtaataattcaaattttcaaggtattgtttacaaatctggatgcagttcactcacaataaaatttttaaactcacactcactaccttgggtttgaaaatggcttaaccaccatcatcacagaaatgctttgaaatacgtttcagtgttgtgcttttagatggtaaattccttgatgtccagtgagattaaacaaattgtttgccgcaattcttactgtgaaacaatcaataacttcactcctgaagtatggtcatctctattgtgaggttcacaaggcctttgcccacagaaagaattgagaaatcaattttgactccctacgagttgtgactktgtctctacttgactaaataaataagtagatcaagtggaaaagaaagaggatgtcatgctcagcaaaggttactaatagatatatctgttagcccacagatctggggtaatgatatttt

SEQ ID NO: 320048 - DNA, 604 bp, Homo sapiens
ccatgtgacatgatctaacttatgctctgttcctctcattcttattttttcctcccagcttcagtttgcatatttttattgacttgtcttcaaatgtattgatatcatctttgactgtgttgaatctgcttttaagcccatccaatgacttactaattcctaatactgtattttattccttatacaaaatatacatttgattttgtatatattgtattctctgtaaaaatatttcatcatctacatattttctatagtttttctgtttctttaatatgctagtcatagttattttgaaattattttctgctaactacaacatcaggagtttttataggcctgcatgttaataatcttatcactttttattaatatcagtcactttttctttttaaatatctagagtgttgggtggttttgtttttgctatttcttttttttttttttgtattctggaggttacaagtgatacttataaactattgaaattctgaatcatggatccttccttaaaaaaatgttkcactttgttctggtaggcaccttgatgctgaagagtcccactgttagctttgttaagatagtcctgtattagtttggaaag

SEQ ID NO: 320049 - DNA, 600 bp, Homo sapiens
ggtagttaattgtttctgctataatatccttccttttcattcagcagaatgcattataatatagtcagacagttaagaaaattggttctattcagtctctctatgccaaattgtatggtattgacaaattatgtagcctttctatatctctgttctgcataggattgctgtaagacaattcagatagtgtgtgtgaaatgcttagaacattctgcaacattttagtaagtattcaataaatattacccattgttattatattccaaaaaatcctacatgataaatgagaagaaaaaaggatttaagagaaattaagtgattttttttttttccccaggagcctcagcaaataaatggcctaaacaattggaagcctagggatgtaattgctggtcttctattaaaaagtgaaggagacaagattttaatgaaggtactcattctattcayaggctggacaaaaatagtggttttaatagaacgagctaataagtaagagataaaagtagaaaacccagagctacctggaattacactacactcaattatactcgatcgtatatagacagattagccttcctctcaggtgacatctcacgc

SEQ ID NO: 320050 - DNA, 629 bp, Homo sapiens
agaaagtagcttcagagaagagaatatttgttgtatataataaacagtgggatattgtaaaaattgcatattcttattcagtagctctgtgggtggggggacggggtgttgacattctgtgtttttaactaacaagctcctaggtaatgctgatgttgctgttctkcagaccaaactttaagtagcaattaaagtaattaagtaattaagtaattaagggtagagaagacattgatatttattctaggcagagtgatgaataccctctagtagtcatggaagaataaaagcatttggtctggctagtagttcactgagcataaatagttcactgagcataagtagttcactgaactatcagataatgatttagaaaaaaaaagtattacaaatgacctcaggctaaacattctgaacattattttgtgggcaaagggaagcctacaaatgcttctgttcctaagtgtgccactgtaggcttgttggtaaggaaaccataaacatgttatagtttaaagggcaagatggaattagagaaagaggaagaggaagaactgttagcagacttcagccattgccagagtgaggaaagcaccaggttgaactttggagatggaaaagaaaattcc

SEQ ID NO: 320051 - DNA, 509 bp, Homo sapiens
actgacagtaccttcctgacatttgtacctcgacaccagaagtgctaacagctgcgatgccagtggtagaaaagcaaggaagatctttttcagctttagttgctctcagattctcagcaccctaagagaataaagtctgttaaaactgacttcagttggctatgtcctttgcgaagatttttgtgttggtgtctgaaaagcagttttattccatgacattgggcttaggggagatkattttttcaagacagaagacacatgtggtaaatgcgtgacaaatggcagtaacaaagttgggctgggagttcatggttttatgaaatgaaatatttcagcaaccaattccgtgctctgttacttgctgcagacagcccttttgaccctacactgaggcagccaaaaaggactataggagaaaatttctagttatcttgaagttggatggtattcttaactaatagtgacagatgtagcaatatgacttctagtgcttgctgctaatggcagag

SEQ ID NO: 320052 - DNA, 509 bp, Homo sapiens
actgacagtaccttcctgacatttgtacctcgacaccagaagtgctaacagctgcgatgccagtggtagaaaagcaaggaagatctttttcagctttagttgctctcagattctcagcaccctaagagaataaagtctgttaaaactgacttcagttggctatgtcctttgcgaagatttttgtgttggtgtctgaaaagcagttttattccatgacattgggcttaggggagattaktttttcaagacagaagacacatgtggtaaatgcgtgacaaatggcagtaacaaagttgggctgggagttcatggttttatgaaatgaaatatttcagcaaccaattccgtgctctgttacttgctgcagacagcccttttgaccctacactgaggcagccaaaaaggactataggagaaaatttctagttatcttgaagttggatggtattcttaactaatagtgacagatgtagcaatatgacttctagtgcttgctgctaatggcagag

SEQ ID NO: 320053 - DNA, 509 bp, Homo sapiens
actgacagtaccttcctgacatttgtacctcgacaccagaagtgctaacagctgcgatgccagtggtagaaaagcaaggaagatctttttcagctttagttgctctcagattctcagcaccctaagagaataaagtctgttaaaactgacttcagttggctatgtcctttgcgaagatttttgtgttggtgtctgaaaagcagttttattccatgacattgggcttaggggagattattttttcaagacagaagacacatgtggtaaatgcgtgacaaatggcagtaacaaagttgggctgggagttcatggttttatgaaatgaaatatttcagcaaccaattccgtgctctgttacttgctgcagacagcccttttgaccctacactgaggcagccaaaaaggactataggakaaaatttctagttatcttgaagttggatggtattcttaactaatagtgacagatgtagcaatatgacttctagtgcttgctgctaatggcagag

SEQ ID NO: 320054 - DNA, 571 bp, Homo sapiens
tggggataactttttttgttgctgtttaattttattttgttgctatttttaacattcagtgagaaccagggtgtgtatttattttaatctccctgattctgtaaaataatgtcatttatagtatttcattctgctttggctgatgtgaggcttaaaatcaaattaaagccaaaatgggagccaagaaactgtactaggttttatgatgtcttccattttcttttcttattggtattttctctatttgtatatgctcatttattttatttgcttattttgtttatatttatgtaaattgtgtcaactttagttataaaatgtgttaaataaataatctaggaaaatcattataacatcttttttctaattttctaagagttttgttggtgcttaatcaattttatgtattttgttcattcacagatatatatatatatatatatrtatatatatatatatctgtgatatatatatatatatatatatatatatatctgtgatatatatgtgtgtgtttgtgtgtgtgtgtatatatatatatagtgtccattatgagtgaactagaaatata

SEQ ID NO: 320055 - DNA, 415 bp, Homo sapiens
gacttgatgaaaaattgttgaagacttctaagtaatcttttttgctcaatttccaaagcttactttcyagatctaggttctcataatcaaattattatattagagaacttcagcttttggggataatatttacattcagctttttgggataatatttcattgttttcttttttgttacatgaaaatatgtgctgtgtatcttattgcaacctattacaggtaatttgcattttcattctcacagttttaaggtttttatctcatctttgtggtctaatgtctctctttattcctaaaaatgtgctacttttatctctttgaaatcacctcttcagaactcctattaaacattaattataaaccttcatttaattgttcttgtttcctaattttaattttatattctgaaaaaatt

SEQ ID NO: 320056 - DNA, 415 bp, Homo sapiens
gacttgatgaaaaattgttgaagacttctaagtaatcttttttgctcaatttccaaagcttactttccagatctaggttctcataatcaaattattatattagagaacttcagcttttggggataatatttacattcagctttttgggataatatttcattgttttcttttttgttacatgaaaatatgtgctgtgtatcttattgcaacctattacaggtaatytgcattttcattctcacagttttaaggtttttatctcatctttgtggtctaatgtctctctttattcctaaaaatgtgctacttttatctctttgaaatcacctcttcagaactcctattaaacattaattataaaccttcatttaattgttcttgtttcctaattttaattttatattctgaaaaaatt

SEQ ID NO: 320057 - DNA, 593 bp, Homo sapiens
tcttttttaaagaaaagcaaaccatgttgacagaagtagcacagtgaccattaagactattaaggccagaaagttcatttgctttagttaagctgacactagcctgaaactgttcttatacaaagtcttggtaaatgtttcctattttagaaacatgaattctttcaaggtgcctctgggggaaggcccttcaagcttttgtgatttcctctaaatgtttaaaatcacgctctccttatgtgttctgagtaacaattacggcttctttcctggaaataaactgtgttttactctttctttcccttttattgacctcctgctgtgtcctktttttttttttttgtctaaaattgtgatttagttttatcattcaagtggtaaaactaatgatttttagttcctatttcaaacttcacgactgaggtaaagagactaccaattaagtaaggcaataaaaaaagctattcagcattttacagcaatcatttatatacaaaacacctgtatagcttagaaaagtgacttaaagaccatattttattaatttaacatgtgttccagtaagagcgatttaagccacattgaatgcacat

SEQ ID NO: 320058 - DNA, 593 bp, Homo sapiens
tcttttttaaagaaaagcaaaccatgttgacagaagtagcacagtgaccattaagactattaaggccagaaagttcatttgctttagttaagctgacactagcctgaaactgttcttatacaaagtcttggtaaatgtttcctattttagaaacatgaattctttcaaggtgcctctgggggaaggcccttcaagcttttgtgatttcctctaaatgtttaaaatcacgctctccttatgtgttctgagtaacaattacggcttctttcctggaaataaactgtgttttactctttctttcccttttattgacctcctgctgtgtcctttttttttttttttgtctaaaattgtgatttagttttatcattcaagtggtaaaactaatgatttttagttcctatttcaaacttcacgactgaggtaaagagactaccaattaagtaaggcaataaaaaaagctattcagcattttacagcaatcatttatatacaaaacacckgtatagcttagaaaagtgacttaaagaccatattttattaatttaacatgtgttccagtaagagcgatttaagccacattgaatgcacat

SEQ ID NO: 320059 - DNA, 562 bp, Homo sapiens
aaataatataagaaacagaaagtgagtagattggaacacaccttatacaggtgatctttgcctattaggaacttattatttagagggagaagaaatagtcctaccagtcacaaggtagatttttctatagtgaagatactacatatgttttatggaatcatagtggagtttaattgtgatttcaaaacaagacttcatgatgaatatggcctgttatcgaggtacagttggtagggaggctttctgcctagatatgtaagggaaagacagtacaaakgaggtcaggtacagagccagaagatacgaagcgcaaggtaattgcacagttgattggtaagaatgtgcactgacttgaatatcattcaaagtcacctgtttgtacaggaaagtagatttgacctgtatttttaaactatgttgaattaataaatatttggtgccacatctatagtccacaaatgtatacgaaaatatgtgaagggggatcctaaagaccctcacgttagtgtctcttagtttgctagcaccctcttacatttcacatttaagactaaaattcttt

SEQ ID NO: 320060 - DNA, 650 bp, Homo sapiens
taattcatttctagttactttgccagagcctaaggcccttttaagagatatagccatattttaaaaccacttaagacattctacccatgatttttccagtcaaatatcatgatctcttaaatttgcttaatagtttgtaagtcattctaaaatatacttatttgtacgatgacttcaaatgattttatgtaccttagtaaaatgattatcaactctagcactaagtggtcttttttgatacttcctcatttattatgagtcaaaataaatctcttccatgaatttatgacattacatgtttaactgtagaacaaagactttgcatccttatccatttggacatttgaaatatgtgttatgaaataaaataaacagaacaaaatgttttcatcaaaagaatgtaccaaaatgtctatatcaatgctatatttcatctatattttcaaccaygtatataaaagaaaaatatcattaaattgcatttagagagcattaattaatgacaaaagtaactatagcttcatcagaacaccacatcaacactgtatgatcattgttatgcagatttggtagtgagaatttaaggagtgcccccaaagattttaagtcctggtcagtcaaaagcacagttagttggaatgtttggtgcc

SEQ ID NO: 320061 - DNA, 499 bp, Homo sapiens
ttttcaaattttaagaaataagtatattttggttcaaaatgaatccaaagataattttatattgatgttagcacaaagtaagaactacgtcatcatttattgaactgttttacctaaataacttaatgtggatgagttaagattatttagacccattatcctctgctactgacataatagctgtgaagaagaatccatgttttttctctgatgtacacagataggtaggacaggatagaacagaataggataggataatatagggtaggatgaagtgtgtgggcagagagggctttgctatcracaaggtctggtccctaattacatgcaaagtgtaccatggtaggcactgcatctgatttgctagtagattcaagcccactcctctctcatttggaaaagaaaagatgaaggcattggaagctgcagcagagatttagagggccatgatcactattgatactcctgagggaaagtgtacgttgaccaagagggaata

SEQ ID NO: 320062 - DNA, 499 bp, Homo sapiens
ttttcaaattttaagaaataagtatattttggttcaaaatgaatccaaagataattttatattgatgttagcacaaagtaagaactacgtcatcatttattgaactgttttacctaaataacttaatgtggatgagttaagattatttagacccattatcctctgctactgacataatagctgtgaagaagaatccatgttttttctctgatgtacacagataggtaggacaggatagaacagaataggataggataatatagggtaggatgaagtgtgtgggcagagagggctttgctatcgacaaggtctggtccctaattacatgcaaagkgtaccatggtaggcactgcatctgatttgctagtagattcaagcccactcctctctcatttggaaaagaaaagatgaaggcattggaagctgcagcagagatttagagggccatgatcactattgatactcctgagggaaagtgtacgttgaccaagagggaata

SEQ ID NO: 320063 - DNA, 499 bp, Homo sapiens
ttttcaaattttaagaaataagtatattttggttcaaaatgaatccaaagataattttatattgatgttagcacaaagtaagaactacgtcatcatttattgaactgttttacctaaataacttaatgtggatgagttaagattatttagacccattatcctctgctactgacataatagctgtgaagaagaatccatgttttttctctgatgtacacagataggtaggacaggatagaacagaataggataggataatatagggtaggatgaagtgtgtgggcagagagggctttgctatcgacaaggtctggtccctaattacatgcaaagtgtaccatggtaggcactgcatctgatttgctagtagattcaagcccactcctctctyatttggaaaagaaaagatgaaggcattggaagctgcagcagagatttagagggccatgatcactattgatactcctgagggaaagtgtacgttgaccaagagggaata

SEQ ID NO: 320064 - DNA, 631 bp, Homo sapiens
ttattactgattacttgagactgtggtacctgactcctctgaggattaattcacctgatttcagattagcacagtacagtttctagtgctctagtccttagagagctgctactataattattgtatgtggtacatgcttcagatgcgtcctgtacagtattgcaaacagttttattggtgttaacattattmaattcacattaattttattcatcaaaagatttcatgtatccctatttcagattttgacaagtcattatattttaataccacttataaattttcgaagagcaaataaaaataattagaatacagtaagagctgtaataatactgcttgtgactaagactagcagccataaaaattatttttatccactttaataaaatgttattttaggtatggagaattacaattactacatccatttcatagatggcagtaatttgatattattgatgaaataataaaccagaatagaatgctggtttttgtttgctttttggggtttactttatttgtcacatacggaagtaaacttttggccaaaagaaaagttaaataaaattctactattttgctaaaattatacaaaaacattatgacaaaaccactttaaattgttatccaa

SEQ ID NO: 320065 - DNA, 540 bp, Homo sapiens
gggatagacatgggaagaaatcctcatttctacattgagctgggaatagaaagagctatagaagataccagcgaattctcatcaaaagcagtaacatggattttggattttaaaaataaataatttgccaatcagagaagtctgtctggacacaactggaatttcttaagtacctaatgtttaccaccaaattatgtcatttatttctgaaaacagtcacagttttataattatctctactgttagaaattatctctactattagaaaataataaatcaaacaagttaatccttgtacctaatattatccaatagttaaatggtagaattgggataaacttcaatccgatgctctttccattctaagcactgagaatagcaggctcaagagcaagcaaaggtataggaaacacaagcatgtataagaaaaggcaaggaagtcagggtgacattcttgctgtgaagytgtaaaactgtgatgttattgagggatctgcatcttttttaatggtctctttatgttggaaatgtaaaattgcc

SEQ ID NO: 320066 - DNA, 520 bp, Homo sapiens
cgactggcacactcctaacagatcttcagagggaaggcaccaacagcagacagcggaaacacacagaagctgggcttcggtggaaggaactaggaatgctacatggggctaccatgcaccaggactcattattggcccccagcaattttgggagaaccagtgakttggactgtcaagaagaaacccattctcaccatgggcctctggaatcacagcaggagaagaccccttgaccaccataaacactcaagttggcaggaagagctgcttggagaaatggtaggggcagcacaccagctgatgtggagcccagagggtttggtgtgggagcctccatagtggagcaccgccaaagaagcctatctccccaggcttgactttctcccataggagactttagccctaggggaactgtcagacctgaattctgtagggatgtcttgcccatcagatgagttgttggacatgagcaccccttggtctgctggcctctcccggggccccagcctggccacaccta

SEQ ID NO: 320067 - DNA, 520 bp, Homo sapiens
cgactggcacactcctaacagatcttcagagggaaggcaccaacagcagacagcggaaacacacagaagctgggcttcggtggaaggaactaggaatgctacatggggctaccatgcaccaggactcattattggcccccagcaattttgggagaaccagtgagttggactgtcaagaagaaacccattctcaccatgggcctctggaatcacagcaggagaagaccccttgaccaccayaaacactcaagttggcaggaagagctgcttggagaaatggtaggggcagcacaccagctgatgtggagcccagagggtttggtgtgggagcctccatagtggagcaccgccaaagaagcctatctccccaggcttgactttctcccataggagactttagccctaggggaactgtcagacctgaattctgtagggatgtcttgcccatcagatgagttgttggacatgagcaccccttggtctgctggcctctcccggggccccagcctggccacaccta

SEQ ID NO: 320068 - DNA, 611 bp, Homo sapiens
gtaacaaactaacctcatgatgacagggccaaatccacacatatcracactaatcttgaatgcaaatgggctaaatgcccccaatgaataggcacagtgtggcaaggtggataaggaaccttgacccattggtatgctatcttcaagacactcatctcacatgcaatgacacccatagtttcaagataaaggggtgtagaaaagtctaccaagcgaatggaaaacgatgaaaagcagggggtgtaatcctaatttaagacaaaacagactttaaacaaagagcaaaaaagacaaagacaggcatcacataatggtaaagggttcaattcaacaagaagacctaactattctaaatacataagctcctaacacaggagcacccagattcataaagcaagttcttagagacctccaaagaaacttagactcccatgcaataatggtgggaaaattcaacaccccactaacagtattagacaggtcattgaggcagaaaattaacaaagatatttagtatctgaactcagcactggatcaaatggatctgatagatgtcttcagaactctccacttgaaagcaacagaatatacattctcctcattgccacatg

SEQ ID NO: 320069 - DNA, 504 bp, Homo sapiens
tgatcatataattggacataaagcactcttcagcaaatgcaaaagaactgaaatcataacaaccactctctcggaccaaagcacaatcaaattagaaatcaagaccaagaaattcactgaaaactatacaattacatggaaattgaataaccttcttctgaaagacttttgggtaaataatgaaattaaggcagaaatcaagaaattatttgaaactaaggagaacaaagatacaacatattagaatccctgggacacagctaaggcagtgttgagaggaaaattcatagcactaaatgccaacaccaaaaagttagaaaggtctcagtttaacagtgtaacatcacaactgraggaattaaagaaccaagagaaaaccaacccaaagctagcagaagacaagaaataaccaaaatcagagatgaactgaaggaaattgagacatgaaaaaatattcaaaagatcagtgaatccatgagttaattttttgaaaaaaataataaa

SEQ ID NO: 320070 - DNA, 590 bp, Homo sapiens
cctatcagagggtgcaggacaggcagaggtagaggatcaggaaaaataactaatgggtgctaggcttaatatctagttgatgaaataatatgtacaacaaaaccccatgacagaagtttacctatataacaatcctgaacatgtacccctgaacttaaaacaaaagttaaaaatacagatagatagatagatagatgatagatagatagatagatagatagatagatagatagatagrtagatagatagatagaagcttaaaatctgtgagatatagctaaagcttttcttaaaggtaatgtacagtatgaaatgcttctattagaaaagttgtatggcattcacacttcaaagatatatgtttcccagtagtcatgcctttatgtaatcccctccaacactgaattagagttgactgtgtgaccaacagattatagcagaagtgaaaatgattgacttccgaagctaggtcataaaaaagcatgcagctttcactttggcctcttgaattattcactcttggaaaaacagccacatggtgatgaaatcactcaaatattagaaagacatgcagagaaacttgccagcca

SEQ ID NO: 320071 - DNA, 556 bp, Homo sapiens
attatgtacaattaggcaaggtgtttacattccaggaagaaaggaaaatgaatacaggaacaataaagaattgtacctactcaaagggcaaagaatttcccagattcycttggccagaactttgccacaaggttatcccaagtcccacatagtctgtggaagcaaatacttttagctgactacattgctcaagcaaaattaatgttctgatagcaaagaagaaagaccaatagatattgggtgggcaactagcaggtaattccatactctaaaattgtccctcaggggaatggtagccattcaatacatcacttcttttttctttcttagaaaggaaaaaagtgtctccgcaccaagaagtcactcaaagccatccacctgcagttcaagaactgcaccagcctgcacacctacaagcccaggttctgtggggtctgcagtgatggccgctgctgcactccccacaataccaaaaccatccaggcagagtttcagtgctccccagggcaaatagtcaagaagccagtgatggtcattgggacctgcacctgtcaca

SEQ ID NO: 320072 - DNA, 572 bp, Homo sapiens
aatgaacagcccacaggtcctactggaaggaaattggcaacaaatattttataatccaagcagaaaatgtggcttggacttacattttattagcaaaatctgagaaccagactctgcttgtagcatagaatcagaagtttggaagaagttataaagttcttagcttgggttaaatatgggtcagtatgctccaagctgacccaagtttgtcctgctgaagcaaggccacttagaagatcctgggaggactttgatacaggagatgctagtaagtgggcattctagctcctctgaaagttgagcagtgagaatcttccccaatawtttgtagaaaatcatagcccccagaaaagagaataaagaccataaggatcctgttaagtgtaccatgttatctccctaaattccatttcatggttcaagaatccactctaagttcaccttctctaagaagccttcttcaccagcactcttttgactacaatgagcctgacccaacctcttttgtgcccaactgctctttgtaacaattactatcatagcagctgaaacaccatctctgttacttgttt

SEQ ID NO: 320073 - DNA, 572 bp, Homo sapiens
aatgaacagcccacaggtcctactggaaggaaattggcaacaaatattttataatccaagcagaaaatgtggcttggacttacattttattagcaaaatctgagaaccagactctgcttgtagcatagaatcagaagtttggaagaagttataaagttcttagcttgggttaaatatgggtcagtatgctccaagctgacccaagtttgtcctgctgaagcaaggccacttagaagatcctgggaggactttgatacaggagatgctagtaagtgggcattctagctcctctgaaagttgagcagtgagaatcttccccaataatttgtagaaaatcatagcccccagaaaagagaataaagaccataaggatcctgttaagtgtaccatgttatctccctaaattccatttcatggttcaagaatccactctaagttcaccttctctaagaagccttcttcaccagcactcttttgactacaatgagcctgacccamcctcttttgtgcccaactgctctttgtaacaattactatcatagcagctgaaacaccatctctgttacttgttt

SEQ ID NO: 320074 - DNA, 582 bp, Homo sapiens
accacttgctttggcagtctgctcagatgagatatcgaggtgcatctagaaatataaagcatagactgattcattgaattggtcagattattttttgaaatgggtcatttcagtcaaacaatttgtttgtaacccaagttactaactagttattgcccatttgatctattaaaaacaattcatccatttggtaaagcctcactaacatttttgaaatcaatctatacaatgtacctgagaaaaatatattaattagttaataccttcactcaattaaaacttgggcatgtccaaagtctgaccacacacctcttgtcatattggattggccatcacaggtaarttcttacaatgttggacacagattctttaacaaaacagttgaacttcagtacacaccaagatggttaatgcaacacagactgctcaaggttagactaaacacaaggtccaagaattattttctatggccctccttaatgacacaaagccataccttttaacgggcatttttttttctcacaaaactttgtattgatttatacatttcttcaattctgtataagtgggctgtgaatttac

SEQ ID NO: 320075 - DNA, 582 bp, Homo sapiens
accacttgctttggcagtctgctcagatgagatatcgaggtgcatctagaaatataaagcatagactgattcattgaattggtcagattattttttgaaatgggtcatttcagtcaaacaatttgtttgtaacccaagttactaactagttattgcccatttgatctattaaaaacaattcatccatttggtaaagcctcactaacatttttgaaatcaatctatacaatgtacctgagaaaaatatattaattagttaataccttcactcaattaaaacttgggcatgtccaaagtctgaccacacacctcttgtcatattggattggccatcacaggtaaattcttacaatgttggacacagattctttaacaaaacagttgaacttcagtacacaccaagatggttaatgcaayacagactgctcaaggttagactaaacacaaggtccaagaattattttctatggccctccttaatgacacaaagccataccttttaacgggcatttttttttctcacaaaactttgtattgatttatacatttcttcaattctgtataagtgggctgtgaatttac

SEQ ID NO: 320076 - DNA, 582 bp, Homo sapiens
accacttgctttggcagtctgctcagatgagatatcgaggtgcatctagaaatataaagcatagactgattcattgaattggtcagattattttttgaaatgggtcatttcagtcaaacaatttgtttgtaacccaagttactaactagttattgcccatttgatctattaaaaacaattcatccatttggtaaagcctcactaacatttttgaaatcaatctatacaatgtacctgagaaaaatatattaattagttaataccttcactcaattaaaacttgggcatgtccaaagtctgaccacacacctcttgtcatattggattggccatcacaggtaaattcttacaatgttggacacagattctttaacaaaacagttgaacttcagtacacaccaagatggttaatgcaacacagactgctcaaggttagactaaacacaaggtccaagaattattttctatggccctccttaatgacacaaagccataycttttaacgggcatttttttttctcacaaaactttgtattgatttatacatttcttcaattctgtataagtgggctgtgaatttac

SEQ ID NO: 320077 - DNA, 582 bp, Homo sapiens
accacttgctttggcagtctgctcagatgagatatcgaggtgcatctagaaatataaagcatagactgattcattgaattggtcagattattttttgaaatgggtcatttcagtcaaacaatttgtttgtaacccaagttactaactagttattgcccatttgatctattaaaaacaattcatccatttggtaaagcctcactaacatttttgaaatcaatctatacaatgtacctgagaaaaatatattaattagttaataccttcactcaattaaaacttgggcatgtccaaagtctgaccacacacctcttgtcatattggattggccatcacaggtaaattcttacaatgttggacacagattctttaacaaaacagttgaacttcagtacacaccaagatggttaatgcaacacagactgctcaaggttagactaaacacaaggtccaagaattattttctatggccctccttaatgacacaaagccataccttttaacgggcatttttttttctcacaaaactttgtattgatttatacatttcttcaattctrtataagtgggctgtgaatttac

SEQ ID NO: 320078 - DNA, 574 bp, Homo sapiens
gaatgtatgtgctttttcaatctgtacatttaactgcccctttccctccctcaaattttaaggcaactagaagaatcactgcaaaaagacacatcaatattcattcactaacattaatacaactatttaccatgttccagacactgttttaggtgccacagtcacagcaatgtacaagacagttgctctggaccaagtgctgtatcccctcaaaatttaatgttgaaatgttgaaattctaatccccagtgggatggcatttggagatggagactttgggagataatgaggtattgagggtggagtcctcatgatggaattagtgtctaagaagagacaggcyagaacttgcttcatctccatccttctaccatgtaagattacaacaagaagctggatatctacaaagcagcaagagggccctcacaagacaccagactgccagcaccctgccttcccagcctccagattgtggaaaataaatgtttgttgtttaagcaacccagtatctgatattctgttacagcagcccaaactaagacagcagttaacgacctctctgtctttgtggagc

SEQ ID NO: 320079 - DNA, 574 bp, Homo sapiens
gaatgtatgtgctttttcaatctgtacatttaactgcccctttccctccctcaaattttaaggcaactagaagaatcactgcaaaaagacacatcaatattcattcactaacattaatacaactatttaccatgttccagacactgttttaggtgccacagtcacagcaatgtacaagacagttgctctggaccaagtgctgtatcccctcaaaatttaatgttgaaatgttgaaattctaatccccagtgggatggcatttggagatggagactttgggagataatgaggtattgagggtggagtcctcatgatggaattagtgtctaagaagagacaggccagaacttgcttcatctccatccttctaccatgtaagattacaacaagaagctggatatctacaaagcagcaagagggccytcacaagacaccagactgccagcaccctgccttcccagcctccagattgtggaaaataaatgtttgttgtttaagcaacccagtatctgatattctgttacagcagcccaaactaagacagcagttaacgacctctctgtctttgtggagc

SEQ ID NO: 320080 - DNA, 620 bp, Homo sapiens
tgaaaagcattgttctggctgtcctattgagaatatatcccatagaagcaaagatggaagtagaaagacctattatgaggatactgcaattatccaggagagagatgcatggagtaatagtggaggtggtgagaggtgtaggatttattgttagaagaggatctactgacatattagatacgaggtgtgaggaaaagtgaaggtcaaggatgaattcaaggtttttgcttcaggcaaactgtagtttgaacttgtgatgaggaagactggcataagagcagatttccttgtaggggtgtgtcaagagttcacttttgagcatgttatgatagggatgttattagataaatagttagatctctgggcctggagttcaggagaaagttctaggctgaagattttaaatgtgggttmtaattagtacaggtggtcctcagtatttgtgaaggattggttccaggacccccctcacataccaaaatctgcagatgctcaagtcccttatgtaaaatcatgtggtgttggcatataacctacacacatcctcccatgtactatatttaaatcatctctagatcatgtataatacatataacaatgtgaattgtatgtaaatagtt

SEQ ID NO: 320081 - DNA, 464 bp, Homo sapiens
agaggacatgacaggctgatacagggcaagaagagaatggagccaagggcagaatgataacaggttattcacagctgggcactatggctcacacctgtaatcccagcactttgggaggtygaggtgggcagatcacctgaggttcaggagtttgagaccagcctggccaacatggcgaaaccatggttttttttttgtaaaatgttgtaaaaatacaaaaattagccaggcatggtagtgcatgcctgtagtcccagatacttgggaggctgaggcagaagaattgcgtgaacctgggaggtggaggttgcagtgagccaagatcttgccactgcactccagcccgggtgacagagcgagactgtctagaaaaaaaaaaaaaaaaagaaagaaagaaagaaaaaaaggcttatttacatttaagacacgatggaaaagcaagactgaatggaaaggggcacaga

SEQ ID NO: 320082 - DNA, 577 bp, Homo sapiens
gattaagggtatctggcagaaaaactttctaagcagcaaagtgtttaagatgttgcctggctgcttcaaacagcctattctcagatacaggagcaaaggaatgacttaaagttggaacttctgttgaaaaggaaagcagagcataaaagtttagagattttgcagcctggccatgtgacagagaaagaaaaagctttctggggggagaaattcaagcttcctgtgtagcaatcacttgctagaaatatttgcataattaaaagggagccacatgctgatagccaagataccagggaaaaagcctcaaaggaatttcagagatcttctaggcagcccctcccatcacagttccagaggcataggaggggagaatggtttcatgtgccaggcccaggaccctgctgccctgcgcagcctcaggacactgctccctgcatcccacccactccagctccagctgtggctcaaagggccctakgttttggttatgtcaccactctggagactgcaagctgctgtatgctttggctgcttacatgtggtgttaggcctgcacgtgtgtagagtacaagagtga

SEQ ID NO: 320083 - DNA, 593 bp, Homo sapiens
ttaaagttggaacttctgttgaaaaggaaagcagagcataaaagtttagagattttgcagcctggccatgtgacagagaaagaaaaagctttctggggggagaaattcaagcttcctgtgtagcaatcacttgctagaaatatttgcataattaaaagggagccacatgctgatagccaagataccagggaaaaagcctcaaaggaatttcagagatcttctaggcagcccctcccatcacagttccagaggcataggaggggagaatggtttcatgtgccaggcccaggaccctgctgccctgcgcagcctcaggacactgctccctgcatcccacccactccagctccagctgtggctcaaagggccctatgttttggttatgtcaccactctggagactgcaagctgctgtatgctttggctgcttacatgtggtgttaggcctgcacgtgtgtagagtacaagagtgaaaaatgcttggcagcccctgcctakattttggaggttgtatgaaaaatcccatgtgcccacgcaggggcctgcttcatggtcagagtccctacagaaaatctctactatggcactgagggg

SEQ ID NO: 320084 - DNA, 593 bp, Homo sapiens
ttaaagttggaacttctgttgaaaaggaaagcagagcataaaagtttagagattttgcagcctggccatgtgacagagaaagaaaaagctttctggggggagaaattcaagcttcctgtgtagcaatcacttgctagaaatatttgcataattaaaagggagccacatgctgatagccaagataccagggaaaaagcctcaaaggaatttcagagatcttctaggcagcccctcccatcacagttccagaggcataggaggggagaatggtttcatgtgccaggcccaggaccctgctgccctgcgcagcctcaggacactgctccctgcatcccacccactccagctccagctgtggctcaaagggccctatgttttggttatgtcaccactctggagactgcaagctgctgtatgctttggctgcttacatgtggtgttaggcctgcacgtgtgtagagtacaagagtgaaaaatgcttggcagcccctgcctatattttggaggttgtatgaaaaatcccatgtgcccasgcaggggcctgcttcatggtcagagtccctacagaaaatctctactatggcactgagggg

SEQ ID NO: 320085 - DNA, 616 bp, Homo sapiens
tgatttattcagctattaacaggatgactgcagctgttgtgttgaagagcaggtttggggcgtaagggtgagagcagggtcaccagttaggaggcagtaaatgatggcagcttggaccagactgaaatcagtgtagatgctgtgaagtggctggattcttaatacattgtaaataaattcctaacgaattagatgcaattttgagggaaagaaaggatttgggatggttccaatattttgatctaagccactagraggatggtgttccatcaactgaaaagagaaaggctgaatatatcaggtttcaggggataaattaagacttcagctttaaacatattaggtttgaaatgtctcctagacctctaggtgactatatcaaataggtagttgggcattcaggtttggattttaggagagaggtccagctggagataaaacttttggagtcatcaaatggtatttaaagccatgagactgaatgctattatcaaataagtaagtattgatagggaagatgtccataaattaagttctgaggaaccaacattaagaattttgagattgtatagaggtagaaatagcagcaggatctaagaagatggggtcatcaggt

SEQ ID NO: 320086 - DNA, 596 bp, Homo sapiens
ttttagctttttatgacattgtattacacttaaataatactgaggttgccattgcctgttacttaaacttttgagaaattctgtcacttagtttttaaattcttgtttgatcttttaaaaccaaagtttagtacaccacatttatcctcttttaatttagattttctagtctattgttttggatccttgactgtgataactaatgtattcacatctaccccttgccacattggaatggcagaacatttgataatcatacattctgtgctttttattaatatgttttcataattgatgtaatgacaagagcatagactctaaagtgatcacgattaagattttcctttctcttctgctagctatacataccacgcagctaataatcctgctttcattgagcacttactatgttctagccactctgctagtgactttccagatatactgtattttaattctttcaatttatcaatgagtagggaaatatatttttccatttttattataggaatataaagcaraagttttatatttctgtttaagcatacacagttaagtgacttgcacataattcactgtcctagttttcagttccg

SEQ ID NO: 320087 - DNA, 575 bp, Homo sapiens
cagatgagaggaagggttgaataggtgaaacatagggaatttctagggtggtaaactattccatatgataggtaactgttaacacatggtaytatgcatttgtcaaaacccactgaactttacacaaaggagtagaccttactctttggagtaaccttattcattaagagtaaaccttaatgtatgcaacttaaaaaataattcagatgttagaggaatcccaggatggaatgggattcctaactatattacaatctaactatattacaaatgtatactatttaatacaacctcaaataaagctggggaaaggaggctgacctgagcaactctggaaattagagtagtctgtcaaacaataggcaaaaagtctagagaactaatatatatcatgaggactataggtgataaaatcatactgtatttgggattcatgacaaatgaatagattttagttaccttaccaagaaaaaaaaagatagtaaacatatgagatgatgaatttattaatttgcttcactatagttaaatactatagttagatactttttttctatctctgtatatcccataac

SEQ ID NO: 320088 - DNA, 575 bp, Homo sapiens
cagatgagaggaagggttgaataggtgaaacatagggaatttctagggtggtaaactattccatatgataggtaactgttaacacatggtattatgcatttgtcaaaacccactgaactttacacaaaggagtagaccttactctttggagtaaccttattcattaagagtaaaccttaatgtatgcaacttaaaaaataattcagatgttagaggaatcccaggatggaatgggattcctaactatattacaatctaactatattacaaatgtatrctatttaatacaacctcaaataaagctggggaaaggaggctgacctgagcaactctggaaattagagtagtctgtcaaacaataggcaaaaagtctagagaactaatatatatcatgaggactataggtgataaaatcatactgtatttgggattcatgacaaatgaatagattttagttaccttaccaagaaaaaaaaagatagtaaacatatgagatgatgaatttattaatttgcttcactatagttaaatactatagttagatactttttttctatctctgtatatcccataac

SEQ ID NO: 320089 - DNA, 570 bp, Homo sapiens
tctctttctttcccattctgtaccataaaccctggaagagcttgcctggtaagacagaaccctcattataggtcatgagaggttaaaaaaaaaaaaaagaaagaaaaagaaaaatctcagtgcaaagccaaatcttccttaatcttcctttagttgacagtgagggaaagctggagacatttatatgacaatgtattgttgttgattttgttaactgaacagttttttaattaaaaattaatttttaattgaaaaaaacacttaactcttttcttatacccagaagcaattgacatatgtgaaaagtccttgaaaattaatcattcactgctttttgacagatctatttttgtctttacatgttacttagattttttattttacttaacatttgtccattatgtcttttctgcccaattaatagatttttaagaaaatttatgtataatacctagcatgrtattttatacataacaagtgtttagaaatatttgtggagatactttgaaagacctagttataaaacaaattttatctaagagggattttattctgagccattactagcca

SEQ ID NO: 320090 - DNA, 560 bp, Homo sapiens
tgtcctgatgtattcaaatatctatatttggtattatagtgttcaaatattggggtctgagtttgcatccttaaaagttctttctatagctctggattattatgctgatactaagaatttgatattgcttcttcccattgtaagagctcaaatctgggaaggcattctccttctctttagacctttcctaagtagactactttgtctttctatgacagaaactgcacgttttgtgctcctttactgaggcgagtgtccctggacttgtcctttccccaccattgctttttcctttgtatatttatagccatcactctattaagactgcttcacagggtggctacctttacttcctgttttatactcattaatagaaactttctcagacctctgttttcatcatttctaccattaatctttcttgactgttattgttttgtttgtcagaccccattactgttgtcatcaaaataatcaccaccaccatcattaatattgtcaacatagtcaacatttattgaaattttgctacrtcgttaagagtctgaactattgatcat

SEQ ID NO: 320091 - DNA, 569 bp, Homo sapiens
gtaaactacgcattggcactcagtctgcccagcagtgacctacagacacttccactcacatcccagtggccaaagtgagtcatgtggtcctgccaagttcaaccacggaatggtgtctaatcctcctacaggtagggcaccacagaagaggatgctaaatatgggtgtctagacacacagtctgccacacagacaaatgtacatttcagcaatgccctgtggagaacagagtgggcacacctctgtggactgctcaatccctgcatgcttgacacccctggaattcagatcggtactgtgtgtctgactagacctgggagggctgaggaaaccacggcttatataactccttctacagagaaattttagtctagaaatatttccagtgagctttgctttttttcccacttttgtcaagaagaaaacaacctgacaataatggcaaggagcccaggggagaatcacaaagtcaaaatgacaggcatggaatgaaagaatcaggccagtagtgatgtakgaaatgtcctacttttgatttttcatgtaggaaacacttaaaattgattttc

SEQ ID NO: 320092 - DNA, 563 bp, Homo sapiens
tactgtatggcaacaaagtctaacacactaatcaggtctaggtctctcaacaattcctcatatgacaaagttttctaatataatattattcatggtaccctactcttctgtgcattaatggctattgtcattttttaaaatgtgattctgtaaataaaattcagcacttttgataaggtgcaacaatgccagagtacagtggaactatcaatttgtaggattcatatgccatatctttgttactgacaaataagtttactttaaaagttagccatgagagatctattgcatctgggaagatggagtagayatatttccaaattcctcccactatatgtactaagtacaattaacgaccctggacattatgcatataagaaacaaaaatactgaaaagtagagggaagtcagatcaactaaggaaccatggagccacagatttataaagtggtgagttctctgggtttttctgcagaagaaaagttttatatatcccagatgggttgctagagaagctgacaacctagaaatcttaatgggtgcacagcataaaggtcagaata

SEQ ID NO: 320093 - DNA, 587 bp, Homo sapiens
agaagtcatactaaaaatgcctcaacagcaattacaaacaaacactaaacaaaaaataacctccaaaaagatatatgaagtctcaacaagaaatggaagatataaaaaagaaccaaataaaaatattagaactggaagataaccaaaataaaaagcttagtggataaactttacaccagaatgaaggggggaaagagaaaatatgaagatagaacaataaaattgtataatctgaacatcaaagagtaaatagactaaatttatgaaaagaacaaagcctcagaaacctgtgggaaaataacaagagatataacatttctgtcaataaagtcccgaaaagaggacagagacaaaaagtactcaaacaactaatgactgaaaactcaaatttggcaaaagatataaatgtatagattgaagaagctgagtgaacattaaacagaatayacccagtgaaatccaaccaggaaaatttataatcaaccttctaaaaactaaaagaaaaggttttaaaaaaagtgataaacaacagcttatctatgggggaaaaacaatgtagataacattgcatttatcatcagaaattg

SEQ ID NO: 320094 - DNA, 512 bp, Homo sapiens
tgcggttgagggatgttcccaggagtgagttaattctctggggtgagcaatttctagcctgctggtaggacagatgaagtgactccaacaatgaaagaaagacttcagcaaagaaatgaaggtgctagtagttggctggtgtacactgaagtgctaaagtcaaggtggtatagatgcagtaccaatagcacctactacattgtccaattcttacagaatttctttctttctcttacattgctgtactggctaaaacccctagtccatattgattaaaagaaatgataaaggtcatccttgcatgctgtctgatkgcaaaggaaaagcttcaccataggtttactataaatacctttatcaaattatggaagtttcttctatccatatatatttttaaattatgaatgagtgttaaattatatcaaacatttttatttatctaaagagacaatagtgttacttttctcatttattctgtaaatgggctaaatttcattgattattattattat

SEQ ID NO: 320095 - DNA, 609 bp, Homo sapiens
atcatttcctcaagatacacaaactacttcaactcactcaacataaaatagatgatttgaatatccctgacaattagaggaattaaatttatacttaacaacctccctctcaaaatatctcagatccacgtggttttattggtaaattttatcaaaaatttaatgcagaatgcaatgtgaaytttccataaaaatagaagaggaaataattcgttttttgaggctaaaattaaagtaaaaaagaaaactgcatgtaaagaaaagagatcaacatctctcatgatgttagacacaaaaattatcaaccaaatgtaaaagattgaattcaatgataaggtggtatttattgcaggtatgcctgaatccttccttcaccagttcagatatgtagtgcctacatgattctctcactccttttttaaaaaatccatccctcagcaaagggtgacaccaatcacgtactttggaggatacttttagtctcttttgcttatggtccacagctcaattgccatttcagttttatcacattcttggtgccccctgccccctgccccctgccccatcaggaccttggataattctccttctcctgctgatctagaagag

SEQ ID NO: 320096 - DNA, 583 bp, Homo sapiens
ttttgcttatggtccacagctcaattgccatttcagttttatcacattcttggtgccccctgccccctgccccctgccccatcaggaccttggataattctccttctcctgctgatctagaagagaagaggccctctccagaataccatgtcctctctcttccaaatttggggtcagtcctgtttatacttyagtatactgaagctgagttgccatttcagccttgtctttaattcacaaagaaatggcttggctaccttgacaaagtgaactcaggcatatgtgaaccaagaggaagctgactttcgagcaagggaccttcctttccagaaactctggaattgggtgttctagatgattggacctacttaaagagtcaacaatatggaatgtccatattggcatctaaaagattctggcagtcatgctttgcaccttttaattgctgagcctatgatacttaaatttacttttattgcactttgggatccatcctgaatactcattctatttcgtcaactccacagccagcctaggcttcataacttgcttgcatttcgtgcatggtagcttattagaatga

SEQ ID NO: 320097 - DNA, 597 bp, Homo sapiens
gtcttcatatgcttcactctgtatttatcagggaggcatatatttctaagaaatcttcagcagtatttctctttggttttatttggttttgtactttcatcttgctgttgggctgagagactgcctgccagtatttgagtggatttgggcatttccaaccagaataaaaaggcaaggggaattgtgatcaacagtataactgccatatttaccaagactgacagacatactatggtcttttaatattcttgtaggctttattttgaaggtgtcttgtcatggtaatagagaagtagagaggaattgttttgatattaatgacaatataaattacaatattaattgctctcacttatcarcacctaccttctcctaggaactgtgctacttggtattctttgcatagattatttcatttaatcttttccccatgagacagtaaatataattcatctcaacttatagatgagaaaacaaagacttagaaaggtgaaataatttgctcaatatctctcacgtggaaaagaaaaaactgagttcaaacccaggcaatcagtttttagattatgagttcctaatgacttaccattctactta

SEQ ID NO: 320098 - DNA, 316 bp, Homo sapiens
cagcaaaaccatgaacatttgccatggtacatcttcccttagccacactgacattacattcctgggcaaaattggctccaggtcctgctcaagctgagcctgaacaaaggcatcttgatttgtgtgtgtgtgtgtcaatcacaacatgtaatcatcagaaaccatgatctcacatccccctcccccctctcagttcagattttgsatttgtcaagtgactgactaagtgttaacaaccagcagatggactagaagggcagatggggctttctcaggaaagcagctaagaagtgattaaaatcaccaaggactgcac

SEQ ID NO: 320099 - DNA, 581 bp, Homo sapiens
aggagacaagatagttaggaaatgttttaaatagattttatctgcttgaatattaatatcatggtcatccttaatatttggggatgctcataaagatgtttcccatttttataaggttttagaactgtcaactcacttccacrtgtattgggtgtctataccattattttactaattcaaccatttggtgttatgtatgagtgaggcactgtgataggtgctgatgttacagggaagagcagttcaacctctctaaactcagtcattctccttggtgctataatataccatctgcatgactatgccttttgaaacactcagtttgggacatttacacttattttaacagcagtgctctttcttatattgctgggtaacccccttaggaaatgttttcagaaccagactcatagctccaaaagaaaatgtctcattactttgtaggtaaatctcattttcgacctaaaatagttttgcctagtttgatgatcaaacttgattctgaaagatattttgttacatgacatagatttctataattgagaatatttaacacaatatgctagaggcagtaaataaca

SEQ ID NO: 320100 - DNA, 477 bp, Homo sapiens
attttcacatgtactctcaactgcatgaagaaattctgtgtttgaggagagctgaaaaaggagaagataggcacagaagtgagaggagggtttcttaacctataccttattatatcattattttaatctgtyaattaattgcttattaaaatacaattaaatcaaaaataaaatggaaaaaactacagagcctatccccattgggttttacacaaaatggcagagaagcaggaattactagctaaatcaatgttaaaaaactatttgttattaaagaaaagacaaacttctctttggaatgattgctgtagaattacagctatgcttctgtctgttccagctgggtcagtttattgcattcattgacttttgttttcaactctaatcatttacttgattgaatgttgctttcctgccttccttacatcactgatgcgtttcaataaataataaattttgctcccataaccttatttg

SEQ ID NO: 320101 - DNA, 656 bp, Homo sapiens
acagctatgcttctgtctgttccagctgggtcagtttattgcattcattgacttttgttttcaactctaatcatttacttgattgaatgttgctttcctgccttccttacatcactgatgcgtttcaataaataataaattttgctcccataaccttatttgtttaaacttctttccctttgtagttcctaagaactayaaagtctcccacctgtcagatgctatgtttggagctggagatacaaagacaataagacatggccctaagagatcataattacaggagagtgagagataaatatctttttatgggcgaaattgtgttcccccaaaattgatatgttgaaatcctaactcctagtaaatcagaatgtgatttactgtatttggagagagcatctttgaaaagataattaaggttaaatgaggtcattagggtaggcccaatccaataggactggtgtctttataagaagagacgattaagacacagacatgcggggaggaaagaccatgtgaagaaaaagggagaagactatctttgaaaaagctgaggacaggtgcctcaggatgaaacaaattctgctaacaccttgatcttggatttcctgcttccagaactgtgatgaaataaattactgttgttaaaatcactc

SEQ ID NO: 320102 - DNA, 612 bp, Homo sapiens
ctatgtgtccatgtgttctcatcatttagctcccaattataagtgagaacatgtggtatttggttttctgttcctgcactagtttgctaaggataatggcctccagctctgtccatgttcctgcaaaggacataatctcatcctttttttttcctttttttttttttaagacagagccttgcattgtcacttgggctggagtgcagtgtaacaatctcagcttgctgcaacctctgcctcctgggttcaagtgattctcttgtctcagcctcctaagtagctgggactataggcatgtgtcactacacctggctatttctttgtatttttggtagacacagagtttcaccatattcgccaggctggtctggaactcctgacctcaagtgatctgcccaccttggcctcccaaagcactggaattacaggcgtgtgccaccacacccagcctcttttttatggctgtttatattccatggtgtatatatatatcacattttctttattcaatctaccattgatgggcatttaggttgatttcatsacttttctattgtgaatagtgctgcaatgaacataggtgtgcatgtgtctttatgataaaacagttta

SEQ ID NO: 320103 - DNA, 594 bp, Homo sapiens
aatgacattttagtggcattttaaataatgggttcacagttcaggtcagtgtattaggtaacagttgtaagttggaagcaggcaaaggcaaacatcagcgctaactcatgtgatagctgggttaagagaatctttgtgtataaatagcctttctatgaagtaggtataatagcatgagtcaccctttttttctttctgggactctgaatgattttatataaatgttaatgagtccccaacaattcaagttttctttaaactccttcrtaagtattcctaacttcagactctccttttttcaactattttgcatattaatagcaattatcccacacggggagaggaaacagcatgccaagccctgctttagaatcattagctcatcgtaatattaatcctgaacacaaccacagttactacgtcaacctcataaaaaaaaaaaaatgagtctcagcgatgctaaataacttgctaaagtttggacagtgattttgaggctaagttaggattcttttcttttttctttttttaaggcagtgtctcactccattgctcaggctgaagggcagttgctcaatcatggctcactgcagc

SEQ ID NO: 320104 - DNA, 614 bp, Homo sapiens
ggagtgacaaatgtgccctcaaacctctggttcctgcactctgatgagtggtatcagccaaagtgtattgtagtgtggtgtggtgaccacaggattcatcctcactcacacctgccagcarccatggtaacagcagtgcagtgggttgcacatttgtcagctgcagcaaggtgctcatgggtgctggggtgcctgcctctctgcaggtgttcaccacagtgacagaggcaatgcagctttgcagggcaggggactgtggcaactgtttgaatgatcgtgctggtggtggtgatggcttgggggtgggatgctgtctggtgtaggtctctgtgccttctctgtttgctgcaagcaggagtgattgctcagtgcaggggaggattcactgttctccgcacctagtttcactcctgtggcagtgttagtgcaaggttggggcactggtgggggcagggctggctgcctctgtgctcatcaagtctctatctgcaatgacatttagggagtgatggaagtgggctgtactttcactgcagcagtggcagagtggtgtgtgcacatactcgctcgcacactggttggacaaggaaagcaaaacctgcctgcacagacat

SEQ ID NO: 320105 - DNA, 602 bp, Homo sapiens
ggaacacatgagataatagagttcaacgagctatgaataatatacagtgtctaaggactgtagcattatttaaacctgcagctagtccatttgtttttaagttcccatagcattgtgtgcccagccaagaaccytcttgcccccagtattaagtgttgatgaagataaaaaattggaaagaagagagcacaagcaagggagagaggggatgtttggaagggccttgtgatttgaactcttcttttattccagttttctagagatgataatcgggcttttggttccaacaggagcattccacgttgttgagagattcgcaatgaaacttcaatgctgggagaaaaatgtgctcatgtctttcttttcaaacacttcattccatgtccatcccacatacaagcactgtgcagagaatgataggagcaggcagataagtcatttcaccaacagtgacaatgtaggacctcattttaatttaatcatcaggatagacaggatttttgcctggtaacaaatcaccaggcccttttgctggtgctggttttacactagattgagccccatcattcttcatgctgcattacatccacaccttcatcggg

SEQ ID NO: 320106 - DNA, 594 bp, Homo sapiens
aatgacattttagtggcattttaaataatgggttcacagttcaggtcagtgtattaggtaacagttgtaagttggaagcaggcaaaggcaaacatcagcgctaactcatgtgatagctgggttaagagaatctttgtgtataaatagcctttctatgaagtaggtataatagcatgagtcaccctttttttctttctgggactctgaatgattttatataaatgttaatgagtccccaacaattcaagttttctttaaactccttcgtaagtattcctaacttcagactctccttttttcaactattttgcatattaatagcaattatcccacacggggagaggaaacagcatgccaagccctgctttrgaatcattagctcatcgtaatattaatcctgaacacaaccacagttactacgtcaacctcataaaaaaaaaaaaatgagtctcagcgatgctaaataacttgctaaagtttggacagtgattttgaggctaagttaggattcttttcttttttctttttttaaggcagtgtctcactccattgctcaggctgaagggcagttgctcaatcatggctcactgcagc

SEQ ID NO: 320107 - DNA, 440 bp, Homo sapiens
gaaaacttgtaaattctttctctatctctttaaaatgtatgtttagcttcttagaaattaaataaggctcctgccagcgttatgacccaggaatgtctttttcaagaacctgggagccctctttttgaaatggaaacatcaagggagacagtaccctgtagcccgatttctgtgggagggtaggagcctaacttcagtgggtgcctggctccaagctgcaaaactaccttctgtcaagaagatatggaaagtttatttttcttttgtataaaaccaattaactaacacagatggtcaccccaattaacaggtaaatttaggataaactatatgtaataaatggcactgtcaaatcctsttactggaggactaattattgtctatttagagattctgtagataatgagttttatctggtcggctttataaaagggttagat

SEQ ID NO: 320108 - DNA, 644 bp, Homo sapiens
ttctggaaaaatgcctgccttcgagtacaaaggaagtccacagtcacccctctgaaactggtgtgctaaagaagagaaatgtttcaagagttcatatgagttccaagtttcctttgagcaagttgactttcttctttaaaaatagtaaacattttgaaattttttccccctgaaaaaggcaaaattgaaacaggcagctacatttgggaagaaggtaaaagcaaaatgtgctctgtgaaggtgggagtgagtggtcttctgcctaagtgtctgccatgaagagagcatttgtaattacagccacgaaatcaccctgtagacacttaatagcttaataagagttttaatgggtctatttgaaaatgagaaaccccactgtataaaatgggcccataaaatgttatgcagctgtgctgtggcctcaaacaaattgcaaatagatctcatgcagtatcctgtaatatcaactgctgagtttaggtggctgtagtattttggctacacttgtctccaaaaatacttaggaaagacttcagatgccttcagagaagccctacagagactggtggckgaccctgtggggaatcctgaaaaatttatgttcatgtttactgctccgctaattacctcagcttacactgata

SEQ ID NO: 320109 - DNA, 606 bp, Homo sapiens
tagcattgcagaagacagaaatcaatctaaaattcattagtttgcctgacaagagcctaatctcttattgtttaataccaacgatggcacctcaggtagaataggaagctgcaagagatcatcctagtttcttgtgacagaaatgttcaatgtttacggcttaatctggcctttcgactattcctattctgtgggcagaaacctttgcccccctgcttaaggycaacttgcctgtggtatgaggcaggaatcactctgatgttgtcaccatatttcacagctattagtgttacggttgggtgggttgcagtatttcaggtaaaaaggacacagacgttgcagcctaagtgaagtgttctgtatatacagtgagtcaaaggctcaaacgtagctgcaccatcatcagaaacactcctgcaagccaggggttagcaagaacactccctttccctcttcctcttcacataacccctgatgtgatagctcttttgtgactgcatctctcctttgaggcttctctagtttattttaatcagatctcatctgtgtatacatattagcagtgatattcaggattagcatgggacagaggagtctagagataga

SEQ ID NO: 320110 - DNA, 503 bp, Homo sapiens
gcaaaggcctgcattcccaaaaaccttgttaaaaaccaaacttgctgaatttactattcatcttgaccaagaatagtggaaakttacccaatgaagtattactaccataaggcactaggttaacaggatttacattttactctgccagtttttttttttttgaaatgatcaatttttgacaaacattttaataaagtatgattatttcatgttccataaaatatagcatcacctacatcagtatactaaaaatcttaagagagtagaattgtggcctgtacccaaaagtgtcctcttccttcaccgaataaatacaatatatagaaatctataaacatttattgtttgctactaattttgattaaaatgttggagctgtcaaattctattaagatttcacatcaagtctttaaattggataaagaagaaacataatgaaaagtcacggtggcttatttttataaaataagaatgtaagttcatttgaggctatctccatgtgg

SEQ ID NO: 320111 - DNA, 503 bp, Homo sapiens
gcaaaggcctgcattcccaaaaaccttgttaaaaaccaaacttgctgaatttactattcatcttgaccaagaatagtggaaagttacccaatgaagtattactaccataaggcactrggttaacaggatttacattttactctgccagtttttttttttttgaaatgatcaatttttgacaaacattttaataaagtatgattatttcatgttccataaaatatagcatcacctacatcagtatactaaaaatcttaagagagtagaattgtggcctgtacccaaaagtgtcctcttccttcaccgaataaatacaatatatagaaatctataaacatttattgtttgctactaattttgattaaaatgttggagctgtcaaattctattaagatttcacatcaagtctttaaattggataaagaagaaacataatgaaaagtcacggtggcttatttttataaaataagaatgtaagttcatttgaggctatctccatgtgg

SEQ ID NO: 320112 - DNA, 503 bp, Homo sapiens
gcaaaggcctgcattcccaaaaaccttgttaaaaaccaaacttgctgaatttactattcatcttgaccaagaatagtggaaagttacccaatgaagtattactaccataaggcactaggttaacaggatttacattttactctgccagtttttttttttttgaaatgatcaatttttgacaaacattttaataaagtatgattatttcatgttccataaaatatagcatcacctacatcagtatactaaaaatcttaagagagtagaattgtggcctgtacccaaaagtgtcctcttccttcaccgaataaatacaatatatagaaatctataaacatttattgtttgctactaattttgattaaaaygttggagctgtcaaattctattaagatttcacatcaagtctttaaattggataaagaagaaacataatgaaaagtcacggtggcttatttttataaaataagaatgtaagttcatttgaggctatctccatgtgg

SEQ ID NO: 320113 - DNA, 509 bp, Homo sapiens
tccttaatgtccttttctgaagaaacatcattgtttagccattttttacgtattagtcaccaatcatccaaagagactgtaaacatacaaaggctaattcaaaaagtgaacacaaatgatgaggctacttcaaatggattctttgtttccccttaaatcatttctactggagatgaaattttgaattggtgacataaattaattcctgaatttctagttgcaaaacaaaaaatggggaaatagaaataataatgtcattcattggtgagctgttgttttcttcctcttcaaaatattttcaaacattggctaattcatgattttacctaattgggtatttttgcctaaaggaaataattaaaagagctacatttaaagtagatgagaggcttcacagaagaaaattgcatctttttttttaactcttcttcctgctgatgcttcatttttgagttttcattagarctgttttctttgtttttaagtgaatgagacatgaaccacttatc

SEQ ID NO: 320114 - DNA, 633 bp, Homo sapiens
tacattttgtttttgtatctcttggtccacctgcattagaataattttatctgctttattcacaagtacttttcctggggaaaaaaaaattcttatttgctgctggtggaaccaatgctatagtcacaggcaagattcaagccttaactgtgcactcagcactgctatggagtcaggatcctgctctgtgtcactcattccaggacagcccttctgcaatactagcaagttctgttcacctctaggtgtttacataccttggatttgtttcatcatgtcatgcttcttacctttcaaaacataactcttgctgggcatagtggcatgcatctgtaatgccagctattaaaaggctaaggtgggaggattgcttgagcccaggagtycagggcttcagtgagctatgatcatgctactgcactccaacctgggcaacagagtcagacttcatctctaaataaaccaataaatctgtaaataataaattataaataaataaatgtaagtctgctgtgacctcctccacaaagccttctccctccctttcaggcagaactgacttgcctgttttctctggccccatgtacttggtaccttatatggcagttctctgtgcatgtgtctgatccacac

SEQ ID NO: 320115 - DNA, 607 bp, Homo sapiens
caattcaaaacagccatcttaattccctctagctgtctgggtagatactcttttggaaaccaaacttaagccaaaattcgaaggagaaactcaaaggttgaaagctgacaactggcctccatattccagcccaggaactggggaaaagtccaggttaagaattgatggtgaagccagtagcaaagtaggacttacctcttgtgatgtcagagtccaagatttactcccttatttgccagaccaatcaatcttttaggactaagacattctaaaaagaaagttttycctcttccaccattccagtaatgcccaaaggccacttaaactttattttataaatttgtatagaaaggaaactcttcactcatctccattaaaatgcacattctgagatagctttgaatttgcttctctctaacgagcccatctaagttgtctgaagaatacaggagaaattaagacacagtccccacccttgaggaacttacaatctagttggtaatcaaagattaataaatttgcaataaagttaatcagatcctttttcacaggttgcctgaggaaatctctgtcacccttctaggtatcctcagcctttcccacccct

SEQ ID NO: 320116 - DNA, 509 bp, Homo sapiens
tgggttttatatgacttttataagcttcttgtttgtatgtcttctctgtacatttctttctacaaaaagaaactatattttgaaattctttttttrttgttgttgttttcttgagacagggtctcactcttgcccaggctgagtgcagtggctcaatcaatcacgattcactgcagccttgacctcccaggctcaagtcatcctttcatctcagtctccctagtagctgtgactagaggcatgtaccaccataccaaggtagttttttttatttttattttttgcagagacaaggtctcactatgttgctgaggcttgcctcgaacttctagatcctctcacctcagcctcccaaagtgctgggattacagatgtgagacaccacatccagccttgaaattcttaaaaaagtcaacccaagagtcatttttgtttaaagtttggaaagacatgcctctatggactacctagtctatatcctgatagctaatctaggtccttctagccct

SEQ ID NO: 320117 - DNA, 509 bp, Homo sapiens
tgggttttatatgacttttataagcttcttgtttgtatgtcttctctgtacatttctttctacaaaaagaaactatattttgaaattctttttttattgttgttgttttcttgagacagggtctcactcttgcccaggctgagtgcagtggctcaatcaatcacgattcactgcagccttgacctcscaggctcaagtcatcctttcatctcagtctccctagtagctgtgactagaggcatgtaccaccataccaaggtagttttttttatttttattttttgcagagacaaggtctcactatgttgctgaggcttgcctcgaacttctagatcctctcacctcagcctcccaaagtgctgggattacagatgtgagacaccacatccagccttgaaattcttaaaaaagtcaacccaagagtcatttttgtttaaagtttggaaagacatgcctctatggactacctagtctatatcctgatagctaatctaggtccttctagccct

SEQ ID NO: 320118 - DNA, 454 bp, Homo sapiens
tatgctatcatgttatttaattattagtgttcttcattttcaggaatgtaaatgatgattttccattgtgtggcttacaaaagagtaatccagttacatgtaactggggcacaaaggtctatyaaacacaagtcaggaaactctatcttcacccctgcacctctccctgccttcagcagccacgaggtaatacaaattctacttacacatgactttcagaaccaaagccatgttttttttaaatacatatctgtggcttctttttaattttttatttttttttcaatttttaatttgtttttattatgtttagaggtagggtcttgttctatcacccaagctggtgtgtagtggcatgatcatagctcactgcagcctcaaactcctgggctcaagcaatccttctgacacggtctctatatgtcgcccaggctggcctcaaactcctaagctc

SEQ ID NO: 320119 - DNA, 632 bp, Homo sapiens
gtctctctgtgagtgtggcctttcatatgcgctatagcagagaaattagtagtccacagaacaggaggtcagtgttacagcacacaggtccaaagtcttcatgtgatatccaatacttgataattacaattagatctaaaaggagctgaagctctctggcccaacctactcattttacagataatgacacttagacccaaagatggtaggtaacttaaacaaagttggagttagagagtcccccatctcctagtccaaactcatcacccaaccataaacttgccggatattttgtcacatcattcgattgtcactgcaaactcctctaatcacatctgataaacttgttttttcaagaaaactgcatttctcttttagatgtacataattcatccttagcgacacctctctctccttttctcttttttttttttttttttttttttgagacagagtctctctcttgctgcccaggctttagtgcagtggtgtaatctcagctcacggcaacctccacctcctgggttcaagcgatwctcctgcctcagcttcccaagtagctgggattataggcatctgccaccacatctgcctgatttttttgtatttttagtagagacaggatttcacca

SEQ ID NO: 320120 - DNA, 589 bp, Homo sapiens
tttttataacagtaccatgctgacaaacgataatattcaaatacagaaaatcaccaagaagcattacctatatagtgatgaattatcacacaacatttattgtttaggccaatgacaaggtcaaagactaatactttaagcagttaaggtgaaaacttgtacaaaacacaaacaaaaccgaaaaacttgcacctaactcagagatgagttattttctggagtactaacacttcagttatcttgtttcccagcccacatcatattggaagtagctaagaagagaatgctggagggagcarccagatgtagacacaattacagcaacacaaagcaaaataatcatagcctaaacaatagcaaagttaacaggcaaaaagtagttactgtgttatgcccttgactttcattcctctcaacaacccatgtggcagctctatcataaggcacctactatgtacattctctctaattcttacaagttggcattattgtgcccaatttacaactgaggaaactgtggttcagagaaactaaataatttgtgacaagattccttaacaagcaagcaaggcaggatgtggacctggcc

SEQ ID NO: 320121 - DNA, 604 bp, Homo sapiens
aatgctcatcacatgctgtgtgatcttagacaagagttttgtcctccctcatccttttactcatctgtaaaattaagacaataaccatacctggctcaccagaatgcagggaggatggtacaaaataatgcatgtaaagcacttggaaaagygaacagtatttagcacacaggccaagcttaacaattttacttatgatgatgaatattaaccttattaatattcctaatgttaatcccaattcaagtccttttcccttttgaaaagtgaaatcccaagtagaagaaatatgttcaaaatccagccaaaattatactggcactagcatttataaaatactccccaaaacaggtttacaattcaaagtcaaaggagtctaaggcacctagtccaactacttcattttacagaaaaggaaaatcgaaccagagaggtgatgtgacttcccaaacacataaagccaacttagtagcaaagctagctattatggacttcatgccaaaaatgtcctgaatgcagaaagagtatgggcctttgtggggaataaagctcatcttccacatgatagttgtgtaacctcaggcaattttacttaacatttctg

SEQ ID NO: 320122 - DNA, 576 bp, Homo sapiens
ctatgcatgctggttgcttgggcattatcctgyggacacttgaaggatggtgaaggtgaagaattttactgagaggtgggaatggctctcagcagagaggggagctggaaagagtatgggaccagcaggtagtcttccctgaagtcctgccatctttcccccaaagtcaagccatctcttcttccctgaagtccagccgtcttctctccaaagtcaagccatctctcctctaccaactgagcctggggtctttatagacacaggatgggggtggggcaagccagaggtggttttggaaaaggcaacattcaattggtaaaaaagatattattcagaaagaaccaatcaggagagagtgggcaaacagggatagaggtcctcacttttgggtgcaggtctcaagctactttggcttgaaggtggagtttcaccagggacctccccctgtctgcctagaatttctctgcctcctgcctctatcaatattaggcagataagacagagttttcttttcatagggctaattggttgtatgttaagtcctgagtgttagaagacaatttcttgctttcatgg

SEQ ID NO: 320123 - DNA, 613 bp, Homo sapiens
cctggaacaaattcctacttcattatcctccttttgtgcaagaaattgagcttttccaaagtgcraggcatggattatagacagtgttgatggcagcccgacctggcccctgctgtgtccagctcagaggtgaacatgcaactcaaatgcccacgtgctacctgccagtgactacatcctgaagtcacatttcctttcatacccaaattacagtgactctgggctcccacctgccaccttagcaagagtttccttcaacaaatgttcctaaatagccacaaggttgctaagttggtccccttgccctctgcttatggctgaattgggaggacagaaactcaggccagccctcttaggctgacttataaaccattgactgcttcccgactgttctgtgtgctgggctctctcccgttggtgctgctgcctcgtgcaggaggaggagcccaggctccctgcttggctgtgccaaggctgtctgctgctggcccaggcatgctccagtctccatttagtattgagggtccccactgggccaagatcccctctggttccttggtgatttgattttatggctcctcaaagcaggctctctctcttccaggtgagccct

SEQ ID NO: 320124 - DNA, 613 bp, Homo sapiens
cctggaacaaattcctacttcattatcctccttttgtgcaagaaattgagcttttccaaagtgcgaggcatggattatagacagtgttgatggcagcccgacctggcccctgctgtgtccagctcagaggtgaacatgcaactcaaatgcccacgtgctacctgccagtgactacatcctgaagtcacatttcctttcatacccaaattacagtgactctgggctcccacctgccaccttagcaagagtttccttcaacaaatgttcctaaatagccacaaggttgctaagttggtccccttgccctctgcttatggctgaattgggaggacagaaactcaggccagccctcttaggctgacttataaaccaytgactgcttcccgactgttctgtgtgctgggctctctcccgttggtgctgctgcctcgtgcaggaggaggagcccaggctccctgcttggctgtgccaaggctgtctgctgctggcccaggcatgctccagtctccatttagtattgagggtccccactgggccaagatcccctctggttccttggtgatttgattttatggctcctcaaagcaggctctctctcttccaggtgagccct

SEQ ID NO: 320125 - DNA, 638 bp, Homo sapiens
ctcagaggcgggtatctgcgcaatatgcattctggctagatcctctcggcacacccatggaaagctacaatacaaattatcaatctatttgtagaacactctgtgtgttacaaagaactttactactatctatcatagtatgataaatatggtgaatatgtaaatatagtaaatctatgtgcataaagtaaatgtggaatatgacaggagttggaggtagctgagtyaattgtattctaggagtgcaataagacaagcttggttcctgcaaggtgtatgtcagttggttccagcaaggtgaagatgtgggataattagatcccactgtctacagcagtttccacgagttgaaagcatacctactgcttgccctgggggcgttttccccaccatcccttctcaaggttcatttctaattacttgaatacccctagcgtgctgactgaacaggttaatttaaatgggaagacctaaaactcttgtttttcagctccttgccgaggtacctgatgattatcccatcgccaacaggggcaagtccaaatgcctttacgtcccttcacgatgtcatctcccatcactttccctgcacgctgtgttccagctcctcggaacgacctcccatttcctgaataggt

SEQ ID NO: 320126 - DNA, 638 bp, Homo sapiens
ctcagaggcgggtatctgcgcaatatgcattctggctagatcctctcggcacacccatggaaagctacaatacaaattatcaatctatttgtagaacactctgtgtgttacaaagaactttactactatctatcatagtatgataaatatggtgaatatgtaaatatagtaaatctatgtgcataaagtaaatgtggaatatgacaggagttggaggtagctgagttaattgtattctaggagtgcaataagacaagcttggttcctgcaaggtgtatgtcagttggttccagcaaggtgaagatgtgggataattagatcccactktctacagcagtttccacgagttgaaagcatacctactgcttgccctgggggcgttttccccaccatcccttctcaaggttcatttctaattacttgaatacccctagcgtgctgactgaacaggttaatttaaatgggaagacctaaaactcttgtttttcagctccttgccgaggtacctgatgattatcccatcgccaacaggggcaagtccaaatgcctttacgtcccttcacgatgtcatctcccatcactttccctgcacgctgtgttccagctcctcggaacgacctcccatttcctgaataggt

SEQ ID NO: 320127 - DNA, 561 bp, Homo sapiens
gtcctgcccagcccgcaggcagccagactttaaggttatctcccttgttcctgaacatcggtgtcatcctgttcttttttcaaggtgcccacatttcatattgtttaaacaatttgtgcagttgactcaatcatcacagggtcctgaggcaacatacatcctcagcttatgaagatgacgggattaagagattaaagacaggcgtaggaaatcacaagagtattgattggggaagtgataaatgtccatgaaatcttcacaatttatgttcagacactgcagtaaagacaggcataagaaattataaaaacattaatttggggaactaataaatgtccatgaagtcttcacagtttatgttcttctgccatggcttcagctggtccctccgttcggtgtccgtgacttccygcaacaagtgatgagaagacaagattgatgagggcatggcaggaaataatgatatttatgtgtttaattccatgagggatgttgtgttgttattactgttttacagttgagagaactgaggcacacgaagggttgaactcggctgggact

SEQ ID NO: 320128 - DNA, 617 bp, Homo sapiens
ctttactctgccagtgccatcttcagtggcaggtgtcaactgacagatttgaatagacaatttatatgtgtattatttgaaacctagagcatttcctgtagttagctctctcctctacaatgttttgcaaacattacaagaagaacggacccatctcaaaaggtaaccggaaggtaacttgaagctgttatttgcttgtggggagatggggctgtggtcaggcaatggaagtggtggatagctggatagatggatagctggatgctcagggctttctgcagcagcactgggagaagctctagcattgaggacggagtggagcccaagagggacattggaaagccctccatcaaaggtagatgagacctccatgataacaggacattagtatagagactggtttggtggaagaagttgccactgctgaggtgccaattaaaagaggctgttgtgtcctggagaaaggaygaacaagggtacgcttgtgcccactgttgattttctgtggcaccccagcacagagaacagctgagcttaatgccagatttccctcctgctgaattcagccagctttgaaaatgagcaggggagacaaagaagtgcagacctgcatcata

SEQ ID NO: 320129 - DNA, 529 bp, Homo sapiens
atgttattttaatccatttttggaagttattcttggtgcagattaaatataactattgagtgggactttttaataattttgacttattacctataagtactcataagaacttagaagtgagaagttattccatattaactcttttgcttaatggaatgtttgmgtctttgtatattttgtcctgtaatttattttttttaaagaaagaacctcactgtcttgcccagcctggactcgaacttctgggctcagatgatcttcttgcctcctaagttgcaggaactataggcctgagccactgtgtttggctttgttctgtaattttttttttttttttttttgacagagtttaagtctgtcttttaggctggagtgcagtagtgcaatcatggctcattgcaacctctgcctctcaggctcaagcgatcctcccacctcagcctcctgagtagctcggactacaggtgtgcacaagcacgcccgactgatttttaaattttttgtagagacagggtttcactatgttgcc

SEQ ID NO: 320130 - DNA, 578 bp, Homo sapiens
gagactggagttacaccccctggatttaaattctggctctgccacttatgaactgtgagaactctcagggtgtcagtgttcttatctataaaacagagataatgacagcatatgaaaattaataactaatrtttatcgagtgttttataaagcataggcattgttccaagcacttaaaacatataactaattttaatcaagtgactgattgatatgtgttaaagtccttagaatagtgcctaagactcagtcaagtactcattaaatgttaactgttgctatgtccttccaaaactttaatgcataaacacacacacatagtctcaatacaagtgggctattaatacaaataagttttaatacagttttaatacaaataagctattgtgtaaactgcttttttgaaaggtgtctacgatcttgtagacacttttcaatattaatacaaatggacctacttcatcttttttaagaagcacatggtaataatagttgctaacatatactgagttattttgtgctagacactgtgctttatgtgtatcatttcacttaatcctcatgacatccttagaaac

SEQ ID NO: 320131 - DNA, 578 bp, Homo sapiens
gagactggagttacaccccctggatttaaattctggctctgccacttatgaactgtgagaactctcagggtgtcagtgttcttatctataaaacagagataatgacagcatatgaaaattaataactaatatttatcgagtgttttataaagcayaggcattgttccaagcacttaaaacatataactaattttaatcaagtgactgattgatatgtgttaaagtccttagaatagtgcctaagactcagtcaagtactcattaaatgttaactgttgctatgtccttccaaaactttaatgcataaacacacacacatagtctcaatacaagtgggctattaatacaaataagttttaatacagttttaatacaaataagctattgtgtaaactgcttttttgaaaggtgtctacgatcttgtagacacttttcaatattaatacaaatggacctacttcatcttttttaagaagcacatggtaataatagttgctaacatatactgagttattttgtgctagacactgtgctttatgtgtatcatttcacttaatcctcatgacatccttagaaac

SEQ ID NO: 320132 - DNA, 543 bp, Homo sapiens
gggcaacatggtgaaaccccatctctacaaaaaaaaaaaaaaaaaaaaaaatcaacaaaattagctgggtgtggtggcacatgcctatagttccagctacttgcggggakgaggtggggggatcatttgaggcctggaggtcgaggctgcggtgagccatgatcatgccacagcactccagcctgggcgacagagtgagaccctgtctcaaaaaaataagtaataataataggcagagtgcctagcacacagcaggttcaccagtgaagagctgtaccaaggaaatgacacataagctatcttggaagatgcaaaggagccagctaggcagggtaggggtagaggcagcagggagagggcatttcagtcaggatggatagcaaatagcaaaacttagaggtgggaagaggagtaggagaggccatccaagacgcaactcctgcagatgaggcaatcgccatatcctgcagtcctacgaaagcagtgaaggcttcttaactgtattccaagtgcaaaaggccacaggaaagtggcatggccaga

SEQ ID NO: 320133 - DNA, 543 bp, Homo sapiens
gggcaacatggtgaaaccccatctctacaaaaaaaaaaaaaaaaaaaaaaatcaacaaaattagctgggtgtggtggcacatgcctatagttccagctacttgcggggatgaggtggggggatcatttgaggcctggaggtcgaggctgcggtgagccatgatcatgccacagcactccagcctgggcgacagagtgagaccctgtctcaaaaaaataagtaataataataggcagagtgcctagcacacagcaggttcaccagtgaagagctgtaccaaggaaatgacacataagctatcttggaagatgcaaaggagccagctaggcagggtaggggtagaggcagcagggagagggcatttcagtcaggatggatagcaaatagcaaaacttagaggtgggaagaggagtaggagaggccatccaagacgcaactcctgcagatgaggcaatcgccatatcctgcagtcctamgaaagcagtgaaggcttcttaactgtattccaagtgcaaaaggccacaggaaagtggcatggccaga

SEQ ID NO: 320134 - DNA, 557 bp, Homo sapiens
ctgggcaacatagcaagactgcatctctataatacttttaattaaaaaaaaactagaaattaaaaaatacttgtttttatgttcagcatgtgctggactcacagaacagacacaccatgtgctgtgtccacttaagtagaagatagttacaaaggaataaatacggactatttattgtacttcctgctagaaaagtctggagaaatataactatctcactctttgtgctccatctgatcagttcttgaggtttcagagtctctactgttgtatcactataatgtaaagaaaataatatctcatttacctaataatatcccattatgatgtcactaaatgataataataactcatttaattacaggaaatgagatgtcatgtttccaaactattttgatgaagaacagcagtttcctttttaaagcatcattttttataatatgttggttattttgatgaaaatacattatccagaaaaagcactcatatgtaatacagaggaatrtttaaagacatttacttgctatatagccctatacttgcttagttgtcttagc

SEQ ID NO: 320135 - DNA, 627 bp, Homo sapiens
ttatttttctagaagagactaggtagatgtgtgttcctgttcacrtccatgaacaatgggatgtggcaagaactgagttactatatatttaaattaggggataaagtactattctctgtagagagacattaataatataaactcatatgggagaagaattcatgtctcaattgtaaaacaatctagggtatctgcacatttataatgtactattttgctaaaaataataacctaaacaactatgtcagaaaccaggtgccaatttataacactaaacgatttcttgatttacttatgcaattctcaacttcaaaatcaaatacattgtcttaggcatatttgacatatcacagagttgccagtaaaataagcttatgtcctcaatgctggttcagtcagatccagtcttaaactgtaatttccaaaagccactaaggatataaggattaacttcacaatgcaattagaaatctctgaacccactctatcatttgccagtataagtacagcatagtgaaaggacatacaatttattatgaaatgaaattctaattttgactctgcaacctagccttgggtcacttaccctcttaaagacttaagctctttctctgtgcaatagaaaca

SEQ ID NO: 320136 - DNA, 589 bp, Homo sapiens
ttccttggagaccactgttctttgtatttacatgttgctggcataatctgttttccattagaatgatttaggattctgctgcacatattacatacagtttatccagtacttctacctaattatactggtgttayacagtattgatgatagtttggcacatgttcagattttaaatagaatgcattttatggagctaaatttcagtaaaaatgagattttattacctagtcataaatgttggtggaatagaatcccctctctgaaaattagctttaacaacacattaatattattttataacttcaaaaataatgtgtctgtgaagaatgtgtgtgcagtgtctgaaattttatcccatctgtaagctattagtccaccatgattttgtgcatgctagaagaaaacataaaaatcctggtacagacacaaagaacttttctagatcaatagcaataaccagagtgacagcatttttaggtgcctgttccctgagtgccattttcacaggtaaacacgaagaactagatgatacttgcacatgctctgggttgtgttacaggagacaagcactgtatgtgtggtgcaggtg

SEQ ID NO: 320137 - DNA, 515 bp, Homo sapiens
caattgaaaaaaacaagcatatccacagagttccaaacgatttttgatcagtagttgaacaagtcgtcaactttcagagaccacaggtatgggttaatatgtgaacacattcttagattgatctttgtaatttattttcatattttctctttaacatatatataggttagtgtacacagtttattcattagtgttctaaattaattacattcacattcatatttttgaggccacccacatttgtttataatagattgacacaggcagtctcctaaggacagtttttcccatggctctcatcaaactattattagcaaggaaattsttattatcatttgacctgtgatatgaccctgatcctaacactgtttttagtttatggtgctattaaccaagtctgtttgtccacaataaaaacaaattgaactaaatgatggctaggacctcttgtagttccaaattattcctaattatgatgttgattataaaaacaacagtatttttgtttccatggt

SEQ ID NO: 320138 - DNA, 424 bp, Homo sapiens
aaaatctaaatttcaaatgttctcaccataataaatgttaagtatttgaggtgatggatatattaactggcttaattattccacactgtattcataaattataacatcactttgtaccccataaatttatacacttatgaattgttaatttacaatttaaaaagttaaacccagttctctgttagaagaaaaagagaaaayacacacacaatgatattgattccaaagtgattaagatactaacatctttgtcttcagctgttataaatgaacctgaatagaaagtagtatttgctaagatatttatttggaaacataattataattttataaatgcaatgactaataagaataacatgaatataatgtcatgatagatatgctattgctattattttaaatcttactgttaccatggctatga

SEQ ID NO: 320139 - DNA, 555 bp, Homo sapiens
ttttttattcctgctttaccaggtgttggctgaatgacattatgcaagttgcttttctgttgtaaaatgttcatagtcttattacttatttctagaaatataaggtgtgaaagagataatctgtgggaaagtacctggtacgtagcagttgatgagttgtagctgccacatctcctcactcgtgtcctcctcctcctttatcttctccattgataccctgaatatactgacattaatatggttcataaatgttctatgcttctgattctctcagtatgtattgtcacttctctcaaggttaccaactgtcttagtttttactcaagtattttcttcaactgatacctgtggttctctcataagtttaacttgtttataaccctatgttatatccttgtgatttagtttcttcttctaatggcctgcttatctctcagcttcccaaaycaaacttgtcctggggtggggggaggggggagggatggcataagagaattacctattgtaaatgacgagttaatgggtgcagcacaccaacatggcacatgaatacat

SEQ ID NO: 320140 - DNA, 571 bp, Homo sapiens
catatcatcagtgaacagtgacagtttgacttctttttttttcccaatttgtatgtcctttatttctttctcttgcctaattgctctggctaagacttcctgtactatgttgaatagaaatggtgaaagtgggcatccttgtcttgctccagttctcaggggaaatgcttttagctaagatgttagctgtgggtttgtcatatatggcttttattactttgaggtaagtcccttctatgcctattttgttaagagtttttattatgaagggatgctggattttaccaagtgcttttcccttatctattgagatgatcatatggtttttgttttcaattctagctatgtgatatatcacatttattgacttgtgtatgttaaaccatccctgcatctctgwgactaaactcattttgtcatgatgtattatcattttgatcatccaccagctgttggatttggtgagctagtattttgttgatgatttttgcatctatgtttatcagtgatattggtctgtagttttctcttttttgttatgtcctttcctggttttgctattagggtggta

SEQ ID NO: 320141 - DNA, 536 bp, Homo sapiens
ttactatacctggcatgagggcagatggataagtacagatgctccccaacttaataatagttcaacttaacaattttttgaccttatcatgaatttaacaggatgtaaccccatcataagtcaaggagcatctggatctttgatggctcaacttataaattttcawctttacaaggagtttatgggggtactaaatgcatttccgatttcacaatatttttaatatctattgggtttattggtatgtaaccccattgtaaggcgagaagtatctgtaccacacagtctctacatttatgatgtactgagaaaccagtcaaaaaaaaagttacacaaacagattcaagtaagtgtgataagaagtataataagaacacgtgcagaacacagcactttaggagaagactaagttaaatcttgaaatatgatactaaatggaaaaattatttgtatgtcaagaatatttaggcagaaaaataaatgaatgtggtacacatacacaatgaagtactattcgactgtaaaaaagagtggca

SEQ ID NO: 320142 - DNA, 536 bp, Homo sapiens
ttactatacctggcatgagggcagatggataagtacagatgctccccaacttaataatagttcaacttaacaattttttgaccttatcatgaatttaacaggatgtaaccccatcataagtcaaggagcatctggatctttgatggctcaacttataaattttcaactttacaaggagtttatgggggtactaaatgcatttccgatttcacaatatttttaatatctattgggtttattggtatgtaaccccattgtaaggcgagaagtatctgtaccacacagtctctacatttatgatgtactgagaaaccagtcaaaaaaaaagttacacaaacagattcaagtaagtgtgataagaagtataataagaacacgtgcagaacacagcactttrggagaagactaagttaaatcttgaaatatgatactaaatggaaaaattatttgtatgtcaagaatatttaggcagaaaaataaatgaatgtggtacacatacacaatgaagtactattcgactgtaaaaaagagtggca

SEQ ID NO: 320143 - DNA, 611 bp, Homo sapiens
cattagtatcagcattttatttcagagtataaaaaattcatcaatatggcttcagatcctgccttcaactaaactgtgaggaactacccttttygaacaacatatctatgtgtgggctaatattcttcacaaaacaacatattgcaccagattgaatgaagaaagagaaaatcccagccagacaatgaagaaatttgcaaaactgtaaagcaataccgcacttctcatcattttttttgtttgggaaaatatagatgtttctaaaaaattattttatttaacatataatgggttaaatactattatctgaaaatagcttactttttttcagatgtctgttttcattattaattaggtaagtattaattgatacaactcacagaaaccaacattctttttgatcctcagtaatttttaagaatgttaagggatcttgtaaaaaaaaaaagattaaaaacaactacattagcatatttattagtattaattactatctatatatctcaatttcctcatttgtagtatgtgaaaaataataatgtctaactttaagggatttttgtgaagacagatactccaatggctgaagtgctatactttccagatcccca

SEQ ID NO: 320144 - DNA, 533 bp, Homo sapiens
taaagtattttttactctaacctatagccacataatgaattcatttaatatatttaaaattaaatgaatgatgattccagaaggcctatctgtttgtgctactttcctgcttaaaaccaatcgcttaaaaaaagtcaatcgctcctgacttcctacccaaaccctcattatataatagtgactctccctggcctagctcttctctatctcctacccctttctatcatagcatctcacctttattctaactctcctgccttactgaaatactttgtgcattatcgcaattatacatgaatttctcttggtctaaattgctgttctcttggtttctcttgagctcaccaaggtaatggttgtgttaagaatacaaaacagaaagaaggccaagaaggtgatcgcatactgaagtattayctaaaaggctttcccaaagattactacattcaatagattatataattgtttgattttgctatttactgtaagagctctgactcagtgaagttaaaaggtaacttgcaaatttgtat

SEQ ID NO: 320145 - DNA, 650 bp, Homo sapiens
atatgtttgtcctagtttctttaagtaaaaacatcatagatactaaaagatatctgcacattattgaataacctggagtagatataaatctactagaggtaaatatccttcacatgtcttttatttttaatatgaacttgtatttcccttgagagtttctcagcyaaataagaggaaaatagactataggtcaagattatccatattctttaggaaggctctttaaggcttggatgctgtctacatctccagattcattagtcctctcgtcacacttcatgctccgctttcactgatgactgccattttcttatctttctttccttttccttttctttcttcctttttgttttgttttgttttgttttgtttttggagacaaggtcttgctctgtcacccaggctagaatgcagtgtagcaaacatagttaactacatcctcgaattcctgggctcaagccatccttctacctcagcctcccaagtagctgggactacaggcatacagcatcatgcccaattaactttaaaaaaaatttcatagagacagagtcttgctatgttgcacaggctgatctcaaactcctggcctcaagcaatcctcctgcctcggtgtcccaaagtgttgggagtacaggcatgagccactg

SEQ ID NO: 320146 - DNA, 563 bp, Homo sapiens
agacagctactatatgatctcacttatttgtggaatataaaaaagttggagtattaacagctgagagtaaacagtgtttaccagcagattagggggctagggaaatgaggagatattgatcaaagggtataaacgttctaagatgaatataaatatttggcattatgtatataaaataacatgagatgaatatgttccagggatttaatgtacagcatggtgacagtagttaataatactgtaatgtatagtttaaatttcctaagaaagtatgtcttaagtgttctcaacacacgcacacaaacacacacacgcacaatagtaactgtgtgatcaacttgattatggtactcatttcacagtgtgtatgtatatcaaatcatcatattgtacaccttaaattaatacaattactayttttcaattataccccaatacatctgaaataaaaagaaaaataactaaataaaggtattaatgacttccatttgatggttctcgtgctaggtattttttacagacttttatcattttaagtactacaagaaccaactagcatgtgg

SEQ ID NO: 320147 - DNA, 601 bp, Homo sapiens
tagttggcgctgtgactgtttattcatctgaacttggctgtgcttttggtttcctcgtctcatttttggccaacaggccctactcctcagcaaagagcagagaccggtgtctcacaacaccacagatgtgaaatgactgaaaaacaacaccctgagttgctgccacgaggaatgatatttaagtcaagacactccccaatgagggaagagactttcagctggtattctaaataaaaaggtattctgcctctgtagtgtgaatttaaaataaccatcctaacaccgcagttattacaaagtgatggacaaagcaagggagaacattataacaattattactcaggtagtagagagagacatagaactgaagcaccattcccaccatcgataaagccactcttttgctgagtttataaaaggaaagaaagccaaagcttccatagaaattaaatgaagacgactcagacctgaaagactatctttaaaaaaawaaaataaaaaagaacataaaattttgagtctacaaataaggctctgaagttagaaactagtattcttggagcatgttggaaaattacttgaaaggtctgaataagaaatt

SEQ ID NO: 320148 - DNA, 599 bp, Homo sapiens
aatttcagaatattgataatttccaaatcatactaatatttcagagcatttaaagcatggtacacttcacaattgattttgtgaatctagtaaaatsactctaatacagtttttctgataaagaattctgttaagatgctatagactgaatgtttgtgtcatcccaaaattcatatggtgaaatcctaatccccaatgtaatgatattaagaagtagaggcctttgaaggcaattaggtcataagggtggagccctgatgacgagattaatgcccttataaaagagaaagggacatgagtctttctatctctgcctcatgagaatgcaatgagaaaagatagttgtctgtaaacaggaagagtgctcacacctgccgcagaatctaccagtgccgtaatcttggacttcccagcgtccagaaaagtgaagaataaatgattgctgcttaagccaccctgtatatggtaatttgttacagcagcccaaattgactaatatatagattttttaaaagtttaccagcagatgcatgaatgcaagcacataaaatataaaacatgcaaattaaataacataacaaaatattaatctgcaaaat

SEQ ID NO: 320149 - DNA, 581 bp, Homo sapiens
caggactggttaaaatataagtgtactacattgttctaattattgactaatacatataattttttaaaaatttattggcagatgcatgaatgcaagcacatagatacatttatctgtctaaataatacactttaatatattaaattatgttatttatatattatataatactatatattctatattctattatatattatttctgtcattacagatctcctcagtgcttgtcttaatgacaattgtaagggaagagccttccagtagcaagacttgattatcacatggagaaaagtggcttgaagtatgagtatatacaggctcctcagcaggagggagtggcttttgctgattgatcaaggttctagaaggtataatatttgaaaaccagggacaagaagctctcaagaaaatgtatatggacacatctatgagaaaagccagagagcakgtgactattaatgagtctataacacggaagaaattcttaaaatattttagattactagaatgactcatcttatggatgtaagtctatttctgctcagtcatctatttctgttcagtgctgattcagtgaa

SEQ ID NO: 320150 - DNA, 581 bp, Homo sapiens
caggactggttaaaatataagtgtactacattgttctaattattgactaatacatataattttttaaaaatttattggcagatgcatgaatgcaagcacatagatacatttatctgtctaaataatacactttaatatattaaattatgttatttatatattatataatactatatattctatattctattatatattatttctgtcattacagatctcctcagtgcttgtcttaatgacaattgtaagggaagagccttccagtagcaagacttgattatcacatggagaaaagtggcttgaagtatgagtatatacaggctcctcagcaggagggagtggcttttgctgattgatcaaggttctagaaggtataatatttgaaaaccagggacaagaagctctcaagaaaatgtatatggacacatctatgagaaaagccagagagcatgtgactattaatgagtctataacayggaagaaattcttaaaatattttagattactagaatgactcatcttatggatgtaagtctatttctgctcagtcatctatttctgttcagtgctgattcagtgaa

SEQ ID NO: 320151 - DNA, 581 bp, Homo sapiens
caggactggttaaaatataagtgtactacattgttctaattattgactaatacatataattttttaaaaatttattggcagatgcatgaatgcaagcacatagatacatttatctgtctaaataatacactttaatatattaaattatgttatttatatattatataatactatatattctatattctattatatattatttctgtcattacagatctcctcagtgcttgtcttaatgacaattgtaagggaagagccttccagtagcaagacttgattatcacatggagaaaagtggcttgaagtatgagtatatacaggctcctcagcaggagggagtggcttttgctgattgatcaaggttctagaaggtataatatttgaaaaccagggacaagaagctctcaagaaaatgtatatggacacatctatgagaaaagccagagagcatgtgactattaatgagtctataacacggaagaaattctwaaaatattttagattactagaatgactcatcttatggatgtaagtctatttctgctcagtcatctatttctgttcagtgctgattcagtgaa

SEQ ID NO: 320152 - DNA, 521 bp, Homo sapiens
atttcttcctaccttaaacttcttccctaggtctctctattggcgttttatctcttgactcccttgacttacatcattttcttttaatgttatctctgcacttactttcccatcattacacgaagagtgtctaaatcgccgagactgctctttaaatccccaacaatcctcacaagcatctattaaacaagaatgaataatgtcactccaggtataatttatcctccacttttttcctcaatgtatctctggatctcattgatgctgcctctaggataaatttttatacctctcmtcatgtcctccgattcactggctctcactaatttgcttcagttaactagttcaatcttattttctattgaagtatttccccaattacttcaatattcaaatagttaagtttcttagacaattgtagagagagaattatgtatggacagaacttaggaccagagacaaaaacggaaagtgaaaacaaaggtgttctctccacctctcagagtctttatagtcttgtc

SEQ ID NO: 320153 - DNA, 553 bp, Homo sapiens
tcaaaggaatccttgaagagatgaaatgtatcaagtttgactgcaaagattgaagatacagtagaattaagatgtgctagcattatttcaagcattatgccatctctaaaggagtaaacaaaataaaaagaaaatcyatgtgtatatagtgtttaatacatgccaggctaggttttatctattgacatacatatttatagttctcacggtaaccttattagcctatttgatatctaatttcttctatgctaatcacttctctgatttttggttagcatccccttatttggggacctgtttctctccttacttcactcagtacactccagtggctactgtcaattatgttatttcatcttcctggatttatatgtagacaataaaagttggacattttaatcaaagctcttccctggaatgttttcaattagatctaagatacataagttctttcctttctggtggaaaagctataatgataaaaaaaaaattatctaagagaaaataggtgaagggaagggaagtgaaaagagaaattctggtggtactggag

SEQ ID NO: 320154 - DNA, 553 bp, Homo sapiens
tcaaaggaatccttgaagagatgaaatgtatcaagtttgactgcaaagattgaagatacagtagaattaagatgtgctagcattatttcaagcattatgccatctctaaaggagtaaacaaaataaaaagaaaatccatgtgtatatagtgtttaatacatgccaggctaggttttatctattgacatacatatttatagttctcacggtaaccttattagcctatttgatatctaatttcttctatgctaatcacttctctgatttttggttagcatccccttatttggggacctgtttctctccttacttcactcagtacactccagtggctactgtcaattatgttatttcatcttcctggatttatatgtagacaataaaagttggacattttaatcaaagctcttccctggaatgttttcaattagatctaagatacataagttctttcctttctggtggaaaagctataatgataaaaaaaaaattatctaagagaaaataggtgaagggaagggaagtgaaragagaaattctggtggtactggag

SEQ ID NO: 320155 - DNA, 555 bp, Homo sapiens
gaaagcagaaacgccgaaacaggagaggacacatagtaatgcactgggtttttgcacacacttcacctgcttttctcccaatgttcaggatcctaaatcaaaccaaaattgtgataaagaaatgtaaaaacattattagttaattgagttcgaccagagtggattaattacaataaagagatgacaattaattacaataaaaaaaaagttttttttaaagactaatgagattaggccaggtgcggtggctcacacctgtaatcccagcactttgggaggccaaggtgggtgggtcacctgaggtcaggagttcgagaccagcctgaccaacatggagaaaccccatctctactaaaaatacaaaattagctgggcatggtggcacacgyctgtaatcccagctacttgggaagctgaggtgggagaatcgcttgaacctgggacgcagaggttgtggtgagctgaaatcgcaccattgcactccagcctaggcaacaagagtgaaactccatctcaaaaaaaaaagacgaatgagattttggaagttgtttttta

SEQ ID NO: 320156 - DNA, 642 bp, Homo sapiens
aatatctaggtgatgggttgttaggtgcagcaaaccgccatggcccaactttaggtaacaaatctacacatcctgcacatgtaccccaaaacttaaaataaaacaaagtagggaagtcaacagtgcagccttcgatctgtggtctaaggtccaaaagcccctggcaaaccactaatgtaagtccaagagtccaaaagctgaagaacttggagtctgatgtttgaggacaagaagcattcagyatgggagaaagatggaggacagaagattcagtcagtctgctcttttcatacctgcttttgtgctggcagctgattagatggtgcccacccagactgagagcggatctgcctctcccagtccattgactcaagtgttaatctcctttggcaacatcctcacagatacatccaggaagaatactttgcatcctccaatccaatcaagttgacactcaatattaaccatcacacatacatattatacaaagtcatgtaaaaagaatgcaaagaacttgtggtgattctacagtcatttcacagaattattcttttgaaaactccacaatattgctgactgtgtaataaatcagaaactcaaaatggccctcttttatcattaatttaccccacttatttttgt

SEQ ID NO: 320157 - DNA, 535 bp, Homo sapiens
attctatatagtacaggaagtctcagctagagtaatgatgagagaaagaaataaaagacattcaaattgttaaagtagaagtcaaatcatccttgtttgcagatgatataatcttatatttggaaaaatctaaagagtccacaagaaaactcttataactgataagcaaattcagcaaagttgcagaatacaaaatcaacatacaaaaactcagtaacatttctatatgccaaaagcaagcaatctgaaaaataagaaagtaatctcacttacaatagctacaaataaaataaaatacctaggaattaaccaaagaagtaaaaaatctctacaatgagagctataaaacattgatgtaagaaattgaagaggacataaaaagtggaaagatattctatgtccatgaattggaggaatcaaaattgttaataygttcatactacctatagcaatctggaggttcagtgcaattcttataaaagtacgaatgacattcttcacaggaatagaagaaacaatcctaaaatttatatga

SEQ ID NO: 320158 - DNA, 560 bp, Homo sapiens
gaaaatataacgagctcaaacaactctacaaaaaaaatctaaaaatccaatttaaaatgggcaaaaggtctgaataaacatttctcaaaaagaracatacaaatggcaaacagatatttgaaaagatgctcaccatcattaatcatcagagaaatgcaaatcaaaactccaagatgtcatctcaccccagttaaaatggcttttcccaaaagataggaaacaacacatgctggcaaaggatgtggagaaagtggatatctcatacactgttggcaagcatgtaaattagtagagccattatggagaacaatatggatgttccttaaaaaactgacaatagaacaaccatatgatccagcaatcccactgctaagtatataccccaaagaaaggaaatcagtatatcaaagagatatctgcacttccatgtttgttgcagcactattcacaatagccaaaatttgaaatcaacctagaagtccatcaacagatgagtagattaaaaaaattgtggtatatatacacaatggagtactaatcagccataaaaaataatgaga

SEQ ID NO: 320159 - DNA, 613 bp, Homo sapiens
aattttgtaccttcaggcggggcatggtggctcacgcctgtaatcacagcactttgggaggctgaggcgggtggatcacgaggtcaagagatcgaggccatcctggccaacatggtaaaaccttgtctctactaaaaatacaaacattatctgggcgtggtggcacacacctgtagttccagctactcgggaggctgaggcaggagaatagctcgaacctgggagacagaggttgcagcgagccgagattgtgccactgcactccagcctggtgacagagcaagattctgtctcaaaaaaaaaaaaaaaaaaaaattgtaccttcaattgtgttctaatagaaatttgaacaggaactcataaacatacactgtatwtttagtctagagaatggatacaacggtaagatagaatcagtcaactattaaaatttttagaaatgttgtgaattgatgaacatctcattagtagattgaaatcacccatgtttgaaatagttacattacaactcatggcttctgcttctccagagaaccagttgttaaatattcaccagcatatgattggttaaggaagtcacactttctaaactatcaacaaaaagcatttacca

SEQ ID NO: 320160 - DNA, 608 bp, Homo sapiens
cagtacaaaggcttgagaacaaagggaactgatggtgcaaatttcagtccaagggcaggaaaagtccagtgtttcagttcaacagtcaggcagatagaaaaaagggaaaagtctcatttcttttgccttttgttctattcaggccctcaacagattggatgatgctcacccacrttggggagggcaatatgctttactgagtgcacagatctcaaatgctaatttccgctggaaacaccctcacagacacacccagaaataatgatagccaaatatcagtgcatgctgtgagccaatcaagttgatatctaaaattaacagtcacgcattctaatgtcaaactttatctctagaagactttacctcataaggccggctatcctatcatactaatgagatgtatgattaattttcaaaaagggtaaatgtttttgtacaaaggttataacacaatacagataattgtaagtgatatctccaagtatgatcaacatctagtttttccttttcttcctatggctagataaggacatgacttttggccaaagacataattccctgtctatttctctttatgattaattacatagcagtactcctatcacaat

SEQ ID NO: 320161 - DNA, 593 bp, Homo sapiens
caaaatttgctcaattccagatgaaaattactctagttttccctattttaacttttggtcattaaaaaaaaaagggagtacatcttttctggaagaacatacattgaccagcatttctgtaaattctgatagagtattctcagcattcaagtaaaatgtaacaggaaagttagaaaaccaaaacgttaaataatagaaacagatagacttacagctcatccagatattggaatgatcaggtatagaattttataaaatcttgattaataaaatgacaatatgaagaatgtctctagagaattgggaaacatgaaatagatttatcgaataccaaacattatatttcaattttatcaacagaaatttttcagtgaaaacaaaattatgtgttttsttatacaagaagtataagaccattattttattttataaagaatagtctgaagtataattatttaagttacctaaacattttcatcaagtatttctctaggcatatctctactgagatgtataaaaaacacattaggtactcaatacttaatgtcaagaaataaatgaataaataaatggctttaaataaaaatatttat

SEQ ID NO: 320162 - DNA, 532 bp, Homo sapiens
tatccctttcataatatctaattcttatatatcatggttagagatgaaaacattttactgtaaagcatacgttaatattctttaattctagagctatttttctataaagtatatataaagttagaaacagagaattgcaaaggacagggctatatatttgcttttcaatgaaaaataagtgtttgtcggtttggtacaaaagtcttaagagttcagaagtgtgaacaagttaaaaattacataaagggggamatgatcacagagaaattttgagaggtagtggtaatggcagtgaaggtggtggcggtgaataattaagtcagtacatttatggaacagtaagtgtgtgattaataagagatgaactacgtattcaaaaatatttcacatttgaatcttttctgatataggactttattttctagagtccacataaagacactccaaatggcaaagtccactcagaaaagatgtttgaacagaaaggcaaaatatggaataacacatacaaaacttaagaggaaatataaaa

SEQ ID NO: 320163 - DNA, 576 bp, Homo sapiens
ccttaactgggacaactctgaagatctggtccagctgaagaactttctgtagggttggctgacagctttgttgagactgaatcactaaccaatttctctctctgtccaatcctgcttacatttccccccttccataggttttaagccccagagcactctctaacaagaatcttacgtggaatctaaaaaagtcaaactaatagaaacagagattagaagggtggttaccagggtttgggagtgtaggttttggtggggggtgggtggagggaagggggaaaggttgaccaaagggtacaaaattttagttatgagatgaatacactctgaagatccaacatgcagcatggtgacaatagttagtaacaatgtattgtgtgcttgaaatttgctgagaggacagatcgtaagtattcttaccaccccccmccaaaaaaagaaaagtaacatgtgaggtgatggatatgctcattagtttgaccgcagtattgtgataatcattttactacatatgtgtatcaaaacactacatcatatacttcaatatgtataatttttatttgccaattatacccc

SEQ ID NO: 320164 - DNA, 576 bp, Homo sapiens
ccttaactgggacaactctgaagatctggtccagctgaagaactttctgtagggttggctgacagctttgttgagactgaatcactaaccaatttctctctctgtccaatcctgcttacatttccccccttccataggttttaagccccagagcactctctaacaagaatcttacgtggaatctaaaaaagtcaaactaatagaaacagagattagaagggtggttaccagggtttgggagtgtaggttttggtggggggtgggtggagggaagggggaaaggttgaccaaagggtacaaaattttagttatgagatgaatacactctgaagatccaacatgcagcatggtgacaatagttagtaacaatgtattgtgtgcttgaaatttgctgagaggacagatcgtaagtattcttaccaccccccaccaaaaaaagaaaagtaacatgtgaggtgatggatatgctcattagtttgacygcagtattgtgataatcattttactacatatgtgtatcaaaacactacatcatatacttcaatatgtataatttttatttgccaattatacccc

SEQ ID NO: 320165 - DNA, 406 bp, Homo sapiens
atcattttactacatatgtgtatcaaaacactacatcatatacttcaatatgtataatttttatttgccaattataccccaataaagctgggaataaacagaatcctgcatgctaattgcatctcagaatctgcttcttggagaacccaaatggtgacaagtgcattyggtccaggcagagacaagcagcacaggcagaaggatgcacataagatggcatgggtgatttgtggagccacaattttctgatgaaaatggcatcccatcttcctgtgtactttaatttctattgttttatttattttttactgaaaaaatatatacacacacatatataattatacatctaaaaccacacctatatatacacacacatatatacagaaaatgttcttcacgtttttaa

SEQ ID NO: 320166 - DNA, 406 bp, Homo sapiens
atcattttactacatatgtgtatcaaaacactacatcatatacttcaatatgtataatttttatttgccaattataccccaataaagctgggaataaacagaatcctgcatgctaattgcatctcagaatctgcttcttggagaacccaaatggtgacaagtgcatttggtccaggcagagacaagcagcacaggcagaaggatgcacataagatggcatgggtgatttgtggagccacaattttctgatgaaaatggcatcccatcttcctgygtactttaatttctattgttttatttattttttactgaaaaaatatatacacacacatatataattatacatctaaaaccacacctatatatacacacacatatatacagaaaatgttcttcacgtttttaa

SEQ ID NO: 320167 - DNA, 460 bp, Homo sapiens
tttctacttggaaaattactacatgtattcatctctattttatgcctcatcatttattttagtaaaaacacaacatcagraagagcatacaacaaatggtgaggcagtcctagtccaacttgggtcaatgctgacgttaatttcttgagtggaagaggctcatgaatcacaggacaacatactatagccaaatatttcctatcccacctgttacagtcttatgctaacatcattatttgaagttacacctattgaaagaggaagaacaataccttttgaaacaagaagagcaatgctttttgaaacaaagtgaaaattggccgggcacagtggctcatgcctgtaatcccagcactttgggaggaccgggtgggcagatcacctgaggtcaggaggtcaagaccagcctggccaacatgaggaaacctgtctctactaaaaatgcagaaattagctgggt

SEQ ID NO: 320168 - DNA, 571 bp, Homo sapiens
atctgaatgttaagctgctctcactgtttaaatactagctcactatatacattatgcctcttgaagagtgttaaattgactaactgaagcaaagtaaaaaattttaattaagaaaaaacgtggctgtcttcccacagctgcctcagtagtggcagccctaaatggtgtatttatttgcatcttattttctatgcatacttacgggaaaccatcactgcagcattgagatatacatctaaatttgtgtttctatgggtttcatctgtcctaaggaatgtggcgcataatacctgcttatgctaaagtatgttggctagaggctcttttatcctaagaatcaattgcatccctttagaatgcaaggctgccaataatgtattctggtttttcataccagaaaataatgcaattggaattattgaaagtaawgcatactggagaaaagcacatgttttaaaactgaaatgtaagcaataccagcacaaaggaatgtctggatggccacagtagccattgccatgcaatcacatattattctaattgtaagggagaggaaaataggtttttaact

SEQ ID NO: 320169 - DNA, 291 bp, Homo sapiens
aaatttactcaaattgctatttgtcctttaaaattggtttcctactgcttccgtaataatacattattagctgggtacatggccattcagcttgagactgcrttttctgtattttctagtcttctttgtagctagatgtcttcctaatggaatgtgagcaggcataatattcctacttcacaagattaaaggaaatcttgttttctacatccctcttgccctttcctacaggttttcaagtgttggtagtggcaacccagatgcaactacatagccaatagcaacataaaa

SEQ ID NO: 320170 - DNA, 600 bp, Homo sapiens
gaatcttatttataacttatttggtgaaacagaacaatttgatatattatttttcccaaaaagactatttatttggtgataattcccaggaaattatcactcttgttaaaaaacaaaaacagagcaggaacagtaacagaaatatcataaaagtaacattgtaaaacagtatttacaaattctcgtaatatagaaagtcattctgagaattcrccatctctattagtgactcagtgtttaagttttccatctttaagaatttgttcttcacctgtacaagataaaataaaggacgtgacttctaagcatttgtaaccatgtcttttggccaaattcctattagaatgtattaaaaggagaaacctgtcaatgaagatgtagcttgggactgtgggccttgaatctgaaacatagccagactttgagaagtactttcacaatttgtacttatttcttatcaagcagctatttctttcctgcaagcagcaaaataacagtttttttgttgtcattctgttttctaaaggaaaggagagagttcccagattctaagcaatatgcttatatttctaatcatgcagaaaaatcttggaaagggta

SEQ ID NO: 320171 - DNA, 600 bp, Homo sapiens
gaatcttatttataacttatttggtgaaacagaacaatttgatatattatttttcccaaaaagactatttatttggtgataattcccaggaaattatcactcttgttaaaaaacaaaaacagagcaggaacagtaacagaaatatcataaaagtaacattgtaaaacagtatttacaaattctcgtaatatagaaagtcattctgagaattcaccatctctattagtgactcagtgtttaagttttccatctttaagaatttgttcttcacctgtacaagataaaataaaggacgtgacttctaagcatttgtaaccatgtcttttggccaaattcctattagaatgtattaaaaggagaaacctgtcaatgaagatgtagcttgggactgtgggccttgaatctgaaacatagccagactttgagaagtactttcacaatttgtacttatttcttatcaagcagctatttctttcctgcaagcagcaaaataacagtttttttgttgtcattctgttttctaaaggaaaggagagagttcccagattctaagcaatatgcttatatttctaawcatgcagaaaaatcttggaaagggta

SEQ ID NO: 320172 - DNA, 507 bp, Homo sapiens
agagtgagtgagtgagagagagagagagagagtagttacctgagggtcaaagagggtaagtgttttgccaaaatcatccaacttactagtttcagaaatgaaagtaaaccagattcccacaatttcttgtcccaacaccccctattccctccagagacagtttgacaacgccatgactgagctttgcagaaactttagattccaggtccaatgtcctgatactcttaggcaatgctgcgattcatycttccacaaatcctttgaccagtaaatattgagcacttttaaagtgttagacactgagcttaagacgcaggaaaccagatataaaagccatattgagcccctctgttcagacagatccctatgttaggccatttctctggcaaccaaggtgccatctgaagtgttactcctgaacaaatctctgttgttgagcagaattagatggtaaagggtaaatacagttttcagtgagtctgaaacatgaacatataactcaattaa

SEQ ID NO: 320173 - DNA, 507 bp, Homo sapiens
agagtgagtgagtgagagagagagagagagagtagttacctgagggtcaaagagggtaagtgttttgccaaaatcatccaacttactagtttcagaaatgaaagtaaaccagattcccacaatttcttgtcccaacaccccctattccctccagagacagtttgacaacgccatgactgagctttgcagaaactttagattccaggtccaatgtcctgatactcttaggcaatgctgcgattcatccttccacaaatcctttgaccagtaaatattgagcacttttaaagtgttagacactgagcttaagacgcaggaaaccagatataaaagccatattgagcccctctgttcagacagatccctatgttaggccatttctctggcaaccaaggtgccatctgaagtgttactcctgaacaaatctctgttgttgagcagaattagatggtamagggtaaatacagttttcagtgagtctgaaacatgaacatataactcaattaa

SEQ ID NO: 320174 - DNA, 600 bp, Homo sapiens
cacaatatctctattataaatttcaaggaaacaatggaatatcattacctatttatagtatttcactacactgtatattagatccacagaacttaatgatcttacaattgaaaatacataccctttgattaacctctcctcccgcacccacccccagctcctggcaaccagcattctgttctgattctataagttcaacttagattccacataagtaaattctgtttcacagtatttgtttttctgagtgtacataatttcactcttttaagaactgctgatagaagttacttaaaacattccactttttaaaaataaccagtttttaaaatatacataaagatatctagatgagaaataatagaattccttagaagacatgttattccaagaatggccatagacctcagagtcagctagtcttgggatttggatcttagatctcctgctcactgagctcatgaccttggctaatttatccatgcaaagattatatttccctctcagtaaacgggataaaataatatccaccttgtagtaatgtgaatattataygtatcatcagcattatattaaaatattatttatatattaatgtaa

SEQ ID NO: 320175 - DNA, 554 bp, Homo sapiens
atttatttacttgccaagtcattacatgtttcttcctgctagaatgaaatttgccatagagggaagccatacttgttttgttcagctctatatcccctgtttagttactaagcataataaatatttgttaaatggattaataaatcctagagttttagcagatggaggggataatcaaggacctaccagggggccgggctcggtggcttacacctgtaatcccagcactttgggaggccaaggtaggtggatcacgtgaggtcaggagtttgagaccagcctggccaacawggcgaaaacccatctctactaaaaatataaaaaatttagttgggtgtggtggcgggtgcctgtaaaccccagctacttgggaggctgaagcaggagaatcacttgaacccaggaggtggaggttgcagtgagccgagatggtgccattgcactctggtctgggcaataagagcaaaactccatctaaaagaagaggaaaaaaaacaaacaaaaaacaaagaaccttacaggggaagagtataatacaccagagaatggaaaga

SEQ ID NO: 320176 - DNA, 582 bp, Homo sapiens
tttccagagccttgatattgaagctattgttttctcatttatacactgactttcttaagggtaggggactgggtctcatttatcttgatgactttagaccctagcayagaatgtcacttatgttgggttttagttaacggttattgaaatgaataaacagatttatcttaaacattataaaaatgtattatggctttattcttaagcccaggagagatttcttatctttttgtcttattaaaagaaagctcttctgcattagttcaagaaattgtgtttgaaagcaggtcacgcgggtgctgcactgtgaacaagctctggctatgttttatcacctgaggtggtatataatagattcatcagctgaggcttatgatgttgattagggtggagattctcttaaccatgcaagtctgaaggtgacctgtaaattcatttttcataaaagcttaaaaggctgactacaggggccttcaacctctcacatgacaccattacagctggacgtggaaggcagtgtcgctaccctcaacaaacgaggcattccttgcaactgcctgactctgaaaggtcgaaggtacc

SEQ ID NO: 320177 - DNA, 582 bp, Homo sapiens
tttccagagccttgatattgaagctattgttttctcatttatacactgactttcttaagggtaggggactgggtctcatttatcttgatgactttagaccctagcacagaatgtcacttatgttgggttttagttaacggttattgaaatgaataaacagatttmtcttaaacattataaaaatgtattatggctttattcttaagcccaggagagatttcttatctttttgtcttattaaaagaaagctcttctgcattagttcaagaaattgtgtttgaaagcaggtcacgcgggtgctgcactgtgaacaagctctggctatgttttatcacctgaggtggtatataatagattcatcagctgaggcttatgatgttgattagggtggagattctcttaaccatgcaagtctgaaggtgacctgtaaattcatttttcataaaagcttaaaaggctgactacaggggccttcaacctctcacatgacaccattacagctggacgtggaaggcagtgtcgctaccctcaacaaacgaggcattccttgcaactgcctgactctgaaaggtcgaaggtacc

SEQ ID NO: 320178 - DNA, 582 bp, Homo sapiens
tttccagagccttgatattgaagctattgttttctcatttatacactgactttcttaagggtaggggactgggtctcatttatcttgatgactttagaccctagcacagaatgtcacttatgttgggttttagttaacggttattgaaatgaataaacagatttatcttaaacattataaaaatgtattatggytttattcttaagcccaggagagatttcttatctttttgtcttattaaaagaaagctcttctgcattagttcaagaaattgtgtttgaaagcaggtcacgcgggtgctgcactgtgaacaagctctggctatgttttatcacctgaggtggtatataatagattcatcagctgaggcttatgatgttgattagggtggagattctcttaaccatgcaagtctgaaggtgacctgtaaattcatttttcataaaagcttaaaaggctgactacaggggccttcaacctctcacatgacaccattacagctggacgtggaaggcagtgtcgctaccctcaacaaacgaggcattccttgcaactgcctgactctgaaaggtcgaaggtacc

SEQ ID NO: 320179 - DNA, 582 bp, Homo sapiens
tttccagagccttgatattgaagctattgttttctcatttatacactgactttcttaagggtaggggactgggtctcatttatcttgatgactttagaccctagcacagaatgtcacttatgttgggttttagttaacggttattgaaatgaataaacagatttatcttaaacattataaaaatgtattatggctttattcttaagcccaggagagatttcttatctttttgtcttattaaaagaaagctcttctgcattagttcaagaaattgtgtttgaaagcaggtcacgcgggtgctgcactgtgaacaagctctggctatgttttatcacctgaggtggtatataatagattcatcagctgaggcttatgatgttgattagggtggagattctcttaaccatgcaagtctgaaggtgacctgtaaattcatttttcataaaagcttaaaaggctgactacaggggccttcaacctctcacatgacaccaytacagctggacgtggaaggcagtgtcgctaccctcaacaaacgaggcattccttgcaactgcctgactctgaaaggtcgaaggtacc

SEQ ID NO: 320180 - DNA, 433 bp, Homo sapiens
taatatttgccaggtgccagggaagcaggagctccagggaggacaggtgtgccttctgagaaatctgattcatcgtctgcccttgtgcctgctgcagtgcctggggcatggtaggtgctcagaaatggaacaggaaatgccagagagatggtcagggcatgatcgtggctttcaggtaaacaaggaggaggagatttgttattccttgagccattcgctgttatttaaggaacacgcactgctggtgcttccagagtctgtagatttgacacaaggactcttacttatggttctsttgaaaaacaaccaccatgctgccctgggccaacctctgcatgtgagagctgttaggcagagccagcttgccaatggtgccttggtaggcgacagtcctcaccacccctagatgctagccaccctgcccgcggcgggc

SEQ ID NO: 320181 - DNA, 569 bp, Homo sapiens
tgcctttccttctttgcatacacacctgaatattctgaatccaggattcagatttggagcctaggggcaggtggttgggctgctctgtaagccttggtcctgacccctgtgctgtgctgtcactcagcctaggtggagttaaaatggtattctttggtaacaggttcttgttaagaatttaggagtaaggagttttaaaataggagggcaataggtgagctaggatttgcaaatgcttggggggtcctgcctgtgacagtcactcatgagtccttccatctctcccccctcccttcctcttcgtctctctttctgtctctctcctccctccctcttcaggaatgccccccattcacaagtcaacagacacggtatctttttcatcccaaccaagagcaaataattagaaacagtttaagagtgtgtgtgtgtgtgtgtgtgtgtcctccctaatctctccaatccatccaactctctccctgccagagtgaccatcctggaaaggagacccgataagggcagtgtcccatccaatgccacaacayggcccccgcagtttcattggtcca

SEQ ID NO: 320182 - DNA, 609 bp, Homo sapiens
tccttccttttgggtttatacccagcaatgtgattgctggattgtatggtagctctatttttagttatctgaggaatctccaaactgtcctccatagtggctggcctaatttacrttcccaccaacagtgtatgagaatttccttttctccacatcctcgtcagcatttgttattgcctgtcttttggatataggccattttaactggagtgagatgatatctcattgtagtttggatttgcatttctctgatgatcaatgatggtgaacatcttttcatatgcctgtttgccatttgtatatcttctctggagaaatgtctaatcaaattttttccccatgttttgatcagattattagatattttcctatagaaaaaaattttccataagaaacttttatcattgatattattcagtatcttcattgtagtggtgataaaattgcttcttatatattttgtgggttgtctcttcactttgttgattgcttcttttgctgtgcagaagctttttaacttgatgtggttccttttgttcatttttgctttggttgcctgtgctctgggtgttactcaagaaatttatgtgcagatcaatgtcctggaga

SEQ ID NO: 320183 - DNA, 609 bp, Homo sapiens
tccttccttttgggtttatacccagcaatgtgattgctggattgtatggtagctctatttttagttatctgaggaatctccaaactgtcctccatagtggctggcctaatttacattcccaccaacagtgtatgagaatttccttttctccacatcctcgtcagcatttgttattgcctgtcttttggatataggccattttaactggagtgagatgatatctcattgtagtttggatttgcatttctctgatgatcaatgatggtgaacatcttttcatatgcctgtttgccatttgtatatcttctctggagaaatgtctaatcaaattttttccccatgttttgatcagattattagatatttycctatagaaaaaaattttccataagaaacttttatcattgatattattcagtatcttcattgtagtggtgataaaattgcttcttatatattttgtgggttgtctcttcactttgttgattgcttcttttgctgtgcagaagctttttaacttgatgtggttccttttgttcatttttgctttggttgcctgtgctctgggtgttactcaagaaatttatgtgcagatcaatgtcctggaga

SEQ ID NO: 320184 - DNA, 588 bp, Homo sapiens
aacctgtgaaattcctctaccagaagtaagcaacattaacgatttgatatatattattccacaagttgctctatgcttaatcaaacagagacgaacatgtacagcgtagaataattcactccttgaaagtaaagctaatctggagagcaaaaaggcaaacttggataaaaagttatggacatataacttataacatataacatatatacatacttataacatgtaacacatatacacacgatacacaaacaacactccatattttataaaaagatttataactaatgtayagtcattaaaacacacatgtatacacacacaaaaccaatactccacacttatataaagggcagccactgatggattttttataaccgattgtttttagttgttcctaatagtttaggatgtaccatgattatgtagccattcacttttggttatacatgcatttttctttcttcctcctaatctagctgtgataaacacattatgtataaatccttacacactggagattttatttctgtaagatagaatccccaatgtgtcaaaaggtttgtgcataggaagggtagaggggggttg

SEQ ID NO: 320185 - DNA, 561 bp, Homo sapiens
ttttctaaaccaacatgaggtccatcttaagtgagaaagacattaactgcttaactgatagcagctggtatttccttcacttatatcaaaaagaaaacaaaattagagactccatataaatacraaaaaattattcaaagtccctccaatgagtatgacaattttcaaaaattatttttgtgctgcttaaccctctgtattttaaaattaaaaaaaaagtagagacaaaacaaattccaaataatataagataatttaaaatagaaaataaaaatgtcctcccttgccttgcttgtatagctccctcctccatctctccttggaatttgtaactaaggcacacaaagctgtggttaaaagctacttgctttatccttacctctcaaagtgtggtctgtaaatcagcaagttgagcatcacctaggagcttgttagaagtgcagaatctcaggtcccagcccagaattagtggaccaggatctgtattttaataagaatctccaagttgtatgttgcgttgaggaaattatattgaggaaattaccttgaagtttgagaaac

SEQ ID NO: 320186 - DNA, 598 bp, Homo sapiens
aggctagaaaaaaaaaagtgactgaaagtaaggcagaaaagaagcgcatgcagcatatcataatacagcttttcttggcctagagattcaataagtatatgcagttactggtgaaacggcagtggtatcagcatgaggtcaattagtgtgtagagtagctctttaatgtggggccatacatgactrttcaggtagactttacgcaaataatcagtgtgcctctattcaaagcagcattcctcagcctcagaactaccgactttggactggataattttttattgtgggaggctgtcctgtgcattttaggatgtttagcagtaagcctgagctccactcagcagatgttgtgacagcccaacatgcctccagacattgccaactacaccctggggaataaacagcatgcagttgaaaatcactgaattaaggtaatgttcgcaaatagttggctctcctggttcttgatctatactcagcatcattaaagcaatgccatcatactgagggatgtgaacagagtcagtggtcaggggcttctgagctgtagttctctacagcttccagtattcttgaaaggccatttctgtaaaccccc

SEQ ID NO: 320187 - DNA, 598 bp, Homo sapiens
aggctagaaaaaaaaaagtgactgaaagtaaggcagaaaagaagcgcatgcagcatatcataatacagcttttcttggcctagagattcaataagtatatgcagttactggtgaaacggcagtggtatcagcatgaggtcaattagtgtgtagagtagctctttaatgtggggccatacatgactattcaggtagactttacgcaaataatcagtgtgcctctattcaaagcagcattcctcagcctcagaactaccgactttggactggataattttttattgtgggaggctgtcctgtgcattttaggatgtttagcagtaagcctgagctccactcascagatgttgtgacagcccaacatgcctccagacattgccaactacaccctggggaataaacagcatgcagttgaaaatcactgaattaaggtaatgttcgcaaatagttggctctcctggttcttgatctatactcagcatcattaaagcaatgccatcatactgagggatgtgaacagagtcagtggtcaggggcttctgagctgtagttctctacagcttccagtattcttgaaaggccatttctgtaaaccccc

SEQ ID NO: 320188 - DNA, 471 bp, Homo sapiens
cttcaagttaagtagcctgagagggaggaggaagaggaagagttgatcttgctgtattaggsgtggcagaggcaagcagaaaaaaaaatccacctataagtgttcaaaactgtgttcttcaaacgtcaactgtacaatcataggtattttagaaattctagcttcattgactattattctataactaaatgaaagtaaataccactttaaattgttgtgggttgtaaaaagagcctgagttgaacctaagtattcctgcacaaatgttggcagcaagttcaaatatatatttacctatgtatgtttcaccaggctgtgacaaattgctttaaaattatatttttagaaagtaataattccttccacatgtatgttaattgattataatcattatgtaatcacaataaatacatctttggctaattcaagaagagataaagggaaacacaacaacgaggaaaaagtcagcag

SEQ ID NO: 320189 - DNA, 471 bp, Homo sapiens
cttcaagttaagtagcctgagagggaggaggaagaggaagagttgatcttgctgtattaggcgtggcagaggcaagcagaaaaaaaaatccacctataagtgttcaaaactgtgttcttcaaacgtcaactgtacaatcataggtattttagaaattctagcttcattgactattattctataactaaatgaaagtaaataccactttaaattgttgtgggttgtaaaaagagcytgagttgaacctaagtattcctgcacaaatgttggcagcaagttcaaatatatatttacctatgtatgtttcaccaggctgtgacaaattgctttaaaattatatttttagaaagtaataattccttccacatgtatgttaattgattataatcattatgtaatcacaataaatacatctttggctaattcaagaagagataaagggaaacacaacaacgaggaaaaagtcagcag

SEQ ID NO: 320190 - DNA, 471 bp, Homo sapiens
cttcaagttaagtagcctgagagggaggaggaagaggaagagttgatcttgctgtattaggcgtggcagaggcaagcagaaaaaaaaatccacctataagtgttcaaaactgtgttcttcaaacgtcaactgtacaatcataggtattttagaaattctagcttcattgactattattctataactaaatgaaagtaaataccactttaaattgttgtgggttgtaaaaagagcctgagttgaacytaagtattcctgcacaaatgttggcagcaagttcaaatatatatttacctatgtatgtttcaccaggctgtgacaaattgctttaaaattatatttttagaaagtaataattccttccacatgtatgttaattgattataatcattatgtaatcacaataaatacatctttggctaattcaagaagagataaagggaaacacaacaacgaggaaaaagtcagcag

SEQ ID NO: 320191 - DNA, 649 bp, Homo sapiens
tctgagaactgtgtctgtgatgttagtcaagttgctgagtcccaatttccataaatgtaaagtggcgaagatattaccaaaaaattatctttaaaacaaattaaataataatggagatagatactgtttttgagcattataattagagccaacatttgttgaatgccaggcattgctctaaagagtttacttggatttttcttacttgatcttcatcacagcctttcaagatgcacctcttaaataacagtggcaaagattctgggcagatggatgagtagaagcatcaagaatctgtctccccatctagataaaaactgcattggcatagtctgtctgttgtaaatatttttgaactttggagtgttgtggaaggcttgcaacttccaggggaatgcttgacagtaaacttggtttattttggttaatttctgctcttacctggctaacagttttctatctcycacacgagcctggtgggaggcagtgcatgagctgcaggagcagcttgcatgcagcttgtgggagccagggtaggcaataagaaccatgtcatccaaatagcagaacctgtgttctgagtgctgactgttgcttctgatcatggaaggcagacacaaaggcagatagtcattgttgtaccccctca

SEQ ID NO: 320192 - DNA, 627 bp, Homo sapiens
gttttttgatccttaccctcctcccaccttccaccctcaagtaagccccggtgtctgttgctcccctctttgtccatgtgtactcaatgtttagctctcacttataagtgagaacatgtggtatttggttttctgttcctgcatacattgcctcagaagaatagcctccagctgcatccatgttgctgcaaaggacatgatttcattcttttttatggctgcatagtattccataataacacctctcttatttttatttttgccaagcacatgataggcactggttctacagtgagayatatctctcctaagtctggtgacaaaccagaaccaagcgatttctaaatggtgtgttagatgttacagcgcagtgcgggtaacatggcagtgttgagaggagtacttaatgctcatgtaggtgacaggaatgttgcaattattccaaatttgttctactagatggagagtgtctgtgaaagtatttaattcacttactggggacatgttcctggcccattttgccaaggattttgtctctgatggtagcagaaagccattaatttagggtgggccccaaagttttccagaaactaatataaatcaagtatctccaattagcctgccatg

SEQ ID NO: 320193 - DNA, 572 bp, Homo sapiens
tctttaggagaaaaacattagttgattacatttatttatttatttatttagagatggagtcttgctctgtctcccaggctggagtgcagtggtgtaatctcggctcactgcaacctctgcctcccgggttcaagtgattctcctgcctcagcctcggagtagctgggaccacaggtgcgcactaacatatccagctaatttttgtagttgtagtaaagatgaggtttcaccatgttgttcaggctagtctcgaactcctggcctcaagtggatctgcctgccttggcctctcaaagtgtgtgagccaccccgcctggctgattacactttaaatactatgtttgctgtttctaaacaggcataaaatgggcttamtgttaaaaatgtggaatcaaatctgaaaaaaacccacaaggatagtgtctttttcatctctgttggtcttaaaaacattaaaaacgacaacctaattagctacgtcattttcttttgactgtgggcaggtggctttctttctggtattctagagaaggattaaggatctaaatagatttgcagatagactggtacaa

SEQ ID NO: 320194 - DNA, 461 bp, Homo sapiens
cttggtatttatgttgaggtaccttatattatcattgacttattcattaataattatttaatgaggacctatgtgtgccaggtattcctccagagactgaagataaagatcactgtcatcgagattgtggcccagtaggtgagtcagacaataaaaaatataartatatataaaaggtaatgtatattagcaaccactgaaagaaaaatataagaaggggatttaaagtgctggtgtgagtacaggatgcctgttacttttagaaaagatgacaaagaagcacttcattaagaaaagcttctgagtaaagattggaaagtgcaaggaaagcagcagccagatattttggcaaaaacagcagttgaggcagagtgaagggcatgtgcaaaggccctgaggcaagagctacttagcaaactgtaaaaaatagattatgagatcagagaggtaataagggagaa

SEQ ID NO: 320195 - DNA, 580 bp, Homo sapiens
attgatcagaacatttgtggtggaacataaattagcctttaagaaaaagaaaggctaagcttacaagactttattttccattaaaaacacataatcctaatatcaatggtttatattcaagggaggaacaagttttttcttggagaactaatgataatacaattatgayacctattgtgattgaaattattttatatatcaccataattgtaactgcccaggtgatttttaaatgcacatttcttaattctcagtaaaattcaaatcatctggaaaaaaatgagttaataaaaatgtaaaaaggagaagcaatatagaaagaaacaagacatgataaataagatttttttccaaattcagatgatattacaatatatatgtgattaccaaattgttaggagtaaacagaataaccccttaaagcagaccattcttcaaaatggcagtcacattcttcgatactcaacagaggtcctctgccccagaatattattatgattattcccaatttcttattcctgagaggacatatcataaattctgttataatttcaaataaattaattgccacacccacaaa

SEQ ID NO: 320196 - DNA, 583 bp, Homo sapiens
ttccttaaaccttcattctcatcgtgcagcaagtgctcagtctcccgcagctcctgctccttctcgttcagcagtttgatcaccgccagcaactcgggcctcctgaccttcaaatgggcttcagaccccgcctggcgctcgaggaaggtccgcaagggcccgccccgggcgaacagctyctccagcggcgggctaccggagctcaggggccggcgggctgggccaacggcccggcggggccagagccaccgggcagcgcccccgctgagcacttggattattgctattttgtatcatatgaactgacatacgtgtgcacttaactcttttcagtaataacaacattaaaaactgtaattgaatttactttaatgggtcagaagtacattattgaaatttttttgggttccattctgagtttgtgattcactttaatagtcacccatgatggggtcctcagtagcattgattttgataaacctcatttgtatctcggatgcaagcccttctgataggctgatagacataaactctcctttcatgtagctaattgaagatgctcccttcttaatttctttctaat

SEQ ID NO: 320197 - DNA, 583 bp, Homo sapiens
ttccttaaaccttcattctcatcgtgcagcaagtgctcagtctcccgcagctcctgctccttctcgttcagcagtttgatcaccgccagcaactcgggcctcctgaccttcaaatgggcttcagaccccgcctggcgctcgaggaaggtccgcaagggcccgccccgggcgaacagcttctccagcggcgggctaccggagctcaggggccggcgggctgggccaacggcccggcggggccagagccaccgggcagcgcccccgctgagcacttggattattgctattttgtatcatatgaactgacatacgtgtgcacttaactcttttcagtaataacaacattaaaaactgtaattgaatttactttaatgggtcagaagtacattattgaaatttttttgggttccattctgagtttgtgattcactttaatagtcacccatgatggggtcctcagtagcaytgattttgataaacctcatttgtatctcggatgcaagcccttctgataggctgatagacataaactctcctttcatgtagctaattgaagatgctcccttcttaatttctttctaat

SEQ ID NO: 320198 - DNA, 470 bp, Homo sapiens
aaattaaataaattcctattttaaaatacctcaagttaaattggttatatatacagaagtacaatatatttagagttttttttacactttctgttcttgactaggcaagatttttttatcttttcttttttagaccagacaaaaaatttcacatgaggaacatttgaaattattaatgagaggaaaaaatggccttgtcttttatagtagcgtttycttttaatagttctctctgaaaaattgtgaaccaaaatggaaaataagttggaatgaacttagaacagattttagaaggcaaaacataaaccatcacttggaaaatggttcttaagcattaattttacacatattatttgttaactcatatcattcaatttgtttcttacttttacatttgtttttcaatttttaatttctcttaaatgtataattacacaaatgcagtagccagtgaaattaaaacatcatac

SEQ ID NO: 320199 - DNA, 541 bp, Homo sapiens
agatttttatgtcaatgcagctcaacatttctgctatattctgttttgtaggcagaacaaaatctctcttagttagaggctgaaatccaagggacttcgatttattccaattttcaagtagaagattttattttactcaggtaaacatagactgtgctgttacataaataaataaataaataaataaataaataaagcaagcagaaggtgcggcatagatttaaaaaactatacttggggaaaataaaattaaataaaatcatcgtcaaaagttcttgtgcactttgaaattcagattgcatcgtgagcttggattgccaatatccttcaygctgttgcttgccagactgatagctctttccattcattacagatagaaagtgactatgaagctttacaaagttacgggcaggtgcaaagctgttgatcccagcctagaagatacattttatatgcctgtgaagattgttcaaaaaaccccaactgtaacaccaagttgttagaatagtttaagaaagattaagccagagaagggagcttc

SEQ ID NO: 320200 - DNA, 594 bp, Homo sapiens
tgtccaattctgagctcagatcagtcatctcagtcagcttgagctattattactcttagtctaaaaattatttttgttcccctatatatagcccccctcacttcttccttaagagactgagaatttttcaagcccactcatatcaatgtgatatcgtagattcgattaaatgtgatgttcactgttttttgtattgaaaaggcaygactcctcatgtacaagatgattctacatttttgaattccaaaataaatttgtttcaatgttgtataagattgaagatgtccaccctgatgtttttccaaacaaactataaatggtcttaatatgactgcctattaaattatatttttaaaaagtagatcctattgttttttcatattttaaaagtcaatgttcactgattttctgataagctatacttcatatatgttcttttatataaccactgtatattcaaattggatgcttgctattagcatgaagggcctctttattaactgattttgtacattatctagtataaggaggaagccacaaagaatacatcatattttccaaatgcaggtagaatctcatatgagttttcactag

SEQ ID NO: 320201 - DNA, 510 bp, Homo sapiens
aagaatggtgctaccagcatgcctccttggggttggcagcctggctaggtagttttgcagggttcttgggtagaggtaagccagttgacataaagaatccagcaaacttccaggagagccccaggcctcttgcttgcctgaagcagaaatatgacacccatactgagaaataatrggagatggccatgctccatcactgtagaatataaaggtaaagaagaccctcaaataaacctgcaatgaatgggaagagccaaggccagtaggggcttggccaaccacaagatgggtcattgtgctggtgtggaagggggtccactgtccgggagggctggttgtggtttggggacagggaagaagtgagtgtctcaggatcagggcagttgctcatgccacaactattgtggcctagctttaagatgaagaactgtgctcagctgaaagagcactttcagcagataaaaggaccaaggaccttgaattccttccccatttggtgtggtggtgtct

SEQ ID NO: 320202 - DNA, 484 bp, Homo sapiens
tcaccacgttggccaggatgatctcaatctcctgacctcgtgatctgcccacttcaacctctcaaagygctgggattataggggtgaaccaccacgcttagcccttctgtgatttctttgagcagtgttttgtaatcctcattgtaggggtctttcaccttcctggatgctgtatttctaggtattttattttttgtggcaattgtgaatgggattgcctttctaatttggctctcagtttgcttgttgttggtgtataagaatgctagtcatttttgtacactgattttgtatcctgcaactttgctgaagttgtttatcagctgaaggagcttttgggcaaagactatggggttttctatatgtagaattatgtcatctgcatacagagatagtttgagttcctctattactatttggattggctttatttctttcttttgcctgactgctctgggtaggacttccaatactatgatgagca

SEQ ID NO: 320203 - DNA, 561 bp, Homo sapiens
tggagaggttcacacagcaaggtaacagcaaccaagtgacttcttcattttatagccatgagagttccagaaggggatgctccagcctcagtggagccttgagatgactgtggcccatgacagcattctacctgcagacacaggagaccctgagctggcactagtaatayctggctgagcgactcaaaccctgtcccacagaaactgggggataacaagtgcccgttgttttaagccataaagttctgcataaatgttatacagatatcaataactaagatatgggcattgggctatgcattcaatatctgtgatacacacacacacacaccccttaaatcttacatagcaccaaataactaaaatcagctgaaaacacaatcaggaaactgataaaaggggcaacattttgggaagaaataaaattgttaatattgtgtttttaaaggccaggtacctaggtaatgatgacattgctaattctattattcttcatcatggataaattttaaataattctgaacatttctccaagctgcacagcctaatgatgttcactaa

SEQ ID NO: 320204 - DNA, 479 bp, Homo sapiens
aattgactactgaaagattttattaacagcatgcatctacaaaagatacattctaaagatagaatacatcaatgaattttaaagaaacagaaaagtttactgatrtactttcatattccacattgcaaatagcttttaaaaaataatacatcatgctttggttgtagttttgaggaagaaaatctacaatgatataaaaaggctattgaaatacactttgttttccccattacatatctattgagagtacgtattctacataaacttcacaatcaacaatttgagtgcaaaagcaggcattttattatggaagataatgagatatataaaaatattaaaatgatacaatttttccacagttgttttattttgaaaaacaattatttttaataaaatatatacatgttatagatttcgtattgctttataaattgaattaataaatcttaaaaattataatttaaaaatgcctaatacaa

SEQ ID NO: 320205 - DNA, 479 bp, Homo sapiens
aattgactactgaaagattttattaacagcatgcatctacaaaagatacattctaaagatagaatacatcaatgaattttaaagaaacagaaaagtttactgatatactttcatattccacattgcaaatagcttttaaaaaataatacatcatgctttggttgtagttttgaggaagaaaatctacaatgatataaaaaggctattgaaatacactttgttttccccattacatatctattgagagtacgtattctacataaacttcacaatcaacaatttgagtgcaaaagcaggcattttattatggaagataatgagatatataaaaatattaaaatgatacaatttttccacagttgttttattttgaaaaacaattatttttaataaaatatatacatgttatagatttygtattgctttataaattgaattaataaatcttaaaaattataatttaaaaatgcctaatacaa

SEQ ID NO: 320206 - DNA, 513 bp, Homo sapiens
tgtgacttagacaagtgtgatactagtacaagtggtgagaagagatcagatgtagatatattttggccatagatcagataggatgtgttgatgactttgacgtggagtatagaagaaaaactgtagtcaagtatttctttaatatttttgcytaagaaatgggaaagattcagatactcttaactgaaattgggaagaatgtgaaatgagctgaattgagctcattctatgttgggcatattagaatcttagttgtcggtattttgaggcagggatgtctattagatatccaaggggagaggttgactaggcaactgaatttatgagtcagcagttggaatcctcagcaaataaacggtaattatatacgccatctttctttatctgttttgcctttactatgttaaagcaccaaagatcaatattaggtggtaggcattagtttagggtgtagcatgatgtcaacttgggcataaaagttatgctttatttaatctgtagatattgatcaca

SEQ ID NO: 320207 - DNA, 525 bp, Homo sapiens
ttttgcagtaatatttaattgttaaatattaaacccaccacattttattctaagagacaaactaattaatacagaaataaccactcaagtagagcttacttacaaaaacataaagacacaatgtaaaatctaaattatttggcagaaattgaactaaaaagtagacaaaagcagatattcaatattttacattgtggttttgctggctacttttaaaatagaactttaggcttttcagatattactgaaagtgtgtaccaatattattttcttaaaaatgttgggagtgagtattccagggcaagaagtgccatgttccagtgccaccagagatgaacatataaataattttgcaatgatacggaagccatgtcatggcacacgttaagctagcaaaatgtttttcattacaacttaagtaatgaacagacattgctaatataactwattatatgtataccttgaacatgatagtaatatgaaggacattttttttctttagtttcattgcctagatacacaact

SEQ ID NO: 320208 - DNA, 662 bp, Homo sapiens
cctcctttactctggtttttctactatgagtgttattaaaacagatcatttaagcagttaagatagatgttwtattgtctgtgtgtcgttttgtaaggatatttggatggctttggaagagaataggcaaattttcataaatttcttttctacactttagatttttttttttttttgaggcagagtcttactctgtctctcagtctggagtgcagtgttgtgaccttgggtcactacagcctcaatttcccgggcccaggtgatcctcttacctcagcttctccagtagctgggaccacaggtacatgccaccatgcctggctaactttttgtatttttggtagagatggggtttcactatgttgtccaggctggtctgaagctcctaggctcaagaaatccaccttcctcggcctcccaaactgttgggattacaagtgtgagtcaacatgccggtctgattacttcttaaattctatgcacatttggccttcctgtgtcttctggtggctttgcacaatagtctcatatcccatgatagttataagaataaagccttaatttaggaactttccagataatatcaccataagattgtaggagcaaggtaaagccctgccataaaatcttttttttaactgagaactacagtacttttgctc

SEQ ID NO: 320209 - DNA, 638 bp, Homo sapiens
tttctcttctctttctcctttttatctctttttcttttattatatttactgggagatttccacaactttattttccaacctttgtattgagttttaattttttctactatatttttaaatttccaagggctggttttgttctctaaatattactttttacggcgtgcctattttcatatgtacaatgtgttctttctttyctctgtaaaaattaattttagctctttttgcactttgtctccttgcattgttctcacttaccccaaaactcttttagaaatctgttttgttttctatatgtcctgatagaaaatgtgcttaaatatctattggtatttggcatttaattaataagctctaaaaagctgagtggaagttctataagttagtgagatcagttcactcgtgggcttcactctagatttatctggttgagaaattgtatttggggaccaaaactgccaggaactttttgtgtatgtatattaaatatacaattatgtatatatacatatgaatattttcccttctgggaaaaatctcccatctctggccatagattatataaacttctctgtcattattctgtgacccaagtagaaagtaaaaataatagttagcacatatatagtgcttat

SEQ ID NO: 320210 - DNA, 546 bp, Homo sapiens
attcttagcatttgagatgatggtaggcatatacagagtatttcgaatagtacttgaaatgaataaattaatacttgggtaaagacttttgaaagagtttgaaaaccaaattggaacacacaaaaatttattgtaaataatgtgatttttgtattcttcattcraccagttgatatattagaaatggagactgtaataggatgaatttaaaagcaaaaggcagaaatgacatgtaaacattcaagagtccaatctgaatgatttaattggattgatagcttagttttggaatgcaaggacatttcagactctgctagtgctctgctcttcaacatttaggctgagatggaaggtattgacaaggttttgacgagaacagtttatctttattatcttcatgctgtgttatgcttgtccagaaaccaaacaaatgtcaaccatagtcagctgctttgggatggtaccttaactcttaggctaagaattccataaactctttagtaaagaaagcctttctgtggtatagggaatgcactaaattcatcc

SEQ ID NO: 320211 - DNA, 507 bp, Homo sapiens
aaaatcttataaaatatatgaaaatgttgattcctagggagtttactgtctagcttgaaaagccactgacatacacacgaaaaattctagtggctatctagattatattttaatttatctatattgatcataaatacaaagggaagaactgggtatggacwttcattctgtcacctaccaattttataatttctgaacctaggttccttcatctgcctggttacattaataaaatgtagagttgctgtggataaaagtacacatgtggtggctcgtgactataatctcagggacttgggacttgggaggccaaggcaggaggattgcttgaggctaggattttttttatgtttttaatgttttactttttaatttgtatgggtacagagtagttgtgtgtatttatagggtacatgagatgttttgatacagacatgcaatgggtaataatcacatcatggagaatgggggatccatcccctcaagcatttatcctttaaataccag

SEQ ID NO: 320212 - DNA, 507 bp, Homo sapiens
aaaatcttataaaatatatgaaaatgttgattcctagggagtttactgtctagcttgaaaagccactgacatacacacgaaaaattctagtggctatctagattatattttaatttatctatattgatcataaatacaaagggaagaactgggtatggactttcattctgtcacctaccaattttataatttctgaacctaggttccttcatctgcctggttacattaataaaatgtagrgttgctgtggataaaagtacacatgtggtggctcgtgactataatctcagggacttgggacttgggaggccaaggcaggaggattgcttgaggctaggattttttttatgtttttaatgttttactttttaatttgtatgggtacagagtagttgtgtgtatttatagggtacatgagatgttttgatacagacatgcaatgggtaataatcacatcatggagaatgggggatccatcccctcaagcatttatcctttaaataccag

SEQ ID NO: 320213 - DNA, 636 bp, Homo sapiens
accagggctcttgtttcaagcacaaaactgggcagctgtttgggcaggcatggagccagctgcaggagcttttttcagactccagtggttcctggaactccagcaagacagaacaacaatccgcttccctggaaaagggccatggagccagcagtctcactcagagggtcccactcccatggagcccagcaaggtaagaaccactggcttgaaattctcactctcagcacagcagtctggaggtgatctgggacaatcgagattggtgagarcaggagcatccaccattactgaggcttcagtaggcagttttccccagataatgctaaggagactgggaggtttggactgggcagaattcaccagagcacagcaaagtggctgtggccagtttgcttctctagattcctccttacttgggcaggccatttcataggaaatgcagcagtcccagtcagggacttacagataaaactctcatctccctgggacagagcacctggtgggaggggcagctgtggttgcagcttcagcggacttaatctttcctgcctgccggctctgaagagagagtggcaggccctgacaagggggattctcccagcacagtgcactaggtctgctaagggacagagt

SEQ ID NO: 320214 - DNA, 636 bp, Homo sapiens
accagggctcttgtttcaagcacaaaactgggcagctgtttgggcaggcatggagccagctgcaggagcttttttcagactccagtggttcctggaactccagcaagacagaacaacaatccgcttccctggaaaagggccatggagccagcagtctcactcagagggtcccactcccatggagcccagcaaggtaagaaccactggcttgaaattctcactctcagcacagcagtctggaggtgatctgggacaatcgagattggtgagagcaggagcatccaccattactgaggyttcagtaggcagttttccccagataatgctaaggagactgggaggtttggactgggcagaattcaccagagcacagcaaagtggctgtggccagtttgcttctctagattcctccttacttgggcaggccatttcataggaaatgcagcagtcccagtcagggacttacagataaaactctcatctccctgggacagagcacctggtgggaggggcagctgtggttgcagcttcagcggacttaatctttcctgcctgccggctctgaagagagagtggcaggccctgacaagggggattctcccagcacagtgcactaggtctgctaagggacagagt

SEQ ID NO: 320215 - DNA, 621 bp, Homo sapiens
gatcaaagttagataaattcaggaagatgagggaaaaccagtggaaaaatgccgaaaattccaaaagccagaatgccttttctcctccaaataatcacaattcctatccagcaagggcacaaaactggatgagattgatgaattgacagaagtaggcctcagaaggtgggtaataacaaactcttctgagctaaaggaacatgttcgaactcaatgcaaggaagctaagaacttgataaaaggttacaggmactgctaattagaataaccagtttagagagaacataaatgacccaatgcagctgaaaaacacagcacaagaacttcatgaagcatacacaagtatcaatggctgaatctatcaaacaaaataaaggaattcagagattaaagactaccttgctgaaataaggtgtgcagacaagattagagaaaaaagaatgaaaatgattgaacaaagcccccaagaaatatgtatatactatgtatttgtaaatactatgtaaaaagaccaaacctatgattgattggtgtacctgaaagtgagagggagaatggaaccaagttggaaaacacatttcaggatattatccaggagaactttcccaacccagaaagaca

SEQ ID NO: 320216 - DNA, 605 bp, Homo sapiens
atgggcaaggaacagggtttggaaaaatcattgtggcagagaggtgcagtgtgtggggctgaatcaaagtagcacatggcctagacagagcgatatgagcatgaaattctccatggtattatatagcctagaaggactgagcttctgtaagtgactaaggtgcagcaatataagtcatgaaaatttccttatttcttggaaagaaggaggtggacaactattttaaacaagagtcctgaatatttaagcccaatggtatagaagcctcatagtaatttgtatttgtgagcaatgtcagctaagaaatggagcttggacctgtcaaagaataactcagaactattcagtygttaaagaataactcagccgggtaaggtgggtcacacttgtaattctagcactttggaaggccaaggtgggcagatcacttgagcctaggagctcaagaccagtctgggcgacatggtgaaactgtatctttacaaaaaatacaaaaattagccaagcatggtggcaagcatctgtagtcccagctactccaaaagctgaagtgggaggatcacttcagcccaggaagttgagactccaatgagcaatgatcatgc

SEQ ID NO: 320217 - DNA, 589 bp, Homo sapiens
tatgcaacagctatttggttaagtttagagttttaaaaaacttatttctggccaggcgcggtgcctcaagcctgttaatcccagcactttaggaggctggcacagggggatcacctgaggtcaggagttccagaccagcctggccaacatggtgaaacaccatttctactaaaagtacaaaatttagccagggatggtggcaggcgtctgtcgtcccacttacatgggaggctgaggcggaagaatcgcttgaacctgggaggccgaggttgcaktgagccgagatcccgccattgcactccagcctgggcgacaagagtgagacttcatctcaaaaacaaaacaaaagaaaacaaaatgtatttctatcatgattttattttaagtacaccaggaagaggttgaagagttttttatagatagaagttactgtataaaaattcaaggtaattgataaagtctgtcagtgtgataaaaacaccaaatgatttcaaattcaagatttcaggataaaaattctgccctttacttgaatgactaagtcacgcaaatgtgatattacttattttctttattttgaaagtggtgg

SEQ ID NO: 320218 - DNA, 487 bp, Homo sapiens
catctttttatctactaagttttgcaaccctgagatgatttttaaagtagtcgaaaattatctkatgctcctttcattgaaagataagatttatgtcctttcctttttaatctgtacagacttgtttttgcttctatcgatagagtgtaaccaaaaactctttgtgacttctgaggtctgaggctagcagatataaagccatgcagcttttgttctgtctcatggatccctgagcttccataatggaatttcaactactgtgaggcaaccatgctgtggggaagcccaaaccatatacaaagaccatttatagatttagaagactgtcttaggcaagctcagcctaggagtcatcccagcctaggtgtcagatctgtgaatgagtctgctccagatgagttaagtgtccggccaatcagtcatatccaactatttgagtcttctcagctgaggctccagtcaatggagaacagagtcaagccataat

SEQ ID NO: 320219 - DNA, 660 bp, Homo sapiens
gttaattttgtttgccttcgtttaaaatatctaagcctgaaaaaaagctgagataatttatattttggcaaagttcactgagttttgatgaatttattcaccacataatttaagggggtcagtaatgagggtaggtggtcatgccaaatatttatcaatatgaaagtgaaatgtgactttttctgttaagttgataagtaagcgttagaaactctaaaggaataataaaatatcattgtttaatcttttaggtatattttccacatagcaaagagtctatatctcattgaaaaacgtwcttttcttagttttcattttattatgcaactggctaattttttgaaaaattcctcacttacgaaaaacctaaagtttcttacaaaactgttactatcttttgtgtttatttaaagcatgccatcactttgattaaaacaataaccaagtgttttttctcaggacccttgagcctatcttgaaacataaggtctgctttattttgtaggggagggggagggttgcctaaagtagtagataccaaatttagaaaaaaattaattcaattcaggagccttcccccctcccatagatttcctagacaaaccccaatatctgttacttcaccttgtggaaaaagatgatacgaacagttagggttgt

SEQ ID NO: 320220 - DNA, 552 bp, Homo sapiens
cctttggtctgggaggctaattcataacctctcacctcaaagttccctgaaccttttatagatttcagggcacccagactccgaactccttccccatttcagcacagactcagttgtggctcctggrtttacagctgatgactgaaaggagagggcactctgaaggggctggccatgggcaccggtattatagggaagtggatatttgtgcagacattgggatcatgcagactacaacatgagtcccagctctaccctttactactagcaaagtgactttggatgagttatttaatcagttttcctgtctgaaatattgaaataagaatagtaacttgcgtgtgtgtgtatacatgtgtatgtgtgtatgtatatatatgtgtgtgtgtgttagtgcatatatatccatttatatataaccacacacatatactacacattatctagtaaggataactattaatttgttatgcttttgaatcaagtctaaaatactattgcagaagcataactcattaccagatagtttcctatattagatgtaaaactcca

SEQ ID NO: 320221 - DNA, 552 bp, Homo sapiens
cctttggtctgggaggctaattcataacctctcacctcaaagttccctgaaccttttatagatttcagggcacccagactccgaactccttccccatttcagcacagactcagttgtggctcctggatttacagctgatgactgaaaggagagggcactctgaaggggctggccatgggcaccggtattatagggaagtggatatttgtgcagacattgggatcatgcagactacaacatgagtcccagctctaccctttactactagcaaagtgactttggatgagttatttaatcagttttcctgtctgaaatattgaaataagaatagtaacttgcgtgtgtgtgtatacatgtgtatgtgtgtatgtatatatrtgtgtgtgtgtgttagtgcatatatatccatttatatataaccacacacatatactacacattatctagtaaggataactattaatttgttatgcttttgaatcaagtctaaaatactattgcagaagcataactcattaccagatagtttcctatattagatgtaaaactcca

SEQ ID NO: 320222 - DNA, 552 bp, Homo sapiens
cctttggtctgggaggctaattcataacctctcacctcaaagttccctgaaccttttatagatttcagggcacccagactccgaactccttccccatttcagcacagactcagttgtggctcctggatttacagctgatgactgaaaggagagggcactctgaaggggctggccatgggcaccggtattatagggaagtggatatttgtgcagacattgggatcatgcagactacaacatgagtcccagctctaccctttactactagcaaagtgactttggatgagttatttaatcagttttcctgtctgaaatattgaaataagaatagtaacttgcgtgtgtgtgtatacatgtgtatgtgtgtatgtatatatatgtgtgtgtgtgttagtgcatatatatccatttatatataaccacacacatatactacacattatctagtaaggataactattaatttgttatgcttttgaatcaagtctaaaatacyattgcagaagcataactcattaccagatagtttcctatattagatgtaaaactcca

SEQ ID NO: 320223 - DNA, 620 bp, Homo sapiens
ttctttcttttttcttcatgtttggaaacctctcttatcatttcctttctgttaagagaatttcctctacttattatttcagggtaggtctttttggtgacaaaattctcttaatgctggcttcctatgaaaatgacatgatgtcctatccattcctggaagagtatttttgcggatatataaatctatattggtatttttttttcctccagcacttggaatatttggggccacatccttacatcctccatggattctgatgagaatttacagtcatttaaatggtttttactctgtaggtaagatggtgtttctttcttgcagcttctacaatttttttatcttagttttcagaagtttkatgtgtcttggatttctttgggtttattctctgtgagattctcttaatttttgaaactgtaggcatatgtcttatgccaaattagaaagttatcaatcataatttttgggactatttttaagtcttgttgtattgtcttgtccttctgggactctgatgacacaaacagatcttttgttatagtctcacaggttcctgaagttcatttgttttaagcttattttttctccattgtccagattaagtaacttacattgtt

SEQ ID NO: 320224 - DNA, 471 bp, Homo sapiens
gtctcacaggttcctgaagttcatttgttttaagcttattttttctccattgtccagattaagtaacttacattgttctactcttaagtttgctgattctttcctctgtgcccgctagtttgctattaagcccatctgttgaaatttttgttgyttgaaaatttcagttatctgtattttccagtcccagaagttccatttggttcttctttgtatttcttttctgagacttttctatttcttcactgtgacttttcattttacattaaaaaaattgtttatcaacatttgtaattgctctttgaagcatttttattatgactgctttaaaatccttgtgagataattctaatacctctgtcatattcatatctctatctattgattgtctttcttcattacagttgagattttctcagttcttagtatgctgaataatattttattgaaacaaggtcatttttggtatta

SEQ ID NO: 320225 - DNA, 471 bp, Homo sapiens
gtctcacaggttcctgaagttcatttgttttaagcttattttttctccattgtccagattaagtaacttacattgttctactcttaagtttgctgattctttcctctgtgcccgctagtttgctattaagcccatctgttgaaatttttgttgcttgaaaatttcagttatctgtattttccagtcccagaagttccatttggttcttctttgtatttcttttctgagacttttctatttcttcactgtgacttttcattttacattaaaaaaattgtttatcaacatttgtaattgctctttgaagcatttttattatgactgctttaaaatccttgtgagataattctaatayctctgtcatattcatatctctatctattgattgtctttcttcattacagttgagattttctcagttcttagtatgctgaataatattttattgaaacaaggtcatttttggtatta

SEQ ID NO: 320226 - DNA, 612 bp, Homo sapiens
gctgtgggttttattaatttagctaaatactaatatgcatatctaagttcattcactctccggattagcacrgtattgtaacagccttatatagcattagcctaatttgatacacaagtattaacatgaaaggggatccctttcgtgacaaggtattatttctatagcaatttaatattttattggcctgagacaatccagcgccaatttgcttccctccccaaatacagcataataaacatgggcttctttgttgtagctgtggtttaaggacagccacagtgcggatagggcatgaagttttattcccccgctccccacatcaaacctctgtgtcttcctcaccatcagaggcccattggcattgttgatggtctgtttgcatacctttctttcttgcctaagggaagtcagatgggatatttaagatcctccccaacttccagattctaggattgaaaacagagcaataatgtgcctgctgcatcccaagtcgggagatgactcacccttccagacttcctggaatccccatggaaatgggcttgcatcttatttaaatggaaaagtacagccatgacgaaaaaggaaaatgtcggtcagggtcatgtt

SEQ ID NO: 320227 - DNA, 612 bp, Homo sapiens
gctgtgggttttattaatttagctaaatactaatatgcatatctaagttcattcactctccggattagcacagtattgtaacagcctwatatagcattagcctaatttgatacacaagtattaacatgaaaggggatccctttcgtgacaaggtattatttctatagcaatttaatattttattggcctgagacaatccagcgccaatttgcttccctccccaaatacagcataataaacatgggcttctttgttgtagctgtggtttaaggacagccacagtgcggatagggcatgaagttttattcccccgctccccacatcaaacctctgtgtcttcctcaccatcagaggcccattggcattgttgatggtctgtttgcatacctttctttcttgcctaagggaagtcagatgggatatttaagatcctccccaacttccagattctaggattgaaaacagagcaataatgtgcctgctgcatcccaagtcgggagatgactcacccttccagacttcctggaatccccatggaaatgggcttgcatcttatttaaatggaaaagtacagccatgacgaaaaaggaaaatgtcggtcagggtcatgtt

SEQ ID NO: 320228 - DNA, 612 bp, Homo sapiens
gctgtgggttttattaatttagctaaatactaatatgcatatctaagttcattcactctccggattagcacagtattgtaacagccttatatagcattagcctaatttgatacacaagtattaacatgaaaggggatccctttcgtgacaaggtattatttctatagcaatttaatattttattggcctgagacaatccagcgccaatttgcttccctccccaaatacagcataataaacatgggcttctttgttgtagctgtggtttaaggacagccrcagtgcggatagggcatgaagttttattcccccgctccccacatcaaacctctgtgtcttcctcaccatcagaggcccattggcattgttgatggtctgtttgcatacctttctttcttgcctaagggaagtcagatgggatatttaagatcctccccaacttccagattctaggattgaaaacagagcaataatgtgcctgctgcatcccaagtcgggagatgactcacccttccagacttcctggaatccccatggaaatgggcttgcatcttatttaaatggaaaagtacagccatgacgaaaaaggaaaatgtcggtcagggtcatgtt

SEQ ID NO: 320229 - DNA, 612 bp, Homo sapiens
gctgtgggttttattaatttagctaaatactaatatgcatatctaagttcattcactctccggattagcacagtattgtaacagccttatatagcattagcctaatttgatacacaagtattaacatgaaaggggatccctttcgtgacaaggtattatttctatagcaatttaatattttattggcctgagacaatccagcgccaatttgcttccctccccaaatacagcataataaacatgggcttctttgttgtagctgtggtttaaggacagccacagtrcggatagggcatgaagttttattcccccgctccccacatcaaacctctgtgtcttcctcaccatcagaggcccattggcattgttgatggtctgtttgcatacctttctttcttgcctaagggaagtcagatgggatatttaagatcctccccaacttccagattctaggattgaaaacagagcaataatgtgcctgctgcatcccaagtcgggagatgactcacccttccagacttcctggaatccccatggaaatgggcttgcatcttatttaaatggaaaagtacagccatgacgaaaaaggaaaatgtcggtcagggtcatgtt

SEQ ID NO: 320230 - DNA, 632 bp, Homo sapiens
agttaaataatatcagtcatattctaatatatttgcaaacctagaaaaaacaatgtttataaaaaatgttaaaatgtacataaacttgtattatttaaagaaattaaagtgataatcaattcgctcctactccaaaatgacacgcatagagggttttagagatgaggtaaggaatatgcagttgttatrcatgttgtcccaaaaagtcaaaaatgacgaagtctggacagattattttgtgaggctagtataattctttttttttttttttttttgagatggagtctcactctgttgcccaggctggagtgcagtgggacaatctcagctcactgacacctctgcctcccagcttctagcaattctcctgcctcagcctcccgagtagctgagattacacatgcacaccgtcacgcccggctaattttttgtattttagtagagatggggttttgccgtgttgcccagactggtctcaaactcttgagctcagataatccacctgccttggcttcccaaggtgctaggattacaggggtgagccaccgcgcctggctgaggctagtataattctaacagccaagtcacacgaaacaagtacatgacaaaaataatagcacaagtcagcttct

SEQ ID NO: 320231 - DNA, 587 bp, Homo sapiens
ctaatttggtatatgactatatctgcatttattaattttttctaactgcagtatttccagaactttacatgcagtaacttggttcttaaaaaagccttgccagggttgggcgtggtggctcacacctgtaatcctagcactttgggaggccgaggcgggcggatcacgaggtcaggagattgagaccatcctggttaacatggtgaaaccccgtctctactaaaaatacaaaagttagccaggcgtggttgtgggcacctgtagtcccagctacttgggaggctgaggcaggagaatggcgagaaccccggaggcggagctggcagtgagccgagatcaygccactgcactccagcctgggtgacagagcgagactccatctcaaaaagaaagccttgccaggcagatattgtccccatttgacttataggattagtgaggctcagagtgttgagtaatttgcacaatgtcactcaactgcttgaatggtaggtgtgtctgttctcaaaggctgggctacatctcctcactagctgtatccccgatttccaatcctgggcttgattccaaaggatacaggagtcctg

SEQ ID NO: 320232 - DNA, 587 bp, Homo sapiens
ctaatttggtatatgactatatctgcatttattaattttttctaactgcagtatttccagaactttacatgcagtaacttggttcttaaaaaagccttgccagggttgggcgtggtggctcacacctgtaatcctagcactttgggaggccgaggcgggcggatcacgaggtcaggagattgagaccatcctggttaacatggtgaaaccccgtctctactaaaaatacaaaagttagccaggcgtggttgtgggcacctgtagtcccagctacttgggaggctgaggcaggagaatggcgagaaccccggaggcggagctggcagtgagccgagatcatgccacygcactccagcctgggtgacagagcgagactccatctcaaaaagaaagccttgccaggcagatattgtccccatttgacttataggattagtgaggctcagagtgttgagtaatttgcacaatgtcactcaactgcttgaatggtaggtgtgtctgttctcaaaggctgggctacatctcctcactagctgtatccccgatttccaatcctgggcttgattccaaaggatacaggagtcctg

SEQ ID NO: 320233 - DNA, 625 bp, Homo sapiens
caagcactctattccttcctaagacttgtttatccaggactcaactctccaggccttccagcctytgctcagtgctattgtcatcccctttcatctggattattgcagtagcctcatagctagcctttgatattttgactcctctaatgtccatggcagccaaagcagaaaatataaataatcctatcttgtccctacttaaaacacttcagtggttcttcatggaacttggattgaaacccaactctctaaattggcctaatgccctgagacgtcctcctcctccctacctgaaaatttaacagtgccttttcttcacgaagctccagctacactctcctctccattcccaactggctctttcccacctccaggcctctgtccttgctgttccctcttcctgaaatgctcttccatcacttactgagaggctgcctcccactgacctcttaggtcttagtttaaactgtcaccttctcagaggccttcccagacaactagtctctcttagggttcctattaccccctgcctcagcactctgccctttcccttattatacagcccatgcttcctaattctacgcttgtgtgagaattggtttaatatctgtatcccctgctcaaa

SEQ ID NO: 320234 - DNA, 625 bp, Homo sapiens
caagcactctattccttcctaagacttgtttatccaggactcaactctccaggccttccagcctttgctcagtgctattgtcatcccctttcatctggattattgcagtagcctcatagctagcctttgatattttgactcctctaatgtccatggcagccaaagcagaaaatataaayaatcctatcttgtccctacttaaaacacttcagtggttcttcatggaacttggattgaaacccaactctctaaattggcctaatgccctgagacgtcctcctcctccctacctgaaaatttaacagtgccttttcttcacgaagctccagctacactctcctctccattcccaactggctctttcccacctccaggcctctgtccttgctgttccctcttcctgaaatgctcttccatcacttactgagaggctgcctcccactgacctcttaggtcttagtttaaactgtcaccttctcagaggccttcccagacaactagtctctcttagggttcctattaccccctgcctcagcactctgccctttcccttattatacagcccatgcttcctaattctacgcttgtgtgagaattggtttaatatctgtatcccctgctcaaa

SEQ ID NO: 320235 - DNA, 625 bp, Homo sapiens
caagcactctattccttcctaagacttgtttatccaggactcaactctccaggccttccagcctttgctcagtgctattgtcatcccctttcatctggattattgcagtagcctcatagctagcctttgatattttgactcctctaatgtccatggcagccaaagcagaaaatataaataatcctatcttgtccctacttaaaacacttcagtggttcttcatggaacttggattgaaacccaactctctaaattggcctaatgccctgagacgtcctcctcctccctacctgaaaatttaacagtgccttttcttcacgaagctccagctacactctcctctccattcccaactggctctttcccacctccaggcctctgtccttgctgttccctcttcctgaaatgctcttccrtcacttactgagaggctgcctcccactgacctcttaggtcttagtttaaactgtcaccttctcagaggccttcccagacaactagtctctcttagggttcctattaccccctgcctcagcactctgccctttcccttattatacagcccatgcttcctaattctacgcttgtgtgagaattggtttaatatctgtatcccctgctcaaa

SEQ ID NO: 320236 - DNA, 582 bp, Homo sapiens
gtggctgtctctgagacaacttcattttcacaataattcttttcatgtggcagcagagatgytgctgcttactccaggtttccaagcactttggttataactatctgaaaagaagaaggtacttctttttcccagcatttacataaatctctccaaaaggacacactaataatattattcgggtcatgttttctatttcagatcaatttctgtgtctaggggctggccatgctgggtcatgcgcttactctattggctgggaaatcacaatcatgtgactggagggctggtggagggcctgttccccaaaggcaaagttaccaaagagacaaaaatgtaatggatatccactgaacacaaatcgctcggattacttgatgacgttgataatacaatttattaaagtaattctgtttttagtatcttgagtgttgtagagccaaatatatctgcactgaaactagattctttcttttgatagaatcccataattggataaaattttcccctttcatatgtttcaatctgtgattctccacttttactatgcatcatcatcacctgtagggagttaaaaagaac

SEQ ID NO: 320237 - DNA, 582 bp, Homo sapiens
gtggctgtctctgagacaacttcattttcacaataattcttttcatgtggcagcagagatgttgctgcttactccaggtttccaagcactttggttataactatctgaaaagaagaaggtacttctttttcccagcatttacataaatctctccaaaaggacacactaataatattattcgggtcatgttttctatttcagatcaatttctgtgtctaggggctggccatgctgggtcatgcgcttactctattggctgggaaatcacaatcatgtgactggagggctggtggagggcctgttccccaaaggcaaagttaccaaagagacaaaaatgtaatggatatccactgaacacaaatcgctcggattacttgatgacgttgataatacaatttattaaagtaattctgtttttagtatcttgagtgttgtagagccaaatatatctgcactgaaactagattctttcttttgatagaatcccataattggataaaattttcccctttcatatgtttcaatctgtgattctcyacttttactatgcatcatcatcacctgtagggagttaaaaagaac

SEQ ID NO: 320238 - DNA, 558 bp, Homo sapiens
gtgtattgtgtgtgtctgtaaatgtcagaaacttataagcaataaaagtgcaagccagaactggataccatgtttaaagaaagaaaatttaaaaaaactgaaaaaaaattcctcttttatcctaattataccttttccttcaggaagacattttcaagacaggtaaaagttagtgttccctgcccgctacatactcagttgaattatgtaatgtgttttctatttgtgggcattccrcatattagttgtctgggatctgggattggggattttctctctctctctctctctgtctttttaaattaaattaactattggctcatcaaggttgaatggcgaaaatttaagctagatgtatggttgaggtcattagcttatagatggtaactaaaggcttttttttttttttttttttttttttgagacagagtctcgctctgttgccaaggctggagtgcagtgacatgatcatagctcactgcagtgtcaacctcttgggtttagggaagctgctcagcttcccagagtagctgggactataggcatgtgctaccatgc

SEQ ID NO: 320239 - DNA, 558 bp, Homo sapiens
gtgtattgtgtgtgtctgtaaatgtcagaaacttataagcaataaaagtgcaagccagaactggataccatgtttaaagaaagaaaatttaaaaaaactgaaaaaaaattcctcttttatcctaattataccttttccttcaggaagacattttcaagacaggtaaaagttagtgttccctgcccgctacatactcagttgaattatgtaatgtgttttctatttgtgggcattccgcatattagttgtctgggatctgggattggggattttytctctctctctctctctgtctttttaaattaaattaactattggctcatcaaggttgaatggcgaaaatttaagctagatgtatggttgaggtcattagcttatagatggtaactaaaggcttttttttttttttttttttttttttgagacagagtctcgctctgttgccaaggctggagtgcagtgacatgatcatagctcactgcagtgtcaacctcttgggtttagggaagctgctcagcttcccagagtagctgggactataggcatgtgctaccatgc

SEQ ID NO: 320240 - DNA, 477 bp, Homo sapiens
aatatgtgtgaataggttgtttttgttcctctgagtggcgkttcagtgaaatcagagatggctctcacattagcaagctctcctttgatgtagcccatttctgtgggaaatccatttccaagaggagactctcctgtgctctgttgaaaatcagcctccaggaaacccatatgggaattctgaggagaaaagaaaaacttctagggagatgttttgaaatcctttgagctgcatataatcagtgcaaactttacatgtatattgactgtacattcggagcactttaagcagtaaagacctcaaaggctccagtccattatgagaacaaacagcaatttaaagcaatattttcccagagaaaagaaatcaggaggaacaaagatgctggggttggggcttttttccctgttcgtttgtgagaaaatgtgcttttgattgataatctaaagaagactgtgttcagcatagcatattttt

SEQ ID NO: 320241 - DNA, 477 bp, Homo sapiens
aatatgtgtgaataggttgtttttgttcctctgagtggcggttcagtgaaatcagagatggctctcacattagcaagctctcctttgatgtagcccatttctgtgggaaatccatttccaagaggagactctcctgtgctctgttgaaaatcagcctccaggaaacccatatgggaattctgaggagaaaagaaaarcttctagggagatgttttgaaatcctttgagctgcatataatcagtgcaaactttacatgtatattgactgtacattcggagcactttaagcagtaaagacctcaaaggctccagtccattatgagaacaaacagcaatttaaagcaatattttcccagagaaaagaaatcaggaggaacaaagatgctggggttggggcttttttccctgttcgtttgtgagaaaatgtgcttttgattgataatctaaagaagactgtgttcagcatagcatattttt

SEQ ID NO: 320242 - DNA, 287 bp, Homo sapiens
attgcccttgctctcctttgctctctttcctgtgagtctgactaccagcaagaccttctattctcatgaattcttcgctttcattttttaataacaaggctgcaacttttttgtcaaaggcaagagtatgctgtcctgtagaagacaggacccatgatgaatccaacatacttctttttgcmtctttttctttgaaattcaactagagcaatttgtttatagaaatactgaatggctttagagaaaatactcgatttctaattcagatcaatatactggaatgaaaa

SEQ ID NO: 320243 - DNA, 593 bp, Homo sapiens
gttaccctctttaagatgtcacaacagtatttcagatgctgtccaatttttcatggacatagttactaaacggcatgacatttcaaacatgttagaatcttcaaaaactgcatacccttctctttactctggtttctgtttcactatcaggaaacctgaagaacaatgagtattactaatgggttgacatttttggaggtatattgtgtgccagggagtgtgctggagatttttaatatattttctctaatccccacagtaatattcctattgtatggattagaaaactgaggctcagagaatttaagtaacttgcccaagagtatgtaactcctagtgatgaagaagagattcaaatgcaggtccatctgcctctaaatttaagaccctttccattggaacaactacatcagaatctctaggggtaggcctcaggtgttaatattctttagaagatagccttggagattttaacatagagctttgattggaaaagattgcatttgtaccttttgtctttcatgagcacaagtaaagaaatcrgctttgctaatgtggtttgtttatggggacaaagcgatatagactagcaa

SEQ ID NO: 320244 - DNA, 633 bp, Homo sapiens
ttctatttttagtttcctccaggaactaaagtaatacaggatatttttagtgttcagcatattagatactttacatcaacataaaaacaagagcacgacaacctattggccaagttgtaacatttctcccttgttagccggcagcaaaacaaagataatgtattaaccagcctsttgaatccattcattttctcaagatatgctggcttcttagcttggaaagatgcatgatcgtgagcatccatcttttaaatgtcattgaaacaaggctactacttcaaacacaaagttgtcttttttttttctctcactattgcccgtattaagtaaaactttccaaatggcatgccctcctgcaaactcaaatatagatagaacagacctactacaaaaatatgcatttctctacgtgcccagaatataaagagaatcaaataggccaaatggaaagcaaacagaaaagccaatgaaaagcagacacggggaccttaacggtactgcatggatcttgcttatttaagttgtttttgatcagctttcttggacttcatgcctgtgagagaactcaaaacattggaaggtgaaggtcaatagtctggaagcccaaaaagttgccttgggaaaaatcctact

SEQ ID NO: 320245 - DNA, 533 bp, Homo sapiens
gattttctcctgtattgtctcctattttatagttaattgtcaccacaaagctttccctaaggataccttagaaagaacagccctattctcctgctttctaataagatgcttccaattaactatgatccagaaaaatagattaaaaacttactagcattgaatgcagcataagagtaaatatgctctgaatgaagatctaggtaaagatcttgtatttagtgacataatttyatggcgtttattttagctgctcaggagactacttttgcttacatcttagttataggtatatcctatggctaaagggatgataatttctagaaaaaaataattttaatgatagtagtggtaataataattgtagtaataaccatcatatgataatatcagctcacatttactatttattaataccaagtgctttcataattgctttatacatatttaactcaatcttcacaatagcctataaaaaatactaatagtatcatgctcattatacagatgaggaaactgaggcacagcaattaaat

SEQ ID NO: 320246 - DNA, 558 bp, Homo sapiens
gtatttagtgacataatttcatggcgtttattttagctgctcaggagactacttttgcttacatcttagttataggtatatcctatggctaaagggatgataatttctagaaaaaaataattttaatgatagtagtggtaataataattgtagtaataaccatcatatgataatatcagctcacatttactatttattaatascaagtgctttcataattgctttatacatatttaactcaatcttcacaatagcctataaaaaatactaatagtatcatgctcattatacagatgaggaaactgaggcacagcaattaaatacagtaaattgccaaaataagacagttaatggcacagaatggatgtgagccccaaaaatcttattttaaaatgtgtgctcaagaccactgccccatactgcttcccaatgagccattggcgagtcataattctacaccaaaaacaaatggtcctgggcaaggtggctcacaccagtaatcccaatgagtctgaggcaggcagattgattgaggccaggagtttgaggttatatagt

SEQ ID NO: 320247 - DNA, 582 bp, Homo sapiens
tcattatcttattaacaagacataattaataattgttctctaatataacaatattcaatatctagtccatattcaaagtcccagctggcccataagactctatagctttcctttttctacagtgaacccaattgaggttcccacgtgacatttggctgttatagcgccaacaatctagaaatgctcttccatggtttcagtttttgatttgtctgtttcattttggtgtcatttaactgagtcctatattctcagtatttcctataaactagaaattaagtctaccttacacattttgacaagaatagttaatagataatggtttttcaaaactttgtgtattgttagaaggcacaccacatctgtctgtctcaattttactgataaagagcctgatcaaatggctaaggtagtgaccaccagatctctcycctacagaaggttttgtttttccttttacaattagtaagtaacctgtggcatcatgttttcaacacagtataagcatatttttccccaaacaacaccttatacaaaagttttaatattcgttgacaatccttggcttccatcagttatttc

SEQ ID NO: 320248 - DNA, 532 bp, Homo sapiens
tcaacctataaagaaggatgggcaagtattatgatcagcaatgaccaggtgagggaaatagggtactgagaggtttacttttctgttcaaagtaggtgatctggggttgattccacatctgttggtgcctaatctttggatatttccaacagccccaaaaaggaaagaaagcaacctcacttatgtaaggaaaatgaatctataattactattttttcycattgtttcaaaagtttacccccaaacacttcatattaatgaagttttactgctctccagaagatgttgactcatgctggattgaagagaatccagtaggcagtttgtggagtcactcagtacatacacatgactttttgtctcaatgttggagccgtaggagacaatgaatagttgctgtttaatcacctggtaaggactaagtagtaaccaagtgtaggcacctaaagtggatcttactttgcttattactgagaaacactcgtagtttcttcactgttacaggccgttaaagtggaatgggtttgttatt

SEQ ID NO: 320249 - DNA, 534 bp, Homo sapiens
tgtaaggaaaatgaatctataattactattttttcccattgtttcaaaagtttacccccaaacacttcatattaatgaagttttactgctctccagaagatgttgactcatgctggattgaagagaatccagtaggcagtttgtggagtcactcagtacatacacatgactttttgtctcawtgttggagccgtaggagacaatgaatagttgctgtttaatcacctggtaaggactaagtagtaaccaagtgtaggcacctaaagtggatcttactttgcttattactgagaaacactcgtagtttcttcactgttacaggccgttaaagtggaatgggtttgttattgatggtctatgtagcaattccagtgtgatagataccagcaaacacacagggagtgaactgtcttgccctagtctacaaatagagatcaatgactattttatttgctcaaccctgcctccagtccatggctgtggcctccatcatgaagtagctggaatgattaatgatctattggaggtattaat

SEQ ID NO: 320250 - DNA, 693 bp, Homo sapiens
actcgtagtttcttcactgttacaggccgttaaagtggaatgggtttgttattgatggtctatgtagcaattccagtgtgatagataccagcaaacacacagggagtgaactgtcttgccctagtctacaaatagagatcaatgactattttatttgctcaaccctgcctccagtccatggctgtggcctccatcatgaagtagctggaatgattaatgatctattggaggtattaatgcctcttgtttyggtactctaattatagaagcagattggagccaagcttttagagtgggtttgagattgaaaaatatttgaaagcaggtgattggtccaacacctccacttctttcaatttaaccataaatcagttgtgagtgattttttcactgtaatttttcataggttttgaacttgggtaatgagcatccctgtcccatagtgaaactgtgattttcctagatcttgttggaaagaagatgaagatttatgaagggggatagaaggaaatatattgcatttctttttatcctctgcttggtatttttctcttcctctcctgtacttcaacccctataagtctcaactttcatgcatgccacacatggcatatagtatttggaaatgggaaagctgcagtgtgtcttgacctactttccagtgactgtacaattacaaataagaagttgatg

SEQ ID NO: 320251 - DNA, 484 bp, Homo sapiens
cctcattggaagtaaccaattttaaatgtcccaactttgacacattgacaccagaactttccaagggcactagcaactgttaagcagcaattcatggcttggattgagggctggaacccctcactttggcacttcccacatcttaccccaccattgcagaaatctgcccatggatattaagtactttctatgtacaaggcactatatagaagataatggaaagaatcaagggcacagccctctgctttcaaaaaatagcaccactaagatttgtgtcaatgactcttaaacattagcatcaccagaattacctggaaggcttgttaaagtcagtttgctgggggctgaggcaggggaatcgcttgaacccaggaggtggacatcgcwgtgagctgagattgtgccaccgcactccaacctggcaacacagcgagactccatctcaagaaaaaaaaaaaaaaaaaaaaaaaggtcgggttgctga

SEQ ID NO: 320252 - DNA, 562 bp, Homo sapiens
gccactgtacttgttatcactcatggcaatcaatgccatctctggagatctcatccttatagtcaggtgaaaatctatgtcttgatgagtttatccatggatggtatttctaacttaggaaattcgaatgtctacaaaggcttggcagataatttacatgagctaggcaagccaggtattaaaatttaaaagttcaagtattataaaaaatggcataaggcatgtgaccagagcatggtgaagacaatagttgtgtggtagggactgtggtcaaaactgaaaagcatgccatctttcactgtcatttattgtttttttgaagaaatgtgggccagatattataatttttttcaagaaaaccggaatttggcagctttatttggcgtctcctgatttttaaattggcaactgattcaaaacttttaagacattctgggggacaacattttgagagacaagcacatatctacagctagatttggcctgtaggctattaatttttaaaacttttctaaaygctacaggtataagaaataaacctatattctccttcacttgaaag

SEQ ID NO: 320253 - DNA, 582 bp, Homo sapiens
  misc_feature (1)...(582): n = A,T,C or G
aagtttgttattacccccccttctgaagcctacttctgtcaattcagccatctcagcctcagcccagttctgtgctcttgctggagaggtgttgcggtcatttggaggagaacaggcactctggctttttgagttttcagcatttttgcattgattctttctcatctttgtgggcttatctaccttcaatatttgaggttgctaacctttgaatggggtttttgtagggtcttttttgttgacattattgtttctgtttgtttgtttttcttttaacagtcaggccactcttccatagggctgctgcagtttgctgggggtctgcytcagaccctagttgcctccatttttccatgccggagggttcnccagtgagccctgcaaaacagcaaagatggcaacctgctccttttctggaatctccgtcccaggtgggtactgacctgttgccggcctgagtatacctgtaggaggtggctggagacctatgttgggaggtctcatcccatcaagaggaatgggatcagggacctgcctaaagaagcagtctggctgctttttgttagagcaagtgtgctgtgt

SEQ ID NO: 320254 - DNA, 567 bp, Homo sapiens
agtccaagctcttaaccacttaatcatcttacttttcttgaagcctttgatatggggagaactgcttaaatcaaacacaaaacccaagaaccacaaaaaaaagataaacactttttttgctgaaaatgtttggcaaaagatatcaagacaaagtctaaagatcaaaaatagagtagggaaaatacttgtaacaaatgacagaacaaaagttcatataatatataactcatctgatcagactaagtgataaaaagtaaatgactaaagttgaaaaataagcaaagtacatgaacaggcagttcacagaagagaaatgcaaattgctggtacctktatgggaaaaaaaaagatcccctatctcatttgtaatctgggtatcacaaattaaaacaataatggacacaattttttatctgtttcattggttaaaataaaaagcaggtagaacattcatcatatgactggtgaggactcagtttaaatatatatatatatatatatacacacacacacacacacacacacacatacacattcatatgcttataatcatagtataaattttta

SEQ ID NO: 320255 - DNA, 600 bp, Homo sapiens
tttcctgctctgacagcaaaattgagtggtagttgtgacaggcactgtgtggcccacaaagtctaaagtatttactgcctggccctttacggaaacaattttcaaatcgctgatctagagagtcaccaaatacctgttttgatttgagaaaatgtaggaatactgccttaaagggatatgaggtggcctttaaaaaaaatctttgtgctctgtactagacctagaaaatctccaaggacagcctaacccagctttcagctgctgaaagaggtgtaacatttatcttttcactcttgaagtgctacctacggggccaccgctggcagaggtcattaggcaaatgcaggctcatctctccgtgatactacatgtgaggcatttgcacaaatgtagattgtagtaaggcctgaatgtaatgtatatacttcagtcacttttatgaaattgttcagtcatctggacgtttctcactgtgtttaccaggaaatgtgaaatagagaattgagcaattttcycatcaatttgatcaatgtagaacagcaacctggatgccttcagtcttttttttaaatgcctttttttctctcaattgctacaatt

SEQ ID NO: 320256 - DNA, 631 bp, Homo sapiens
gagagtacctactcatataatcactgtgatgattatgagccagtgcttgtaatgttttgcctaattcccagtctatagtaagtgctcaataactgttaacttgctattgcaagtattattgtcattttaatgacttcagggtagaaagtagaaaatgttctttctactatgcatgtcttgaagtccagggataatgtctgtgggacaataatctgtaccatggcaatcagggaatgactrttccatttgccacccagtccaaaatgaaatatcttagctcttgtctttgctgcacattttcatcaccctgaaatcccaggtgtggtggtagagaataccagggttttctcaaaagtgctttccactaaagtgacagatccagtttgattcggtttttgatggtctgaattattcttcttagttaatgagctcttcttgtcagtatttagagggatactcacctccctttggatgacatgagcttgatgatgcaaataagtggaaaaggtggtgtctcatacagttatgtgtacagtatatcattttctgcaaacaggatagtgtcatcgctgtgaaggaggtaaaacatctgccctatttttcagaaggaggaattaaggaattgaggtat

SEQ ID NO: 320257 - DNA, 631 bp, Homo sapiens
gagagtacctactcatataatcactgtgatgattatgagccagtgcttgtaatgttttgcctaattcccagtctatagtaagtgctcaataactgttaacttgctattgcaagtattattgtcattttaatgacttcagggtagaaagtagaaaatgttctttctactatgcatgtcttgaagtccagggataatgtctgtgggacaataatctgtaccatggcaatcagggaatgactattccatttgccacccagtccaaaatgaaatatcttagctcttgtctttgctgcacattttcatcaccctgaaatcccaggtgtggtggtagagaataccagggttttctcaaaagtgctttccactaaagtgacagatccagtttgattcggtttttgatggtctgaattattcttcttagttaatgagctcttcttgtcagtatttagagggatactcacctccctttggatgacatgagcttgatgatgcaaataagtggaaaaggtggtgtctcatacagttatgtgtacagtatatcattttctgcaaacaggrtagtgtcatcgctgtgaaggaggtaaaacatctgccctatttttcagaaggaggaattaaggaattgaggtat

SEQ ID NO: 320258 - DNA, 529 bp, Homo sapiens
catccacttactgttgactagcttatattcagggtatttgaagtcacttttgatatttgcaatttctttagcattctagctgcaggatcaaacaggaattacatttcaacatacaaggtttgtgtttctttgtagagtaacatatatatatcaaatagtgtgcaagagccccaggtataaygtatgtttgattatgtttcaactctaagcgataacatattgagatcgcttcagtagctaagcaaatgtgactcaggccattacctggatccagacttttaaaaaaagaatgaaacaaaagaaaggaaacgtattttaacctacagatcagtactatacaaatcaaacaacacagccccatttacaaggtaatctgggattgcaattcaggaaatccctagggataaaacttgttcataaacaaggctaattttagcacagaacaatactttttaaagcaatttctcgtttataattcccagggtcaaggaaagaaaaagaaaaggcaggaaaaaaaaaaaagaaatcc

SEQ ID NO: 320259 - DNA, 483 bp, Homo sapiens
tgtgtctttgcatgtgaaatgggtctcttgaagacagcatactgatggatcttggttctttatttaaattgccattttgtgtcttttaattggagcatttagcccatttacatttaaggttagtggtattgttatatgtggacttgatcctgtcatcatgacgctagccggttattttgtagacttgtttatgtgttgggaatgaggtttttgagttacgctttgctcattcactatagttctattgcagagcttcatgccatgatggaaatgttctgtgctgtctaatatagaagtcactagccactggtagctttgagttcctgaaatgaagctaccatgattaagaaactaaattttaaattatacttaatcttaattaatttgagcttaaatagcaaygtgtgcaggtacagtaaacttgtactagcatactggatagtgaaagtttactatattttagagatcgtttcatgtaagctc

SEQ ID NO: 320260 - DNA, 642 bp, Homo sapiens
tgtgttgggccacactcaaagtcgtcctggactgcatgtggctggcgggttggacaagcttgccctagggcctccagaaaagaatgcagccttgctagcaccttgactatagctcagatgagacctgtgtcagatgtataacctacaacacagtgagataataaatttgtgttattttaagctactaaatttgtggtaatttgtttcagtagcaacagaaaatgatacacttgggyagttttaaaagtatattaatgctgggtccccctcatagagattcagattcagttaatctgaggtgttaccaaggcatcaggatttttttaaatgctgcaggtgagtccactgtgaagcaaagcttaagaatcattcaattatttaactatatttggacatttaatatcactcaaacacagacatacaaatctgccgagaaaaaaaaaaatcaaccaagtaccatgctcaggtttagagaaaaagcgggtgaagcaaacttaatattttctttttaaataggaatgtgtgatgatgtgtgtgcttgagcaatatttcactcagccattataacaacgcttaaagtcagtagggaagatatcaccatccgcttaatccaggaaagaaaaatgtggttaggtgcagaga

SEQ ID NO: 320261 - DNA, 526 bp, Homo sapiens
  misc_feature (1)...(526): n = A,T,C or G
atttacatattgtctacaggtgcttccatgctacaacagtagagttgagtagttgtgacatagaccttatggcccacagagttgaaaatattcatattgtgtagccctttacagaaaatttgaccacccttgagccacatcaagtatggatcctctaccttcccaatgccaccattgctattcttcaggcttttaagctcatgaggacaatttaaagagcctggtanaagcatccaacaataacagcttgtggatatagacagaaacacctaagactgatcttttaataataattttaatttaaccagaactttagttcagaaaacctcaatatactttgaacattatcttgtttctttctgacagcttttattagaaaaaaaaatgggggataaccaatgcattaaacacatcatttaaatcatttaagatattatcagctcctttgtgcctttttccactgtcagtattttgagaattaatcgttcatttrtgcacagcactgtacaatacaattttaaaagac

SEQ ID NO: 320262 - DNA, 553 bp, Homo sapiens
atggcagagaaagaatgttccttaggggatacactaaacaaatccataaaacaaacatgcattaatgtaatatattcacaaaaggtgagtcccgatttaacaggaaggcaaataaaaaagcatttgtgttgatctagcaggttgctacaacaaaaaagttaaaattaatttttttaaaaaaaggcatttgtgaaagtagcccagttttcttaatgaactcttaattatttaaggaaagttttccaggagatgaagctgtagaagtgattamggtgacctgagaaacaattgtaggcatatggcttaattatttttaaaggggcaaataagctgtgaacattggtatagaaatttaccccagaagaccagaaaaagccaaagcatttttatatttaacattgaaagggaagacaaagctctatatttaaaatgacaaaaatggagcatgagtacccccagtctcttaacccactcccatagcagacatcatgtgacattgtgatgtataatgggatttttatatatttggtcttcaccctgtttcttacataca

SEQ ID NO: 320263 - DNA, 553 bp, Homo sapiens
atggcagagaaagaatgttccttaggggatacactaaacaaatccataaaacaaacatgcattaatgtaatatattcacaaaaggtgagtcccgatttaacaggaaggcaaataaaaaagcatttgtgttgatctagcaggttgctacaacaaaaaagttaaaattaatttttttaaaaaaaggcatttgtgaaagtagcccagttttcttaatgaactcttaattatttaaggaaagttttccaggagatgaagctgtagaagtgattacggtgacctgagaaacaattgtaggcatatggcttaattatttttaaaggggcaaataagctgtgaacattggtatagaaatttaccccagaagaccagaaaaagccaaagcatttttatatttaacattgaaagggaagacaaarctctatatttaaaatgacaaaaatggagcatgagtacccccagtctcttaacccactcccatagcagacatcatgtgacattgtgatgtataatgggatttttatatatttggtcttcaccctgtttcttacataca

SEQ ID NO: 320264 - DNA, 467 bp, Homo sapiens
aattttttaattctttttttttttttttgagacggagtcttgctctgttgcccaggctggagtacagtagtgtgatcttggctcactgcaaccaccgcctcctgggttcaagcaattctcctgcctcagcctcccgaggagctgggactacaggcacccgccgctatgcctggctaattttttttttgtattttttagtagagacagggtttcgccctgttgcccaggctggttttgaactcctgagctcaggcagtccgcccacctcggcctcccagagtrctaggattacaggcgtgagccaccgcgctggccaacaaaatattttaattatttgttttctttcacttacctaacttacctaactgaagactttcttggcctagatgtgtgcaagttttaatgtactcaagaatcacttgagggttgttcaaattgcagattctgattcagaaggtttagcagag

SEQ ID NO: 320265 - DNA, 587 bp, Homo sapiens
tgcctgtttcagttagcactgagctaagtattttctatgtctcatttacaaccaccctgcaacacagacattatctcaattatacatgtggagaaactgaggcctagaaaggtaaaataacttgccagaatgacactgccaataagactcaaawccaggatgcactcaaaagcccacacacttttcaatccttgttgtctcctatttgtatttaatccccacattgaggtagaaatcaaatccattttataagcaagaaaactgaacttagaaaaagacatacttgtaagtagtggagacagtataaaagcccagacgcactgtctctctccatctaaaagatatacaaggacgcagacactaaaagcagaagattaaccatttattttacacaaaaaagaaaaatggaggcagccttgtttgggagtatacaaacagtaaaagaagaagaatgggtaggattcagaaagtacagaccaagcaacctgcaataggcctatcaccccaatcttccccggaaacaattcccagagaaacatcactatatagtttccccgagaaacatcagtctatagtttccccaaagt

SEQ ID NO: 320266 - DNA, 528 bp, Homo sapiens
ccagcaaaataaatcagtgtgcagttctacaaaggtggttatgggagaaggaaggcagaatttgcttgttaagaagctaacatcatataaagtttaaattaaaaaaataaaaaagacaaaaccyctttttaagatcaaagatttcacagattgagagagggctctgaagcagttttgctaatgaacgtagctgagaagggccctgctgcttttctatgaagggagatgcatctctaccctccccactccaacatggaactcagtctccctggccaggggccaaatgaccttggcattccaacgtttacccaccttggtaagtgtacataataaaactcagagctttgccatcccttaaatgtttcagtcattctgagtcctttttaagagtggctgttttaactaaaggaggccctgagacccagaattctaaaacaaacaaacaaaattaacatctagtgtatcttcagagatcatcgagttcatttacctctgttcttcagaaaggaaacccaggaggcacaaatg

SEQ ID NO: 320267 - DNA, 239 bp, Homo sapiens
taaacagaaccaatgggagatgtatgtagagagagggaaggagaaggagagttattataaggtattagctcacaccattygtggaagctaagtcccatgatcttccttctgcgtgatggaggcccaagaaagtccatggtataatttgaagacctagagagcctgacagtcaaaggtacagatttcagtctaagtctgaaaacctgagaacactcgggcaaaaggagggtgaatccacc

SEQ ID NO: 320268 - DNA, 503 bp, Homo sapiens
gtgagcctatgtgcacatatgtgtatgggcgggtatgcctgtatatgtatgtgtatctaggcatttatctttctaatttggatagcagaattataatcatctttccaatatttgattaataatttcacataattcacagtgtttcttttaccaaatgtcrttttacctttccagtaatagtttcaatttgtagttggagaagaggcataaagaagtagataaagattatcaggtaaagttgtggcagaggatgctaatagatgaaaaaaaaaaaaaagaggatcagaggtttaaaaaaagtgagcaaagaaccagttcaattactgagacttctatgaaatcccatgcaaggctgcttcaattccgttgccagactttttttctgacttcttgtcgtacaaaccatgtgttggtctcctaggcaatgcatcactgttctgagatgctttgctcatacatgttcaggcttccctccatgccctcatgttttctgcctctgcact

SEQ ID NO: 320269 - DNA, 623 bp, Homo sapiens
cctaggcaatgcatcactgttctgagatgctttgctcatacatgttcaggcttccctccatgccctcatgttttctgcctctgcacttatatttatcccttgcctgaaataacatgcttttcccttctgagccctatgtgtcttcatttcaccccagacagactcactcacccagcctctgggtctaaattgccccctaatttacaaaaccacgtgacccttccaggtagatgccgtgtcttgctttctttttgacccaaagcaagcaaaaatgttgagtgatgcttctcactttcaacacacacacacacctcaagttaattctgagatcaattttttgagactggtccctgggacatgtcaccagtgagatgaagatgtatgagagtgcaaagaagttggagttctttttcttttcttaagaggaattttcacttgcgagcaaaattttaattggatgtctaaacttccagataagcttttgttcaacatttgtcatgaatttataggggaagtaaaaaatcaatattctgcagtasttctttcatcccaaggaggttgaaagactttagctgcaaagtgaggagatcagaagagaaacagatttattaaagaaaaaaaca

SEQ ID NO: 320270 - DNA, 620 bp, Homo sapiens
aattgttaaagttctctgcatttcacttataatcggtatccttatccataaggtagacatagaaattacataggatagcatccttagggtgcttgctacattaaccaacactcctcagctgcttgataaatagtagtgtttattgtggtcattttattgtctttgtagttatgatctcatcttatcacctgctgaaatacacatataattccatccttgttccttttcaacattaaataaaacttttaactttaaaaacgtgtttagtaacctgtattgttttgagcactgacacaatgtaaagaggtccccaggtwaagagaatgactttctcagaacttagtccagcactgttgtttgagaaaaatgagtatgtgtgtgttgattttctaaataatgtcgggctttggattaaaatgcagtgcttaccgtgttttgttcacatagtagttttataaatgctggcttactcatttatgaactagtttgatatttaaatatgcattagatctatatccataagaagcctatgaggtaggcactgtacttaatagaaaaatatagtacagtagagatatagtcattgccttcatggcatttacagtccagaaggaaaacat

SEQ ID NO: 320271 - DNA, 590 bp, Homo sapiens
  misc_feature (1)...(590): n = A,T,C or G
gtatttagtagctagtggtgtgaaaggaaantattgtgaaccaagttcgagaatggtcagacacaagggaggccaggcggcagccatctggtatatatcaagttccagcagccaggcccatgaggacagagctgccctgctaagctggcgctattttagttgctgctgcagcacaattgatgcttctactgctgagcctggaacgtggatgctacactaccacttcaccatcaacacagagatgttttctctactgtcccttctcttttgaaatgaactgattcaaagttcagaagtaggatgggtggaatctgcccagtaaatctaggtcatgtartagtaccctttctctaaggaaggctacagaaatctatatgtgtatctttgacgtctaccatggtagatgggctgtgcctcctttcaagactcataggatgaaaattttcacagtaatagatactacatcctctatgatgcgtgcattcctcaaagaaaacaatggcttgcttatctaaatgctcactagaactagaaataccatttgacccagccatcccattactgggtatatacccaatggattataaatc

SEQ ID NO: 320272 - DNA, 590 bp, Homo sapiens
  misc_feature (1)...(590): n = A,T,C or G
gtatttagtagctagtggtgtgaaaggaaantattgtgaaccaagttcgagaatggtcagacacaagggaggccaggcggcagccatctggtatatatcaagttccagcagccaggcccatgaggacagagctgccctgctaagctggcgctattttagttgctgctgcagcacaattgatgcttctactgctgagcctggaacgtggatgctacactaccacttcaccatcaacacagagatgttttctctactgtcccttctcttttgaaatgaactgattcaaagttcagaagtaggatgggtggaatctgcccagtaaatctaggtcatgtagtagtaccctttctctaaggaaggctacagaaatctatatgtgtatctttgacgtctaccatggtagatgggctgtgcctcctttcaagactcataggatgaaaattttcacagtaatagatactacatcctctatgatgcgtgcattcytcaaagaaaacaatggcttgcttatctaaatgctcactagaactagaaataccatttgacccagccatcccattactgggtatatacccaatggattataaatc

SEQ ID NO: 320273 - DNA, 550 bp, Homo sapiens
tgaccttgttgaataatgtggctcttttgttctccactgcaccatgcccagttccctgggcattttaatcccttctgccatgaccacctaccacagtaattcaaatattttaacatcactcaactgcgctttcattttttcaagtttatagaaatcatcaaaacagatagtcagcaccttttcctgggtttcttacaaagatattatagtattatataatgtttatcaataatatctccaaatcaattaactctactttacagtcttgtatagtcttgtatgtcaggcatcttgatcaagcattytcataacccagtcatactgaaagtttcatatttcttgataaaatatgctgactaacttttgcagccccttttgagcattgacagtttcctgcatatgcctggatagattaagctaaaattagcatcaaccaagaagttggaaaaactcttcagggggcagatcatattatgttgtgggagagaggcctcttcattgcctttttactcaagaatagttataattcttgttagggaatggtggatca

SEQ ID NO: 320274 - DNA, 550 bp, Homo sapiens
tgaccttgttgaataatgtggctcttttgttctccactgcaccatgcccagttccctgggcattttaatcccttctgccatgaccacctaccacagtaattcaaatattttaacatcactcaactgcgctttcattttttcaagtttatagaaatcatcaaaacagatagtcagcaccttttcctgggtttcttacaaagatattatagtattatataatgtttatcaataatatctccaaatcaattaactctactttacagtcttgtatagtcttgtatgtcaggcatcttgatcaagcattttcataacccagtcatactgaaastttcatatttcttgataaaatatgctgactaacttttgcagccccttttgagcattgacagtttcctgcatatgcctggatagattaagctaaaattagcatcaaccaagaagttggaaaaactcttcagggggcagatcatattatgttgtgggagagaggcctcttcattgcctttttactcaagaatagttataattcttgttagggaatggtggatca

SEQ ID NO: 320275 - DNA, 615 bp, Homo sapiens
ctgaaaggctgtaagaatctctgtgttcaggagttgggacagaagccccagtggcataggttcacgagtgagatcttctggtccatgagttgcacagttccatggaaaaagcacagtttccctggctgggtagtgctctcactcactgcctcccttggcccagggagggagtttcccttccctgcatggctctcrggtggaccactgcaccacactgctgttccttctctccatgggtcaagccagccttctagtaaattttgatgagagaacctggataccttggctgctggtgaagaattcacactcttattatgtattttttcgatgagagcctttgaacaccaaggcttctagtcaggcatcttgccctgcccccaccccgattttttcaaatgtgaattgagttatcagcttgctgtttagaagaggtggtgggatttgctcatgagaggggaaccttgttgcctcactgtgaaacaatatctgtattattttccacagagaagggtactagcttttatggggtggagtgaaagttcatgaaaccaaaatctttgggttcattcagaaagtaattcctattcaaggagctcaggttttccaagttagaga

SEQ ID NO: 320276 - DNA, 620 bp, Homo sapiens
ttgctctgcttgatattggtttagctatgtttatgaacacatcagccttccacttagttcactggaagttttctctctattccagtggcacaatctccaaagttatcagaaacctgcattcaagaatccttttcatgaaatcctccaaagaagcaagccctggaccatagctgattacaagtcactttttgagaaggatcaaagcaaaacaaggattgtagatgacaaaaggcttaagtcagccatagataaagacacagttgaccaggacggttggttatttctatggcatacaawaatttaacataataatcgtaattatgacagacaacatatattaagacatatcagaattttaggcatctcatataatactggaatgcatattaacaacacgtctatataaataagccgaaaggaagctaaataccacctcagatttcacaatgctttctgcataattctaacataacaaaagcctagtaagcctaatatgtctttcttggacttgagggaacctaatatccaaagagttagtttgaggtcaaaaagcctgaatttagactctgaaattttgctgttggaaagtctgtcaactatcaaatgtttaagacatttga

SEQ ID NO: 320277 - DNA, 620 bp, Homo sapiens
ttgctctgcttgatattggtttagctatgtttatgaacacatcagccttccacttagttcactggaagttttctctctattccagtggcacaatctccaaagttatcagaaacctgcattcaagaatccttttcatgaaatcctccaaagaagcaagccctggaccatagctgattacaagtcactttttgagaaggatcaaagcaaaacaaggattgtagatgacaaaaggcttaagtcagccatagataaagacacagttgaccaggacggttggttatttctatggcatacaaaaatttaacataataatcgtaattatgacagacaacatatattaagacatatcagaattttaggcatctcatataatactggaatgcatattaacaacacrtctatataaataagccgaaaggaagctaaataccacctcagatttcacaatgctttctgcataattctaacataacaaaagcctagtaagcctaatatgtctttcttggacttgagggaacctaatatccaaagagttagtttgaggtcaaaaagcctgaatttagactctgaaattttgctgttggaaagtctgtcaactatcaaatgtttaagacatttga

SEQ ID NO: 320278 - DNA, 583 bp, Homo sapiens
aactggctcaattttctctcctttaaggagactttctggaatacagatgagaaattttgtgcatgcaagcatagttgtgtttatayatatgtgtatgcattttgtttcctcttatagacattatttaagtgctagcttattggcacttgacactcatgctctaaatatgttactgtaaatgagaggtgaatggttttaatggtccagtaaatctcataggtcctgatatagcaaagaaaactttgcagttaaagcaaatacttctgactgaaatggcagatagaagctttctaccatcattcctcatagaagcactgactttagcaactttccatgtacaagaacacctttgtgtgagtcttggagtccagcagggacgttctagcatgcgctattggaagagtattagggtgttaattggtaacataaaacacatgaaagtataaaattccctggcaaatggatacttagtatacatttcagaataatactgtaatggcggcatgtaaatcacatataactagcatgaaggttaaaaactaaaagtattaaaaataactataactacaataattggttaacg

SEQ ID NO: 320279 - DNA, 565 bp, Homo sapiens
tttttgattctcaccctcttctgaccttcaaccctcaagtaggctccagagtctcttgcttttttctttgtgtctatgtgtactcaatatttcactcccacttataaatgagaatatgcagtgtttggctgtgtgttcctgtgttagttctcttaggataatggcttccagctttatctgtgttgctacaaagcacatgatcttgttctttttgtggctgaatagtattccatgctacatacatataccacaattttttttatmcagtccaatgttcatgcacattgaggttgattccatgtttgtgttactgtaaatagtgctacaatacacatacgcatgcatgtgtctttatggtagcacaatttatattcctttgggtatatacccaacaatgagattggtgggtcaaatggtagttctttgagaaatgtcaaactgctttccacagtggctgaaataattaagttcataaggtagggtataagcattatctttgctccatagccttgccagcatctgttgtttttttgacttctaaattatacccattctgactggtgta

SEQ ID NO: 320280 - DNA, 565 bp, Homo sapiens
tttttgattctcaccctcttctgaccttcaaccctcaagtaggctccagagtctcttgcttttttctttgtgtctatgtgtactcaatatttcactcccacttataaatgagaatatgcagtgtttggctgtgtgttcctgtgttagttctcttaggataatggcttccagctttatctgtgttgctacaaagcacatgatcttgttctttttgtggctgaatagtattccatgctacatacatataccacaattttttttatccagtccaatgttcatgmacattgaggttgattccatgtttgtgttactgtaaatagtgctacaatacacatacgcatgcatgtgtctttatggtagcacaatttatattcctttgggtatatacccaacaatgagattggtgggtcaaatggtagttctttgagaaatgtcaaactgctttccacagtggctgaaataattaagttcataaggtagggtataagcattatctttgctccatagccttgccagcatctgttgtttttttgacttctaaattatacccattctgactggtgta

SEQ ID NO: 320281 - DNA, 565 bp, Homo sapiens
tttttgattctcaccctcttctgaccttcaaccctcaagtaggctccagagtctcttgcttttttctttgtgtctatgtgtactcaatatttcactcccacttataaatgagaatatgcagtgtttggctgtgtgttcctgtgttagttctcttaggataatggcttccagctttatctgtgttgctacaaagcacatgatcttgttctttttgtggctgaatagtattccatgctacatacatataccacaattttttttatccagtccaatgttcatgcacattgaggttgattccatgtttktgttactgtaaatagtgctacaatacacatacgcatgcatgtgtctttatggtagcacaatttatattcctttgggtatatacccaacaatgagattggtgggtcaaatggtagttctttgagaaatgtcaaactgctttccacagtggctgaaataattaagttcataaggtagggtataagcattatctttgctccatagccttgccagcatctgttgtttttttgacttctaaattatacccattctgactggtgta

SEQ ID NO: 320282 - DNA, 565 bp, Homo sapiens
tttttgattctcaccctcttctgaccttcaaccctcaagtaggctccagagtctcttgcttttttctttgtgtctatgtgtactcaatatttcactcccacttataaatgagaatatgcagtgtttggctgtgtgttcctgtgttagttctcttaggataatggcttccagctttatctgtgttgctacaaagcacatgatcttgttctttttgtggctgaatagtattccatgctacatacatataccacaattttttttatccagtccaatgttcatgcacattgaggttgattccatgtttgtgttactgtaaatagtgctacaatamacatacgcatgcatgtgtctttatggtagcacaatttatattcctttgggtatatacccaacaatgagattggtgggtcaaatggtagttctttgagaaatgtcaaactgctttccacagtggctgaaataattaagttcataaggtagggtataagcattatctttgctccatagccttgccagcatctgttgtttttttgacttctaaattatacccattctgactggtgta

SEQ ID NO: 320283 - DNA, 540 bp, Homo sapiens
tagtaccatttattgaataggaagtcctttccacactgcttgtatctgtcaacttttttgaaaatcagtcagttgtcagtgtgtagctttatttctgggctctctgttctgttccagtggtctatgtgtctgttttcataccagcacaatgctgtttttgctactataaccttayagtatagtctgaagctgggtagtgtgatgctggtggctttgttcattttgcttaggattgccttggctatttgagatcttttatgttccagatttatttatttatttatttatttatttattttgagatgaagtctttctctgttgcccaggctggagtgcagtagtgcgatctcggttaactgcaacctcctcctcatggattcaagtgattcttctgcctcagcttcctgagtagctgggactaaggcatgcgccaccacacccggctaatttttgtatttttagtagagacagagtttcaccgtgttaggcaggctggtctcaaactcccgacctcgtgctctgcccacctcagtgctggga

SEQ ID NO: 320284 - DNA, 617 bp, Homo sapiens
cctttgctttttacctgaaccagtttttacagcaatgttgattctccatgtccagaactccttctgtaaattggccttcacaaatctactgtaagcaagagttctcccttctcctcattttttgtttgtttaatatccaatatggactcatgggtttctagtttttcattggtctgtgctctcttaatgtctttcattattttggtattcaaatcgtcttatttttggctatttagagctccttcaggctacatcccatgcactgcgacagtctccatcagcctttagagtacttcctcactttctgctatracaagatatcccaggatgatcttttgtctattctgtcccagcctataatcagccatttcaagaaatagctctggttctttttaggggaaagtgacaaattctattatgagaaactaagattggagttccagttatgcccattggtactggattgtctttcttcctaagttcactttgtggacagaaatagaaagtttgtttgtttatacatatgcatatatatgcgcaaaaatacatatacatagtatcaaactgatattaaactcaattccaacacgtcttctcagagacttattcttatgtgt

SEQ ID NO: 320285 - DNA, 617 bp, Homo sapiens
cctttgctttttacctgaaccagtttttacagcaatgttgattctccatgtccagaactccttctgtaaattggccttcacaaatctactgtaagcaagagttctcccttctcctcattttttgtttgtttaatatccaatatggactcatgggtttctagtttttcattggtctgtgctctcttaatgtctttcattattttggtattcaaatcgtcttatttttggctatttagagctccttcaggctacatcccatgcactgcgacagtctccatcagcctttagagtacttcctcactttctgctataacaagatrtcccaggatgatcttttgtctattctgtcccagcctataatcagccatttcaagaaatagctctggttctttttaggggaaagtgacaaattctattatgagaaactaagattggagttccagttatgcccattggtactggattgtctttcttcctaagttcactttgtggacagaaatagaaagtttgtttgtttatacatatgcatatatatgcgcaaaaatacatatacatagtatcaaactgatattaaactcaattccaacacgtcttctcagagacttattcttatgtgt

SEQ ID NO: 320286 - DNA, 573 bp, Homo sapiens
ctggcagtataagccaaagaagacaacatataaaactataacaaaaacaatccagaacattaattactattttaaaaatatttagttaactattactgcaacaccaaaactactaatataaygaattaaaattacaatttataattactccaaattctgttgtttagatgggtggttcttctgctggttgcacctgggcttactcatgtgattaccactagctagtgggtcagctgccctaggagaccaatgatggcctcactcattctggaagcttctggctggttgtcaactgaggcaccttggctcgcctccacagtctctattttctagatagctagaccagatttttttataagatggcagaagtgtttcaagagggtgaatgtagaatagttgcaaaacctcgtgtggcttgggctccagaactcacacaaggtcacttccactatcatttattggtcaaagcaggtcatgagggctgctgagatgtaagggtttgggggatcggctccacttttaacaagaggagtagaccagaatctatgatcatatttaatttaccacaatccc

SEQ ID NO: 320287 - DNA, 528 bp, Homo sapiens
aaatataatttattgtgcctctcattttattctggtcctatgcagtatggcttaactgaaaagttatttaatacctctaacaattctatgagataaacaatattattattatcatttggatttacccactattattaccaaggcgaaaaggaggccaggagttattataacttgctatgtgtgaaaagcactaagtggtagagcaagwaatgaacctgtctctggcaaataggtcaaaataaaaacaaaaacatcctctattctaaagaaggagcaatgaaataggaacataaattaaaaatatcaggaccaatttggctttacattgatttgtaaaaaataacctagacaattaaaaaaatacatattcttccattatttgtatgtgatttttatcagaagcctgagatgaaagagcaactttcttgtttcttcagataaaatgtatcatctataatctcttccaaagattgtctacaaaaatattggtgcagtagttatagctgatttaacatatttacttctact

SEQ ID NO: 320288 - DNA, 585 bp, Homo sapiens
atgtaattgcttaatcagatctcagaggaccattgagacctccaatgagatagaaattaactgtattttatgtcttaatatacaacggtttctccttattgtaaacatttcaggcagatgtgatttgtgaccattaattagataattgaatataaattagccccttttctcccaagggaaatgcttaattttcagatattcaatagctgttggccatttgttgcattcctggtttgaactgaacttcccactacttagctgtgttatcctctgctgaaacaacttttacacaggataaaaaaaatcaaccaatcacagtcccacacaaaattgcaaaacctcaaaggctggtgataaargaaataaaatctccaaagtagttaagatttataatataaattgtcactttctaaagaagctccacagatactgtattaagtttgtgtaaattggctgtggtaacaaatggaccccagaattttagtgacataacataatagaacatttctgaaagtgtgcacgtcactgggggctgttttacaaaatcttgctggcatagagtttggcagaccttttgccatcttt

SEQ ID NO: 320289 - DNA, 588 bp, Homo sapiens
ctggcaaatgagttaaattcaccctggactttggattcaccacagattactccaaattctgttgtttccaaatcacttcgggaataagacctgaggaactacagagactggaaagtccctattagtgaataaattttctttttttttttattcctttgcttaaatcttagttcaaagttcagaaatggtacatatttcctgtctgtttgaagtttaaaagacttttaaaaataatcttggccgggtgcggtggctcacgcctgtaatcccagcactttgggaggccgaggcgggcggatcaagaggtcaagagatggagaccatcctggctaacacggtgaaactccgtctctactaaaaatagaaaaaaaattagctgggcgcggcggcgggcgccggtggtttcagctactcgggaggckgaggcaggagaatggcgagaacccgggaggcagagcttgcagtgagccgagattgcaccactgcactccagcctcggcgacagagcgagactccatctgaaataaataaataaataaataatttaaaaaaaaaaaattttatgcaatcaggaacacattctcaatc

SEQ ID NO: 320290 - DNA, 588 bp, Homo sapiens
ctggcaaatgagttaaattcaccctggactttggattcaccacagattactccaaattctgttgtttccaaatcacttcgggaataagacctgaggaactacagagactggaaagtccctattagtgaataaattttctttttttttttattcctttgcttaaatcttagttcaaagttcagaaatggtacatatttcctgtctgtttgaagtttaaaagacttttaaaaataatcttggccgggtgcggtggctcacgcctgtaatcccagcactttgggaggccgaggcgggcggatcaagaggtcaagagatggagaccatcctggctaacacggtgaaactccgtctctactaaaaatagaaaaaaaattagctgggcgcggcggcgggcgccggtggtttcagctactcgggaggctgaggcaggagaatggcgagaacccgggaggcagagcttgcagtgagccgagattgcaccactgcactccagcctcggcgacagagcgagactccatctgaaataaataaataaataaataatttaaaaaaaaaaawttttatgcaatcaggaacacattctcaatc

SEQ ID NO: 320291 - DNA, 591 bp, Homo sapiens
cattgcatgtgtttcatgtctttttttaacatcactgagggactaccttcttgagaaaactaaatacaaatctggtgttactctcctgctggaggcacaaactatttctttatcctataaaaggtacctgttcccctgaaaattaatatgattagcctgaagacatattgaaaaatgacaaccactttattaggttactaagatcatcttttcctgtctattcagaaaaacaaaggtttcaataattcagaattataatccactagtgataaaaacaaattaatcactattatcattaaatatacaatattagggcccactgagagccatcccagtaacccgaccaccgctggtcttcactggacaccatgaaccacactgtccaaccttctctcctatcaacagcggccagccccccaactatgagatgctcaaggaggagcaygaggtggctgtgctgggggtggcctacaaccctgctcccccgacgtccaccgtgatccacatccgcaacgagacctccgtgcccgaccatgttgtctggtccctgttcaacactctcttcatgaacccctgctgcctgggcttcat

SEQ ID NO: 320292 - DNA, 558 bp, Homo sapiens
  misc_feature (1)...(558): n = A,T,C or G
nnnnnnnacaaattttatttagctagccaacacaagcaatccagtggaaactaagaaagcaagatcactgtcttcaattagtttatagtgtaataggaaacacagcacaaaaagaattgttgaataggtggtaacacatatgacaggtaaatccagagtactgtaggagaaaatgagagtagacttccaaagtttaggacaggagtcaatgacaatctacatgtcaaaatataattcttatagataagaaataggaggcatagaagaaaaaggtgraacagaagcactaccttaagaaagtagaatacgtatgcagagattcaaagataataaaaatcttaagttcaggtttctaaatagttcattaaaagtgaataatatatagaagagaattgtggtttgtcttagtctgttttgtattgcatgaaagaatacctgaaactggataacttattaagaaaagatgtctaaatttggcccatcgttctccaggctctgcaagaagcatggccccagcatctgcttctggtgaggcctcaggaagcattcagttgtgga

SEQ ID NO: 320293 - DNA, 558 bp, Homo sapiens
  misc_feature (1)...(558): n = A,T,C or G
nnnnnnnacaaattttatttagctagccaacacaagcaatccagtggaaactaagaaagcaagatcactgtcttcaattagtttatagtgtaataggaaacacagcacaaaaagaattgttgaataggtggtaacacatatgacaggtaaatccagagtactgtaggagaaaatgagagtagacttccaaagtttaggacaggagtcaatgacaatctacatgtcaaaatataattcttatagataagaaataggaggcatagaagaaaaaggtgaaacagaagcactaccttaagaaagtagaataygtatgcagagattcaaagataataaaaatcttaagttcaggtttctaaatagttcattaaaagtgaataatatatagaagagaattgtggtttgtcttagtctgttttgtattgcatgaaagaatacctgaaactggataacttattaagaaaagatgtctaaatttggcccatcgttctccaggctctgcaagaagcatggccccagcatctgcttctggtgaggcctcaggaagcattcagttgtgga

SEQ ID NO: 320294 - DNA, 555 bp, Homo sapiens
cttcactgctgaattctaccaaacatttaaaaaactgataccaatttctcaaaaatgacttcaaagaattgaaggggtgggaacagtcaaacccgtttcactaggctagcattaacctgataccaaagccagacaaggacatcactakaaaagaaaactacaagccaatatttttgggaaacagagatacaaaaatcatgaacaaaacacaggcaaactaaatgcaataacaaaagaatcatttattatgatgaagtgagatttatctctgggattcaaggatggttcgacatttgcgaatcaataaatgtgattcacagcataaacaaaatgaaggacaaaaattatatgaccatctcataagatgcttataaaacatttgacaaagttcaatatcctttcttataaaaactctctcaacaaattagatatacaagaaatgtacatcaacacaataaaaaaatgtattacaaacacacagataacacacaaaggagaaaagttgaaagcttttcttctaagatcaggaacaggacaaggatgcccactctcaac

SEQ ID NO: 320295 - DNA, 598 bp, Homo sapiens
tatatgtatatgagtacatcatgttttataacttgaaaatatctgcaacattttacaaatatttgcaattttttgtcaattgtatctcgatagaaaaagctgagaaaaatgtagatactcccctggcttaaacaagtacagcaaatatttgccttattgcacatggagtattggtacatggaatattaaatcttttagaaaaatttttaagaaaaatgtattaagtgggtaattaagcatcattgcatgtacaagaaatataataaatcttattcaagatatatagatttaaacattaagtgtttaaaaaaaactttgtaggtcttctataattcttattatccacatgacacaacactattaaactaaaagagaaacamtatactcaattttatgagcctcactataggaataaatagtatagtaaattttcagagagattatcttagattgctaatggtgtcattaatttatcatcaaacattgcctagttgctcccaacttaagaagattgtaatagtagatatgagatgagagcagaagaatagctcacggaaaatgaagagctaagtacatgtgatttttttgttttgtttat

SEQ ID NO: 320296 - DNA, 598 bp, Homo sapiens
tatatgtatatgagtacatcatgttttataacttgaaaatatctgcaacattttacaaatatttgcaattttttgtcaattgtatctcgatagaaaaagctgagaaaaatgtagatactcccctggcttaaacaagtacagcaaatatttgccttattgcacatggagtattggtacatggaatattaaatcttttagaaaaatttttaagaaaaatgtattaagtgggtaattaagcatcattgcatgtacaagaaatataataaatcttattcaagatatatagatttaaacattaagtgtttaaaaaaaactttgtaggtcttctataattcttattatccacatgacacaacactattaaactaaaagagaaacactatactcaattttatgagcctcactawaggaataaatagtatagtaaattttcagagagattatcttagattgctaatggtgtcattaatttatcatcaaacattgcctagttgctcccaacttaagaagattgtaatagtagatatgagatgagagcagaagaatagctcacggaaaatgaagagctaagtacatgtgatttttttgttttgtttat

SEQ ID NO: 320297 - DNA, 620 bp, Homo sapiens
tattaatatagctttacagtcttacagtttatggtatggtctttgcagtaattaaatcattagaatttttatttcttagcttagccaggtttttgttgtcatattcttataaatgtccaaactcatgtctctgaagttctcattcattattcttagcactctaccagaactaccaacttcctgatgaagatatttacagcatactaaatgttgactctgagatgcaatggcttttcaaggtaaaataaaaataactatgagaaagtataaatttcattgaactttttataagaaacattttcttctggtgaaagatcaacattctcagcaagtaatataatattcaaaattttaagtaataaatgtggaaagcaatgtataatatgttatttttcttaaattatcctaaaaatgaccagagtgtttgctcttcttaggtgaactaggaaattggttgttctttgtattgtttgaatttattaaagcatgtatatataaatatggtatatatrtacatatggtatatcatatatatgcggtagtatacatggtttaatacattcaaatataaattcaaatatatatctatataaattgtttatatatatttgattactaaa

SEQ ID NO: 320298 - DNA, 559 bp, Homo sapiens
gttgcctgttcactctgatgatagtctcttttgctgtgcagaagctctttagtttaattagatcccatttgtctattttggcttttgctgccattgtttttagtgttttagtcatgaagtctttgcccatgcctatgtccttaatggtattgcctacattttcttctagggtttttattgttttaggtcttacatttaagtgtttaatccatcttgagttaatttttgtacaaagtgcaaggaaggggtccagtttctgatttctgcatatggccagagaatggctattattaaacagtcagaaaacaacagatattggcaaggttacagagaagaaggaatactttatatgctgctggtaggaatgtaaattagtttagctgctgtgaaaaggagtttgaagatttctcaaagaacttaaaacagaactacaattcaacscagcaatcccaatattgtgtatatacccaaaggaaaataaattgttctaccaaacagacacatgtaatcatatcttcatcacagcactaatcaaaataccaaagggatatcaacgaat

SEQ ID NO: 320299 - DNA, 584 bp, Homo sapiens
aggcatccctgaactatttttacaaaaataacttattttgagaaggtgttgctttgatgttgaaagaataagagcataaattttttaaactatatgtagaaaatattctgcatttgaaaaakaaatagaacgaaaacatatttctacagaaattcttggaacttttctacttttgtgtaaagatcaattatgacagactaatatgaaatttgacctttatttggaagaaatctgtcacaggttgtcattgattacatgaaaaattataaacgttctgtactaaacaggaacactatcagcatttacagtgactgcacatctgcctagtgagattccagtcatacttaatatcaccctgatgcctgatttggaaacaaacttacactttctctaaaagcaagaacaaagaatttggactataaaaacaggttcctggaatcttaccatatttgtatttttttcaccggtaattttacttcaaacataatcttgttcattagcatgcatatttcttatgtacatattttttcatatattaatttttgaatggatattgactaattattagaaggcgggtgttgtga

SEQ ID NO: 320300 - DNA, 545 bp, Homo sapiens
caacagcaagccaatgggatgtggtactctacctttcacctgtgatgggatcctcatttcctgcttgcctgtaggtgatttagctgtaaggtatcattttagggtctgctttctagaaaccagactgctaccaacttccaaaaatcacacatggtatatttaggaatgctctcaagaacagtaccagtaagacattaggatagaagactgacaaaagggagaagttgaactgtgatgtagttcgagacttcaggtagtcccatgaggggtccatcagagatgcttctaatttagaaattaacccggctgggcttggtggctcacgcctgtaatcccagcgctttggraggccggggcaggcagatcacctgaagtcaggagtttgagaccagcctgaccaacatggagaaacctcatctctactaaaaatacaaaaaattagctgggcgtggtcatgcatgtctgtaaccccagctactcgggaggctgcagcaggagaatcacttgaacctgggaggcaggggttgtggtgagccaagatcaca

SEQ ID NO: 320301 - DNA, 484 bp, Homo sapiens
gcaaacattaccatatgtattagctacctaaggatgccataacaaattgccacagacttcacagcttaaaacaacagaaacatattctcttagaatctgtttcatcattttatccaagcttctgagggctcctggcaattcttgacattccttggcttacacacttgataacttcaatctctgcctctatcttcatatgtctttcttctctctgtgtctgtcttttccttttctgtcacttataaaaacaccgaccatgggattccaggcacatyctaactcaggatatctcatctcaagaccctaaccttaatgacatctgtaaagactcttcttacttcaaataatgtcatttgtcaaggttctgcctgaacacacattttgaatccagccactatttaatctgctacactctagaagagtggttctctgatttcagagtgcatgagaatcccctggtgtgttcactaaaaatgtaaaattc

SEQ ID NO: 320302 - DNA, 546 bp, Homo sapiens
tctgtattagtttattctcatgctgctgataaagacatacctgagaatgggtcatttataaagaaaaagaggtttaatggactcacagttccacgtggctgggaaggcctcacaatcatggcggaaggtgaaacacacatcttacatggcagcagacaagagagaatgagaggccaagcaaaaggggtttccccttataaaaccatcagctctcttaccacgagagctgtgggagagaaaccacctccataattcaattatcttccactggttctctcccacaacacaargggattatgggagctataattcaagatgagatttgggtggggacacagccaaaccataccattttgccccagcctctcctgaatctcatgccctcttatttcaaaaccaatcatgccttcccaaccgtccaccaaagttttaactcatttcagcattaactcaacagtccacaacccaaagactcatttgagacaagcgaagtcctttctgccgatgagcctgtaaaatcaaaagtaagttagttacttcctagat

SEQ ID NO: 320303 - DNA, 580 bp, Homo sapiens
aaataacatgtagaacccaaaccaagcttatgtaagaaattagggactcatacaggaaccactgacatgcaaaatgagatttcaactgatttatgcctatgcctatgagaggtagaacttgtaggcaraacttgagctagttatctgctaggttgatatgtacattcaatatcaccatggggtaccagtaaccaatttttaataaaacaaaaacaaaaaaccaaatgaaaatttattctgcatgactacaaagaggtaatacatagaagtgagtaaaaacagaaagtttaaaaatatagtaactgagtttcaaactaaaattctaaagcatataggaaaaataaaataataagcattcatagtgacaaaatataatggaacaatctgaaaatgattaaataacaagaatcaatatacaattaatttctagttacataacttttattattcctatatacattaatcacacttctttgaactagtcaaattttgaaatattgaaaaggttgttgtatgctcctttggagacattgtttttgcttgtcacatttagtattcacttcattatactgcttaatat

SEQ ID NO: 320304 - DNA, 575 bp, Homo sapiens
atttcattgcatttggatggtcccaggctgtgagttatctcacctgccactttcccctcatctagtcctgcatggcatcttatttatcaggcttctgtactcttttattatcctgaattttctaaatccctacatagaatttagggtattcataatttttgtttgtattcagttggctaatactttcctggtttcaggttaaatgttagctcatgattgagaccttctctgaattttacttcaaattctttttattctcttttatgaatatatatttttattacttcataaaagctaacacatttttaaattaagagwgtgtgtgtgtgtgtgtgtgtgtgtgtgtgtgtgtgcatgtgtgcgtgtgtgtgtgtgtattttgtttttggcctcattaactaggttttcacttccaggatcatttcagttttgatacacgacacagatcccagtgttagcaaatactaagttctcagtaagtgtaggattatttaagttgttgaactgattattacagagatatggtggcaaaaatcaattagtcactcatttatataaccaacacgttatttatt

SEQ ID NO: 320305 - DNA, 575 bp, Homo sapiens
atttcattgcatttggatggtcccaggctgtgagttatctcacctgccactttcccctcatctagtcctgcatggcatcttatttatcaggcttctgtactcttttattatcctgaattttctaaatccctacatagaatttagggtattcataatttttgtttgtattcagttggctaatactttcctggtttcaggttaaatgttagctcatgattgagaccttctctgaattttacttcaaattctttttattctcttttatgaatatatatttttattacttcataaaagctaacacatttttaaattaagagtgtgtgtgtgtgtgtgtgtgtgtgtgtgtgtgtgtgcatgtgtgcgtgtgtgtgtgtgtattttgtttttggcctcattaactaggttttcasttccaggatcatttcagttttgatacacgacacagatcccagtgttagcaaatactaagttctcagtaagtgtaggattatttaagttgttgaactgattattacagagatatggtggcaaaaatcaattagtcactcatttatataaccaacacgttatttatt

SEQ ID NO: 320306 - DNA, 575 bp, Homo sapiens
atttcattgcatttggatggtcccaggctgtgagttatctcacctgccactttcccctcatctagtcctgcatggcatcttatttatcaggcttctgtactcttttattatcctgaattttctaaatccctacatagaatttagggtattcataatttttgtttgtattcagttggctaatactttcctggtttcaggttaaatgttagctcatgattgagaccttctctgaattttacttcaaattctttttattctcttttatgaatatatatttttattacttcataaaagctaacacatttttaaattaagagtgtgtgtgtgtgtgtgtgtgtgtgtgtgtgtgtgtgcatgtgtgcgtgtgtgtgtgtgtattttgtttttggcctcattaactaggttttcacttccaggatcatttcagttttgatacacgacacagatcccagtgttagcaaatrctaagttctcagtaagtgtaggattatttaagttgttgaactgattattacagagatatggtggcaaaaatcaattagtcactcatttatataaccaacacgttatttatt

SEQ ID NO: 320307 - DNA, 578 bp, Homo sapiens
aacgtaaaaaaataaataaataaataccaacactcctatggaaacaacccccttttaattatccccaggaccatgttgcattataatttacattctggccagctgaggttcaaattaaakagctccatgggtgacaggaaccctgaggcccatgaggatcctgaggacacaggtgactgtgtcaatgatttaacagggatggcttatccagccttggtgtcagcatggggcaaagtattgggagtctgatgcatgtagccatgtaattacgcatttaagtatattttcctaattaatttaaatatgcttgaaaagctcacaaggcttgaacctgaaaattcctggggtttagtcattggaaggaatcaatgctccctgaagtgagagagcttgtcgcatcattcatgagcttttgaaagatgcctttgatagagaaaatcatattactgaaatttcaaaatttggagaatatgctttacctcttttataatattaattttagttaaaaaatgaggctgaaaatgttttcagcaactgatagtctggttgctatttaaagcaggacaaaagaatgtgca

SEQ ID NO: 320308 - DNA, 494 bp, Homo sapiens
actagggttctcaaacttccctaggggaagaatgaggccaaatattgaaatattatctttattgaagaaatagcttataacttgtaattatttttctctgtcttgtttggatcttttgtagcaaagtgccttgtagagagtccccacattgacataggttgccccaaaactgagtggaaatrtggttgtcatatttagacagagatatgcaatgatactgcactagacgaccccccaccctggtcttgaaaatgaagtgatagtgaagaaatgcagttcatgtgtgctcccaagatgacagaaattagttataatgagagtcagtagactctgattagacttctgaagtcctgcaggagataactctattgcagagcttacagagtggacatctttaaccaggagatggatagtgaatactgctgggtattcagaagagctgttagagtcatgatggggctgtgtcagcagcaggaacaattgcattgcctggc

SEQ ID NO: 320309 - DNA, 577 bp, Homo sapiens
atacttttcatatgtatatgctaaacaaaatgcagaatttctaggcattttgagacttagtgtttattttgaatgtgtttaatatgagtgtatttccccagttttgttcattttaaacttgtatctgccaaagctctcatttaccacctaagcttattgattaatcattttattaacttatattttgaaactatgtaagatcatcaataatttgtaaaatagtatagagttcccatgtaccctcacacagattccctgaatgttaatattttacatgccgtcatggtttttaatattacttcatgaatttttctctaacttggataattaaaatacagttatctcttgctttgtttccctacaaccctaatccattctccaaaatggttccagaaacatctttagaaattttagygtcactcctcttaataaaattgtgtgaaatcttggaatgatagaataagatgatatttataaatgaaagcaaaaattaagtgacttatgtaaatctaataaattttatttcccttttcataaaagttatgaaggcttaacactgcaaaagaagtttaatgat

SEQ ID NO: 320310 - DNA, 666 bp, Homo sapiens
cacacagattccctgaatgttaatattttacatgccgtcatggtttttaatattacttcatgaatttttctctaacttggataattaaaatacagttatctcttgctttgtttccctacaaccctaatccattctccaaaatggttccagaaacatctttagaaattttagtgtcactcctcttaataaaattgtgtgaaatcttggaatgatagaataagatgatatttataaatgaaagcaaaaattaagtgacttatgtaaatctaataaattttatttcccttttcataaaagttatgaaggcttaacactgcaaaagaagtttaatgataataggatttgtttcctacayatttaagttgtattttggggtagatgaaataattttaattacagcttgtgtggggcaaataggaggaaataataaagattgtcattgctaatcgagtgaaatccatggtgtgaccttttaccagatgtaaccttttttcttattatggcccattgcatttactttactaatgttattcttagatgcatttttagtcacatagagtttttaggagaaagcaagcagacttttttttttcctgttcatggaaatatattaaactttcttttagcccacatagatgtcttacaattaaaaataagaaaacagtg

SEQ ID NO: 320311 - DNA, 666 bp, Homo sapiens
cacacagattccctgaatgttaatattttacatgccgtcatggtttttaatattacttcatgaatttttctctaacttggataattaaaatacagttatctcttgctttgtttccctacaaccctaatccattctccaaaatggttccagaaacatctttagaaattttagtgtcactcctcttaataaaattgtgtgaaatcttggaatgatagaataagatgatatttataaatgaaagcaaaaattaagtgacttatgtaaatctaataaattttatttcccttttcataaaagttatgaaggcttaacactgcaaaagaagtttaatgataataggatttgtttcctacacatttaagttgtattttggggtagatgaaataattttaattacagcttgtgtggggcaaataggaggaaataataaagattgtcattgctaatcgagtgaaatccatggtgtgaccttttaccagatgtaaycttttttcttattatggcccattgcatttactttactaatgttattcttagatgcatttttagtcacatagagtttttaggagaaagcaagcagacttttttttttcctgttcatggaaatatattaaactttcttttagcccacatagatgtcttacaattaaaaataagaaaacagtg

SEQ ID NO: 320312 - DNA, 519 bp, Homo sapiens
taaaagttgtactttctttcaatgagtttatacttggtttgaaggtgacagaattggatattgttaccttgtaccctttccctcccattaaggcagatggccagttttgattaaggttcctcctccctcctgtgcrgtaattagctatttgctcaacggtctcctgtcccagatcatgagcacctcaaaaacaagactgtttcttatttggttaatttcccatgcctgtaaaatgctcctcatatattagatgatcaacaaatatttacttactgattggataaaggaaagagtgaaggttaataatgcaagatgacaatgctagaaactaaatatacagttctacttagaaactttccagtaagaagaaatagtcactaatttcctctcatgtattaaaagtttcagagagtttagacagaaagagctctagaaaacagcttatctccccaccattttcactgaacaccaatgagcccttcttctgtttctgcacctgcttccctcttctctgtgcca

SEQ ID NO: 320313 - DNA, 491 bp, Homo sapiens
ctttcaaattttgcacttagatcttcaaaagtatgtcatcatgagtttctttgaaacaaaaaccacatttagaatatatctaaatgttctatttgctatcataggataatgtaaatctagtaatgtttttcttccacattcctcattagcatagaatgtttttaaaaatctcaatcaataatgaatataattcaataaactmttcaaaaattaaaataaaagatttccactgagcctttaaatattttaatttgataagaaaaggtccaatttttttagtgttgctaatacaaaaatgtaaaaaattcttaaattttacaaaggtacattggatgtacacaaataccattttggaaagaaagtaatgcaattttgttctcactcataggtgggaattgaacaatgagaacacttggatacagggtggggaagacaacacaccggggcctgttgtggggtggggggagtggggaaggatagcattaggagat

SEQ ID NO: 320314 - DNA, 491 bp, Homo sapiens
ctttcaaattttgcacttagatcttcaaaagtatgtcatcatgagtttctttgaaacaaaaaccacatttagaatatatctaaatgttctatttgctatcataggataatgtaaatctagtaatgtttttcttccacattcctcattagcatagaatgtttttaaaaatctcaatcaataatgaatataattcaataaactcttcaaaaattaaaataaaagatttccactgagcctttaaatattttaattwgataagaaaaggtccaatttttttagtgttgctaatacaaaaatgtaaaaaattcttaaattttacaaaggtacattggatgtacacaaataccattttggaaagaaagtaatgcaattttgttctcactcataggtgggaattgaacaatgagaacacttggatacagggtggggaagacaacacaccggggcctgttgtggggtggggggagtggggaaggatagcattaggagat

SEQ ID NO: 320315 - DNA, 491 bp, Homo sapiens
ctttcaaattttgcacttagatcttcaaaagtatgtcatcatgagtttctttgaaacaaaaaccacatttagaatatatctaaatgttctatttgctatcataggataatgtaaatctagtaatgtttttcttccacattcctcattagcatagaatgtttttaaaaatctcaatcaataatgaatataattcaataaactcttcaaaaattaaaataaaagatttccactgagcctttaaatattttaatttgataagaaaaggtccaatttttttagtgttgctaatacaaaaatgtaaaaaattcttaaattttacaaagrtacattggatgtacacaaataccattttggaaagaaagtaatgcaattttgttctcactcataggtgggaattgaacaatgagaacacttggatacagggtggggaagacaacacaccggggcctgttgtggggtggggggagtggggaaggatagcattaggagat

SEQ ID NO: 320316 - DNA, 491 bp, Homo sapiens
ctttcaaattttgcacttagatcttcaaaagtatgtcatcatgagtttctttgaaacaaaaaccacatttagaatatatctaaatgttctatttgctatcataggataatgtaaatctagtaatgtttttcttccacattcctcattagcatagaatgtttttaaaaatctcaatcaataatgaatataattcaataaactcttcaaaaattaaaataaaagatttccactgagcctttaaatattttaatttgataagaaaaggtccaatttttttagtgttgctaatacaaaaatgtaaaaaattcttaaattttacaaaggtacattggatgtacacaaataccattttggaaagaaagtaatgcaattttgttctcactcataggtgggaattgaacaatragaacacttggatacagggtggggaagacaacacaccggggcctgttgtggggtggggggagtggggaaggatagcattaggagat

SEQ ID NO: 320317 - DNA, 562 bp, Homo sapiens
tgctgcttattcgcttattcttcttctgaaacaccagttttaaaattccaagtcatttcagtgtctgtctctttcatttatcaaatctatgtagtaatcattgaggacacagggaggaattctgttattggtggctccaaagaccattatccactttctacctgctaaagaccactagttagctttaccaagactccattcagctttactggaaggtttactctaaccagcttctgctgctgaaaagtaaatatattcttgcaattgaaatttttttttcagattctggggctcaaattaatttcttctctatcatctggatacatctgtgatttttagtgccttactttgatcacacaagcatacctcaatctctaggtcttcataaaatgcyattctggtatttccacagtattttcaatagttctttaactaaaacaactacatggaaagatttaaaatgtactgattgctaaagaaaaatgattttctattttgaaaccattaaatcaactacttttacatttgtttgacaaaattagctgttttaatttatgtttta

SEQ ID NO: 320318 - DNA, 496 bp, Homo sapiens
gagcaacaggaagaatgctctcagcaccgagaggggacccgaaagtggattgccagttaagaggctgaatctggggtttttatgggcttagaatggggaaacgtatgctgatwggtttatgaataggcttggaaaaagcaacatttagaaagaggtatgatagtgtaaagaaccaatgcagggctgaagtgaagatcccggtactaatcaggggctgagtataccaaacaagaatggaagttctcagtctggtccatggactccatctggagctcgtagtttggtgttcagacttcacactgtccttgacttgaaggtcaagtttcaccaggaacccctccctgtccacctgggaacttgtctgcctcctatcgctatcatttgtgtacctgtagtagagcctcacttacctattatgatcaagcaatggatttttccatataagtgaattgtcctgataatttatcactacaagaactattaaaaatcattcttt

SEQ ID NO: 320319 - DNA, 496 bp, Homo sapiens
gagcaacaggaagaatgctctcagcaccgagaggggacccgaaagtggattgccagttaagaggctgaatctggggtttttatgggcttagaatggggaaacgtatgctgataggtttatgaataggcttggaaaaagcaacatttagaaagaggtatgatagtgtaaagaaccaatgcagggctgaagtgaagatcccggtactaatcaggggctgagtataccaaacaagaatggaagttctcagtctggtccatggactcyatctggagctcgtagtttggtgttcagacttcacactgtccttgacttgaaggtcaagtttcaccaggaacccctccctgtccacctgggaacttgtctgcctcctatcgctatcatttgtgtacctgtagtagagcctcacttacctattatgatcaagcaatggatttttccatataagtgaattgtcctgataatttatcactacaagaactattaaaaatcattcttt

SEQ ID NO: 320320 - DNA, 496 bp, Homo sapiens
gagcaacaggaagaatgctctcagcaccgagaggggacccgaaagtggattgccagttaagaggctgaatctggggtttttatgggcttagaatggggaaacgtatgctgataggtttatgaataggcttggaaaaagcaacatttagaaagaggtatgatagtgtaaagaaccaatgcagggctgaagtgaagatcccggtactaatcaggggctgagtataccaaacaagaatggaagttctcagtctggtccatggactccatctggagctcgtagtttggtgttcagacttcacactgtccttgacttgaaggtcaagtttcaccaggaacccctccctgtccacctgggaacttgtctgcctcctatcgctatcatttgtgtacctgtagtagagcctcwcttacctattatgatcaagcaatggatttttccatataagtgaattgtcctgataatttatcactacaagaactattaaaaatcattcttt

SEQ ID NO: 320321 - DNA, 612 bp, Homo sapiens
tctttttgtaatatgggtacattaacataaaacctctccattgcatacccaaatgctttcctatgtaggtgtgatcatggaaagtacaatcctagatgagggctaatgtatcttactggagttcactaccaagctgattgaagttgacagccctgtgcttkttgcaaagaaagcttcatggggagttaggaacagatgctaaacaatgtggcacatttgctttcatgctgatcacgcatgccagcccctggcagtctttatgaggtcagaggattggtaaaattgtagtcagcaggaatacagggcatataagtagaaggagtcaagcaggtgtgctggaatgagttaggtatgggctttccccaggtgtgtcttacttgcccttcagcatatggctgtaggatcataaggggaaaaaactaaagctcaaataattcaatccaaatcatgcaagtacttatgactttatatgtgttgaatatgaagtggacatacatgctgaactacacatgtgctggacttaatatttctttataaaaataatgattggtcataaaagtggttgatgagcgatgtagatcagtatgaaggagagaaatatgttgatgagaa

SEQ ID NO: 320322 - DNA, 621 bp, Homo sapiens
ctagatgagggctaatgtatcttactggagttcactaccaagctgattgaagttgacagccctgtgcttgttgcaaagaaagcttcatggggagttaggaacagatgctaaacaatgtggcacatttgctttcatgctgatcacgcatgccagcccctggcagtctttatgaggtcagaggattggtaaaattgtagtcagcaggaatacagggcatataagtagaaggagtcaagcaggtgtgctggaatgakttaggtatgggctttccccaggtgtgtcttacttgcccttcagcatatggctgtaggatcataaggggaaaaaactaaagctcaaataattcaatccaaatcatgcaagtacttatgactttatatgtgttgaatatgaagtggacatacatgctgaactacacatgtgctggacttaatatttctttataaaaataatgattggtcataaaagtggttgatgagcgatgtagatcagtatgaaggagagaaatatgttgatgagaaagaattgaataggatcataagccatttttggtttagttggttgtcattttctaggtctcagctgattcatctgtaaaattaggatattgcagtggatgat

SEQ ID NO: 320323 - DNA, 386 bp, Homo sapiens
ttgtttttgttttgttttttttttggctggtccgtgatgttgtgttattacctaagacagtagtgcaaggaattaagtggttattaactgggaggaaggaggcagcccagaaatagaaattgggccagggcagagagggaggacaacctcagcttcttcccrctgcaagtatcagttttctcatataagtgattaatggaagttgattctgtagtttggttatgttggaacaggggatttggaggatcaaactgacaaccacagagaaagtctattttaaataaaagaaaactaaggcccagaatggccaacgagacttactcaatgtcacaaagctaggtgtaacaaagttggactttttatggcatttatttggtacatataac

SEQ ID NO: 320324 - DNA, 616 bp, Homo sapiens
taaagaaactcaacaatgatcacctcagcaatatgagagcctaagaattgttatggacatgggttactcaataggactggctgagatgaagaaatatactctaatctggggctgttagacgcagtggtaattaacacatgtgcttattgagtacttacatgttactagcatgatggaggaactgaattttttggtttaatttcattttaattaaaatttaagcttaaatagtcatgtgtaccttgtggctaccactgccagcagcataatgacaatgacatcatggcgtggcatttttaagggctattgatgtttttttwaaaaaaggtgaatattttaaatgcttactcaccctgggcaaaatagtgagaacttgtcactacaaaaaatagtttaaaaattaacaagggtgtggtggcaacatctgtagtcccagctacttatgaggctgaggcggaaggactgcttgagcccaggagtttgaggttgcagtgagccataatcgcgccactgcgctctagcctggatgacagaacaagaccccacctatcaaacaaacaaacaaactgaaaaacaaaatgctcccaacaggaattacacagcatggaaaatacat

SEQ ID NO: 320325 - DNA, 616 bp, Homo sapiens
taaagaaactcaacaatgatcacctcagcaatatgagagcctaagaattgttatggacatgggttactcaataggactggctgagatgaagaaatatactctaatctggggctgttagacgcagtggtaattaacacatgtgcttattgagtacttacatgttactagcatgatggaggaactgaattttttggtttaatttcattttaattaaaatttaagcttaaatagtcatgtgtaccttgtggctaccactgccagcagcataatgacaatgacatcatggcgtggcatttttaagggctattgatgtttttttaaaaaaaggtgaatattttaaatgcttactcaccctgggcaaaatagtgagaacttgtcactacaaaaaatagtttaaaaattarcaagggtgtggtggcaacatctgtagtcccagctacttatgaggctgaggcggaaggactgcttgagcccaggagtttgaggttgcagtgagccataatcgcgccactgcgctctagcctggatgacagaacaagaccccacctatcaaacaaacaaacaaactgaaaaacaaaatgctcccaacaggaattacacagcatggaaaatacat

SEQ ID NO: 320326 - DNA, 621 bp, Homo sapiens
agcctggatgacagaacaagaccccacctatcaaacaaacaaacaaactgaaaaacaaaatgctcccaacaggaattacacagcatggaaaatacatacctcatcatatctactgataatttcatatttactgaagcttgtttcatattaaacatattaatactytcttttctagtctgatttgcatagtgtgtgaaaagaagagctggtaaccttggaagagtatgccacgaattttcttaacttcatgtcacatgtgaaattcatacacatgctagtgagggctgggatctttttatattaagaaggcattgacgagatgtctcagaatattgagaaagcgactcaatattaaatatttaaaaatattaattggtacaagtcggcagttgtctgttgtcgtgcccagtagataactagttaacaatcttctttgcaaaagtccctgcagccaccgaccgtcttttaaactaaatttgatcacatagtggaatttgctagaagctcagttttgtgtatgtggtacgaatctgtcatagataaattctcctgtttcaggataagtagagaagacataaacctctgcagaagaatgaagtacgcacactaggagttgatgtg

SEQ ID NO: 320327 - DNA, 621 bp, Homo sapiens
agcctggatgacagaacaagaccccacctatcaaacaaacaaacaaactgaaaaacaaaatgctcccaacaggaattacacagcatggaaaatacatacctcatcatatctactgataatttcatatttactgaagcttgtttcatattaaacatattaatactttcttttctagtctgatttgcatagtstgtgaaaagaagagctggtaaccttggaagagtatgccacgaattttcttaacttcatgtcacatgtgaaattcatacacatgctagtgagggctgggatctttttatattaagaaggcattgacgagatgtctcagaatattgagaaagcgactcaatattaaatatttaaaaatattaattggtacaagtcggcagttgtctgttgtcgtgcccagtagataactagttaacaatcttctttgcaaaagtccctgcagccaccgaccgtcttttaaactaaatttgatcacatagtggaatttgctagaagctcagttttgtgtatgtggtacgaatctgtcatagataaattctcctgtttcaggataagtagagaagacataaacctctgcagaagaatgaagtacgcacactaggagttgatgtg

SEQ ID NO: 320328 - DNA, 521 bp, Homo sapiens
gcctggatgacagaacaagaccccacctatcaaacaaacaaacaaactgaaaaacaaaatgctcccaacaggaattacacagcatggaaaatacatacctcatcatatctactgataatttcatatttactgaagcttgtttcatattaaacatattaatactttcttttctagtctgatttgcatagtgtgtgaaaagaagagctggtaaccttggaagagtatgccacgaattttcttaacttcatgtcacatgtgaaattcatacacatgctagtgagggcygggatctttttatattaagaaggcattgacgagatgtctcagaatattgagaaagcgactcaatattaaatatttaaaaatattaattggtacaagtcggcagttgtctgttgtcgtgcccagtagataactagttaacaatcttctttgcaaaagtccctgcagccaccgaccgtcttttaaactaaatttgatcacatagtggaatttgctagaagctcagttttgtgtatgtg

SEQ ID NO: 320329 - DNA, 621 bp, Homo sapiens
agcctggatgacagaacaagaccccacctatcaaacaaacaaacaaactgaaaaacaaaatgctcccaacaggaattacacagcatggaaaatacatacctcatcatatctactgataatttcatatttactgaagcttgtttcatattaaacatattaatactttcttttctagtctgatttgcatagtgtgtgaaaagaagagctggtaaccttggaagagtatgccacgaattttcttaacttcatgtcacatgtgaaattcatacacatgctagtgagggctgggatctttttatattaagaaggcattgacgagatgtctcagaatattgagaaagcgactcaatattaaatatttaaaaatattaattggtacaagtcggcagttgtctgttgtcgtgcccagtagatarctagttaacaatcttctttgcaaaagtccctgcagccaccgaccgtcttttaaactaaatttgatcacatagtggaatttgctagaagctcagttttgtgtatgtggtacgaatctgtcatagataaattctcctgtttcaggataagtagagaagacataaacctctgcagaagaatgaagtacgcacactaggagttgatgtg

SEQ ID NO: 320330 - DNA, 591 bp, Homo sapiens
cgtacaacagtagcctaatcatttttgttaagctaatattctaatctttgggacggctgtcatcaaatagaaaagaactctgactattgccacatcgatagtgaaattttgccatatactgacagacctagaaatagacaagaggcataacatgtcaacatatcaaagttatgtaaacattttatgatttctcataacattgctgtcaaatattacacttatgtaatattggcttcaggcatgagaaattatggttgctaaattgtataggtgataaaaaccattaattagcttaaatttgttkttataagaagaactactctattgtgcactttcagcaaagtttctgtaagatatcaaaatactttttcgaatatggataggtaaaatatcttacagaaaacaattattacagaaacctaatactactactgcttttttttttcttaactgaaggtttgcttagactatctctaactttggcacttgtatgttcactatacttatactgagaaataagtaaaatactctgcatcgtatttttgttctgtgaataatgatgccccaggactgcatgtctagtttctgcag

SEQ ID NO: 320331 - DNA, 504 bp, Homo sapiens
aggtttgcttagactatctctaactttggcacttgtatgttcactatacttatactgagaaataagtaaaatactctgcatcgtatttttgttctgtgaataatgatgccccaggactgcatgtctagtttctgcagtgcactgtgttcatttacatcctgtgcctgtctggctagctcctacaacctgctacctctcttaaagtttattgtaatttaacagtgattgatctgcttaacgtttgaaataagcttgaagacaatayttcttctttgcaaaggcccactaatttggtttaaattttctttttagtgtgttaatgttttcttttatttgatgtgactaggtcaagaagtatatatgagtggaggtatgtgcaactaaattgaaattgcagagagtgggatctcaaatgagaaatatataatctttctcatgatcatggcaattgtctttacatgaaaatgatattgctttaatatttttcaattaataatgatatat

SEQ ID NO: 320332 - DNA, 576 bp, Homo sapiens
aaagaggtggggaaaatgttatttaagactattgcaaaagagrtcaagattattgcaataaagagaaagattgaattcaactctgctgaaacaaaaggcaggagagtttgcattagcgagggaagtctactgcttgatgttaggagagtggttggtcaatgtgattaggccacatgtgttttctaattgaagtttaggaaagttaggttcctaacttctcacagcgatggaaagattggggcactgtctttctagatgattacatttcaatgggttagctccgagatccttgagaggcatttccatgttgtaaaactggctagaggctaggggatgatttacatctcaaaggggcaattgcaactttattgaagtgagtaatcttaggaagcacaagcgaagggcctagcatcagaaggaaacctctttaaacttttgtctagctggaggggagttaaggccattgtggtctcttgctcataagcaatggatgaaaacagcttactttaaccgtggcgatgggacgcagaatttcaaacttttatccataatacaatatagaattaatatcaatcc

SEQ ID NO: 320333 - DNA, 576 bp, Homo sapiens
aaagaggtggggaaaatgttatttaagactattgcaaaagaggtcaagattattgcaataaagagaaagattgaattcaactctgctgaaacaaaaggcaggagagtttgcattagcgagggaagtctactgcttgatgttaggagagtggttggtcaatgtgattaggccacatgtgttttctaattgaagtttaggaaagttaggttcctaacttctcacagygatggaaagattggggcactgtctttctagatgattacatttcaatgggttagctccgagatccttgagaggcatttccatgttgtaaaactggctagaggctaggggatgatttacatctcaaaggggcaattgcaactttattgaagtgagtaatcttaggaagcacaagcgaagggcctagcatcagaaggaaacctctttaaacttttgtctagctggaggggagttaaggccattgtggtctcttgctcataagcaatggatgaaaacagcttactttaaccgtggcgatgggacgcagaatttcaaacttttatccataatacaatatagaattaatatcaatcc

SEQ ID NO: 320334 - DNA, 576 bp, Homo sapiens
aaagaggtggggaaaatgttatttaagactattgcaaaagaggtcaagattattgcaataaagagaaagattgaattcaactctgctgaaacaaaaggcaggagagtttgcattagcgagggaagtctactgcttgatgttaggagagtggttggtcaatgtgattaggccacatgtgttttctaattgaagtttaggaaagttaggttcctaacttctcacagcgatggaaagattggggcactgtctttctagatgattacatttcaatgggttagctccgagatccttgagaggcatttccatgttgtaaaactggctagaggctaggggatgatttacatctcaaaggggcaattgcaactttattgaagtgagtaatcttaggaagcacaagcgaagggcctagcatmagaaggaaacctctttaaacttttgtctagctggaggggagttaaggccattgtggtctcttgctcataagcaatggatgaaaacagcttactttaaccgtggcgatgggacgcagaatttcaaacttttatccataatacaatatagaattaatatcaatcc

SEQ ID NO: 320335 - DNA, 576 bp, Homo sapiens
aaagaggtggggaaaatgttatttaagactattgcaaaagaggtcaagattattgcaataaagagaaagattgaattcaactctgctgaaacaaaaggcaggagagtttgcattagcgagggaagtctactgcttgatgttaggagagtggttggtcaatgtgattaggccacatgtgttttctaattgaagtttaggaaagttaggttcctaacttctcacagcgatggaaagattggggcactgtctttctagatgattacatttcaatgggttagctccgagatccttgagaggcatttccatgttgtaaaactggctagaggctaggggatgatttacatctcaaaggggcaattgcaactttattgaagtgagtaatcttaggaagcacaagcgaagggcctagcatcagaaggaaacctctttaaacttttgtctagctggaggggagttmaggccattgtggtctcttgctcataagcaatggatgaaaacagcttactttaaccgtggcgatgggacgcagaatttcaaacttttatccataatacaatatagaattaatatcaatcc

SEQ ID NO: 320336 - DNA, 586 bp, Homo sapiens
acattcaggttctagaattaattctttcaataagcaaatgcattttttactgtcttatacaacttagaaatatggataagaagagtaaaacaatatgaataagcactgaatatgtcttaagtgtacaattttcagaataacatatttattaccagaaggatggaaactgatttttataaaatataattttctataagacaataattgttcattattatctcttcagttttttctcagattgcttttatacttattaaatgacgaatctaacataaatacttctgaataaattatacacaaataaaaataatattaataagtaattaaattatatgttaagtaatataaaatatatgtactatacaattatcattgtaatgttcattgactcaatcctactgtagataaaatgttgagaatttttttttccatargtttttgggaaacaggtgatatttggttacatgagtaagttctttagtggtgatttgtgagatttttatgcatccatcacctcagcagtctataatgaacccaatttgtagccttttctcgttcactcacttctcaccatttccccctgagt

SEQ ID NO: 320337 - DNA, 610 bp, Homo sapiens
atgttccatgcatatgtgagagggattggatttgagacaacaagtagaccagactgagatctccagagcaagctgtatttaaggtcatatctgaagaaagtaaaagttaaataggaaaatgcaaaaacccttcacaacaaagaattwtccagcccaacatgtcaatgatgctgaggttgtctttctgtataggtagtagtaagatggtgaaatttaaaatctgtcataaggatgtttaaaagccatgtttttccttagaaatgatagggcaccattgaagcaaaaagtggaggggtaggaaaagtggtggtggtgacttgctggattttcattttgaaataatccattttggttgtggcatggagaactaattagaaagaaacaggccaagaggaggcaagaggacaagtgagtaggttattatagtggaaacaaggcaggataacagtagattcaattaggatggcaatggaatgtatgtaaagttagtgtatacatgaggcctaatacatgttaagcataatgcaatttattactttatattcattatttgttagatgatgggcagcttgatttatctgaggttacttgggcacaataagcttgttat

SEQ ID NO: 320338 - DNA, 607 bp, Homo sapiens
caaactaaacccaaaagtaacagaagggaagaaatcataaagactaaagcagagataaacaaaataaagaataaaaaataaagaaaatcaacayacaaattaggttctttgaaaagatcaacacaactggcaaacagctagatgaactaaaaaaaaaaaaaaaataccactcaaatttccaaaatcagaattgagggtggagacagtactacccattctacagttataaaaaggattataagagtcctacatgcaactgtgaactaaaaattggataaccttaatgaaatggacaacttcatagaaagacaaaatcacaaagaaatagaaaatttgaatagacctataactgataagaagattgagttagtaaccaaaaaaaaatctcctgacaaagaaaagccccagatttgatggcttcaccagtggattctacccaaaatttaaagaataactaacatcaattcttctcaaactttaacaaatgtcgaagaggagggaaaccttcctacatcagcctatgtggtaagcattacccagatagcaaagcaagacaaaaatacaagatacaaaaactagagacaagtattccttatgaacattgata

SEQ ID NO: 320339 - DNA, 602 bp, Homo sapiens
ctttctccaagtgctatgggatgagaagaaaaagtaacattttcctatgggaaacatattcagattaaataatcaaaatctaggttcaggatctgattcagttatagatgtctgattttaacaggagaatatgggccaaatgaaagtatcagctatcattttattaaatattaaggaataattaaaataaaataattaacaatactgtctcaaacaagtatctaaattgaatacaaattttagactcccaactttagcatctgacaattagctctaaagttaggcatcttgctrttgtaccttttgaaacactacacacacttgtctttcttgatctaatacacaaggcaaagcagggacaaaatctacttctttggatttggaattcgtctctctgttctttggtatttctcagttggtgattactcaattggtctttagatacatttcttgttattatgcacatctttctatgccctgaagagctatttgcatgcctgaccctctcccactgtcaatgtttaaagtaattttggggcaccacaaatcgtcccactgcctttccataccctgcaagtgagcactgacacccagtgaaaact

SEQ ID NO: 320340 - DNA, 616 bp, Homo sapiens
tgaagttatttagggtagttcactcttttcccaaatatttgtgtgcttacgtttttcatttgtaatatagctagtttcattttttaaaatatttgtatttaattttttattccccacacattgtggttgattttatttattcatttttcaagtatgtgaaccagtaatatagttctaaaagtcataactatacaaacacattgtactagtcttttctcacattgctagaaagaaatgcctgagactgggtagtttagaagaaaggaggtttgattgacycatggttctacaggcccctgtaggaaccagctccacagggttggtgggtctctccctgtgcgtggtgacgagagagtgtagaaataaagacacaagacaaagagacaagaggaaaggcagctgggccccggggaccactaccaccaatgcgcggagaccggtagtggccccgaatgtctggctgcgctgttatttattggatacaaggcagaaggggcagggtaaaaaatgtgagtcacctccaattataggtaaggtcacgtgggtcacgtgtccactggacagggggcccttctctgcctggcagccgaggcagagagggagaggagacaaagag

SEQ ID NO: 320341 - DNA, 616 bp, Homo sapiens
tgaagttatttagggtagttcactcttttcccaaatatttgtgtgcttacgtttttcatttgtaatatagctagtttcattttttaaaatatttgtatttaattttttattccccacacattgtggttgattttatttattcatttttcaagtatgtgaaccagtaatatagttctaaaagtcataactatacaaacacattgtactagtcttttctcacattgctagaaagaaatgcctgagactgggtagtttagaagaaaggaggtttgattgacccatggttctacaggcccctgtaggraccagctccacagggttggtgggtctctccctgtgcgtggtgacgagagagtgtagaaataaagacacaagacaaagagacaagaggaaaggcagctgggccccggggaccactaccaccaatgcgcggagaccggtagtggccccgaatgtctggctgcgctgttatttattggatacaaggcagaaggggcagggtaaaaaatgtgagtcacctccaattataggtaaggtcacgtgggtcacgtgtccactggacagggggcccttctctgcctggcagccgaggcagagagggagaggagacaaagag

SEQ ID NO: 320342 - DNA, 623 bp, Homo sapiens
atggttcccactggtttgatcttctccatttaatattttgacctcttattattttattttagttgatcattcatatcttctgttatttgcttatattgcttgatgtatcagtttctaagaatttgtgtgaaaaatctaattatagccatggattctttatttctacccatatctctatcaaattttactttatatatgcaagttctacttcatatttgtgaattgggtaaatttcttttcaaaactattacattttctyaacatattgttccttgtacatgtattagtagacaatgtcttaacttcaattatattttatcacatatttaggacacaacataaattttcttttgcatcatatatacctgtatttctttcttcatctttttggttttcaattctctgtattattttattttgtagattatttgcaacatatattgctgaaacttaactgttgcaatataatctgagcatttctgtttgtcattggctcctttaacttatttgaatttattacaattcatgcaattttatgcttaatttactgtattttcaagctaggcagccttcctcctttcactgactttcatttgacaggtcagaatttcttctgctagttt

SEQ ID NO: 320343 - DNA, 582 bp, Homo sapiens
tgttttcccttctgccatgattgtaagtctcccgaggcctcccaagtcatgaggaactgtgagtcgattaaacctctttattaattaccctgtgtcaggtatttctttatagcagtgtgaaagtggacaaatacaggcattaagaagttctgtgggagtgaaaaggcctctacatccatctcaccttggagatgatggttcatgttcttctggtgcraaattgcttttgtttaaacatttctagtctattagcttacctctaacagctgactgttgtgtgtagcagtgcaaagtaatgattcttcagcagattaatcagttaatataaatttgggcacatcatattttttctggaagcaaaagtaagaatcatatccaaagcaattatattaaggttttaaaattatttatatcattttctgtcattttaactcacttttgcatttaagttgcaaatggtgtgatagagatatttgatcatataatgtttttatttgcgttagctgaacaaatagcaaagtttaaattacagactacatgtttgcttgaattaacaagggttgtacaatcttaagcattgga

SEQ ID NO: 320344 - DNA, 582 bp, Homo sapiens
tgttttcccttctgccatgattgtaagtctcccgaggcctcccaagtcatgaggaactgtgagtcgattaaacctctttattaattaccctgtgtcaggtatttctttatagcagtgtgaaagtggacaaatacaggcattaagaagttctgtgggagtgaaaaggcctctacatccatctcaccttggagatgatggttcatgttcttctggtgcgaaattgcttttgtttaaacatttctagtctattagcttacctctaacagctgactgttgtgtgtagmagtgcaaagtaatgattcttcagcagattaatcagttaatataaatttgggcacatcatattttttctggaagcaaaagtaagaatcatatccaaagcaattatattaaggttttaaaattatttatatcattttctgtcattttaactcacttttgcatttaagttgcaaatggtgtgatagagatatttgatcatataatgtttttatttgcgttagctgaacaaatagcaaagtttaaattacagactacatgtttgcttgaattaacaagggttgtacaatcttaagcattgga

SEQ ID NO: 320345 - DNA, 582 bp, Homo sapiens
tgttttcccttctgccatgattgtaagtctcccgaggcctcccaagtcatgaggaactgtgagtcgattaaacctctttattaattaccctgtgtcaggtatttctttatagcagtgtgaaagtggacaaatacaggcattaagaagttctgtgggagtgaaaaggcctctacatccatctcaccttggagatgatggttcatgttcttctggtgcgaaattgcttttgtttaaacatttctagtctattagcttacctctaacagctgactgttgtgtgtagcagtgcaaagtaatgattcttcagcagattaatcagttaatataaatttgggyacatcatattttttctggaagcaaaagtaagaatcatatccaaagcaattatattaaggttttaaaattatttatatcattttctgtcattttaactcacttttgcatttaagttgcaaatggtgtgatagagatatttgatcatataatgtttttatttgcgttagctgaacaaatagcaaagtttaaattacagactacatgtttgcttgaattaacaagggttgtacaatcttaagcattgga

SEQ ID NO: 320346 - DNA, 671 bp, Homo sapiens
acaaatagcaaagtttaaattacagactacatgtttgcttgaattaacaagggttgtacaatcttaagcattggaaataatcaatttcctaataatggtattaagtttagaagctttatgaccacatatacagcaaaaaatctagtctaaatttactattaatgatgcagtactaatttcctagtttttgtttaatacataaagagccttatatctttctctattatgttaatcccaggatctaatgagagtgaacaaatgtttcagagtgtttgaaagttcgatattaacactaaaaaaccttatatttgaatttgtataatttgtttccagtaaatcaataagtactacatattwtgatgtttgtaaaatagtaatgcaattaaaatatccttctattatcatttagttaatcctaatttcacttaagcacccaaaaatgtaatcatccaaatagtagagtggtcctattttcattttattcttaaatcagagcaattgaagaatattcttcacataaatacatgtgaaacggtaaagcctattaaaactaatttagtctaaaacttgacaaccaacgttgctactgttccagtgtaacccatattagctagacagatactttatttcatatcgtgcttctcaaacagatttttgatggaatgccaccg

SEQ ID NO: 320347 - DNA, 671 bp, Homo sapiens
acaaatagcaaagtttaaattacagactacatgtttgcttgaattaacaagggttgtacaatcttaagcattggaaataatcaatttcctaataatggtattaagtttagaagctttatgaccacatatacagcaaaaaatctagtctaaatttactattaatgatgcagtactaatttcctagtttttgtttaatacataaagagccttatatctttctctattatgttaatcccaggatctaatgagagtgaacaaatgtttcagagtgtttgaaagttcgatattaacactaaaaaaccttatatttgaatttgtataatttgtttccagtaaatcaataagtactacatattttgawgtttgtaaaatagtaatgcaattaaaatatccttctattatcatttagttaatcctaatttcacttaagcacccaaaaatgtaatcatccaaatagtagagtggtcctattttcattttattcttaaatcagagcaattgaagaatattcttcacataaatacatgtgaaacggtaaagcctattaaaactaatttagtctaaaacttgacaaccaacgttgctactgttccagtgtaacccatattagctagacagatactttatttcatatcgtgcttctcaaacagatttttgatggaatgccaccg

SEQ ID NO: 320348 - DNA, 561 bp, Homo sapiens
aacagttgagaacatatcttgaaagttcaaaagactcagatgcaccacctcaaatttgtgacagcaacgaaagtgtgcatgaaattggctcacactacatattacagatgatcagtgcattgaatacacataacttggccagtgtggctaaaagacttggaactgcactggttaacaaaacttcatctttttctgacctcctttaatataagaaaacctaattattataataatttctctataataatggaaacatgcttatttattgtatggtttccaaaaggccatttaaatttatcaccagaaatagcctgtgagttagtgagggcaacttatgttaatattcaaatgctacttgaggagactccatagcatgtctagagagtaaaaataagcagaggtgctggctttaggccagatcttccaattaacatgcatgtgtgtgcacacgcacacactyacacacacttttatatcagaatgaggaaacacattcttgccagaaggcctcctttaaggcagacatttcctataagaagtaacatatctagaaactgaatt

SEQ ID NO: 320349 - DNA, 561 bp, Homo sapiens
aacagttgagaacatatcttgaaagttcaaaagactcagatgcaccacctcaaatttgtgacagcaacgaaagtgtgcatgaaattggctcacactacatattacagatgatcagtgcattgaatacacataacttggccagtgtggctaaaagacttggaactgcactggttaacaaaacttcatctttttctgacctcctttaatataagaaaacctaattattataataatttctctataataatggaaacatgcttatttattgtatggtttccaaaaggccatttaaatttatcaccagaaatagcctgtgagttagtgagggcaacttatgttaatattcaaatgctacttgaggagactccatagcatgtctagagagtaaaaataagcagaggtgctggctttaggccagatcttccaattaacatgcatgtgtgtgcacacgcacacactcacacacacttytatatcagaatgaggaaacacattcttgccagaaggcctcctttaaggcagacatttcctataagaagtaacatatctagaaactgaatt

SEQ ID NO: 320350 - DNA, 632 bp, Homo sapiens
ttttaaaatgaaaataaaaataatgcattaaaaaacagtacaacaaccatttacatagcacttacattctattaggtattataagtaatctagaaatgatttaaagtatacaggaggatgtatctaggttatatgcaaatactatgtgatttcatatcagcgatttgagcatctgcagattttgctatctgcaggggtcctggaatcaaaccccgcagatactgaagaatggttgtatatacacacacacacacacacacacacacacacacayatatatatatatatacacacacacacacatacacacatgcatatatatttatatgcacataagcacataattacctatattatatatactattcatatgtaaacctatataatatgtagggtaaatatattaatataataaacgttcatatacatttatctatgcatttttatcatcactctaattccagtagtaaatatttttcaattgcttttcaactcagacgggatgcaaggagtttgacttacattaactttattattacattttttcctttcattcatatagacaagccaaaattcacggtaattatattttgtacctaactgtggtggtatattatttttaaatgtgaaaa

SEQ ID NO: 320351 - DNA, 607 bp, Homo sapiens
ctttttactttacacaattacacaatttttttktttgtttgtttgtttgagacagactctcactctgttgcccagggtggagtgcagtggcatgatctcaactcactgcaagctccgcctcctgggttcaagtgattctcctacctcggccttccaagtagcgagtagctgggactgcagatacgcaccaccatgcccagctaatttttctatttttcatagagactgggattcaccatgttggccagggtggtctcgacctgttgacctgacgatgtgcctgccttggcctcccaaagtactgggattacaggcatgagccaccacgcctggcctacattgcacaattctttatttgaactttgatgcctgtatttcttagatgagagtaaaaggcaaaatgaattgataaagtgtttaaaatacattgaatttagaacagtcactagccacgtggaaaacatattttgataacctttcatcatattgcatatcaaaataaattccagatggatcagagtataagtttatctatgacattcaacactagaaaaatataggtgattatctaatattgattgaagaatgcctttaagaaaaagaaaaa

SEQ ID NO: 320352 - DNA, 609 bp, Homo sapiens
caataccatggctgtggcacatgacttttctagacctggatcatttgtgtcccaatatttgactgattttggggtgggatgaaagcatgccttcagtttgtacttctatcatgcccattgctaccatacacttaatgacayaatcatgttccaatgtgtcctcagaattactattcctagctggatatactaaggctttatatctaggtcagttcattgagtctgtgtcccctctactccctccatcgtccctccacagtatgaagcatcctcataggaagccttgtaagtagatctaaagatagaccccgcttggcctttcaccctcaaagatactcttcatgcattaaagtaaatttttgtcttccatttctgcagttgaccagatgctaattgtggccatattctaggcttaaactgagaacacctctactcttttggctttgggaacaaagtacctgatgtaatggaaggtccaagaactgcaactgagatgaattagtattggattcaccccacaaccttcttcaccatcgtaaacaaagtaagagtgaacaacatcatgtacaaaacttaacaatatagacaatataatgtgaagaatacaat

SEQ ID NO: 320353 - DNA, 609 bp, Homo sapiens
caataccatggctgtggcacatgacttttctagacctggatcatttgtgtcccaatatttgactgattttggggtgggatgaaagcatgccttcagtttgtacttctatcatgcccattgctaccatacacttaatgacataatcatgttccaatgtgtcctcagaattactattcctagctggatatactaaggctttatatctaggtcagttcattgagtctgtgtcccctctactccctccatcgtccctccacagtatgaagcatcctcataggaagccttgtaagtagatctaaagatagaccccgcttggcctttcaccctcaaagatactcttcatgcattaaagtaaatttttgtcttccatttctgcagttgaccagatgctaattgtggccatattctaggcttaaactgagaacacctctactcttttggstttgggaacaaagtacctgatgtaatggaaggtccaagaactgcaactgagatgaattagtattggattcaccccacaaccttcttcaccatcgtaaacaaagtaagagtgaacaacatcatgtacaaaacttaacaatatagacaatataatgtgaagaatacaat

SEQ ID NO: 320354 - DNA, 606 bp, Homo sapiens
aggactcaaatttatcatcttaaaatgagtaattttacctattcctctcaacgttacgtaaattttaatactggtacttaccactattctttstgctttgctgttttctataattggaggtacaaaattctgactgacttttcacttcaccttgagagatgtttattccttattctctattgagatacattagaaatatgagatgaggctatttataatttttgtaaatttgataaaagttaaggatgttcgaatatagtatttctgatgtaaaaacaagcacgaaaattaaatttaggcaatttataattaggtctccttcccaattaaaataaatattaatgcttcttataggtattcaccatttaataattattaaagtaattgctttaatggcataatttctttttttctattttgtgcattaccataaaataattataaatcaagctgtgatagtgtccaagttacattttatgtgaaagacggaagtaactccctgttccactgtacacaaaagccagcaatattattgcatataatacatggtaaagcagtattttttattctcacaaataaagcataccattactttctccaagtcag

SEQ ID NO: 320355 - DNA, 393 bp, Homo sapiens
gctgcatccagctcttactcaggaatactatctattgacttgtaagttaaactgtacagcccaacccaatataaaaccarctgaaagaagtgcacagagctataaaagaaaagccaaacgaccctaccaaacatcctctacagtcacaagtcatggagatgggggaagaaaaagggaaagggaaaaataaactagaatattatggagaaagaaagaaaaaattcccacctaaatgaaaatatttatgaaaattagaagtgccagcatctctagataagaaagaaccagtgcaagaattctggcatcatgaaaaatctgaatgtagtgacaccaccaaaggatcacactagctctccagcaatggtccccaacgaagaaggaaactcagacctg

SEQ ID NO: 320356 - DNA, 393 bp, Homo sapiens
gctgcatccagctcttactcaggaatactatctattgacttgtaagttaaactgtacagcccaacccaatataaaaccaactgaaagaagtgcacagagctataaaagaaaagccaaaygaccctaccaaacatcctctacagtcacaagtcatggagatgggggaagaaaaagggaaagggaaaaataaactagaatattatggagaaagaaagaaaaaattcccacctaaatgaaaatatttatgaaaattagaagtgccagcatctctagataagaaagaaccagtgcaagaattctggcatcatgaaaaatctgaatgtagtgacaccaccaaaggatcacactagctctccagcaatggtccccaacgaagaaggaaactcagacctg

SEQ ID NO: 320357 - DNA, 393 bp, Homo sapiens
gctgcatccagctcttactcaggaatactatctattgacttgtaagttaaactgtacagcccaacccaatataaaaccaactgaaagaagtgcacagagctataaaagaaaagccaaacgaccctaccaaacatyctctacagtcacaagtcatggagatgggggaagaaaaagggaaagggaaaaataaactagaatattatggagaaagaaagaaaaaattcccacctaaatgaaaatatttatgaaaattagaagtgccagcatctctagataagaaagaaccagtgcaagaattctggcatcatgaaaaatctgaatgtagtgacaccaccaaaggatcacactagctctccagcaatggtccccaacgaagaaggaaactcagacctg

SEQ ID NO: 320358 - DNA, 406 bp, Homo sapiens
catgtggaagccaaggagagagaccttaaaagaaatcaaccttgccactacctgaatctctgacttggcctccagactgttggcaaataaatttatgttttttaagacatctagtctgtgctactttgttgtgatagccctagaaaatgaatgcaaattcattaacagataatgaattaaaaaatgggaggttgcctatataatgccctactactcagtgataaaaaaataagtcatttacacatgcaacactgtgaatggatgaacctataagtaatttttttaaataaaataagycagatgcctctcccaattatattgtccattattccacttataaaattatagaaaatacaaactactccatagtgacattaggctgatacttatgggaaatggaatggca

SEQ ID NO: 320359 - DNA, 406 bp, Homo sapiens
catgtggaagccaaggagagagaccttaaaagaaatcaaccttgccactacctgaatctctgacttggcctccagactgttggcaaataaatttatgttttttaagacatctagtctgtgctactttgttgtgatagccctagaaaatgaatgcaaattcattaacagataatgaattaaaaaatgggaggttgcctatataatgccctactactcagtgataaaaaaataagtcatttacacatgcaacactgtgaatggatgaacctataagtaatttttttaaataaaataagccagatgcctctyccaattatattgtccattattccacttataaaattatagaaaatacaaactactccatagtgacattaggctgatacttatgggaaatggaatggca

SEQ ID NO: 320360 - DNA, 568 bp, Homo sapiens
gctacaactgaatacctgaggctgggtaatttcaaaagaaaagaattagctcatggttytgcagcctaggaaactcaggaagcatggcgtcagcatctgctcatcttctggtcagggtctcgtgctgctcccactcaacatgtaagcagaaggggagtaggcccgcgcaaagagatcccatggcgagggaagaagttagacattttagcaacccacactcacaggagctaatccattctccagacagcaacaacttactcatccccataagaaggcactagtctataaatctgtaaatgagggatccactctcatgacccaaatacctgccactaggctccagctcccaacactgtcacattgggggatcaatgtgtttcccattgacagtgtttcccattgaaatgtgatccctcaatatgatcaaatttgttttagtggaaacaaatcatatgtaaaccactgaagacaggttggaggaattacgatgtgcacaagttttataggtatgcatatgtgggaatatcaaatggtacactttatacttgtgtattattaattatacttc

SEQ ID NO: 320361 - DNA, 568 bp, Homo sapiens
gctacaactgaatacctgaggctgggtaatttcaaaagaaaagaattagctcatggttctgcagcctaggaaactcaggaagcatggcgtcagcatctgctcatcttctggtcagggtctcgtgctgctcccactcaacatgtaagcagaaggggagtaggcccgcgcaaagagatcccatggcgagggaagaagttagacattttagcaacccacactcacaggagctaatccattctccagacagcaacaacttactcatccccataagaaggcactagtctataaatctgtaaatgagggatccactcycatgacccaaatacctgccactaggctccagctcccaacactgtcacattgggggatcaatgtgtttcccattgacagtgtttcccattgaaatgtgatccctcaatatgatcaaatttgttttagtggaaacaaatcatatgtaaaccactgaagacaggttggaggaattacgatgtgcacaagttttataggtatgcatatgtgggaatatcaaatggtacactttatacttgtgtattattaattatacttc

SEQ ID NO: 320362 - DNA, 568 bp, Homo sapiens
gctacaactgaatacctgaggctgggtaatttcaaaagaaaagaattagctcatggttctgcagcctaggaaactcaggaagcatggcgtcagcatctgctcatcttctggtcagggtctcgtgctgctcccactcaacatgtaagcagaaggggagtaggcccgcgcaaagagatcccatggcgagggaagaagttagacattttagcaacccacactcacaggagctaatccattctccagacagcaacaacttactcatccccataagaaggcactagtctataaatctgtaaatgagggatccactctcatgacccaaatacctgccactaggctccagctccmaacactgtcacattgggggatcaatgtgtttcccattgacagtgtttcccattgaaatgtgatccctcaatatgatcaaatttgttttagtggaaacaaatcatatgtaaaccactgaagacaggttggaggaattacgatgtgcacaagttttataggtatgcatatgtgggaatatcaaatggtacactttatacttgtgtattattaattatacttc

SEQ ID NO: 320363 - DNA, 554 bp, Homo sapiens
attgacaagcctttagtgagactaagagggagaaaactcacacaataaaatcagaaatgaaaagaagacattagaacaaatatcacagaaatacaaaagacaataaaaagctattatgaacaactatacaccaccaaccttgataacatagaagaaatggataaattcctagatacacacagcctaccaagattaaattatgaagaaatagaaaatctaaamagaccaataatgggtggagaaattgaagacgtaaaaagtagtatttcagcaaagaagatcccaggacttgatgtcctcactcttgaattctatcaaacatttaaataactaataacaattttccacaaactgtttcagaaaattaaagacaagttaatacttccaaactcactttatgagccagcattacactaattccaaaactggatgagaacataaaaaacaaaatggaacctataggccagtatatttcataaaagtaaatgcaaaaattatcaacaagatactagcaaactgaatctaagtgtgcattaaaaaagataattcactat

SEQ ID NO: 320364 - DNA, 554 bp, Homo sapiens
attgacaagcctttagtgagactaagagggagaaaactcacacaataaaatcagaaatgaaaagaagacattagaacaaatatcacagaaatacaaaagacaataaaaagctattatgaacaactatacaccaccaaccttgataacatagaagaaatggataaattcctagatacacacagcctaccaagattaaattatgaagaaatagaaaatctaaaaagaccaataatgggtggagaaattgaagaygtaaaaagtagtatttcagcaaagaagatcccaggacttgatgtcctcactcttgaattctatcaaacatttaaataactaataacaattttccacaaactgtttcagaaaattaaagacaagttaatacttccaaactcactttatgagccagcattacactaattccaaaactggatgagaacataaaaaacaaaatggaacctataggccagtatatttcataaaagtaaatgcaaaaattatcaacaagatactagcaaactgaatctaagtgtgcattaaaaaagataattcactat

SEQ ID NO: 320365 - DNA, 554 bp, Homo sapiens
attgacaagcctttagtgagactaagagggagaaaactcacacaataaaatcagaaatgaaaagaagacattagaacaaatatcacagaaatacaaaagacaataaaaagctattatgaacaactatacaccaccaaccttgataacatagaagaaatggataaattcctagatacacacagcctaccaagattaaattatgaagaaatagaaaatctaaaaagaccaataatgggtggagaaattgaagacgtaaaaagtagtatttcagcaaagaagatcccaggacttgwtgtcctcactcttgaattctatcaaacatttaaataactaataacaattttccacaaactgtttcagaaaattaaagacaagttaatacttccaaactcactttatgagccagcattacactaattccaaaactggatgagaacataaaaaacaaaatggaacctataggccagtatatttcataaaagtaaatgcaaaaattatcaacaagatactagcaaactgaatctaagtgtgcattaaaaaagataattcactat

SEQ ID NO: 320366 - DNA, 581 bp, Homo sapiens
aaattccttcatgacaataactttaaacaaattaggtatagatggtatgtacctcgacacaataaatgtcatacataacaaatctragacttgcatcacagggaatggggaaaagctaaaatctgtcctaaggccaggaacaagatgaggatgttcccttaaccattttgttcaatatactactggaagtcctagccagagtaattaggcaagagaaacaaagacaaggcatatacatcggaaaagaaataaaattatccctgagtgtagaaaattttatcttgtatataaaaaacaatataggcttcagtaaaaaaaaaaaactgttagaactaatagacagtaaagctgcagaatacaaaatcaaaataaaaattagtgtttctatatagtgttagtgaaccaatatgaaaaaataatcaagaaaacaatttcagttacaatagctacaaaaaattatatacttaaaaataagtttaaccaaagaggtaaaagatctctacattgaaaacactatgaaatttttacaacaggggatacaaagggacacaaagaaatgggaaggtagtctgtgttaatgg

SEQ ID NO: 320367 - DNA, 503 bp, Homo sapiens
aggatagaacaataaatcttgttccagaacagtgtcctcaagaagggacccaactttagcctgagggccatgttgaggacttagggaggtcgaatcctgggcataaggattcctagcctcactgtatcccaagygtggcacagaagcaatagatgtagtggtcctgaagacccatgtaacctgggacaataagaaggcctctcctgtgcttccacactacctctttacatccagggtactggagtcccaacagtgcctgaggctggagtcctctgtaagtccaggagtatgagaactcagattcaaaatcagattaactgataaataattttttttgtaaatttttttagctatatttcactgcctgccatagacagtcattttgtactttcacaatgaagagttttcgcagctttaatgtttccttatggaattcttgccttggatattgatgttctattatcctacctagaaaactgataaaaggattggtgcttacctgc

SEQ ID NO: 320368 - DNA, 596 bp, Homo sapiens
tcattttgtactttcacaatgaagagttttcgcagctttaatgtttccttatggaattcttgccttggatattgatgttctattatcctacctagaaaactgataaaaggattggtgcttacctgccacctgcagagtaagcttctaactttccatttagggaaatcaaaatagatacagtttttctcagtatatgtgatagattgagtctgatgactgtaagattaaggcatttttcaagaacaaacatggaagtatgtaaataatgagtatatagyttagaattaacaaatgcaaatattacaaatgcaaatactaaaaaatgggtgtgaggtagtaattgacaccatcccgagaactctatgtgacaggtactgtgccactgcattattccagaaaattaatttactacaaatatcccaccctctatgtcagaaatgttcttctcctacttattggtgtagctagctgttgcatccctttcacattttaatgcaaaaggcacattctcgataaggtctttcctggctaccttatctaaaattgcaattcctcttcaccaatgcttcttactcctgttctgtaattaatttttc

SEQ ID NO: 320369 - DNA, 602 bp, Homo sapiens
gctactgaaaaactcatttgaagtgaaaaaatgtaaaaaaatgataaatatgggccttaaatgttttattttagcctaaaacaaaaaaggttatttatttaactactctgttgatgtagagtcaagtcttccttgaatgtgtctgctgatagaaatctgtatactctttcttgccaataaaataaacaacaacaacaacaacagaatccatttaatatatcttctacgatttccagtataggtttcttaaggtgaagttgaagtttttaaacccctttaattgaatccagtacaaaatatttgtagatgtttatgacctttttgttttctaaawaatttttactcatgtcttccacatctattctgatagcgattttgctttagatggcttacccttataaagtcaaaattatttaacagtttgcataaaaacacagctctttttccccttgcatttatatttaatcagagtaagcattgtattgattataataacaaaaggagcaaatatggggaaaaataaaaaccacaagtgactcttgacaagcacacaatttaaataataaacctggaattgtggaggctgactttagggaaaaccc

SEQ ID NO: 320370 - DNA, 602 bp, Homo sapiens
gctactgaaaaactcatttgaagtgaaaaaatgtaaaaaaatgataaatatgggccttaaatgttttattttagcctaaaacaaaaaaggttatttatttaactactctgttgatgtagagtcaagtcttccttgaatgtgtctgctgatagaaatctgtatactctttcttgccaataaaataaacaacaacaacaacaacagaatccatttaatatatcttctacgatttccagtataggtttcttaaggtgaagttgaagtttttaaacccctttaattgaatccagtacaaaatatttgtagatgtttatgacctttttgttttctaaaaaatttttactcatgtcttccacatctattctgatagcgattttgctttagatggcttacccttataaagtcaaaattatttaacagtttgcataaaaacacagctctttttccccttgcatttatatttaatcagagtaagcattgtattgattataataacaaaaggarcaaatatggggaaaaataaaaaccacaagtgactcttgacaagcacacaatttaaataataaacctggaattgtggaggctgactttagggaaaaccc

SEQ ID NO: 320371 - DNA, 514 bp, Homo sapiens
gtattagtacattcttacactgttgtaaataactacctgagacagcgtaatttatgaagaaaagaggtttaattgactcacagttttgcaggcttaacaggaagcatgactgggaggccttaagaagcttacaatcttggtagaaggtgaagggcaagcaagcaagtcttacaatggcagaggagggagagagcgagaaggggaaaatgtcacacacttgtaaaccatcagatctcatgagaactcactcactatctgagaacagcccatgatcytatcacctctcaccaggcccctcctccaattcaacatgagatttgggcagggatacaaatccaaaccatatcaatagacatatttatactgttgcattcgggactaagtgtcgacaagatatttggaggggcacataaaaatgtattcaaaccatagcaacctgaaagcctgtatttgtgattagttaacaactccagccatcatttctcttaagagtgaaatcaaaaccaacagcaac

SEQ ID NO: 320372 - DNA, 514 bp, Homo sapiens
gtattagtacattcttacactgttgtaaataactacctgagacagcgtaatttatgaagaaaagaggtttaattgactcacagttttgcaggcttaacaggaagcatgactgggaggccttaagaagcttacaatcttggtagaaggtgaagggcaagcaagcaagtcttacaatggcagaggagggagagagcgagaaggggaaaatgtcacacacttgtaaaccatcagatctcatgagaactcactcactatctgagaacagcccatgatcctatcacctctcaccaggcccctcctccaattcaacatgaratttgggcagggatacaaatccaaaccatatcaatagacatatttatactgttgcattcgggactaagtgtcgacaagatatttggaggggcacataaaaatgtattcaaaccatagcaacctgaaagcctgtatttgtgattagttaacaactccagccatcatttctcttaagagtgaaatcaaaaccaacagcaac

SEQ ID NO: 320373 - DNA, 514 bp, Homo sapiens
gtattagtacattcttacactgttgtaaataactacctgagacagcgtaatttatgaagaaaagaggtttaattgactcacagttttgcaggcttaacaggaagcatgactgggaggccttaagaagcttacaatcttggtagaaggtgaagggcaagcaagcaagtcttacaatggcagaggagggagagagcgagaaggggaaaatgtcacacacttgtaaaccatcagatctcatgagaactcactcactatctgagaacagcccatgatcctatcacctctcaccaggcccctcctccaattcaacatgagatttgggcagggatacaaatccaaaccatatcaatagacatatttatactgttgcattcgggactaagtgtcgacaagatatttggaggggcacataaaaatgtattcaaaccrtagcaacctgaaagcctgtatttgtgattagttaacaactccagccatcatttctcttaagagtgaaatcaaaaccaacagcaac

SEQ ID NO: 320374 - DNA, 564 bp, Homo sapiens
actgcagcactctaattaacttgaaaagtgtcctgaaaatattaatacaaacaatgaacaacacaacttttacttaacatctgatcatgtataaaatataattttaaacaaatgtttgaatatttttatttacatatctgattaatgagtggagtatatacaaaaagcaacatayatatttttaagaattatgtgttttatgtatatcatgtcaattaattttccctggcactctgatagaaggtattgtttgcctcttttcattgataaaatatggggcataaaagacaaaggaccttgcccaaggtcataccagtggcaaacaaaagactcaggatttgatcatcatgctgcccataagcaaaatgacagaaaaagtgaaccgtgtaagctgatgctcctcagcccctagctaggtacttaagcttgtagtactcagcctctccagctaggtacttaagcttgtagtactcagcctctccagctaggtacttaagcttgtagtactcagcctctccagctaggtacttaagcttgtagtactcagcctctccagctaggtac

SEQ ID NO: 320375 - DNA, 622 bp, Homo sapiens
tttctggtcgtgttaaatttagcaattggaatttggtaacataaatataaaacaatccatgttctttccatatctcaaaaaatacatacattctaggatgtggacctttccctaaattaaccatatctccttcttccaaacactacaatcaggaagaaagaccagtgaaaaactgcacgtagactgagaacagcagtttcatttatacaaactrtatccctccctcatctggcttggcctcagattgacaaagcagaccatgatgtcccagttggaagtaagagaggacatcacttggctccctccaaaatcctcagaaaagattaacatagctgccactagaggactgcctgacatatgtcctgatctttaaagaacatgatgactgtcttctatgcagtgtcaaagggcacagagagtaaaggcctcctaccaccatttctgccatccttgagggctgtcgttcaaaggcagtactgcagtgacaacactgacaagtgagagttaaccaaccagcaagaactgatgcatgagtctacgtttatagctcaaacccaagacatagtggatgattgctagccaagaaccatgcattcatctcttgtccgacatggaagagtca

SEQ ID NO: 320376 - DNA, 622 bp, Homo sapiens
tttctggtcgtgttaaatttagcaattggaatttggtaacataaatataaaacaatccatgttctttccatatctcaaaaaatacatacattctaggatgtggacctttccctaaattaaccatatctccttcttccaaacactacaatcaggaagaaagaccagtgaaaaactgcacgtagactgagaacagcagtttcatttatacaaactgtatccctccctcatctggcttggcctcagattgacaaagcagaccatgatgtcccagttggaagtaagagaggacatcacttggctccctccaaaatcctcagaaaagatwaacatagctgccactagaggactgcctgacatatgtcctgatctttaaagaacatgatgactgtcttctatgcagtgtcaaagggcacagagagtaaaggcctcctaccaccatttctgccatccttgagggctgtcgttcaaaggcagtactgcagtgacaacactgacaagtgagagttaaccaaccagcaagaactgatgcatgagtctacgtttatagctcaaacccaagacatagtggatgattgctagccaagaaccatgcattcatctcttgtccgacatggaagagtca

SEQ ID NO: 320377 - DNA, 594 bp, Homo sapiens
ttgagctgctgtatggagaagttcatgcagtgaaaactgacagtggtctctggctgacaaaaagcaaaacaatcaaacaaacaaacagaacaatgcctttgtttctacaatccacaagggactgggctctgtcaagaaccagatgagcttgaaagtagattcttcctcggtcaggacttgaggtgagaccacagccctggctgacactttattggaggcatttgggaagactcagctaaactttgcctagaattctgacccacagaaacagggagacaaaaatcttgtgttgtttcaaaccactaattttgtgataaattgttattcagcattaggtaaccaatatagagggtaagaactaagtggctaccaaatacaaaagaggtgaatctggtcatagccacatcattaacatgtcttttgatcttggaaaaatgacttaaattcttaaaaccttgactccttactactatcctagacactatgactaattaatggcaatgaaatatyttaaaattaaaactggttcgtgagatatacttattttgaacaggatttatgaaacttatactaatataaggtattaagcataca

SEQ ID NO: 320378 - DNA, 594 bp, Homo sapiens
ttgagctgctgtatggagaagttcatgcagtgaaaactgacagtggtctctggctgacaaaaagcaaaacaatcaaacaaacaaacagaacaatgcctttgtttctacaatccacaagggactgggctctgtcaagaaccagatgagcttgaaagtagattcttcctcggtcaggacttgaggtgagaccacagccctggctgacactttattggaggcatttgggaagactcagctaaactttgcctagaattctgacccacagaaacagggagacaaaaatcttgtgttgtttcaaaccactaattttgtgataaattgttattcagcattaggtaaccaatatagagggtaagaactaagtggctaccaaatacaaaagaggtgaatctggtcatagccacatcattaacatgtcttttgatcttggaaaaatgacttaaattcttaaaaccttgactccttactactatcctagacactatgactaattaatggcaatgaaatattttaaaattaaaactggttcgtgagatatacttattttgaacargatttatgaaacttatactaatataaggtattaagcataca

SEQ ID NO: 320379 - DNA, 323 bp, Homo sapiens
catttgttaggtgttaggtgttcactaggcaatacatattattccaggtgctttacctatatagttaatttatgctcatattaagtgtgcaggtgagacatatttttaatctccattttaaaagtaagaaaaccaagccacagagtttatttaacttttccaaggtatagtagagaacccaagcttcaaacctccatacactggacccagagataacactctaaatgtttgcactattttgtctcttcatacrtaatcttagtgtacaaaaagtttaactgtttataagtaaatgcattcacatatattgatgcataatcaaa

SEQ ID NO: 320380 - DNA, 550 bp, Homo sapiens
ggatattggcttgtagttttttgttttgttttgtttttaattcatatctttatccggttttggtatcaaggtaatgctggcctcatagaatgaatttatcaatattccattttcttcagtttttttggaatagtttgaataggataggtgttagttctttaaatgtttgctaaaatttagcagtgaagccatctttgacaacagtccttgacttttctttgatgcttgacttttaataactgctttggtctctttacttgttattgacctattcagggtttctatttttccaaggttccattttggtaagtttttcgtgtcaaataattcattcatttatcccaagttttttaatttcttggaatatagctgctcataatagtatctaatgrtattttgtgtggtatcactttaattttctcccttcttatttctgattttatttatttgggtttttttttctccttttttcttttagttactctacttagagatttgatgattttctttgtctttttaaaaaactaaccctttgttttaatgatgtttt

SEQ ID NO: 320381 - DNA, 612 bp, Homo sapiens
tatctttttttgtggtgagaacacttaaaacctacactcagcaattttcaagtatataatacaccattattaattatattcactaattaattatacaattaagctgttgaatttattctttctctttaactgaaagcttktatcctttgaccaacatttttttccaagctgcctctattccaggacctcccaatggtcctggcccctaggtaaccactattctaccctctttttttatgaatttgactactttagatttcctatataagtgagatcaggcagtatttgtctttctatgtgtggtttattttactcagcataatatcctccaggtacatccatgttgtcagaaatgacagctttgttgttattgttgttgttgtatctgactaagtagttcattttgcacgtaccacattttcttttttcattcattcactgatgagcaatgaagttgagtccatagcttggctagtgaaaataatgcttcagtgaacataggagtgcagatatcttttcaacacactaatgtcaaatcttttgtatcctttgaccaacatttctgggtattttggtaatacccagaagcggaatagctggatcataggataa

SEQ ID NO: 320382 - DNA, 612 bp, Homo sapiens
tatctttttttgtggtgagaacacttaaaacctacactcagcaattttcaagtatataatacaccattattaattatattcactaattaattatacaattaagctgttgaatttattctttctctttaactgaaagcttgtatcctttgaccaacatttttttccaagctgcctctattccaggacctcccaatggtcctggcccctaggtaaccactattctaccctctttttttatgaatttgactactttagatttcctatataagtgagatcaggcagtatttgtctttctatgtgtggtttattttactcagcataatatcctccaggtacatccatgttgtcagaaatgacagctttgttgttattgttgttgttgtatctgactaagtagttcattttgcacgtaccacattttcttttttcattcattcactgatgagcaatgaagttgagtccatagcttggctagtgaaaataatgcttcagtgaacataggagtgcagatatcttttcaacacactaatgtcaaatcttttgtatcctttgaccaacatttctgggtattttggtaatacccagaagyggaatagctggatcataggataa

SEQ ID NO: 320383 - DNA, 540 bp, Homo sapiens
tatatgtttatatattaaacatttctggatggattgttaatagtggcatatctccagggagtggtgccagaagggcaaaataagtgagatattttacatgttattttatgctattcattaaaatatatgtatattagtttctctttgggtatcagttttgctttttcattctacttgggttcatcactcagtgttatatttggcctcaacatgacccatattatttataaatttgttataaaatatagtgcatacaaaagtgcctgatacttactaaagaaatagaatagcattcaattatttcatctgtttatgtgcttctcctctaacttaatattttgcctctagcttcaacattctagacccagaccaccattctttggaattttatattgcatatcrcaccgattttataataatatgactttattacaaatatacagtttatgtatgtttgactctaagttttcctagctgatgcaaaagttattatactatgggtagtttttaaattttttggcgcacaatattatgtaagaa

SEQ ID NO: 320384 - DNA, 550 bp, Homo sapiens
ttcaagatgagatttgggtggggaaacagccaaatcatcacctataagcatttactttttatcttttttgattgaaaattatagcctcaataatgtgggatttttttctgtttttctttttcactgacatatctaaaatcctagtagagtgctcaacgaatattggttgaattactgatatcatcktctctgcttgaaggaaaaggatgagcagaagctgcaggactctagactaggtttaaaactgttctgttacttttgtagttgtttgatttgaggaagctatttgatcactctgatacctggttctgtatattaaatagagataatattgctgatttctcagaatatgtcattcatcctaaccactcaataaataatagttattgttactatcagttagcagagagtcgtgccaggacattagataactaaagctgaggtactgtaccaataaagaacattttgcttttccctcttcttgaaaacctcttgccctttgtgtctgcaaggccaaagtattcatctccttctggttattactcaaacc

SEQ ID NO: 320385 - DNA, 635 bp, Homo sapiens
atctcggctcactgcagcctctgcctctgggttcaagcaattctcccacctcagtctaccaagtagcggggattacaggtacatgccaccacacccggctaatttctgtaatttttagtagagacaggattttgcagtattggccaggctggtctcaaatttctggcctcaaatgatccacccagcytcagcctcccaaagtgctcccaaagggattacaggcatgagtcactgtgcccagccaggtagctctttatagcagtgtgaaaacaaactaataaaagccctttactttattttctaaagtttatataaatctgatttatttctaatttaaaataattattttaaatatattattatagtaaataattttgatttaaaatcatttcattatttctgatttaaaataatttcatactttaatattttatctgtgagcaaaattataggttttcaaacagcatctaacatgagaagaatctagatatttaatgttactttttggttctgtcttagaatttccatttatctgcctacatttcccatctgttcctgcatgctgtccacttttccattagagtcctcagcatattaatcacggttattttaaattcccaatctgataatttcaa

SEQ ID NO: 320386 - DNA, 583 bp, Homo sapiens
ctattcattcttcattaacatcggatatatgcctcacacagtggggttttttagcttatttatgtaagctgtattgtatagcttacatgacattcttcagggagccatgattcattgaaacatagctcctagatttgtttctcataagcaatcgtagatctatgacacccagctaacattgttctatagagaggtattttgctcctatcaaatatcattattgtatttactaagagawccagttatcataacattcacaaggagattagaaaatactctctatcttgtttctttgcccagagcgttcccagtcattgggagagaaattaatcaaagacaggcagctttaactttttctttcccaacttaatgtagactttgaatcttttatcatgaaattatgagcatagctgattagtatgatcctctttttatgaggaaatgtggatgaatttcatatttatttgtgatttggggactacttacataattctatatataagctctgagtctttctaaaaatagcttagtatcatacaaatgaatgtcatagtcataaggaaattcctggttaatttattta

SEQ ID NO: 320387 - DNA, 583 bp, Homo sapiens
ctattcattcttcattaacatcggatatatgcctcacacagtggggttttttagcttatttatgtaagctgtattgtatagcttacatgacattcttcagggagccatgattcattgaaacatagctcctagatttgtttctcataagcaatcgtagatctatgacacccagctaacattgttctatagagaggtattttgctcctatcaaatatcattattgtatttactaagagaaccagttatcataacattcacaaggagattagaaaatactctctatcttgtttctttgcccagagcgttcccagtcattgggagagaaattaatcaaagacaggcagctttaactttttctttcccaacttaatgtagactttgaatcttttatcatgaaattatgagcatagctgattagtatgatcctctttttatgaggaaatgtggatgaatttcatatttatttgtgatttggggactacttacataattctatatataagctctgagtctttctaaaaatagcttagtatcatrcaaatgaatgtcatagtcataaggaaattcctggttaatttattta

SEQ ID NO: 320388 - DNA, 601 bp, Homo sapiens
ggaaattcctggttaatttatttaaaataaaaaataatttttgcatacttcgtgggttaaggcaaggttatttttggacatgttgaataatcaaatatacmgagctatattgcctaaatatttacacataattatgtgtattaaatacacataatttttaagtcacaggtgtgaaagaaactatgatttctgcatgcaggctgtaatgaatatatttttatagtgaaataattttagtttattttatattttatttgttttagttatagttcagtgtatggttatttgatgtgttttagagaaaaaagaaacttccataaaggactatgcaatctgattgatttgtgtgactataggaaactttttctcctttctgaacagcaatccaccatctgcaaaaatatacataaacacgcatatttattcatttttatgtaacaaatgtttcttgagcatctgctttgtgacagagactgttagaaactggagaaaatgcagagaataaaactggagaaagcctcccactttcaagtttgtactatgttaagtcattgtgaggattaaacaatataatgtgtatgccttcaataaacattagctt

SEQ ID NO: 320389 - DNA, 513 bp, Homo sapiens
catttaccaatctctaacaaaaatacttcaagttattgaaaaagcaatgtgaatcaataaataatgttgaaagaactgatttgctatttaaagtaattactgtaatgataactagcacttcagaagggcctagaacaatatatgcctgattaacaaaaatggaaaagactgagtaaaactggcatttgtgagagttaggtaaaaaagaatgyttcaccctatcttggcagaagtgaaaatataacacttcaggtgaaaaggctggcaatatacaccaaaatgcacaatattatattaattctctgagaaattcaaataatttttaagtgtaaggaaattaaatatagatatgctctttaattaggagagataattaatcaaattatgacatataaatttaattctctaatattaacatcatgttaggaatatttatagaaaaggaaaagctgcttacaacatactggtgtttgaaagcagtagcatacctggcattattctgcctatgtaaat

SEQ ID NO: 320390 - DNA, 476 bp, Homo sapiens
tttttttttcagaagaaggtcaatttcactgattagaagtaacagtcagtagaaatctggtgtggccattgattcaacttcttatttrgacaagtgattatgttatctatgccacaaagataaagggagcagtttgtgattctaaattaaactttggagatgacatttggacagaattttagaggaagagaattagccatgtgacccttgggcagtgcattctgggaaacagaagcagatctggcttatgcaagagcagcaaagaagccagcgttgttggagtggaatgagctatggagtgagaggaggtcgcaggagacaagatcaggaggactttataagtaatatatgagctacatttaaaagtaagagtatatcagatggaaagtaaggagaacatatggaactaataataagattgtctatttactcaattctgaggtagaagctttacctacagaattgtctttggtctt

SEQ ID NO: 320391 - DNA, 562 bp, Homo sapiens
aagtaatatatgagctacatttaaaagtaagagtatatcagatggaaagtaaggagaacatatggaactaataataagattgtctatttactcaattctgaggtagaagctttacctacagaattgtctttggtctttacggcaggctggccaggtagatatttttgtgcccgtattacattggaggagactgaagctcaggaagcaagttgcttgtggttacacggtcatgcaactactcagagacagaactgagattagaactcagagttatgtgtttgtcctttagaaatcataatgtgtctttaaaatatccactgtcaaaaaatttatgttataaagtttaaaatttgagatagtttggtcartctgaccttatgatcgctgctggatgaagaaacaagttaacaaatcctacatattaaaaaattaaaattaaacttaaatcagaagtgagaaaggaattatcagacacaaacacagaaaatacggaacagtgagacttcaaatcccaaaggctaagaactttgtgttacagagatacattgagtgtattttacaa

SEQ ID NO: 320392 - DNA, 636 bp, Homo sapiens
ggaataatatagtatatagcctttttagattgacttctttcatttagtaatatgcatttacatttcctccgtgtttgttcatggcttgattcatcatcttttttagccctgttctatattccattgtctgaatataccacagttagtttatccattcacctattgaaggacatttaagttgcttctgagttttggcaattgtaagtaagtagatataaacattcgtgtgcagggttttgtatggacataagttccacttttataagattgttttcttattgttgagtttaaatctttattttatattttgtatgagtcctttatcagatatgtcttttgttaaaattttttcccagttggtggcttgtcttgttgtcttgacattgtttttcaaagaacacagtttttaattttaatgarttttagagtatcaattctctttaaaatggattgtgcctttgttatcacctctgaaaatgcatcaccatacccaataatatttacattttctcataagtagtcttctaggcattctgtagttttgtggtcacatttggcttctgattcattgggagttaatatttatgaagggtataaagtgtgtgtctagattttttaaattgtaagtttgtcgca

SEQ ID NO: 320393 - DNA, 636 bp, Homo sapiens
ggaataatatagtatatagcctttttagattgacttctttcatttagtaatatgcatttacatttcctccgtgtttgttcatggcttgattcatcatcttttttagccctgttctatattccattgtctgaatataccacagttagtttatccattcacctattgaaggacatttaagttgcttctgagttttggcaattgtaagtaagtagatataaacattcgtgtgcagggttttgtatggacataagttccacttttataagattgttttcttattgttgagtttaaatctttattttatattttgtatgagtcctttatcagatatgtcttttgttaaaattttttcccagttggtggcttgtcttgttgtcttgacattgtttttcaaagaacacagtttttaattttaatgaattttagagtatcaattctctttaaaatggattgtgcctttgttatcacctctgaaaatgcatcaccatacccaataatatttacattttctmataagtagtcttctaggcattctgtagttttgtggtcacatttggcttctgattcattgggagttaatatttatgaagggtataaagtgtgtgtctagattttttaaattgtaagtttgtcgca

SEQ ID NO: 320394 - DNA, 540 bp, Homo sapiens
agagcctatttgataagctatgcrgtttgaataatgaaagtagctgatgagtctgctaatcatcattcctcaaatgtttatgtgcgtatggatttcttagaagtctggttaaaatgtaaagtcagtttagtatatctgggatgtggcctgaggttctgcatttctaacaagcttccaagtgatgctgatgaagctgacctatgcaccacactataagtaaagtttttaatatgatgagttcctgatttgaagctttcttatgctttgaggctggattctatcctcttaggaagaaaagtccaatgttttgggttaaaacagaaaaagaatgcctcagcatcataattcacgttttacatccctcattgccttgtctgcttggaattctgatctgagtcattgactcggacatctttctgtgttttgtactcgttactttgcctggtccttcctctgactgcctttgccttgtagcactgtttcttgaaagtcacccaatgatcaccaggatcaaaagctgctgggacggttgttagaata

SEQ ID NO: 320395 - DNA, 540 bp, Homo sapiens
agagcctatttgataagctatgcagtttgaataatgaaagtagctgatgagtctgctaatcatcattcctcaaatgtttatgtgcgtatggatttcttagaagtctggttaaaatgtaaagtcagtttagtatatctgggatgtggcctgagrttctgcatttctaacaagcttccaagtgatgctgatgaagctgacctatgcaccacactataagtaaagtttttaatatgatgagttcctgatttgaagctttcttatgctttgaggctggattctatcctcttaggaagaaaagtccaatgttttgggttaaaacagaaaaagaatgcctcagcatcataattcacgttttacatccctcattgccttgtctgcttggaattctgatctgagtcattgactcggacatctttctgtgttttgtactcgttactttgcctggtccttcctctgactgcctttgccttgtagcactgtttcttgaaagtcacccaatgatcaccaggatcaaaagctgctgggacggttgttagaata

SEQ ID NO: 320396 - DNA, 540 bp, Homo sapiens
agagcctatttgataagctatgcagtttgaataatgaaagtagctgatgagtctgctaatcatcattcctcaaatgtttatgtgcgtatggatttcttagaagtctggttaaaatgtaaagtcagtttagtatatctgggatgtggcctgaggttctgcatttctaacaagcttccaagtgatgctgatgaagctgacctatgcaccacactataagtaaagtttttaatatgatgagttcctgatttgaagctttcttatgctttgaggctggattctatcctcttaggaagaaaagtccaatgttttgggttaaaacagaaaaagaatgcctcagcatcataattcacgttttacatccctcattgccttgtctgcttggaattctgatctgagtcattgactcggacatctttctgtgttttgtactcgttactttgcctggtccttcctctgactgcctttgccttgtagcactgtttcttgaaagtcacccartgatcaccaggatcaaaagctgctgggacggttgttagaata

SEQ ID NO: 320397 - DNA, 442 bp, Homo sapiens
tctctattgcttttgtgtcttcaattttatttattttgccttaaattttattgcttattttattctgtttgctttctgattaaattaatcttgtttctctagtttttctagggtggaaacagattattgattttagatctttcttgttttcaaatatatgcacttcatamcgttatctctcaacactattttctgtatgcaacacattttgaagagttgtaagcttattttcatagagtttaaaatatttttaattttagattatatttttctcggactcatattatttacaagttttttttgttataatctccaaatacatgtgtattccacagctatctttctttaatgaactgagtacatactttctatgacttctgtcttttaaatttcttaatgtatgttttatgctccaggaaatctactatcttggtgaatgttt

SEQ ID NO: 320398 - DNA, 524 bp, Homo sapiens
ttcttttagttttgggatccgctttttcttttcctagtttccagaggtagaaaattaggctatctatatatgatcttttttttaatatagrgatttatagtattaaattttcttctacacacttctttcactgcatcccttaggttttgttatgctgtatttttgttttcacttctgagagtattttacagcttcccttttgatttcatctttgacccactggttgtttaagaatgtgttgtgtaatttctacatttgtgaatttgctaggttttcttctgtattagtccgttctcacattgctataaagaactacctgagactgggcaatttataaagaaaagatgtttaactgactcacaattccacaggttgtttaggatataaggctaggaggtctcaggaaacttacaatcatagtggaagggtgaaggggaaacaagcacatcttattatggtgaaacaggataaagaaaatgaatggggaagtgatacacactcaaacaaccagatcttatgagaac

SEQ ID NO: 320399 - DNA, 524 bp, Homo sapiens
ttcttttagttttgggatccgctttttcttttcctagtttccagaggtagaaaattaggctatctatatatgatcttttttttaatatagasatttatagtattaaattttcttctacacacttctttcactgcatcccttaggttttgttatgctgtatttttgttttcacttctgagagtattttacagcttcccttttgatttcatctttgacccactggttgtttaagaatgtgttgtgtaatttctacatttgtgaatttgctaggttttcttctgtattagtccgttctcacattgctataaagaactacctgagactgggcaatttataaagaaaagatgtttaactgactcacaattccacaggttgtttaggatataaggctaggaggtctcaggaaacttacaatcatagtggaagggtgaaggggaaacaagcacatcttattatggtgaaacaggataaagaaaatgaatggggaagtgatacacactcaaacaaccagatcttatgagaac

SEQ ID NO: 320400 - DNA, 626 bp, Homo sapiens
attttaaatgtgcttctaaaataaattgtaacccaaagaaaatctaatattgcaaaaatagaaagtagttagagctgacataaaatactgaagtatttcagatgaagtaaagtaatagaatggcaatttgtaatgcaataaatactgaacattaatgggagaaatatttaactaaaatatttttaatgcctatatacctcatgcatttacaattgaaaagataaatgataaagtataaaatgtttgtaacatatatatgacaaacatggtgaacccttaaaaatttatgaagaaaaatgcaaaaaagtcagtaaaaacataggcaaatactatgaacagataaaatttaaaaaatcatatataaatgttttaaatataggaaaagtctttgtaggggagtatactctcaacttgagccctcaaacttgttgtacattattgtagagtttgttgatttatttcataaatattgcataaaacactgggcaactttcttagaagtggaagttcaagccattggcaacatccttaaatrtggttctatcttcattatgtctaagaaaattatttcaagtgtttgctataggattaccatcatgcttagttttaatactcattaagttttt

SEQ ID NO: 320401 - DNA, 498 bp, Homo sapiens
atttgcccaaactactgcaacttacaccccatcaaccaaaactcagtcacaacacagctagcaaggctgggaaatgccattatcttgaatgctcctgcacctggctgaaaatcagagttctattaccaaagaataaggggagasaggggcaggggtgacaagcagaactgggctaggacgtgctctcctttgggaactcttttccccatggttcactttgctcattcccccttggacctcatttcttccctcactgaggctacatagaggatggagtctgggctgcctctctgctgccctggaaggctaagcaaggctggcagggctgacagcaggaggtctgggggcagtggaggctacggccgtggctgaggctttcacgcaaggacatctggacccatcaggaccccccctcctaatcttcatccctatgtgatttcagtaagtcactcaacctctgggagccgtagctcctcatccgaagaaaaggggataaaa

SEQ ID NO: 320402 - DNA, 485 bp, Homo sapiens
actgcaacttacaccccatcaaccaaaactcagtcacaacacagctagcaaggctgggaaatgccattatcttgaatgctcctgcacctggctgaaaatcagagttctattaccaaagaataaggggagacaggggcaggggtgacaagcagaactgggctaggacgtgctctcctttgggaactcttttccccatggttcactttgctcattcccccttggacctcatttcttccctcactgaggctacatagaggatggagtctgggctgcctctctgctgccctggaaggctaagcaaggctggcagggctgacagcaggaggtctgggggcagtggaggctacggccgyggctgaggctttcacgcaaggacatctggacccatcaggaccccccctcctaatcttcatccctatgtgatttcagtaagtcactcaacctctgggagccgtagctcctcatccgaagaaaaggggataaaa

SEQ ID NO: 320403 - DNA, 550 bp, Homo sapiens
gaaataaacattcaataaaaggaaatctgccagaaaagagaactaaaagacaaggaggaaaaagaaaacagatgagaggtatattagttaggattctccagagatacccaataggataaagagagagagagagagagagacaggagaggggatttattagagggattggctcatgcagttacagaggctgagaaatcccactcaggccatccgcaagctggagaccctgggatgttggtatcgtggttcagtccaagtccaaaggcctcagaaccagggaggctgatggtgcaactctcagcctgaggccaaaggcctgagaaccagggtgaggtgggggagtggaggtgctgktttaagtcctggagtccaaaggccagggagcctggaagtgttgtccaaggacagaagaggaagagtgcatcccagctccagaaggcagctccacacactcaccttctgtctgtttttgttctctctgacccacagcagactgagtggtgcctacccacatcaagggcagatctcccacttcgtccactcagactcc

SEQ ID NO: 320404 - DNA, 500 bp, Homo sapiens
gtaagacacggctgccgcgacccttgcgacccccaccccgccgcgggagggcgtggggggagagaagggcgcggccggagacctcctggcggggccgcgcgctccaagtgctgcgaccacgcgccaccgcccgctcctggcgtccccgggcaggtggcagaagcgcgtggagtgtgcaccccagaggggagaggctgcgctggggtctccgacccgcaggcggggccccaaagagccggaaactttgcggccaatgttggagcccgcagcggcggccggaatggctctgccggcttcggagtaggkctcccgtcccggcgccccgatttctgctccttctctccgtcgtgtgcatccgtccgcgagcccacttccccgagaggaatggggtcgggtcagaatgagctctagggcctcggcggcgaggatcaaactcccgggcgtcgaagtcagctgagccggggaaagaggacgagccgggctagatatacctgcagccc

SEQ ID NO: 320405 - DNA, 581 bp, Homo sapiens
cttattattattatccttagaatttgtgctggggtgaagccagccctcccattccagctgtgagaggcccaatgctctgtgacccagcagggccactaggctgtgagcctgttgagcacagggtgagtcttcactcagctccgcacctccatggctggtacaatacctggcttgtagcaggtgctcagtaattttggggccaaatagcttgtcagggacatggctgatgtgcggtcccacactgcagttctcagacctcagaatcccttgggacgcttggtaaaaatgtaaaaccccagcttctaccctcagagattctgactcaatattagcagaaatggagtggggccagataacttgcattgtttgaaaagcaccccatttgagaaacactcctggggaagctcaatgtaacrtacccccaaagcctgggattgagggacaagagggagagccaggagtggctactcccagctgtggcctgcctgcgtgaccctcttctgccttcaggactgggaggggatggtgggatctgcgctgtctggtagaaatactgaagaggggtagagcctggcagggag

SEQ ID NO: 320406 - DNA, 564 bp, Homo sapiens
ttaatcgcatgagctacctgctcctccctccacaattttgaaaactgacatctgaagaagattgagtctcctcattcatgaccataatttatcatcccatatatttagcccccctttgatttctttcataaacatattatagttttcagcatacagattctacacatattttgttagacatatacctaagtattttatggtttggggtgctatttattacacataatattgtcttgaaaatatcaatatccatttgctcattgctggtatatagaaatatgattgatttttgtgtatttaccttgtatcctgcaaccttgcaaagctcgcttgttttagttgctttttttttttgtacaattcttttggattttctaagtcgaccataatgccatctaaaaatagagaaaattttactttttcctttgyaatatgtatttttcataaaaagttatttttcttgtcttatttcagtggatagaacttccagtacaatgttgaataggagtggtgaggggaaatacattttccttgttcagattaggaggaaaagagttaatcttt

SEQ ID NO: 320407 - DNA, 650 bp, Homo sapiens
ggaccacagtcacctcccctggccgggctggcgcctcatccccaaacccagtgcacagagctctcaggagggagaaggggcagtgcagtccttgaagagtgtgtccccacgcctgcctctgctcaccttgcagcttcacctgcagaggctggaacagcaggagtgtggaggtgacggcatcatttccaagcacaggactgctgggcccacgttagctctcgatgagcttgctgatgagttaatgcaaagcagggaggtgtccccctggtgaggactgcccgaggccactaccyggctgctcattgagccctctggagaggaaactctgtttttcctcagcctgaggcccggcttctttcctgggagggttgacagcaaaggcttcaggctgctccctaagcctgaggcctccagccacatacaaggtcatggtctctgggaagcttaggtgccgctcgggtgcagggggtggggtgtgctttaaaagtgctctcccacctccaatctctctgataaaagccctccagcaaagccagcaagagggagggataacagtaaactctgccttcagccactattggagaacttccatttaaatgacacgcccccaagcatttatgcaatgctcagggctttctttgcaaaattca

SEQ ID NO: 320408 - DNA, 513 bp, Homo sapiens
tgtttataataataatcactattattcctgaagggaggctattgcacccttccaattattcagacgatttgctgactgtctggataattccgaagcctttaacccctccctaacgttagaggcggtaactttcatccgtttactttttccaggtgcggaggcgaagcagccttattcagaaaatcgaattcaaacaggacctcaagctgccggctgttgcttctaccaactgccccattattaacgccagacggcgctgtgtcctcactggctctttaaccaccacgtcgggctcacagaaggctcaggtttcctccagtatagttcaggggatggtgaacgcttcccaacaagcctgcaacaggcgcatttctttctgcttttggtgcgtgtgtgtagggaagtgtcccawcttttaactagtcttgcggagacctggcctggtgtttgcaaatctgtttcctctattatcgatccgatctctggattgctttttctctgacacttgaaaca

SEQ ID NO: 320409 - DNA, 617 bp, Homo sapiens
atcctgctctcacgttgacttgtggccaatggcactattcttcactccaccttttaaaaaaattattatcattgttaagttcaccatgtcagcctcatgamgcctgaggctaggcactcatccctatgccgcagtgtggtacagccagtaaaaattataattgtgatgactacacagcaagatgggcaagtgcttcgagtgagcttacacaaatagaaagtatattgtgtgggggactattttaaaatatttatttatgtggacaaagactggagtgtattaagcaaaatattgtaaaaatggttttgccatggcttttctcttttttcaaaaacaaattctcattttggttaaaacaaagttttaagcaacctgttgagatctaactcttcaaggatgtctatcagttagctcctcactagctgcagagaaggcaatggagtggttgagtaaactaggggacagatgcacacagatgtctaacacaaaaaaattaaatgatgccatgggactctgcaaggctgtgacagaagcccctggatttccaggaacacccctggaatgcagctcccaatcctacggtgttgttcccagttaaccaggcagagtggggctct

SEQ ID NO: 320410 - DNA, 603 bp, Homo sapiens
gggactgtcctctgaggaggcagtgctggagcagaatcttggcagacaggagttattaattatgactaggaaaataaaattgaagatctcaatgaatcctgctctcacgttgacttgtggccaatggcactattcttcactccaccttttaaaaaaattattatcattgttaagttcaccatgtcagcctcatgaagcctgaggctaggcactcatccctatgccgcagtgtggtacagccagtaaaaattataattgtgatgactacacagcaagatgggcaagtgcttcgagtgagcttacacaaatagaaagtrtattgtgtgggggactattttaaaatatttatttatgtggacaaagactggagtgtattaagcaaaatattgtaaaaatggttttgccatggcttttctcttttttcaaaaacaaattctcattttggttaaaacaaagttttaagcaacctgttgagatctaactcttcaaggatgtctatcagttagctcctcactagctgcagagaaggcaatggagtggttgagtaaactaggggacagatgcacacagatgtctaacacaaaaaaattaaatgatgccatg

SEQ ID NO: 320411 - DNA, 629 bp, Homo sapiens
gcttggccaaccttcttgctttagagaagcctaaactttggggagataaaaatgtacattccttaaaagagtccaccctgaacgaacacaaaacctagataaactatgagagcagttgtctatttaaaaaaattattaaaaatatgcttttttcagaaatgctaattgaatacctgctgttcccaatactattgtagaccctgggaatacacaggctgagctggtgaggagtctgcctgcctggagtttagagaagttcaaggacagttaagttgacaatggactagagctactttgcrtaagaggtgcgctgaaggcaggattttgtcctgccctcaattccaggagatatttggtaaagtctggagacatttttaatgtcacagttggatcggaggcgctcttgtatctagtgggtagaggccagggatgccactaaacaccctcaaatgcacaggtcagctcccacgaaaaacaatgattcagtcccaaatgtcaaaagcactgcatttcggaaaaccgtcctagtggtagagaaagaagatgggagaaggactttttgcaggaaaattctcttactgtaatgtttcttactccaacacaaaacacatacacacacatatatacat

SEQ ID NO: 320412 - DNA, 580 bp, Homo sapiens
aggatttcacaggtactccatcaatatgtactgttattatatataaactaaaaataaaatccatatacaacagttactgcatattctgaaagtataatatttaagaagtttggctaagaaactggaaaatacaatcccaaatcttgtcacagtttaaaatgttttcaattactatgtgtggcatcgtacaatggaaataacacaggcgttagacacagccacatttgggttcaaatctcatttctgcccctaacaagctttgtgatcttccatgaataccttcatttccaagaacttcagttcccactcttaaaagtgtattacccataggagcagtactatctattgaaatcattcaggttgaagagctggcattggcagacgtgtcatggatggtagctgttattagatgattacttcctttattgtcattgtgagaattcaactaagtcagtaggtgcatgaaaaagaaagatagtttacagaggtcagttacgtcttacctrtctggaattttactgtctctaatctcactgtcagaacacagaacatagaaacagaaagaagcaaacaattgttc

SEQ ID NO: 320413 - DNA, 554 bp, Homo sapiens
gaacccaggcagccccagctgttgcatccatcccagcccagtcaccagggtcatacagcagacaagacatggagaagagctgacagactctgcccacagccagagccagtcacaagtggggcaatgtcacactatcacagccactccaactgagttcctgattatggaggaactatcactactaggccgatccacaaccctgacaacatgacaaaatggctctagttttaatgccactgagttttggggtagtttgttacacagcagtagataattagaacatcttgtgtctcgtctataaagggctcccaggacaatcttatcatctagaaaccctgrtaccatttaagcttcctctttctcccacccccactgtaactcttctagctgctccttttgatgtctctcttagaccagtggggaatgatgaaagcaagaaggatctgctgagggtctgaaaaagaggacaggcacaacagggagcatgtgtcaaaatgctttcttcttggtaggcaaaaatggtacatgagagcctcttggatggagagaccaag

SEQ ID NO: 320414 - DNA, 562 bp, Homo sapiens
tgggtttctacttcagtagagtcctgcatggcaggaacttatgaaaagccctttccyttgtaaattcatggcccttgagggagctaaacctgatgattccaagaatatgttcaggcacgtagaacactaaattttcaaaccagaagaccctggtggggacagcacaatgaaaacaattctgaattatacaaatcacgatcatagattacaaaggtaaagctgctagttacctctttggttttctttgcatggttgaattatttagaaattccttcagccagtcaaactatgttgattaggtgataactaaattgttttctcgtttataattccagctaagatttcagcttgatgttattagttatcatgttaatgataacagataatgtcagttatcatgggcaaatgtgctcttcttccttccctccctccctccctcccttgcttccttccttccttccttcctttcttccttctttccctccttgcttcctttcttccttcttccttctccccctctctgcctccctccctccctcccttctttcttctttcctctctt

SEQ ID NO: 320415 - DNA, 491 bp, Homo sapiens
tccctcacagtatcacacagaatagtttcaccactctgattgtgcttcacctgtttatccctctgtcttccctctcaaactcctggcaatcattgacrtttttactttctctataatttttcctttttcaaaatgtactataattggaatcaaatggtatgtaatctcttcaaagtggcttctttcactaaacaatatgcatttacattcttccatgtctgtgtgtgtcttgatagctcatttctttttataactgaataatattccataacacggatgctccacagttgatttatttgcccattgaagtacatcttagtttcttgcagtttttgatggtcttgagtaaagcgtctataaacatttatgtgcatatttttgtgtggacaaaagtttctaattcaattggataaatattagaagcacaattgctggaccatatggcaagactgtgcttagctttgtgagaaaactgccaaactgtcttccaa

SEQ ID NO: 320416 - DNA, 610 bp, Homo sapiens
atggcaagactgtgcttagctttgtgagaaaactgccaaactgtcttccaaagtagctgttctttctgcattctcatagaaatgaaggagaagtgtttctgttgctccacaaccttcccagaatttggtgtattcagtgttttgaattttaacatcttaattctaatacrtgttccatagtaatatcactgttcatttaaattgcatctccctaaagataaatgatgttgaacaagttttcatatgcttatttgccataagtatatcttctttggagaggtgtctgttcagatcttttacccatttttagattgtgctgtttatttcttttcttgtttaaaagtttaaaagttgtctgtatattttggattaggtacatgtttcgcaaagtttttctcttaatctgtggtttgttttttttattttgataacactatcttttgcaaagcagagattcttaactttaataaagtccagcttatcaatttgtcttcttattgattgtgcatttagtgctatatcagaaaatgaattgccaaaactaaagtcacctagattttctcttgtgttaccttcttgaagtgttataatgattttttccacaagaaaa

SEQ ID NO: 320417 - DNA, 610 bp, Homo sapiens
atggcaagactgtgcttagctttgtgagaaaactgccaaactgtcttccaaagtagctgttctttctgcattctcatagaaatgaaggagaagtgtttctgttgctccacaaccttcccagaatttggtgtattcagtgttttgaattttaacatcttaattctaatacgtgttccatagtaatatcactgttcatttaaattgcatctccctaaagataaatgatgttgaacaagttttcatatgcttatttgccataagtatatcttctttggagaggtgtctgttcagatcttttacccatttttagattgtgctgtttatttcttttcttgtttaaaagtttaaaagttgtctgtatattttggattaggtacatgtttcrcaaagtttttctcttaatctgtggtttgttttttttattttgataacactatcttttgcaaagcagagattcttaactttaataaagtccagcttatcaatttgtcttcttattgattgtgcatttagtgctatatcagaaaatgaattgccaaaactaaagtcacctagattttctcttgtgttaccttcttgaagtgttataatgattttttccacaagaaaa

SEQ ID NO: 320418 - DNA, 559 bp, Homo sapiens
cattgtgggatgttaagagggactgtctttgggagactgaggtgggtggatcacttgatatcaggagttcgagagtagcctkgccaatgtggtaaaacaccgtctctaccaaaaatatgtaaactagctgggcatggtggcagatatgtgtaatcccagctactcaggaggctgaggcaggagaattgcttgaaccccggaggtgaaggttgcagtgagcctagatctcaccactgcactccagcctgggtgacagagtgaatgtttcagaaaaacaagaataataaaaaaaaagagtgtcttcaagctgttcattgacacatgaaggatgtgatatgacaccaactggaaaggctggcctctgaggttgagaaagccaaatgcttcttccactggtgtcttttctactcttagatataggttattattgtgttatgggatagaaagacttcctctgtctcatgtagttcagtctgatcccttcatgccaatggattgataattctgccataggttctaagtctctggggttttcaaatttattctattctatttttaa

SEQ ID NO: 320419 - DNA, 559 bp, Homo sapiens
cattgtgggatgttaagagggactgtctttgggagactgaggtgggtggatcacttgatatcaggagttcgagagtagccttgccaatgtggtaaaacaccgtctctaccaaaaatatgtaaactagctgggcatggtggcagatatgtgtaatcccagctactcaggaggctgaggcaggagaattgcttgaacccyggaggtgaaggttgcagtgagcctagatctcaccactgcactccagcctgggtgacagagtgaatgtttcagaaaaacaagaataataaaaaaaaagagtgtcttcaagctgttcattgacacatgaaggatgtgatatgacaccaactggaaaggctggcctctgaggttgagaaagccaaatgcttcttccactggtgtcttttctactcttagatataggttattattgtgttatgggatagaaagacttcctctgtctcatgtagttcagtctgatcccttcatgccaatggattgataattctgccataggttctaagtctctggggttttcaaatttattctattctatttttaa

SEQ ID NO: 320420 - DNA, 601 bp, Homo sapiens
caaacgtgactcttatgggaaagccttcaaatcttattctctattcttgaagatgttggaatttctgtgctgtactctttttaagggaaaaaaatgtgtgtaacctttttgcttatgtctccttctattgattctgggtcccttggtactctttcgagacctgtttctcttccatctctctcccctctgtttcttgarctaaaggtttgtgttgagcactgctccatttcctcttacatcactaccacagtagtttcctgagaatgggatacactttgaagacagcgatgcttcttctttcttgcttgagttaaatgatgtttatttttcaacctagggaatatttcactttctttcttattagagattctgataatttgaaagacagtaaaatctggaaacagcatctgcaagtgccagcactggtgtatattaagcagcacaggtaaagatgggcttggaccctagagaactgtgcatactggatctgcccttcagccttccatgccttcccctcttcctctttctctctctcaaaaaataaaacaaccacatagctcactctttttgatccccttttttgtgctgggcaagggtttgg

SEQ ID NO: 320421 - DNA, 487 bp, Homo sapiens
ccagcactggtgtatattaagcagcacaggtaaagatgggcttggaccctagagaactgtgcatactggatctgcccttcagccttccatgccttcccctcttcctctttctctctctcaaaaaataaaacaaccacatagctcactctttttgatccccttttttgtgctrggcaagggtttggggaactctagagcagggattagcaaactttttttaaacagccagataataaatattttaggctgtgctatttgtggggcaaaattaaagctattgtgcaggtacttgtataaacacttaaaatgtaaccatttcaaaatgtaaaactcattcttagctcttaggtcataaaccaataggcagctggccgggtttggctcttggagtttgctgacccttactcttgagaactggataagattttgattctcaaggaataggaggagttctcagtataaggagagcagcaaagaacagtttgaa

SEQ ID NO: 320422 - DNA, 578 bp, Homo sapiens
gtacagttgatgcagacatgacacagtatttcaaataccataaaaattactaaagtttgggaacttctgctttaggcaatggctttgaatttaccacgtccaacaatttatcaccatttaagaccctcacactctgctttcttcttcatctccattaaccactttattacttggcagttttgtgtagctatcttgagtgagtgctgctggcaaggcagaatgaacctactctgaatttttgttgagatttaggactgttaggactgttttaggtattaaacaggatacaaattgaagacatttaatgtgcggttttawggatttaacatgttaagtgggacatcaggacttgccttcataaaataattaatttgcataatgtgctatgtatataggaatataaaggttataaaatgaagctagggcttggatgaatattcaagattctgggatgacctgggccagaaagaagagttaaaaggattagaaaagtctagagaaattttgaaggggagtcaatttaacactcaataagtgcaaattctaaataaggcattgcacctacaggtgggagtaaa

SEQ ID NO: 320423 - DNA, 506 bp, Homo sapiens
cctctgaacctgtgaatgttaccttatatggcaaacatgacttttcagaagtgatttagttaaaggtctttagatgggtagattatcctggattttctgggtgggctcaatgtaatcagaaggatcatcaggagacgcaaagtcagaggaggagaagaacargtgatgattagagtgatctactttgaaaatgaagaaggggaccatagccagtgagcaaaggtggcccctacaggctaaaatgtttccttcctctagaaggactcacactctgacaccttgactttagctcagtgagactgattttggacttccgacctccagaactgcaaaagaataaatatgtattattttaagccactaagtttatggtaatttgttatagcaaaaataggaaactaatatagtgtacatcaataaaaatgagggacagggttctgtgaactcttataataaatgttcccctagcctagaagaagtaagaatgaaaggcatagtagttaagc

SEQ ID NO: 320424 - DNA, 514 bp, Homo sapiens
aaaattattggctttgtataggataccccttaaacattggaagtttcctactgtctcttaaagatttcttaggaaatacattgctttgctttctgttggagctagctgtcacatagcatgggtaagttaaagcatatctagcaaatgtctggtgcaaagtaagcactcacataatacttctggaatgaaggactaaattgctgaatagaatgaaagtcaagcagactgtgttagtaraagacatggtgctagtcttggaggctttgttaatgccagaattccactaacgactccaaactgaggttcaccttgatggaatattgcagtgctatttacatgatcatcaggatcaaatatgaagtgaaaagaacaaacaactaaaatagaatgtacactatgattacgattatgcataaataaaatacttttaagagatgagccctggaaggcaaacacaatattgagaagagttggtttatttagcctggtgatattgtggataacttttttttat

SEQ ID NO: 320425 - DNA, 611 bp, Homo sapiens
cccatagaagaaatctcactattctatgataggtcttgaaattcttagacagttcttgtccagtcaggtgtttgcataagttatagaaatgtatgttcccataactgtattgaagggactcccctcacccactcagagtttatctctatttgtctccttctaaagacttaggcctttctcttttgtagccctaaatataaagtttatagtagaatgcgtcatcctctggcaaactgaagagttccagcrtcagccttgcactttagcaagcctgtggctatggaaaggaaagaagactaagatggcagatagaatttcagctctagatgtacaacttggagccatgctgaaagataggtctaagataatcatgattctcacattccctagaggtgtagttgccttaacacttggaacctcactttcctaatttgtaaaacaggatggtaataaaattctgtacttcacggagaataaaatgaagattgcgccacgtttgggtcatagtaaatgttcaataaagtagctagtagcaggcggaggagtaataatgctcatttgactccatgggtctacttgcttttctcttgttattttacaagagttaaata

SEQ ID NO: 320426 - DNA, 611 bp, Homo sapiens
cccatagaagaaatctcactattctatgataggtcttgaaattcttagacagttcttgtccagtcaggtgtttgcataagttatagaaatgtatgttcccataactgtattgaagggactcccctcacccactcagagtttatctctatttgtctccttctaaagacttaggcctttctcttttgtagccctaaatataaagtttatagtagaatgcgtcatcctctggcaaactgaagagttccagcgtcagccttgcactttagcaagcctgtggctatggaaaggaaagaagactaagatggcagatagaatttcagctctagatgtacaacttggagccatgctgaaagataggtctaagataatcatgattctcacattccctagaggtgtagttgccttaacacttggaacctcactttcctaatttgtaaaacaggatggtaatamaattctgtacttcacggagaataaaatgaagattgcgccacgtttgggtcatagtaaatgttcaataaagtagctagtagcaggcggaggagtaataatgctcatttgactccatgggtctacttgcttttctcttgttattttacaagagttaaata

SEQ ID NO: 320427 - DNA, 647 bp, Homo sapiens
gtcacttccagctttgcaattacaggaaggggatctcaccataaatcccccaagttgatcacagcttggagtagaggaaacctcactgagatgttcaaagatttttaaagatgctgctgaaagaggctttttgtttactttaaagagtagtaaaactgtccctcacatcttgattttgagtctctgggtactgtcgaccataaggaaatagacaagtggattttctgcttcaaaatggaggatattatttaactcccttccataattaatccaccacctattatgtgcccagtgtggttaggcattgtggagaatgtaacagatttcctgctttcaaggtgttttaaacttgagggaaaagattaaaaatatatgatagcaytccacaatcattcattcaattgttgaagacctagtatgtgccatactcaatgctaggcacaggacagatgtagaaatgggtagatggattcatagctatgggtagataaaattagtggtgtgttggtaagcttgtaacaatgggttcacaggggaaaaaaatccctgttttgttatatttgttgtggtgtaaatactcccaacatggcccatttcaagctaccaaagtagcatcagtgaacttgggagttggaaagagattgcac

SEQ ID NO: 320428 - DNA, 603 bp, Homo sapiens
ctcacttcgtctgcacaacctaatgaggtggttgctccattgagcccattttacagatcaggaaaccaagtcaccacaagcttagataattttctgtactccttgttctgggatcacacagctagtcatgacagaaagaagatttgatcccaggcagtttggctctgagcctaccctcttaacctctctgttatttcttttcctttcttttatttttctttcattttaaattcatgcccaatcttttatctatatagtactcttattcttttctactccccaattattttgaagcaaatcccaagcacatgtaattccatccataaataattcagcatgtaactgtaaaatataaggactcattaaacacacacatacatcccattattgcattcaaagttaacaataatttttaatatcatccaatatccagtcagtggtcacatttccccaattatctcataaacacagcataaaaataaataaccatttgttcaaatgaggatccatgaaacatccaaatattgcatttgattgctctttaagtctcttaaaactcctctctttttttatcwtgcagtgtatttgtggaagaaatcatat

SEQ ID NO: 320429 - DNA, 566 bp, Homo sapiens
caatcttttatctatatagtactcttattcttttctactccccaattattttgaagcaaatcccaagcacatgtaattccatccataaataattcagcatgtaactgtaaaatataaggactcattaaacacacacatacatcccattattgcattcaaagttaacaataatttttaatatcatccaatatccagtcagtggtcacatttccccaattatctcataaacacagcataaaaataaataaccatttgttcaaatgaggatccatgaaacatccaaatattgcatttgattgctctttaagtctcttaaaactcctctctttttttatcatgcagtgtatttgtggaagaaatcatattgtctgtcctatgatgttttctacaatttggattttgtagtttatatgcccacggtgtctttgaacacgtttctctgatctctgtaattctagtagattggttgttatttctagaggcttgattcgaattcaatataaawttttttttttgtcaaacttacttctcaggaaaaatcgtatttttctaatagctggcactta

SEQ ID NO: 320430 - DNA, 555 bp, Homo sapiens
taacatatatgaatgtcatgcctcctatggtccatctctatggttgtcactggggtttcagggaagtgggtcctagagggaaaggagttctgatcaccatcattagaccaagatgtggaatgcaattctaaaatggagcctcaagtaatatatttccatgcacccatgaggggtaaactttgtcagcctcagacaagagtctcatttactcattcatccattcaacaaatcataaaatagatgtaaggtataaaagtggacacmatagctggggttggggagggcaaagatgagtaagttattactaattattatgagctgaaacatttttctaggagagtcagaagtcttcagtgccttctaaggaagcatgaaacaaactgaaactcagacacccattgctcagcctcctgccaattcaaaaacaagctttctgataacatgtctgtaaaactggttatttcagggtgtcaaattcagaaactaggagggggccaggcacgtgcctcagtgatggcaatcaaccaggctgaacaacagacctgcattagaatc

SEQ ID NO: 320431 - DNA, 523 bp, Homo sapiens
gaaataagccaatacggaggactcagatcagggactaagatatggatagtgctttagagaggggggtctttgctgggccccagtccctcatgttttaatcaggaaaggcgggtggcaggtcacagagattaggtttaaccttcctgatatacatcakatctcttgccctttcaaccttctagcagtgtgaggaggcattctttctgaaacccataaattagagaccaaggtttctttgcaaagtataatgacaagatgacagaatccccatgaagcctaattcttttccctagacacgagatttttatttattttctttggaacgttaagctacgatcagtgggtcaatgggagtactgctttttttaaaaaaaaaaagttaaaaaaatgctttggtcatgaatgcattctgctaagatttaagataaaaaagttaaaaaaaagcaaaggactcttcctcctttacatgcttgtttcaaaatccactaagtaagttatttaggttctgaaagttgtatacaat

SEQ ID NO: 320432 - DNA, 538 bp, Homo sapiens
aacaggcttctggtgagttctactcacttttaaagaacaattccaaacaaacacaaaaatttccagagaagaataaaagaaaaaaaccctctccagcatattttatgagactagtaagttgtgattccaaaaccagtcaaagaaaatatgatagagaaaaacacaggcctatctcactaatgaaaaacaaatatactaaacaaaatattaccaaacagaatctagttatgcataaaatagataattcatcaagacaagtcggatttatccctggaattcaagcttgaattaacatctggaaatcaaggaattattcaccatgttaataaattaaaggagagaaactacatgwtcatcttattagatgcaggaaataagtgttcaatatgtgttactgtccatttagttaaaaagtgctcaggaaaaaagaggaacttcttaatatgacaaaggatgtattttaaaaaaaattaagacaagcattttattgaatgttgaagtgacaaatgacttctatttaagatcacaaagaaggtaa

SEQ ID NO: 320433 - DNA, 561 bp, Homo sapiens
tcaaacgcacttgtgttgtaagttgagactcaaggaaatatttatttatttaaaatatttttgtccataagttacacaaacagcaatattttatttcactgtgttttaaaacagccctgtagacagaaatcctacagaccccgtctatgatcatgcttacatctgtagacagatttaattatcttttctttaaagtcagatacctactgacaattttacatatgaacctagttcacttggaagtgggcgggagaaaccaactatagaaaatcatacaatctttttgcattatattcattattttctccgtaaatttgrccaaaagcacagcaactctcctgatggcagatacggaagtgggaaccagtggcagacagagctgtatgggtattttcaaggagacccaagcagggcagatgcaggtggctggatgatgacatggttactactgggagagattggaatcatctcttacaagtggtcccattttcaaaatcttcaaaggaggggtttttacagtgtcactgctgattacttaaggtatcgaacattcgtctttaa

SEQ ID NO: 320434 - DNA, 561 bp, Homo sapiens
tcaaacgcacttgtgttgtaagttgagactcaaggaaatatttatttatttaaaatatttttgtccataagttacacaaacagcaatattttatttcactgtgttttaaaacagccctgtagacagaaatcctacagaccccgtctatgatcatgcttacatctgtagacagatttaattatcttttctttaaagtcagatacctactgacaattttacatatgaacctagttcacttggaagtgggcgggagaaaccaactatagaaaatcatacaatctttttgcattatattcattattttctccgtaaatttgaccaaaagcacagcaactctcctgatggcagatacggaagtgggaaccagtggcagacagagctstatgggtattttcaaggagacccaagcagggcagatgcaggtggctggatgatgacatggttactactgggagagattggaatcatctcttacaagtggtcccattttcaaaatcttcaaaggaggggtttttacagtgtcactgctgattacttaaggtatcgaacattcgtctttaa

SEQ ID NO: 320435 - DNA, 537 bp, Homo sapiens
agctatgtcttaaaagtcttgggtctcaaccctcactgtgcaccagaatcacctaggggaacatctggaaatagccagatacccactgtccccttaatattcacatttaattgttctggaataggaccatatctttttaaagtttttatatgattctaacgtgcattcaaggctgaggactccaaactcatggcattcctgctactattatttgcaaatgttacttggtgccatttttggtaaaacaaaaaacaaaaaacaraaaaacaacaaaaaaaaacccttgaaatttcagttatccctttactgtaaaggagtcctgggctgtgaatctgaattttgtgaatctatctgaatattgatgtgaaagttcctttctccctctaggcctcagtttctctccctgtccactgaggatcttgccaactgatgctctctggttctatgacccagtgagtggtcccgaggcttcacaaaagggaggcacactagaggctggtgttggcagtgcccatggacagagagcctcagagtaga

SEQ ID NO: 320436 - DNA, 665 bp, Homo sapiens
caagaatgcatacatgtatgtgcatatatgaatatcaacacatatatttacatatgtaatattgtataggtgggcacatttgcaatatttcctaaaattttctgattgtaagaacttgttaaaaaaatccccaaatgcaacaccttttatcaagtaccctaggagattattttggctctgacaagtttggaaaacatgcatatacataaaatggactttatgtctcctccttttataagtgattataattttctggatataattcttaagtataataattttttttactgaattcattattacttggatttctcaataccgcaagttaaattgtgctgcttgaaacataactacttgtaggtaaaatttcaatataataaactgacaatagaacttttaaaatattctctcccacaacatacacacacacacacacacacacacacacacacacacacagaggattactttgttcctaagcaaagatgctcaaaacttgtttgttaaacaattcaatgaatacagttaaccctaagctgaacagtaattctttaaaatatcagcatkacaaaaataattgcatccaaattactatgtcttacataagccatccatgcaaaattacaggggacactgtcaaatcttatttttctatctctcatctt

SEQ ID NO: 320437 - DNA, 395 bp, Homo sapiens
aaaagcttccatatagtaaaggaagcaatcaacaaagtgaagagacacccacagaatgaggaaaaatatttgcaaactacccatctaacaagggattaataaccagaatatrtaaggagctcaaaaatctctatagaaaaatataataattcaattaaaagtagacaaaagattctgaatgaatgtttctcaaaagaagacatacaaatggcaaacagatatatgaaaaggtgctcaatatcactgattatcagagaaatgcaaatcaaaactacaatgcaacatcttgtcacccagtcaaaatgacttttattcaaaagacaggcaataacaaaggctaatgagaatgtggggaaaaaaaccctcatacactgttggtgggaatgtaaattagt

SEQ ID NO: 320438 - DNA, 618 bp, Homo sapiens
tataattggattgtttgaaatacgaaagataaatgcttgaggtgatgtataccctatttaccctgatgtcattactatgcattgcatgcctgtatcaaagtatctcatgtaatccataaatatatacacatactatgtacctgcaaacaatttttaaagatatcattaacatgaaataaaatcattgctgytttcatatcaatcagcaaaattttaaaatgttatcagtttcaatttctaatatagtaagtatcagtagttataatctataaaaatcaaagttctttgaggcctaaataagttttaagtgagtaaagtggtctggagatggaaataaacagaagggagattcacgatattaggacaaaacagaatatttgaaaattcttgaaaagcagaagcatgtacagttatatttctcttttactctttctcttaatatagtctcaaatatttatactaattaatactttaatcaaggtaactaacttccctttcaggaagaaaactgaagaatgaataattgaaaaacgtctgtcacacactgacattcaacagccactcatattctttatacagcttccctaagtgacaaatataaacttcttcattaacctg

SEQ ID NO: 320439 - DNA, 580 bp, Homo sapiens
ccagtaattaaaacggaaatttataaccacactcacttttcaggcacatatgtataactaaggccatgataacatccacagagaaatggtatagggttaaaaaaacacaactcggttcaaatcttttcccaattaaaggcagaataaatttgagcaagtcacttttccttcygaatttcctttcttcatcataaaatccatattctgatttgacaacattaaaacttaaaagattaaaaaaaaaaacttgtgtaggaccttgtaaacaaaattaaaactcaaacgaaagaccaagatataatgtatttaatcactaaggcgttagtattaatgaaagttctacaaattaaaaagaaaatgagaaatgattcgaaaatcgacatttgcaaattatgtgaacaggaaatgctatgaaagtgaaatatgagtggctaataaacttatacaaaggtgatctattattcattactaattgaaaaaacacaaataaaataataccattttttccttaaagttggcaaaagttaaagattgatattatccagagctagaagaaggggaaaatgagccctgtatatat

SEQ ID NO: 320440 - DNA, 554 bp, Homo sapiens
catgtgatcagagaaaaacctaaaatagagcactcttcaattaccataatttctactgtcattgcaatttctgtacataaaagcatttggtctgaagcacaacaaatttatctgtaaattacacaataaasgatgggaaatggactttcctttaaaagaacaaacagaatcagtcatttatggggacatcttcatctcagtcgacatgtgaatacaacaaaatgcacactccattattgtataaagttgtgaagctcgtcacccaaccccacacccaccctctcccaagtttaattaaaccagtatcacactgagactggaagggaaacacaatgatacaacaacaaacaaacattaatcatgatcattacatacattttattacatgaaataaataatactgtggagctttcaccaaccgataaagctcttcctcttggataacatccgaaggcaattgaggggtaaaataatactaataatgataacaataattagtatgaaaaggaaaaaaagggtttatcaccacacaaagcagaaactatagcctcctt

SEQ ID NO: 320441 - DNA, 548 bp, Homo sapiens
tgggagttttgtctcctattttcatcttaaagatggccaaagttgtttggtttagcatttcaaaagcaaaataaataatgcatttgcttcagtggaaaaaaacccaggcaaattttccaaacgcttatctattctctagatgtttatggacatattactccagtttttaatgccacatactcaaactagcaatactcaaactaggaaggccaagttctgcccacagggtagctgaagtgcacatttcaactcagagttcatttgccaccagatcctgatagccatcgtgatactttcaagtgcccaggattttctgttttttcacttagaaacgtgattacttgaccggggcaggtatattgtaggtaactggggtagggtgggcacacgaaccastggacaggaagcaggacacagagaagacgcttcctgccctggtctggaactcctcaactgccaatctttgctgaggatcaagacacatttgtttctggaaggtgctgggggattagaaggggtgagtgggaaactaccaggcagatgaaatg

SEQ ID NO: 320442 - DNA, 555 bp, Homo sapiens
gagcctttggaggaagattcagctcagtgaagaagaaaaagttcattgaaagaaagaagaaacctgactaatagataattagtagagaccagggaagacattaaaaatgaaagggaagatggatagacaattccatggaggatgatggaaagccacagaagaggttcatgctgctaagtgacaggggsttacatggcaagattattacttagaagcatgtttgcacattttattatttgaaggcattgttgagacaatataatttaatccttcaattattttgtaagatacatatttagagatgaaggaagaatatgtggattgatcatggttacaggcaaattaatttctgagtcaagaccgcaattcacatctcctgatggctccttttattttgccaaactcctttggtactagggccagttccctaaggaagaggaatagcttacattgtcactgggaagagggcagaggcctgcacaaaacaactggacggttgataccgtagctttgcgagattaagccaagccaagatatgatgacttttgctcccta

SEQ ID NO: 320443 - DNA, 492 bp, Homo sapiens
tgaaaacaatcggtgagggtggggtgcaactgaagaatgaactctgctgtgattcttggcaatatttacagaggggaaaccaagataagattggactttctgataaacagcatagatggggacttggaatcatggtaattcattccccactcaggtaaggcaggatatatcatcttcgtctcactgcaggagggatcagctgtgtggctggtcactcaggcacttgagccaggccaccagtccaatgccccatagttggaagggcatagctgataaaaagattttcacatttcttttgctgttttcttagttttaattgrcaaaatctttctttagttatgttcatgttgcccaaagttttgctttgttcagttgttgattgtcttttaaaaatattacttctacacgaaattcacaacaaaaatgaccaatacacaaactaaatgtgggaaatgtggcatactattgctcccttttggaaatcttaaatta

SEQ ID NO: 320444 - DNA, 568 bp, Homo sapiens
agaaagaactggaaagaattacaggataaaactccctgaagtggtcrggtctcccacaaatgaaccctgatgcccaggaccaatcaacacagaaacaggcagtgcctcagtccctggccagcatccctgagagtgcgtgttcagccactgactcaagtcttggagaaagaaggaacccagcatgtcaccatgtgggaatgaggaagaggagccctgtgtggatggtggggaagctcagagaggctaaaataaacacaaggcactgcaacttgtggcatggaggcctagggatgtggcagggattctaactgaagagtatggcagggaccgggctgagaaggggctgggggaagggtttgcagccggccaagcccagagggaagccaccaccaccactcatgccacacagcaagccgctctccagcaattaatatgagacacaggcagaaactcagttcctacacaggtccaactgtcaaagctccccttactctacttggtctcaccagtgaaggcatttctaggctcttacagagccacagtttctgctgtgtctgccatgcagtgt

SEQ ID NO: 320445 - DNA, 568 bp, Homo sapiens
agaaagaactggaaagaattacaggataaaactccctgaagtggtcgggtctcccacaaatgaaccctgatgcccaggaccaatcaacacagaaacaggcagtgcctcagtccctggccagcatccctgagagtgcgtgttcagccactgactcaagtcttggagaaagaaggaacccagcatgtcaccatgtgggaatgaggaagaggagccctgtgtggatggtggggaagctcagagaggctaaaataaacacaaggcactgcaacttgtggcatggaggcctagggatgtggcagggattctaactgaagagtatggcagggaccgggctgagaaggggctgggggaagggtttgcagccggccaagcccagagggaarccaccaccaccactcatgccacacagcaagccgctctccagcaattaatatgagacacaggcagaaactcagttcctacacaggtccaactgtcaaagctccccttactctacttggtctcaccagtgaaggcatttctaggctcttacagagccacagtttctgctgtgtctgccatgcagtgt

SEQ ID NO: 320446 - DNA, 615 bp, Homo sapiens
ggacttttgaattaatgttgaaatgagttaagactttgggtgactgttgggaaggcatgattggttttaaaacatgaggacatgagatttgggaggggccagaggtagaatgatatggtctggctttgtgtccccacccaaatctcatgttgaattgtaatccccacgtgtcaagggagcgacctggtaagaggtaaytggatcatgggggcagtttcccccacgctgttctcatgatagtgagtgagttctcacaaggtctgatggttgataaaaagctcttttcccttctctcgccactctctcttgcctgccaccatgtaagacgtgcctcttccccttccaccatgattgtaagtttcctgagaccccctagccctgcggaactgtgagtcaattaaatctcttttctttctaaattacccagtcgggtatgtctttatagcagcgtgaaaacagattaatacattgtctaaagacttagaatcaataggaatgtctgggttaagataagcagttgtgaagaccaaggttttatcatgcagatgaagcctccagatagcaacttcagagagaatagacagtaaatgtttcttatcagaattaaagagactg

SEQ ID NO: 320447 - DNA, 608 bp, Homo sapiens
aagcagttgtgaagaccaaggttttatcatgcagatgaagcctccagatagcaacttcagagagaatagacagtaaatgtttcttatcagaattaaagagactgcactatcagtcctaaggttcatgttgatgttgacgctggtaagcttttcctgaattccaaaaaagaggagggtataatgaagcatgtcttacctctccttctcatcatggtctgaactcatttttcaggttaatttkggaatgacgttggcctagaggaggggtccattcagatagtcaagagggcttagaattttatttttagtttacactagaaagagatgatctacacaaactaactcaagaagaaaaaggaaatctgaataaacctatttattaacaagtaaagatacagaatttgcaattttaaaaattttcatatggaaagctcatgtacagatagctttgctggtgaattttaccacaatcaccaccaatcttccacaaaccctcccaaaaattagaagagaaaggcatacttcccagctccttctatgaagctagtattctcctaataccaaaactagaaaaagacatcacaagaaaactacagggagcatccctt

SEQ ID NO: 320448 - DNA, 620 bp, Homo sapiens
gagaatagacagtaaatgtttcttatcagaattaaagagactgcactatcagtcctaaggttcatgttgatgttgacgctggtaagcttttcctgaattccaaaaaagaggagggtataatgaagcatgtcttacctctccttctcatcatggtctgaactcatttttcaggttaatttgggaatgacgttggcctagaggaggggtccattcagatagtcaagagggcttagaattttatttttagtttacactagaaagagatgatctacacaaactaactcaagaagaaaaaggaaatctgaataaacctatttattaacaagtaaagatacagaatttgcaattttaaaaattttcatatggaaagctcatgtacagatagctttgctggtgaattttaccacaatcaccaccaatcttycacaaaccctcccaaaaattagaagagaaaggcatacttcccagctccttctatgaagctagtattctcctaataccaaaactagaaaaagacatcacaagaaaactacagggagcatcccttatgaatacagatgaataaatcctcaacaaaacatcagcaaaccaaatccagcaacatataaaaagaattatat

SEQ ID NO: 320449 - DNA, 513 bp, Homo sapiens
actagcaataatacaaatatgaaattaagaaaacaattatattttcaatagcatccagaaaaataaaatatttagaaataaatttaacaaaagtggcataaacctgtaaaatgaaaactacamaatgttgttgaaaaaattatggaagaaataaatgaatagaaagacacccaatgttcacggattgaaagatttattattgttaaatggcaataccctccaaattaattcatagattaaatacaattcctataaaaatcctagctgccttttttcagaaattgacaaattgattccaaaattctaaaacttcagaaattgacaaattgattcttgacacacttgtcaaaaatcaatcaataaactgaaaaataagcccatatgggctttttgattgatttttgacaagtgtgtcaagacaattcaacaggggtaagaagagtcttttcgataaatagtattggaacagctggatagccacatgcaaaaaaatctaaattggatatgtatccc

SEQ ID NO: 320450 - DNA, 575 bp, Homo sapiens
tggatttgggtttcctttgaggatgataaatatgtcttggaattagaaagttgtacagtcatgaatataccaagaaccactgcattaaacccatttttaaaaaggtagattttgctgtattcaaagcatatctcaataatactgtcatttaaaaagggattccatcccagcactttgggtggccaaggcaggaggatcacttgagcccaggagtttgagaccagccttgacaacacagtgagactctatttctatttatcattttttaaaattataataaaaataagtgaataaatagggattccagctaataagtaaaaaaagaaataatagaaytcaaatctcataataaaataatagatctaggcaatgataatcaatggctgataaaatccggataaaaagctgatggggaatttcataacagagatcagagttacaatatttgaacccactaatcaagcctaatataataaaataactagattttactgaacaaaataaatattttagaggaatatggtcaataacaccacaggggtgcaatcagcaaaatcaagactgggaaaccatac

SEQ ID NO: 320451 - DNA, 250 bp, Homo sapiens
aatcaagactgggaaaccatacaggacaaatgacwcagatcaaataagaggcatatcaaacaaagccagtgtacagactttgtacagatcctgattctaaccagccaaatgcttaatatatgtatatgtatttatatatatatatatatatatatatatatatatatatatatatacacacacacacacatatatatgaaaatcagggacatttgaaaactgatatggtctggctctgtgtccccaccca

SEQ ID NO: 320452 - DNA, 618 bp, Homo sapiens
atggataggcacaaaagagtttaatgtattattttatttttgtacatgttaaaattctccattaaaaatgttttaagaaaaatgtgctaagcatcttttttcaggctatgcactgtggtaagtgctttcatatacactattattcactcttttattctcaacaactggtgcagtacataggcactagcaggcaatgagtacatgtaactgaatgaatgaatcattgtctttaattctctaacagccctaagtcatagaccttagactcccgtgttgcaaatggggacatctgaggctcagaatttgcccaaygttgtccaccttttatgcggcagactctttccacaatgcctcaaatatgagtatttaaagtttatttttttaagtgggaggaggtagagactggctgatgttctcatttgcatattatgtcagccatactgtaaggagattgacattcacatgctgaagacacatggggtctaaaatcaggcacatctgagggtacagtggcattggccacaaagtagaagacccaactgctattttcattctcttcttaaagctaaacttagcttcactgtattgattctcctccctactatcaacccacatcac

SEQ ID NO: 320453 - DNA, 561 bp, Homo sapiens
ttttaaagagtaggtcatgctaaattcaatttctggtcatgccatgtggggatatacaaaatggaaaaaccaagcaaacgtaaacagaattggaaacctaaactcaatccatacccatgtctcctccttaccaacctcctaccaggtgcctccctggtaagagtcttctcttacagcattgtctgagcatggcgaggatcctacatggagccaacacctccagtagctttccaagtggtgcagcccagtccactgaggaaggcttgctgtaaagcgtgaatcccaccggccaaacagtcaggcaagaaaactccctgccaggtctgttctgcgctggacatgttctgacagcatgggccacagttggacaacacatgaatgacacaggtccatacartttgcagggtcccagggtgctctattccagagcattcataaactgaatgcaacgtttcaatgttgaacttaacaaaacaaaaacagcatgtcctcttattcatgctgaattatcagcatcaactagcaaaaaagagggaaagactaggattctgaaaacttgtg

SEQ ID NO: 320454 - DNA, 544 bp, Homo sapiens
tatcagccatccctgatggctttgaaaatatcccagaacaactgtcctgtgaatcagaaaggtacactgcaaacataaagaaagtgttggatgaggattctgatgggattagtcctgaagagcatctactttctggcattactgatttatgtcttcaggatttgcctttaaaggaacgaatatttayaaaattatcatatcctcaggataatctacaaccagatgtcaacctgaaaactttgtccatacttagtgtaaaagaatcttgtattgctaacagtggttctgattgtacatcacatctttcaaaggatcttccaggaattcccttgcaaaatgaatccagagactctaaaattctaaaaggagaccagctgcttcaagaagactataaagtcaatacttctgtcccttattctgtcagtaacacagtggtaaagacctgcaatgttagaccaccaaatactgctttagatcatagtagaaaagttgatatgcaaaccactcggaaaattttaatgaagaagagtgtttgccttgacag

SEQ ID NO: 320455 - DNA, 517 bp, Homo sapiens
attttaagccagactggctaacatgaacacaaawggaacctagttacaataacagtagtgtcattctctcaagtctgaactataaatgtcaaaaaagggagagggagaaaatgtgaaccacagcattttctaaagttggccagtggtgtcccttaatataactccaatctaatcctttgagaccaacacttttcttcccatagtcatctgtcccaactgcccagtggatttgaccatcagaagtgtctaactttcatctttctcactacactgtaacgctcattctcatcctcctttgataaataatgggtgcttgagaaaataagatagaatggcaactcttacccttgaggtggagatgccacacgctctgccttcatcctgcccggtgggacgtccatcatcatccaagaagctctgcccttctcagcacactggaatgtgtggtgcacataggcatttggtggccaaaaagaagggaagaatcctgttctctggttgtacaggccaaagcaat

SEQ ID NO: 320456 - DNA, 574 bp, Homo sapiens
ttcagagagaaaaaagtcgttgctaaaacattttccaaggttctgcttattctgatttgttcagtcgtggctgtgatagttcaggaccatctagaccaggtaaataaaatatctagaggcattcttgagattgtatgagatgaaaataacaaaattagttgggagtggccagtctgagttcattttgctatatagctcaggrgtccccaacccctgggctatggacaggtaccagtccatcacctgtcaggaaccggcctgcacagcaggtgttgagcggcatgcaagcgagaattaccgcctgagctctgcctcctgtcagatcagcggtggcattagagtctcataggagcatgaaccctattgtgaactacgcatgcgaggatctagtttgtgcactcctactgagaatctaatgcctgatgatataaggtggaacagcttcatcccacagccatctccccctcatcatccgtggaaaaactgttttccacgaaagtggtcctcggtgccagaaaggttggggactgctgatatacctaatataggcataagtgtaaaattatagttcctc

SEQ ID NO: 320457 - DNA, 574 bp, Homo sapiens
ttcagagagaaaaaagtcgttgctaaaacattttccaaggttctgcttattctgatttgttcagtcgtggctgtgatagttcaggaccatctagaccaggtaaataaaatatctagaggcattcttgagattgtatgagatgaaaataacaaaattagttgggagtggccagtctgagttcattttgctatatagctcaggagtccccaacccctgggctatggacaggtaccagtccatcacctgtcaggaaccggcctgcacagcaggtgttgagcggcatgcaagcgagaattaccgcctgagctctgcctcctgtcagatcagcggtggcattagagtctcataggagcatgaaccctattgtgaactacgcatgcgaggatctagtttgtgcactcctactgagaatctaatgcctgatgatataaggtggaacagcttcatcccacagccatctccccckcatcatccgtggaaaaactgttttccacgaaagtggtcctcggtgccagaaaggttggggactgctgatatacctaatataggcataagtgtaaaattatagttcctc

SEQ ID NO: 320458 - DNA, 458 bp, Homo sapiens
attcagagtgagtaaatgccataccaactgcaggaatcccaagacttgatgcatgggtaactaaataccaccttcctttcctcctgctctatgtttctagacaacctccccctggsgaatggaggggaggcagcagggacgcagctgtgttgccttggcaagaaaatctagagaaaggaaaggagagacaggcagaccaggcgcttccctgcggaagggtgtgcacctcatagaaggaagtacaacacagtcactgagtgttgacagggctctagggtcactctgagtggtccatgcaactgctcctggccacagaaaggaactgcactggctccatccaccttgtagtcatctccctaccgcatggctagctggagacagaggctagggctgtcccatttgaatgcatcaaacaactgcactaacacaggccgataaagaggaactgaaagcaagca

SEQ ID NO: 320459 - DNA, 577 bp, Homo sapiens
tagtgagcactgccccatctagggtgtgtgtttgcatggatgggtgtgtggtgcaagtgtgtggcccccttcctaggagagaaaactcatctcctcccttctacatcatatagtgctcsggtcctggtactcaaaaccatgtcactgtgcactcattagggcttatatctgctttggtggggcagtctgaaacctaatcctagtgtctaatgatgtctgcatggaaattgtttctgagttgctcacataacataaatgaaggactgtaaaacagggcttgcttatgtattcttaactccattgatgtgggttatagggatgactggtaaaaagcaactaaaagcaaatctactggaattcagggccacattaaactgtccatcctgtactctttacttcaaacccccatacatagatatattaaaaaaaaaaaaaaaaaaaaaaaaaactggctcctgggatcatggcagaggggaggaaggactagattgcagctccggcatgtggaggctcgcattgtgaattttagcttcagattggctgcaagaacaaatcagaaatactgagaggaccacag

SEQ ID NO: 320460 - DNA, 584 bp, Homo sapiens
tgctcacataacataaatgaaggactgtaaaacagggcttgcttatgtattcttaactccattgatgtgggttatagggatgactggtaaaaagcaactaaaagcaaatctactggaattcagggccacattaaactgtccatcctgtactctttacttcaaacccccatacatagatatattaaaaaaaaaaaaaaaaaaaaaaaaaactggctcctgggatcatggcagaggggaggaaggactagattgcagctcyggcatgtggaggctcgcattgtgaattttagcttcagattggctgcaagaacaaatcagaaatactgagaggaccacagaccctctgaaggaagcggactgctcctgcaggacccaggagacccacaaatactgtgagtgccccaactgcggaagtgggaaaggtagaccctcctcccccaaacacacacccccagtggagaagctgaaggtctgtttgcaggagaagtttccaactttacctggagctgagtcaagttagagagccgagcgaaatacagaggaagcagcagaaaagccctgggagctcactgggtccccaagca

SEQ ID NO: 320461 - DNA, 539 bp, Homo sapiens
tggtcctttcctatccaccttggtaatggaagacaaagggcatataatcttgagagttctagggccccacccactgctggttcctccccatactagcacagctgaaagtgcygcctcctggcaggcggccaaccagtaaaaaaatagagcattaaaccaccaaagctaaggatcctcatggagtccattgcaccctccgctacctccactgcaacaggcactggtatccacggctgagagacccatagacagttcatatcacagaactctgtgcaggcaacccccaggaccagcccagagctgggcagactcgctgggtggctagacccagaaaagagacaacaatcactgcagttcagctcacaggaagccacattcataggaaaagggggagagtactacatcaagggaacacccagtgggacaaaagaatctgaacaacagccttcagccctagaccttccctctgacagagcctacccaaaggagaaggaaccagaaaatcaactctggtactataacaaaacaaggctcttcaa

SEQ ID NO: 320462 - DNA, 539 bp, Homo sapiens
tggtcctttcctatccaccttggtaatggaagacaaagggcatataatcttgagagttctagggccccacccactgctggttcctccccatactagcacagctgaaagtgccgcctcctggcaggcggccaaccagtaaaaaaatagagcattaaaccaccaaagctaaggatcctcatggagtccattgcaccctcygctacctccactgcaacaggcactggtatccacggctgagagacccatagacagttcatatcacagaactctgtgcaggcaacccccaggaccagcccagagctgggcagactcgctgggtggctagacccagaaaagagacaacaatcactgcagttcagctcacaggaagccacattcataggaaaagggggagagtactacatcaagggaacacccagtgggacaaaagaatctgaacaacagccttcagccctagaccttccctctgacagagcctacccaaaggagaaggaaccagaaaatcaactctggtactataacaaaacaaggctcttcaa

SEQ ID NO: 320463 - DNA, 594 bp, Homo sapiens
  misc_feature (1)...(594): n = A,T,C or G
tactgacctcctctgcttctgcaattcactaacaccatttgctgtgttctctcccacttgtctgactactcatgtttagttttctgtgaaactctgtgtcctcttcccaaatcttaaatctggggtcacaaaatattaataaaatgtctgcaggagcaaggcagggacccaaaatgagaggaggaggacacctggccactgtaactactagggaacaccggtcttgctgaaggagggcactggccaactgttgtcccttatctgtgggtatcacgtggccagatcacctagtttgtcaagaacaccaacaaattttatttttataaaaaacttccccaattttttaaatgttggcaactatggttcttcctgttttaatatcatcaaccaagctgaagacatctgcagcctggacacaatctgcaggcctccagctntgtgtcatctccccaccaagcctcacccaccaccatggcctcctccttgtgcctctgctcttctcatcrgccaatgtcatctgacagtggagcccagatgtgcatctccagcccagtctccctcttgcattccagactcacagagctgcctaccaga

SEQ ID NO: 320464 - DNA, 313 bp, Homo sapiens
tttttaaaaagtatttttgatctgaaattggttgaacccataggtgtggagccaacagatactgagggccaactgtacttacttgttcattcagtggtattcagctggcaactgggctggtcttgagagacgaagatgacctcactcaaaatacaaattgtttcagacaatacaaaaagacaatagaaaagaggtcagcataacctctctatcaaaayatgacaaagacatttcaagactacaggccaatctctctcatgaaaatatatacaagaaaacagcaatatagatatagatattaaaggatactaca

SEQ ID NO: 320465 - DNA, 609 bp, Homo sapiens
aattgattcagaagaagcatttgataaatgttaacagtcattaataatttaaaaaacttttttaaaaaatttaatgttattttaagttccagggtacatgtgcaagacgcacaggtttgttacataggtaaatgtgtgccactgtggtttgctgcacctatcaacccatcacccaggtattaaggcccacatgcattacctgtttatcctaatgttctccytctccccagacccctccccagcccacacgcatgcacgcgcgcacacacacacacacacgccccagtgtgtgttgttcagctcccacttataagtgagaacagcatcccacttataagttcctgtgttagtttgctcaggataatggtttctagctcctccatgtcccagcaaaggacatgatctcattcctctttatggttgcatagtattccatggtgcttatgtaaaaactcttagcaaagtagaaatagaagggctcttgtttaatctggtaaaaggtatctttaaaaataatataattgacttcctacttaactgtagtattttaaatgcaaaaactctccccagaaaactataaaacattattagatatagtaaataaaaact

SEQ ID NO: 320466 - DNA, 609 bp, Homo sapiens
aattgattcagaagaagcatttgataaatgttaacagtcattaataatttaaaaaacttttttaaaaaatttaatgttattttaagttccagggtacatgtgcaagacgcacaggtttgttacataggtaaatgtgtgccactgtggtttgctgcacctatcaacccatcacccaggtattaaggcccacatgcattacctgtttatcctaatgttctccttctccccagacccctccccagcccacacgcatgcacgcgygcacacacacacacacacgccccagtgtgtgttgttcagctcccacttataagtgagaacagcatcccacttataagttcctgtgttagtttgctcaggataatggtttctagctcctccatgtcccagcaaaggacatgatctcattcctctttatggttgcatagtattccatggtgcttatgtaaaaactcttagcaaagtagaaatagaagggctcttgtttaatctggtaaaaggtatctttaaaaataatataattgacttcctacttaactgtagtattttaaatgcaaaaactctccccagaaaactataaaacattattagatatagtaaataaaaact

SEQ ID NO: 320467 - DNA, 494 bp, Homo sapiens
aataattccaaattcctaacaggtactatttttggaaatttgcaagctgattttaaaatttttattgaaatacaaaaagccaagaatagctaagacaatctttaaaatgaagaacaaactctgaggtcttatactactagatatcaagacttattataaagctatagcaacaaaaacaaaatagtattggtaccaagttaaacagagtagaaagtcyaagaactgacctgcacatataaaattcattttcgataaaaatgggaaggtactatcttttcaataaatggcattggatctattagatattcatgtaagaaaaataaccttgacttctatttcacacagacgtatgaatcaattccaaatagattataagcctaaatgcaaaataaaaataaatcatctagaagataacatgagaatatcttcatgaacttggggcaatcaaagatttcttaaataagttataaaaagctgtcaccttttcatcttat

SEQ ID NO: 320468 - DNA, 589 bp, Homo sapiens
tacaatgaaattttattatgtattcaccaaaaaggctaaaatgaaaaaaaatccaaatgttggcaaagatgcagagcaactgaaactctcatacacttctggtctaagtgtacactggtgcaatcagtttggaaaacagagtatctgctaatgctaaataaatacatactctatggcctaacaattctacttctaagcaggtagcaaacacaaagacatatagaggtgcatccaaagatatgcacaaaaacattcacaaagtattattcgtgattgcaaaaaactggaaataatttaggtgtccacgagcaatagcatggaaaaatatctgtagcatattcatagaatggaatactaggcacccaagagaatgaacaaactacagctacacactrtagtatggatgaaactcaaagttgagcaaaaaaaaagccagataaaaaagagtatatatgtatcacattaaaaaaacaagcaaaacttaacagggattgaagtcacaatagagactagtcaaaggagacaatgactggggaggggacatatggaggcttctgggttgttggtgatgttctatttcttgatctga

SEQ ID NO: 320469 - DNA, 500 bp, Homo sapiens
gaaaacttgtgtgtgacctcagctatgaccactgcctgcaacaccctggataatcaggaggtcctgatactgctcagatgatccgttcattactgctacaactggcgcttgagaaaaccaatgcactgaggctatttataaccaaggactctcacagagtctatgtcactcccctgccacccccatcagacctggtgctggtacccactactgggagacttgagggcaggtcacaccacaagatcccttgcattccccagcaccagcctggagtgaggcagccccactrggcggctagacccagaggagcagcagcattcacagtaatgtgactctcagggactcctactcctaggggaagagggagtgtgccacaacaagggaacaccccatgggacaaaaaaatctggacagcaggccttgagtctcagatctgtctgctactgggaagtttctttcatcagaggcacagttgcagtgctgggctcagtggagaaagt

SEQ ID NO: 320470 - DNA, 187 bp, Homo sapiens
tatcgctgttcactgataatatgattgtatacctagaaaaccctaaagtctcctccaaaagactyctagatttgataaacaaattcagtaaagtctcaggttagaaaatccatgtacacaaatcagtatcactgctatacaccaacaatgaccaagctgagaatcaaatcaagaactcaatcccttt

SEQ ID NO: 320471 - DNA, 574 bp, Homo sapiens
tgacaaaggactaatatccagaagctacaagaaacacaaacaaatcagcaaaaaataaataaataatcccaccaaaaaagtggacaacrggcatgaatagacatttctcaaaagaagatatatgtacaaatggtcaacaaatgcatgaaaaaatgttcaacatcactattcatcagagaaatgtaaattaaaaccactttactcctggaagagtaaaaagtcaaaaaattattaaaaagtcaaaaaatagtagatgtgggcatggacgtggtaaaaaggaacacttatacgctgctagtgggagtgtaaattagtacaacctctatgaaaaacagtatggagatttcctaaagaactaaaagtaagtttacctttcgatccagcaatcccactactgggtatctacccaaaggaaaagcagcaaatatatcaaaaggatacctgcacatgtgtatttattgcagcacaattcataacagcaaagatatggaaccaacctaagtgcccatcgaccaatgagtggataaagaaaatgtgatatatatacaccatggaatactactaagccataaaa

SEQ ID NO: 320472 - DNA, 574 bp, Homo sapiens
tgacaaaggactaatatccagaagctacaagaaacacaaacaaatcagcaaaaaataaataaataatcccaccaaaaaagtggacaacaggcatgaatagacatttctcaaaagaagatakatgtacaaatggtcaacaaatgcatgaaaaaatgttcaacatcactattcatcagagaaatgtaaattaaaaccactttactcctggaagagtaaaaagtcaaaaaattattaaaaagtcaaaaaatagtagatgtgggcatggacgtggtaaaaaggaacacttatacgctgctagtgggagtgtaaattagtacaacctctatgaaaaacagtatggagatttcctaaagaactaaaagtaagtttacctttcgatccagcaatcccactactgggtatctacccaaaggaaaagcagcaaatatatcaaaaggatacctgcacatgtgtatttattgcagcacaattcataacagcaaagatatggaaccaacctaagtgcccatcgaccaatgagtggataaagaaaatgtgatatatatacaccatggaatactactaagccataaaa

SEQ ID NO: 320473 - DNA, 574 bp, Homo sapiens
tgacaaaggactaatatccagaagctacaagaaacacaaacaaatcagcaaaaaataaataaataatcccaccaaaaaagtggacaacaggcatgaatagacatttctcaaaagaagatatatgtacaaatggtcaacaaatgcatgaaaaaatgttcaacatcactattcatcagagaaatgtaaattaaaaccactttactcctggaagagtaaaaagtcaaaaaattattaaaaagtmaaaaaatagtagatgtgggcatggacgtggtaaaaaggaacacttatacgctgctagtgggagtgtaaattagtacaacctctatgaaaaacagtatggagatttcctaaagaactaaaagtaagtttacctttcgatccagcaatcccactactgggtatctacccaaaggaaaagcagcaaatatatcaaaaggatacctgcacatgtgtatttattgcagcacaattcataacagcaaagatatggaaccaacctaagtgcccatcgaccaatgagtggataaagaaaatgtgatatatatacaccatggaatactactaagccataaaa

SEQ ID NO: 320474 - DNA, 589 bp, Homo sapiens
gggtttgtcaagacataaatggtgtgaagaaaggaagtttcctatactatttagaaattgtgtttgctagaatcacaagcttatttttctcaaataaacctataatgagaaaaccaagataaagtggcttgatggtttctgactagaaattggatttatgaatttatgtggaaaaggagttaaggaataaagtcagtgatgtcgtttgcagtgttggtgggcacatggcagcctaagtacatgaatgcaatctcctaccctagacataytctaatatatacaatgtcttataacacacacaaagtgaataaatgcaattccccacaacgaatatttaaaagaaactttgcagtaaccatagcctcatggtcaaagattatattccatagatgattacaataaacctctgtaagaaagaagggaaacatcccaggaaatccctttacctttccagcaaataaatcagccacaaattcaattttacaatgagaagagcaagtatatagagatctaaccttaacaggacttttagcccatctagctaatatactttattctttgtgcctttatggtaactatttgtaaatat

SEQ ID NO: 320475 - DNA, 548 bp, Homo sapiens
tagacatattctaatatatacaatgtcttataacacacacaaagtgaataaatgcaattccccacaacgaatatttaaaagaaactttgcagtaaccatagcctcatggtcaaagattatattccatagatgattacaataaacctctgtaagaaagaagggaaacatcccaggaaatccctttacctttccagcaaataaatcagccacaaattcaattttacaatgagaagagcaagtatatagagatctaaccttaacaggacttttagcccatctagctaatatactttattctttgtgcctttatggtaactatttgtaaatatccctcaactgcgttccttatcttttgagcaaacgataaggagtagctcagtgcttcacattctcaaakacacttgtgtcaacagtctttcttcctctcacgatttcccattaaattatttatcattaaattatatggcctacaatttcaactacaaccttagccaaggttgactcaaagtgccttgggctacaataaacttctcctctcacaatgcact

SEQ ID NO: 320476 - DNA, 613 bp, Homo sapiens
gcgttccttatcttttgagcaaacgataaggagtagctcagtgcttcacattctcaaatacacttgtgtcaacagtctttcttcctctcacgatttcccattaaattatttatcattaaattatatggcctacaatttcaactacaaccttagccaaggttgactcaaagtgccttgggctacaataaacttctcctctcacaatgcactggatgaaatsgccttgggggcaagtatagacatgggagggaagaaggcttgaaattgaacccggaggaattccaacatcagaggccagttgaggagggtgacaccatgagcaggactgagagagtgaggtaggaggtataacaggaaagtgtgatgtaagagaagttatgggcatttgttgtttctgcttcccagtattcagtccctttcttgtggtaacagaaacccaaatactctttaggggaactgcctttctctcactctaaatacacgagatttgggtgagactaattctcccataggtctagggttgaagaatttgactaaggactttgccaatcaatgtattccatcactctggccacagcagttgcttcagtgatgaacacggagcttaagacaa

SEQ ID NO: 320477 - DNA, 613 bp, Homo sapiens
gcgttccttatcttttgagcaaacgataaggagtagctcagtgcttcacattctcaaatacacttgtgtcaacagtctttcttcctctcacgatttcccattaaattatttatcattaaattatatggcctacaatttcaactacaaccttagccaaggttgactcaaagtgccttgggctacaataaacttctcctctcacaatgcactggatgaaatggccttgggggcaagtatagacatgggagggaagaaggcttgaaattgaacccggaggaattccaacatcagaggccagttgaggagggtgacaccatgagcaggactgagagagtgaggtaggaggtataacaggaaagtgtgatgtaagagaagttatgggcatttgttgtttctgcttcccagtattcagtccctttyttgtggtaacagaaacccaaatactctttaggggaactgcctttctctcactctaaatacacgagatttgggtgagactaattctcccataggtctagggttgaagaatttgactaaggactttgccaatcaatgtattccatcactctggccacagcagttgcttcagtgatgaacacggagcttaagacaa

SEQ ID NO: 320478 - DNA, 635 bp, Homo sapiens
ataatccatcatttattctgccttccctgtgtgcactgtatttgaagttaatgaaatgttaatgaaggaaatttccttatagaacaatttcagttatgaagaagggcttagaaagtcacaaataaatggatcctaggccatgttcatcaatgggtgctaacaccattgagtgtagaactttatgtgggatggatcagtctgacaacacctgaactcactgattagtcaatctcagcatcactcaaagtatgagggggttcagtatattattctgtctattttgtgatatttgaaaattttcacaagtttttaaaagaaaaacayacatatactttgaaaaaattttaactaaatagaattatactctatatactgctctgcactttgatctattgaattaatttttgtggattcaatatagcttgacttactggcttctggacttttatacagggcagatttgctgagtatttatcaagactggtagtgagtataaggaggtgaaaagatcaggcagggacaggtaagcacgattcttcccagacaggtttgcaaagtccactctggcaaaaacctcttgaatcctaagtagtaaaaaggaatctttatgtgagcaatgtgagggaaagcaagag

SEQ ID NO: 320479 - DNA, 594 bp, Homo sapiens
atagaattatactctatatactgctctgcactttgatctattgaattaatttttgtggattcaatatagcttgacttactggcttctggacttttatacagggcagatttgctgagtatttatcaagactggtagtgagtataaggaggtgaaaagatcaggcagggacaggtaagcacgattcttcccagacaggtttgcaaagtccactctggcaaaaacctcttgaatcctaagtagtaaaaaggaatctttatgtgagcaatgtgagggaaagcaagagtaattgaagttgttttcctgagaggaggaagggattcacatgatgctgtttggtgcatgtaaccttgggagcagctggaaggagtggggagggggctgcctcctgaccttgggtctgaggtctccccaccyccaatatctccagctgtttcatcagccaattaggttaaaccctttttcttgggttccatatccaacctttggagttgtttccagagggtttaatctttagatcagggatctgatatcccagaaagtataaatgtggtcaaacacaaagggtgaggcagtggatggaaacatgcagagtca

SEQ ID NO: 320480 - DNA, 623 bp, Homo sapiens
aataataaacataagttataaagtacttttcagactttcaaaatgggcaaatatttgatttcccaatgattggtctgtggaaaatgatttcagaaatgtataactataattataagaaatattcataagaccaactataattccaatgttattttgtttcaataagagacaaaacttacatggtcatatgcaacccaygtataaattcatttatagccctcctgatcagtgtatatatattcataaggccctagaaaatttgatcataaccagtgacaaagaattcccatttttaagttttggaaagaactatcagcttaagcctgaagcctctctttcttcagtctatttctctgagttaaatttttgttataaaagacaaacgaagaaattatttgtcctccatgctcaaatgcagcccttctccaggttctccctgataatgacattcagctcagggctgaattttatgataattgaaaccacacacttattttaattactttctgcattttccatttgccatcttgtcagaacgatgtatgaatcacagtgaacaattagtgcgttggaagaaaccatgtgtgaggctgaatggaagcctagttcagttgttgctcgag

SEQ ID NO: 320481 - DNA, 623 bp, Homo sapiens
aataataaacataagttataaagtacttttcagactttcaaaatgggcaaatatttgatttcccaatgattggtctgtggaaaatgatttcagaaatgtataactataattataagaaatattcataagaccaactataattccaatgttattttgtttcaataagagacaaaacttacatggtcatatgcaacccacgtataaattcatttatagccctcctgatcagtgtatatatattcataaggccctagaaaatttgatcataaccagtgacaaagaattcccatttttaagttttggaaagaactatcagcttaagcctgaagcctctctttcttcagtctatttctctgagytaaatttttgttataaaagacaaacgaagaaattatttgtcctccatgctcaaatgcagcccttctccaggttctccctgataatgacattcagctcagggctgaattttatgataattgaaaccacacacttattttaattactttctgcattttccatttgccatcttgtcagaacgatgtatgaatcacagtgaacaattagtgcgttggaagaaaccatgtgtgaggctgaatggaagcctagttcagttgttgctcgag

SEQ ID NO: 320482 - DNA, 470 bp, Homo sapiens
tgtgagcgggaagagcatggtaggagatgaggttggggaggaaataaggggcctgggtggctacagcaaggtggtcagctttyactctgagatgaccaatcattgccaacttttgatctaagatgtaagagacataattttaaaaggatcatttggatgatggatggaaactgcactctccagggacagtggtgaggcaggaagaccctttaggaagctgttgcaatatcctagaagtggctgggacctaggtcacagaggtgaaggtagtgaagaggagggcagattctcaatacattttacaggtagagctaggaggatttgctgaatgcagggtgtctgaaagaaagtgaaggatgaggcagattcctggcctgagcaactggaggggcggggtggcagttcactgaggtgggcaagatcatcgggaggcaggatgtgggcaatgcctggaagttcaggaatttggt

SEQ ID NO: 320483 - DNA, 534 bp, Homo sapiens
gttctttgctgctggcaacatatcttggcatgagccgactgctccagtaggtggcagcctgggttacattcagaatcttacaggacaccactggaaggccctggtgtgatcagcttcctgcggtttagtccattaatgagtgacacatttttcctgtggattctgtgtgttgcttcaaggtttccccatggagacagaaataagatattagtcctgtggggttcrtctgttgaaactcagaggccattttttcaggttcagagtgcttctctagcagaagggagccactccatgcctgtttcttccctctgccctgtggctaagtgtgtgtaggaaaaaaatcactgatacgaggaggtgtctgaagtcaggaacaactctttgaagcatgacacaaaccacctaacgcaatagtatgaacatattgaaaaattatggggtgcatatcatttgtgctgcaaagtatactatagatttattttctaaaatgctcccttactctaggagatgacaaggatgaagaataggtgttac

SEQ ID NO: 320484 - DNA, 598 bp, Homo sapiens
gattccatttttaagcaaggagaccatatgtgatgccttctcctagatcacgcaagagaaaaacaactgccttgtctgtgaaggtgggactactgcccccttctggaaaacaaagattgtctgaccatctccatgggatcggggggaaaatatctctatagacccaacttgacaggaaagaataaacatcacaccccagagggcctctgtttgtgccccaattgggctcatttttgtttgtggccatgaatgggaagaagtcacacctcataactcctgactccccagggagtcacctcttctttaggaacagctttcccttgtatgtcaaaaaacttggaatagaggtgaattacattggttaccctagcccctccagggrtcactgtctataaccccttaagacacaggaataccagaagtaaacaagcaatagggttaattctggcaggaatcagggcagcgaaaggactagcagcaccctggggcaaccttgcctaccatgagttaaccctaaagaatttaactcaaaccctagaatccttagccaccaacactggtgtcaggtttgaaccccagctgaggtccgagaggagtg

SEQ ID NO: 320485 - DNA, 665 bp, Homo sapiens
agaatcttgtgtttcctctgacaatctctacatgcttatttgattttccagatcttaccagaaatggcgcatattgaaacgaaaaggatatagaaaagtgttcagtgaggaatccaaaagtttgctattaagcgttgtgaagtggaagatagcattctcctttaattttgcagcttttcctctgagagagtactccacctaccaggtggaagaaataatgagatacggtctctcccaggggactaaaatgtccaaaaccaatctgaacacttgcaatgacactagtcaaaaatacagtgaaaataatgcttgtgtctccttcgcrtcttttccttcccacaccttactgggactttttatctcaagcaaaggacttcagtgtcaacacttaaaaatatcccaacttccctcccacggttgttgtggggaacaaatgcaatgatgtatacaacagcactctgtagaacagtaaaatctcatacacatgctggacaggtgtagggtattattattaatacaatttagaaataacaataacatgcacttaaactctccatataaatagccccctgtggtctattaatccaagtcctgtttgtagcctgctacttatatgtgtggatatcctctgagggctattccagaccaaatgcatacattttaaa

SEQ ID NO: 320486 - DNA, 544 bp, Homo sapiens
agaggcagaattcaactccagaggtagggtacagacaccagaacaaattgcggactagctacaatagggccttgtggaagcagctttccataagacatgcccaccagtgtgccatgtcaatttaccattgctatggcaacactcaggagctatccccgctttccatggcaataacctgatgacccagaagttactacgcttttcccagaaatttctgcaataaactagctgctaatctcatacaatcaaaagtaggtataaatttactgcctayggggtattctctgcctatgctctgcaggaaaagcacagcagtgccacactgctggagctgtaacattgccacttcaattaagctgttttcttctaccctaccactggcttgcttttgaattctttctctggggaagccaagaaccctggcaggctaggtcccactttggggcccacctgtcctgcatcacaatggtattgcaccaaatgtcaaatgagatagaatcagccacctactaatgcaataaaagcctcgcagaattgttggcgg

SEQ ID NO: 320487 - DNA, 559 bp, Homo sapiens
gagtttatagatcagagacacatcgagataactaagttgaaaatcaagatctgtgaggaaaaacagaaaagaaaattgggatgattattttccagagaagaaacaaaagtgagttttcaaaggtaaagctctaaaggttaactagtcagaaagacacaagctgtttttgatcagaataaagaaaacagaaagggcttccttcaaccacagcaagaagaatttcagtcaaatgtcaagaactcatacagaaaaaaaaaaatctgtaaaaacagtgaaactgaatacttatgagtttctaaaaacttttctttctcaaaagttcttagtgtatatttcartactcaatgactgaatactgcacaaactttatcaggtgaccaatgtaaaacaacatactatacactcactgaaaggaaaaacatgttcacaatgcttaatctcatagaagaaacactttgcatataatgcagtgaaaagacacctagtttctgttcaactatatcgtgttggacaaggattaatgatgacaaaagggcattcaaaattggattagcagcct

SEQ ID NO: 320488 - DNA, 559 bp, Homo sapiens
gagtttatagatcagagacacatcgagataactaagttgaaaatcaagatctgtgaggaaaaacagaaaagaaaattgggatgattattttccagagaagaaacaaaagtgagttttcaaaggtaaagctctaaaggttaactagtcagaaagacacaagctgtttttgatcagaataaagaaaacagaaagggcttccttcaaccacagcaagaagaatttcagtcaaatgtcaagaactcatacagaaaaaaaaaaatctgtaaaaacagtgaaactgaatacttatgagtttctaaaaacttttctttctcaaaagttcttagtgtatatttcaatactcaatgactgaatamtgcacaaactttatcaggtgaccaatgtaaaacaacatactatacactcactgaaaggaaaaacatgttcacaatgcttaatctcatagaagaaacactttgcatataatgcagtgaaaagacacctagtttctgttcaactatatcgtgttggacaaggattaatgatgacaaaagggcattcaaaattggattagcagcct

SEQ ID NO: 320489 - DNA, 559 bp, Homo sapiens
gagtttatagatcagagacacatcgagataactaagttgaaaatcaagatctgtgaggaaaaacagaaaagaaaattgggatgattattttccagagaagaaacaaaagtgagttttcaaaggtaaagctctaaaggttaactagtcagaaagacacaagctgtttttgatcagaataaagaaaacagaaagggcttccttcaaccacagcaagaagaatttcagtcaaatgtcaagaactcatacagaaaaaaaaaaatctgtaaaaacagtgaaactgaatacttatgagtttctaaaaacttttctttctcaaaagttcttagtgtatatttcaatactcaatgactgaatactgcacaaactttatcaggtgaccaatgtaaaacaacatactatacactcactgaaaggaaaaacatgttcacaatgcttaatctcatagaagaaacactttgcmtataatgcagtgaaaagacacctagtttctgttcaactatatcgtgttggacaaggattaatgatgacaaaagggcattcaaaattggattagcagcct

SEQ ID NO: 320490 - DNA, 557 bp, Homo sapiens
aacctggctgttgccagcttcagggcctcactgggccgctagatcagggaagaaggggacgagagagcagaacattaacttggcagggtmcatttgtgttcattcccagcacctcctgggagcgctggggaagctccaggggccgagtggatggcgggaagacatcctgggctggggcccaaagcagcggccccgccagcgatttaccttcatagggtcagcgaggtaaagcttctcggcagcgcggctgaactcctcccaggtctggtactgcggcatcgtggcctagagtggaaaagtaaagagaagcaaggcctcagaacccggcccaacaaactacctacgtccgggagtcgccaaccgacgcgagtcccagcagccccaagatggcggcgcctcctcgcaccaacgcctcgctccattggacagccccgtccatgctcgcccaatgggcaggagggatgttgtcagggagtgggcggagcccagggcgtgtggctcgagagctgagcgagacaagcggagggcacggcaaccaatgccggctgccacagcgc

SEQ ID NO: 320491 - DNA, 519 bp, Homo sapiens
ttatatcattagacttttaatattggatattagtttatgccttttttttttttttttttgagagatggtgtcttgctctgtcactcaggctggagtgtagtggtgcgatctcagctcaccgcaacctccgccttccaagttcaagtgattctcttgcctcagcttcccaagtagctgggactacaggcgtgtgccaccacgtccagccaatttttttttttttttatagtagagacagtttcactatatgttggtcaggctggtctcaaactcctgacmtcaggtgatccatgcgcctcccaaagtgctgggattacaggcatgagccaaagtccctggcctttgtacagatttgttttgcatacttctcagccttggtggggttaattgtggcttggcaaatcaagaaaaggagttctgtgctgttttcagactgcagaatcttgttgctatgcaacaaaaattgtcagtcagtatagggtatagtaaattggtattctctgtcccttttcaccacat

SEQ ID NO: 320492 - DNA, 609 bp, Homo sapiens
ccaatttatccatttcttttaggttttccaactggttggcatatagttgtggcatgatgccacaagtggaaagtttcacacttgacctcttgtgatgggttgcagtcaaaactatatttcatttacaaaattatttaaaatgttgcataaggctgggtgcggtggctcacatctgtaatcccagcactttgggaggccgaggtgggtggatcacttgaggtcaggagtttgagaccagcctgaccaacatggtgaaacccgtctctactaaaaatacaaaaaaattagctgggcttggtrgtgcacacctgtaatcccagctactcaggaggctgaggcaggagaattgcttgaaccaggagacaggtttcagtgagccaagatcatgccattgcactgcagcctgggtgacaagagcaaaaaaaaaaaaaaaaaaaagattgtataaaatcaccgtagcctgtatgcataaagtatgtatgaaacgtaaatgaattttgtgtttagacttgggttccagccccaagatatctctttatatctatgtaaatattctgaaatctgaaaaaaactgaaatctgaaacactaatggtcccaagcgtttcaga

SEQ ID NO: 320493 - DNA, 608 bp, Homo sapiens
atagtaaatgtcagttactattcttgaatggtttctatgttccaggtttttttctaagtagtttagatgtaatagttcacttgacgttcaacatcatgaggtaattcctattatcattctgattttatagatgaagaaactgaggtactgaggctcctcatggtcacaagctaccaagtggtggagacagaattctaaccaggtggttcatctcaagagcttgagtaaaggacccaaggttgagggccytctttaagaaaaagaacacaaaattacaaatgaaaattaagtagaaaagtgaatattaagaatgggaatagaaatcataacacattataaatttgaaattgctaatagaggtttccacttttggttaagatggaataacagaccacgtttacatcttacctgaaacagccaaaaacaacatccaaaaaagtgaaaagaatatataatccagtgatttttcaagacagtggttatcaagttacaaaggacagtgatcacaaagaaataagaaacaaataaaataaatcttataattactcttactttattgagcatttccaggctgtagagcaaagaagaaaattccaaatggaacctgg

SEQ ID NO: 320494 - DNA, 591 bp, Homo sapiens
ctctataaattaaaatcccttgggtacaaatgagacacttctaaagtatatctgcattatctagctggcttacctgtaacaggtaaatgtcaggatcaatcatggaattacagaaatgagactggacatacgtcatggcttgtcctttgatttgcagaccatttcttacccacatattgctgtggatttctgcaagacttgcctaataaaagtaaattggacaaagaataaattatctaaatgcaatctttacaaaatattataaataaccatttcaaaatatttaatgatgtratcatagtataagcccgatattctgtccaatgttaaagataatcagttgaaatatacatttttacattttttttaacaataattatgtttttacatagccacttttttagagtttaaacaaatgagttggttttccatgttggcctctggatacatttatgatgattttcactgacatctttcataagaaatcaatgcttatgtttcactctatttctccctcaagaaaaccctaagtaacaacaacaacaatcctaatatacatgtttaaagaaagacactagaataagcataaaa

SEQ ID NO: 320495 - DNA, 514 bp, Homo sapiens
atttccatttctttctatccacatattaatttttttctaataaactttcaaatttaacatcagaatgccattttggtaaaagacatgtaaaattctggagggaaataaccatcaacttggcagacaaaagtactattttataaagagtacttacatccttaaaataacgctgtaataatgaaagcctcacatcatgaacggctgcacaggtatcccaagggtaaatctgctcctcttcactgatcggcaacttttttggctcaacattgtcacggcactgccccaaaactacattaacagataaaagctcattaatcaaaaataatcagtgccatagacctgtaactccaagaaaagctgagttatttaccacaagcaactcraattatttcactattagaatatttttaaagacccctcaaaaaagtggtattctagttttctcctacaggctaaataaagcttcacatatgccaatatttactttaaaaaattaacactgaactatgattat

SEQ ID NO: 320496 - DNA, 476 bp, Homo sapiens
aaaagtggtgagagcaggcatccttgtcttgttccaatcttgttcctgtctttcactattaagcatgatgttagctaatagtttttgatatgctcttttatcaggctgagaaaattcccttctattcctagccttgtgagtgtttttaccatgaaagtacattagattttgttaaatgcttttctttgacaaatgaaatgatcatatggtttcccccccatttattcaattaatatgtgaactaaattaattgacttttgttgtcgaaccaactgtgcattccgggataaacccatttggtcatgcccatgttcaatgcagcattagttacaatagcaaagatattaatcaacctaagtgtccattgatggatgagtgaataaagaaatagccctctgtattcaggagttccatatccakgtactcaaccagccatacatcaaaaatatttttttaaaaaataacaataaaataca

SEQ ID NO: 320497 - DNA, 603 bp, Homo sapiens
aaaggagaataataacagaactttcacttataaggatttttgctagcttaaacaaaataatgtctacaagtatatataaagcatttcaaacaaaatctggcactaagtaaacattcaaagactgtccattatttgtaaaacaaatacaaatatcttttcagtacaaaaagatattctacattttttaataaagaaaaagagcattttaaatcaattactgaataaccctcttggaagttaatgaaaataaaccacccaaggtgttttttgaggcacctgtccaaaatcgtaacaggaaaactttagaaacaagtacactgaaaaattggtcacrggtagggttgaaaggaagagaagtatagaaatttaaaagtactatttcattataagattaagaaaaaaaataaaattcctacctaactaaatacatactttcttaaataatgtgttaaatgattgtacatagtaattggaaatttgtataacaaatattctcatttttctttgaatttcttttaatttttaatttttcaaattctaattaggaagaagaacaataggttttctttgtatctacctgcataacatttatcatgtctatat

SEQ ID NO: 320498 - DNA, 493 bp, Homo sapiens
aaaattaaagaatacccagaagaggcttatctacatggtagccatggagatggtgacaagttaaattctggatatattttgaagtagagataatgtgacttgctaagagactgtatatgttgrgtgtgagagaaagagagaagtcaaattaactccaaggttttggctcgaacaactggattgaaagagctgaaaggaactgtgataagaaagactgtaggtacagcaatattttgggaattgggaagggcagtggaaaagaaaataggagttcaaaactagacaaagtaagtttggtttatctattggactctcaagcagaaatgccaggtaggcatttgaatataagagcctgaagttcaagaaagagagtcaggctagaaatagaaattttggagttttcagtatatggaggatatttaagccataagattaccaggagagtaattgtaaaaagaaaaaaaaaggtccaagaactgagctttgggacact

SEQ ID NO: 320499 - DNA, 613 bp, Homo sapiens
attggtaactcttactggacatataaaaaaacaagattagcaatgagagattttcaacacagagaggactttctttacaagatggacattacaagtgaagtatttaacctatacataaacagtaaaatatccttataagcaagtaatacttagtgcctaagaaaatgtctactaagcatctccaatgcatttcctttatgaaatttggtacatatgacctttaaagaatagaatttttgtgcaaatcaatayatgctaagatctccaatgttaaacatctaccattaaataattttgccactaaaataccaatagtgtttgagaaaaagtccaaatttaagcaacacattcaaggtaaaaaataatagccaatattacaaagaatgtttagtaagctcttaatataaataatccattcaagtggtttttattctaaatagactctctttaagcatttggtagaaaattagtggaaaggcataaaaatatttggttatataatattaaataagattataaatacatagtctgaaatctcccagacacctgtaagagttgattcctcatttgcctatcattaaaagagataatatacatgtcttcctcatttttg

SEQ ID NO: 320500 - DNA, 528 bp, Homo sapiens
tgacatacagcatttatctgcgtgggtatggatatgcccaaaaagctcatgtgacccatgtttcgctattattctccactttacatgtaccaatccattctaggagtaatactttctaggcaccgtacttgaagaaaatcatgtaccagaatggctcctgaacagtgaggtgacttaaaagatgccaaaggtgtaatagctgaaagactggagtatgttcaacttggtatctgaaatgctgaatttaaaaagcatatatttgttaaagggataatactattcagaagggaaagtaggggccagaaggtgaaagtttcaaggggaaatattttggttcaatattaggaagagcgttctaacmactagaactgttgtaagtgcaattaactatctgagtaggtagtaagtttctcattcatggaggtaaaagtagaggttagataaccacctctggctatggttgttaccatggctggtaatggtgtagagaagattcagacagttatgaagagggttacattgcattat

SEQ ID NO: 320501 - DNA, 420 bp, Homo sapiens
tggtgggcatctgtgatcccagctactckggaggctgagacaggagaatcacttgaacttgggaggccgaggctgcagtgagccaagatcacgccactgcactccagcctgggcaagacagagtgagactcttgtctcaaaaaatataataataataataataatttgtagttttcagtgtggaggtgttacagatatttcatcagatttatttgtaggtgttagatattttttgaagctgctgtaaaaaatatcatttttaaaatttgactatgaacttgagactgataaagaatttgttttcctgcatatacttttatctaataaccttgccaaatttgcttactagttataatagtttgtacattttatttgattttatatattttattagattatgagcacagtcatttgcaaatg

SEQ ID NO: 320502 - DNA, 420 bp, Homo sapiens
tggtgggcatctgtgatcccagctactctggaggctgagacaggagaatcacttgaacttgggaggccgaggctgcagtgagccaagatcacgccactgcactccagcctgggcaagacagagtgagactcttgtctcaaaaaatataataataataataataatttgtagttttcagtgtggaggtgttacagatatttcatcagatttatttgtakgtgttagatattttttgaagctgctgtaaaaaatatcatttttaaaatttgactatgaacttgagactgataaagaatttgttttcctgcatatacttttatctaataaccttgccaaatttgcttactagttataatagtttgtacattttatttgattttatatattttattagattatgagcacagtcatttgcaaatg

SEQ ID NO: 320503 - DNA, 583 bp, Homo sapiens
cgggtttctttttttttttttttcttttggtaaacaattcctccctgaatgtaaccctggttcacagtttgctcccactctgaccacagctggcctcttgctgttcacagccgaaaagtgaaatcaattcttggtctaacaaaatgccaaatgcagatgaaagccattctgatcattcatagtcatttcccgtaattgtatcagcctgtggtacttatatgatctctggaaagcattgtttattcaagtaaattcagtcccagcttctttgttgagtgttgctgtcttctaggaaaataatacttccttaaacccataagcattgtgaataytcatcattatgcagttttctaaaataaccgttgctttttccccctaaggaaatattacatgtctaatcaaatcctttattatttaaattctagaaatttgtattctaggcaaagatgtctctctatttcttactgttaacaaaatttaaaattctgaaaccaaaaaaatgctaaaatacctcaatccaaatgatcattgatctagtattttcttaaaattttttaaatgagattagatagaaagctgtatt

SEQ ID NO: 320504 - DNA, 605 bp, Homo sapiens
ttatacatgtgtgttaatatttacatggatgtttttaggtaaataatcattgtagatgcatgaagtatgtgtatataaataaataagaatattggaaacatggaacataaaagtaattcagaagggtaatttctgtgcacttgattcttatgagcactacacaaaatatctaaacaagtgaaataaggaaatttacatgtattaattgaaaactatctctggcattgattgtcaaaccaagtcatcagaaagttatttcttactaacttttcctcagatataattatatctgttaattttgcaaatgagttttctatacaactgaatttagtttttgmttctatctctgttgtaagcaataccacacatatagtgctactttcattaatatgagtttgatcaatagtggagctaaacttatatataggggagacgtaagaataattgcagtccgcttggtagaaggtatcacaagcacgctgtttctcttagattttatattataagtgaataaaaataaacttttctacaaatatcatatttgtattttgtatgcaatatttttattaattttatttagaagaattcagggagactggtaagat

SEQ ID NO: 320505 - DNA, 605 bp, Homo sapiens
ttatacatgtgtgttaatatttacatggatgtttttaggtaaataatcattgtagatgcatgaagtatgtgtatataaataaataagaatattggaaacatggaacataaaagtaattcagaagggtaatttctgtgcacttgattcttatgagcactacacaaaatatctaaacaagtgaaataaggaaatttacatgtattaattgaaaactatctctggcattgattgtcaaaccaagtcatcagaaagttatttcttactaacttttcctcagatataattatatctgttaattttgcaaatgagttttctatacaactgaatttagtttttgcttctatctctgttgtaagcaataccacacatatagtgctactttcattaatatgagtttgatcaatagtggagctaaayttatatataggggagacgtaagaataattgcagtccgcttggtagaaggtatcacaagcacgctgtttctcttagattttatattataagtgaataaaaataaacttttctacaaatatcatatttgtattttgtatgcaatatttttattaattttatttagaagaattcagggagactggtaagat

SEQ ID NO: 320506 - DNA, 605 bp, Homo sapiens
ttatacatgtgtgttaatatttacatggatgtttttaggtaaataatcattgtagatgcatgaagtatgtgtatataaataaataagaatattggaaacatggaacataaaagtaattcagaagggtaatttctgtgcacttgattcttatgagcactacacaaaatatctaaacaagtgaaataaggaaatttacatgtattaattgaaaactatctctggcattgattgtcaaaccaagtcatcagaaagttatttcttactaacttttcctcagatataattatatctgttaattttgcaaatgagttttctatacaactgaatttagtttttgcttctatctctgttgtaagcaataccacacatatagtgctactttcattaatatgagtttgatcaatagtggagctaaacttatatataggggagacgtaagaataattgcagtccgcttggtagaaggtatcacaagcacrctgtttctcttagattttatattataagtgaataaaaataaacttttctacaaatatcatatttgtattttgtatgcaatatttttattaattttatttagaagaattcagggagactggtaagat

SEQ ID NO: 320507 - DNA, 605 bp, Homo sapiens
ttatacatgtgtgttaatatttacatggatgtttttaggtaaataatcattgtagatgcatgaagtatgtgtatataaataaataagaatattggaaacatggaacataaaagtaattcagaagggtaatttctgtgcacttgattcttatgagcactacacaaaatatctaaacaagtgaaataaggaaatttacatgtattaattgaaaactatctctggcattgattgtcaaaccaagtcatcagaaagttatttcttactaacttttcctcagatataattatatctgttaattttgcaaatgagttttctatacaactgaatttagtttttgcttctatctctgttgtaagcaataccacacatatagtgctactttcattaatatgagtttgatcaatagtggagctaaacttatatataggggagacgtaagaataattgcagtccgcttggtagaaggtatcacaagcacgctgtttctcttagattttatatwataagtgaataaaaataaacttttctacaaatatcatatttgtattttgtatgcaatatttttattaattttatttagaagaattcagggagactggtaagat

SEQ ID NO: 320508 - DNA, 544 bp, Homo sapiens
tgccttccaattagaatgtttagtttattagtgttgattataattattgatgtgattggatttagctctaaaattttaatatttatttgtttctgtgtgtctactctgtttatttctgctttgtgctctattctccctttcattctttttttgaattatatgaatatttttagaatttcattttaatttatatattacatttttcctatgtatttttgcagcatatttttagttgttgtctagggattattttatacatccttaaatttcagtttacatagagttaatagtgtaycactttatgtaaaacatagaaaccttgaaaccatatagattcatttgtagcttatcagacagggtcttagtcaccttgcgccattgctagggactgcagttgaactcaatccaaatgctcagaaatgggtaactcaccaattcctccaaattttcctcacctccaaaatgattctatttttgtttactcccagaacactcacattgttgtaacctctattttgttcagattttataattgctatctgtt

SEQ ID NO: 320509 - DNA, 595 bp, Homo sapiens
aataaaatagtgtgtggtcaaatgaatttaggaaatgttgagtacccaaacagtaaacagttttgtttacttcagatttccactattgtggaaaacttcaccaggttccctaaagttagttaatcaagtcttcctaagtgtattctaaaacatttgttacaccctctgttgctctatcttaagacatctgtaagagaaaatcttctagctcttttacaaagggtcattgccatctttaaatagttcagaatcaataagatccgtctattgctttgaaaagaatgtgcttttagagaaggcagaggtcatttattatcagctaaatgtacatcattttatgttcattatttatatttagaattagaaaaaaacttccattaaaggttaaatcaatggattatggattagtgagttgtgaagtgtgtgmtgagttttctagtcatgatatatgccattgttttaaatacataaacctcctttatgtgaaagaggaaataatgaaattgattacgagtgcagctgtccatctgtaattataggttgtgtaacctgtgtacaaaatcttgggtttttattaacatgttatcgttattaa

SEQ ID NO: 320510 - DNA, 577 bp, Homo sapiens
ttttgaaaacatattgttgtagaaatagaaatgcaaaaatacatgcactttagtctgtgtaacagttgatgtaattactatttattggtggactcatggcaggcactaggaaaagarcattataagaactgttacatccatatgaatgagaaacgaatactcagagaagctgtcatttacctagtaggtggcagggctgggatttgaacccatatcttagtagactgtctcatgctgctgctgctgctactgctgctttcttatatgtgctaggcactgggctaaacactttacatatattccttctatcagttttacaaaatcgatttaatttatcccaattttgtgaatgaaagaactgaggtttagataattgcagtagtaaaaatcatgaacttaataattttaataccaggcttgtaaatgtgacatagctaataagacatctttaatataaaatattttatgagatttaaaaaacattgattttgctgtgatagacgtagtttcaaaaacaattgacaattgtacaatttagcatttaaggatattcctcaaagtaagtccttttctgtgg

SEQ ID NO: 320511 - DNA, 530 bp, Homo sapiens
tctcccatctcctcctgttaaaaaccctacccatttttaagacccatttaaaacacttatgaaatattcactggccagtcatatcatctccataatattttgtgttagcakttttttttggaaatagcattattgagatgtaattcacatatcatataattgacctgtttacagtgtacaatttagtgattttttggtatattcattcacagagttatgcaactgttaccgaaatcaattttaaaatatttcattactccagatagaaaccttgttatcatttgcctttcttcaccaattttcctgttccctctttcgcaatcctggacaaccgctaatctactttctgtctctatagatttgcttattctggacattgcatacaaatggaatcatagatagactttagtgtctgccttctttcacttagcatggtgtcatcaagccctttccatattttgacatgtagtccctttttttgttttttgagatagagtccctttccatcacccaggctggactgcagtggc

SEQ ID NO: 320512 - DNA, 559 bp, Homo sapiens
tgcattgtagctgttcttccatgttttctctgtccttttagactagatcgcttaaagacagcattcatatactgtgtagctttgaaccatgaagaaatctcctaacgcaattatttgccctcaaaggttcccacttaaaaatgttatgtaggtaaactggaaagctgagataattattgagttagtttatatcaaaagacaaaacaaaacttacgagctgttgaaataaatatttgggggctcaaattatcagactatctgctcatactaactgaattattcaaataatttcaatagctcataataagttttgttttgtcttttgttttttggtataasttaattataccaaaagctgaatttcaattcagctcatcacttgaattttccaggataggaacagctaaagttaagctaatctttattgcatttccacttctggtaaacgtgtcattttaactaaatgtctctgtaagttccaatttataaggtcaaaataccgcacctactgttactgtaaaaaaaatttagcaaatagaaaagctgttctatatccaat

SEQ ID NO: 320513 - DNA, 283 bp, Homo sapiens
cccaagtactcaggaggctgatgtgggaggatcccttgagactgggaggcagaggttactgtgtgatggcrccactgcactccagcctgggtgacacagtgagactccgtcgcaaaaaaaaacaaaccagaaaaagttgcagactttttaaattgatggactttttcaagcctttaacttactaattaatgagtatttcccaaacatcttggcctaagtagaggttggactgaaactaaaggagagaataggagtgaggaactaagaaatggaaactcatgtc

SEQ ID NO: 320514 - DNA, 589 bp, Homo sapiens
tggaaatggaatgcactttttatattgacaggcctgctaatagagtatactgattttcaaagtcatgcaattcatttttacaatttggttctgacagcaaaaacggaatttcatttattcctaattcaaaatattcataggtaagcaatattttttagagcagaccaacaaacgggaaattcataaacagtatttttaaacagagaaatgcaattaaaaaagtgcaagaaaatattattgaatttaagtgaagcactatataagtatgaaatgttaacttaataatcttcttaatggagtcaacgtagaaaactgccttctatgctttctaaagaaaatttgataaaccatattttaagaatatacgtgacggtaaacgcagactctctccacattttagacgggatattactcgacaggattttgattagccatgaagttaagatttttaattatttaaaatgagatttcattatactaaaaatcgcagggcacattttacttgtaaaaaaacgtaataaaacatatagaaaacttgcgtcwttttggaactctctaaatatcataaagagcagagatgatgcactat

SEQ ID NO: 320515 - DNA, 387 bp, Homo sapiens
gatggtgctgatacagattatctaaaagcactttttaaaacaccaaaacatttaaaaatgtttttctaaatggcatagaatacatatcctgggaatgatactaagttcatctgttctgatgtatctttacagacgataggctgtaagcgccaaccaaatattagcaggtaaactttacagcagggaaatgttcggtaatgccctyatagttaaggaaattccaaatgtatttactacaacacactgtagagtaagagactggtatttgggttgagttttagctctatctatcacttattatttagcatgtcccctaatttctatggtttgtcattttccaaataaaaattgtttaacgacaatccccttcacagcagggccacaact

SEQ ID NO: 320516 - DNA, 615 bp, Homo sapiens
ctgaggaacataagaatgttctcatttgcagttctcagcatatcttattatttattgccaaagaaatgactgattaactttgtcatttttgctccatgttttttttttcctcaggctgaagcagtctgctctcttctacgatgcctgatcagacctatttaagatgctgtctttgatcacagacatggaggtgcttgcagtcttaggttttgatgaaacattgttccactgtaattttatgaaagggcaacagaggcctaaataataattgacagtcaacaaagacaatcaaacttaagattttgtaccattcttcgacaactacaatattgacatgctagaaatgcaccagaatttgactagtctaggttttattttaatatataaacaatatacaaaaccctcctttttcaatcatttmcctattagctcatttgctcaaaagaaaaagaattctgcagatcagaaggtgagtttatgagttttaaaatattttccttatactgttccattgctatggtccataaaattcatggtaatcaattaaattttcacttgtatgagattttactattagaaaacacctaaataacacattaaatacacgcaaaatta

SEQ ID NO: 320517 - DNA, 615 bp, Homo sapiens
ctgaggaacataagaatgttctcatttgcagttctcagcatatcttattatttattgccaaagaaatgactgattaactttgtcatttttgctccatgttttttttttcctcaggctgaagcagtctgctctcttctacgatgcctgatcagacctatttaagatgctgtctttgatcacagacatggaggtgcttgcagtcttaggttttgatgaaacattgttccactgtaattttatgaaagggcaacagaggcctaaataataattgacagtcaacaaagacaatcaaacttaagattttgtaccattcttcgacaactacaatattgacatgctagaaatgcaccagaatttgactagtctaggttttattttaatatataaacaatatacaaaaccctcctttttcaatcatttccctattagctcatttgctcaaaagaaaaagaattctgcagatcagaaggtgagtttakgagttttaaaatattttccttatactgttccattgctatggtccataaaattcatggtaatcaattaaattttcacttgtatgagattttactattagaaaacacctaaataacacattaaatacacgcaaaatta

SEQ ID NO: 320518 - DNA, 615 bp, Homo sapiens
ctgaggaacataagaatgttctcatttgcagttctcagcatatcttattatttattgccaaagaaatgactgattaactttgtcatttttgctccatgttttttttttcctcaggctgaagcagtctgctctcttctacgatgcctgatcagacctatttaagatgctgtctttgatcacagacatggaggtgcttgcagtcttaggttttgatgaaacattgttccactgtaattttatgaaagggcaacagaggcctaaataataattgacagtcaacaaagacaatcaaacttaagattttgtaccattcttcgacaactacaatattgacatgctagaaatgcaccagaatttgactagtctaggttttattttaatatataaacaatatacaaaaccctcctttttcaatcatttccctattagctcatttgctcaaaagaaaaagaattctgcagatcagaaggtgagtttatgrgttttaaaatattttccttatactgttccattgctatggtccataaaattcatggtaatcaattaaattttcacttgtatgagattttactattagaaaacacctaaataacacattaaatacacgcaaaatta

SEQ ID NO: 320519 - DNA, 417 bp, Homo sapiens
ccagcgccttttcactaacgatttgcactttgagaaagaaaaatggatggtgagaaaaggtatactaggaaactcattagatctagagtgttcaggaaagtgaagtcatttagtttaaaggacgccaggactgtgttttctaagctgcttccttaagcacccctcacacaaggagctgaaggtgatttacataacataggattcaccggtccgcgattatcactgtgggtgaactgggcgccctggaatgaataatactctagtgcaagtactgcttgttgctgcaacacagtgattttctattacactgaacacgtgaaatgaattgccttctgtagctgaawcctttcagtgatcgtagacgcccctcattgttgaagcgagaattaagctattcggagaagcgtgttttccatc

SEQ ID NO: 320520 - DNA, 608 bp, Homo sapiens
tatataacttctttgaagagtgtattaacataggtaatatgatacagtgtaatgctgccttactaatagcagtatatttgactatctttgctaactgcatatatagagagatatctacttgcatagaatactttagagtaaaaatatacattgcaatcaacacctgatgagggttgagagatactggatgtgtggataacaaatccagtaataattatgctagtgattattttttctttctttgtcaaatgggttccttgctcgaaaaatctgtaataggttctgtacttaatatttcattgtaggtttaagtcaactttaaagtacttacgtgttctgagttgtatgttatatatgcaacatactgttatatattgataatcaccaataaatacattattttaaaagtccttatgtggttaaaaattctttaaagtccagtcattgtaagcagagaataraataggtattccacagcaacttgaacaatgcttcctgtgctatattgcttgacaattgcaggctgactatgtgaataaatatatctcaaaactaacaatgattttcaggaatagcccaagcttttacttgagtatttatttgagttt

SEQ ID NO: 320521 - DNA, 608 bp, Homo sapiens
tatataacttctttgaagagtgtattaacataggtaatatgatacagtgtaatgctgccttactaatagcagtatatttgactatctttgctaactgcatatatagagagatatctacttgcatagaatactttagagtaaaaatatacattgcaatcaacacctgatgagggttgagagatactggatgtgtggataacaaatccagtaataattatgctagtgattattttttctttctttgtcaaatgggttccttgctcgaaaaatctgtaataggttctgtacttaatatttcattgtaggtttaagtcaactttaaagtacttacgtgttctgagttgtatgttatatatgcaacatactgttatatattgataatcaccaataaatacattattttaaaagtccttatgtggttaaaaattctttaaagtccagtcattgtaagcagagaataamataggtattccacagcaacttgaacaatgcttcctgtgctatattgcttgacaattgcaggctgactatgtgaataaatatatctcaaaactaacaatgattttcaggaatagcccaagcttttacttgagtatttatttgagttt

SEQ ID NO: 320522 - DNA, 608 bp, Homo sapiens
tatataacttctttgaagagtgtattaacataggtaatatgatacagtgtaatgctgccttactaatagcagtatatttgactatctttgctaactgcatatatagagagatatctacttgcatagaatactttagagtaaaaatatacattgcaatcaacacctgatgagggttgagagatactggatgtgtggataacaaatccagtaataattatgctagtgattattttttctttctttgtcaaatgggttccttgctcgaaaaatctgtaataggttctgtacttaatatttcattgtaggtttaagtcaactttaaagtacttacgtgttctgagttgtatgttatatatgcaacatactgttatatattgataatcaccaataaatacattattttaaaagtccttatgtggttaaaaattctttaaagtccagtcattgtaagcagagaataaaataggtattccacagcaacttgaacaatgcttcctgtgctatattgcttgacaattgcaggytgactatgtgaataaatatatctcaaaactaacaatgattttcaggaatagcccaagcttttacttgagtatttatttgagttt

SEQ ID NO: 320523 - DNA, 549 bp, Homo sapiens
ccaccaatgtgataccattgagtctgcaagaaccacagcataactgggcttggagtgcctcctaatgcagacatggctgaaatcacgacacctaagtcctttcaaatatctggaaagctttcccaagaaagacaggtacaaacatgcccaagctgcagactgcaataaatacctaaatcttcaatgcccagacactgatgaacatccacaagcatcaacacaatccagaaaacatgaccacaccaaacacawtaaggaagcagggaacaatcctggagaaacagataagtaatcttttagatagagaattgaaaatagctgtttgaagaagctcaatgcaatttgatataacacagagcaggaattcagaattctatctgataaatttaacaaagagattgaaataattaaaaagaatcaaacaaattctggaattgaaaaatgcagttgaacataagaatgcatcagtctcttaatactagaattgatcaagcagaagaaataatgagcttgaagacaggctaatgattgacagtactcagaggagat

SEQ ID NO: 320524 - DNA, 456 bp, Homo sapiens
catcaaaaaagaaaaaacaatttaaatgaacaacttgatgatatatcttaaagaactggaggagcaagagcacccaaaattagtagaaaaaaagaaacaatagagatcagagcagaaataaatgaaattggaagaagaaaaacataatgaaatgaaaagttggtttttgaaaagataaaccaaattgtgaatactttacccagactaacttaaaaaaaagagagacaacccaaataaataaaatcggagatgaagaaggagactttacaaacaygaccacagaaattcaaaggatcattagagactaatatgagcaattacatgccaaagaattggaaattctagaagaaatgaataaatttctacgcacatacaacctaccaagattgaaccacgaagaaatgcaaaacctgaacagatcaatatcaagtaatgagataaagcccttaaaaaatg

SEQ ID NO: 320525 - DNA, 485 bp, Homo sapiens
ccaatatacatctttgattttgaaaacagacaagaaatgtataagaaagaaaatttgagtcaatataagccattaatattaaaataaaaattctaaacaaaatatgagcaaatcaaacccaacaattcacatataagataatatatcatgcatcaattgcatttatgtaagtatctgcaagtttggattaacattaaaaaatcatttaatgtaattcatcaaattaagagtttaaaaaattatctcaactatttcaatgatttcatttatttatttttaatcttttagtgatagggtctcactatattgcccaggctggtcttgaactcctggcctcaagcaatcctcagcctcccaaatcaagaggattgcagrtgcaagccaccatgcccagctaatgattaaaaaaaaaataaaaattgctaaaagtcattgcatatggttattttttaaaaacttgtataaacttacaaaagtaagcagaa

SEQ ID NO: 320526 - DNA, 570 bp, Homo sapiens
tttgattccaaaatctgtgctcctaactactaaatacactattcattgatttattatctattcaataatttatttattcaacaaatatgtgttgactacttactaaatatggggcactattttatgtactgggatacatgagtaaaccaaaatagacaaatagtctcctactttattgtagttatatagttagaatgtaaggagtgtacattctagccagtagaaagagccagcaaatgtagtacatgacagctaaaagcaacaaataaattatatagtggtaattagatatttaaaaattaaaccttaaaaaatatatttaaattttttaatttttaaattaaatgttaaaaactgtttacaatggcatccaccatgagattatcttggaatacatggaagaaaataaggcaaaacatacattcagaaaaccacgaaacattaaagacatacatargaaaaattaagacctacatgaacagagggatatcccacatccatagacctagagacttgattttataaagcagttatttccaagttattttacaaattcgatcattccgataa

SEQ ID NO: 320527 - DNA, 594 bp, Homo sapiens
taaaacactaataactaagacaatatggtattaatacaaggataaacaaataggtcattggcatataatagagttcaggaacaaatccacattgttaccatcaccagaattaatttttaaaaaatagtacaaagaaaagatgacagtttttatttatttatttaacttttattttaggtcgaggggtacatgttcaggttcttatatagttaaaatgtgtcacagggttttggtgtatagattttatcacccatgtaataagcataatacccaataggtagtttttcaatcctcaccctcctcccaccctctgccctcaagtaggcccagtgtcttttgttcccttctttgtgtccatacatactcaatgtttagctctcacttataagtgagaacatgtagtatttggttttctgttcctgtgttagtttgctttgcataatggcctccaggtcyatccaaattgctgcaaaggacataatcttgttcttttttatggctatgtagtgttccatgatatatatgtaccacattttctttatccagtctactattgatgggcatctaggttgactccatgtctttgctattgta
